United States Patent Application Publication US 2005/0228172 A9 - sequence listing, part 135

SEQ ID NO: 635958 - DNA, 592 bp, Homo sapiens
aaacaagggaacaaggggacaagttcagccctttgaggattaaactctgaaatcaacccatgattgatgggggcagagataaacagccctgagaagcagaagggacacaaaagaagtgatcaataaatgttagcttccttctgctgtggtctgaatgtttgtgtcccttcaaaattcatatcttcatacctaatctccaatgagatagtgttaaggggtggagctttgggcggagtcctcatgaatgggattagtgcctttaaaatataggcctgaggaagtttgttttcccttctgccatgtgagcacacagctggaaggtgccatctatgaggcagagcatgggtcctcgccagacaccaaatctgttgtcaccttgatcttggacttcccagcctccagaactgtgagcaacaagtttctgttgtttataaattatccagtccaagaaactgtgttayagcagcctgaatggactaagacaccttccttttcccttcattttctcactgcacgagtctggggtatttgttcatcagatgatgtgtcagtcaggatgagttaggtgatcatgctgcagtaactaacaaaa

SEQ ID NO: 635959 - DNA, 517 bp, Homo sapiens
gctcctgcccccaggcccacattacagagagtacatcttcattcatagcgatacatcttttagtgcagggtaagggctcttggagtaagttctgaattcttattccagggttcatttctgaccttctgtgtggccttggacaagtcttatttctctgggccacagtttctcaaactgtagatgagagatttgagaggtaggaggagggtggtggtgataaattagagactggactctggggacccttccaattgctatattatgtgagttactgtgtaaagttgagccattttatgtttggccttgaatttatgaatttcctctggcataaattatgatatatgccaaaggcctttgagacttaatccttcttaaataatttcaggcttatgatgaaaagtgacctggagctttggmtccagtcttgccctcagcacctgtcagcatgcttttgtttttaggattcttcatatgttccctgtttttcagtgagctttctacagggaccacacactcc

SEQ ID NO: 635960 - DNA, 504 bp, Homo sapiens
cgtgaggaactatactggtcctttgtgttaatgcttgtactagtaaaatatttaggtttwaatcatggctggtttggtgtgcttcattcattcattcaactgtgctaaaaactggggctatgaagacaagtgtggtctcaaactgctagtctcctggggaaaagaggtaaacaagcataacacagtattacagcagttaatggtatcagcagactcctggcacagtgggagcaactcaattctgcaggaggagggaaggtagagggataggaaaagattcacataaatagcaatgctattgaccgagcacttaaaatgcatcaggcagtgttcttaatcttttatgtaatcattttagagatgagaacattcagataaaagatggttaaataacctgcctacagattttaaaaaaaatgatggaggcaagatttacaaccaggacatacgactttaaggccctactcttaatcactacaccattctgcctttatattgacagac

SEQ ID NO: 635961 - DNA, 537 bp, Homo sapiens
gtaatttatagttgttctttcgtcatgttcggtaagaaaagctgtataaggacaaaaacacagtcatacgaatgccaagggtagttgtttcacacatttgcagtaccttatctacttacttattttaagtacaacagggtctcgctctgttgccagtctggagtgcagtgacacgatctcggctcactgcaacctccgcctccygggttcaagggattcccctgcctcaaaactcccaagtagcaagtagctgggactacaggtgcacgccaccacgtctggctatctacttattgttaaggactttaaataaaaaactccatatttctattaaacatgggaatattctaaccatgaataaatgatgttcatcatctacattcacataacaaatatttgacatatagaaaaatgtaaaaaaattccaaattatctaaattcaaccgcaaaaggaacaaagaaaatatttccaattttaatgtaagtatatacccaacagaaaaatgaaatattacttaagcacaatcataacacatc

SEQ ID NO: 635962 - DNA, 628 bp, Homo sapiens
acatgtttcatgattgcgtctagtgtgcaaaaatgtcttcaaatcacttgttttacacccttctagataaaaaagctacatgttctactgagatattatcacttaaatggcaaaattataatgaagtactacttaagaagcacaggaaaaatacatggatttcactcaaaattcctttggtgtctcttgtttcagacacatattcaagtctgttaaaatatgaaccaagtacatacattacctgtttcttcagcaaatcaatggttcaaatgcattgatttgtagcttttcattaatattgtttgaaaaactacattatgagggcaagccttcctggacaatcataaccaaaaaataaattctttatttaatcaatcatcaaaatatgttgctatacttgaaatcatctcactgtattttttttggaagtgctatttttctctatcacttaaatatactactagaagcactatgacagggtagtttaaaaatgtggttttcctacatttaaatgtccactctgccacactttggcgatgtcgtgtgagacrcatctcttgatcttcacaagatattattttttcccatgtaatgttgtcataataaaactacagtaatttgtagagaa

SEQ ID NO: 635963 - DNA, 584 bp, Homo sapiens
tgaagcaatttatatggtaatttatgatttcctaatatcccaaagaaaataattgtatgagttctatcacaagttagcaatctctactttacagctaatttaggaagtgtctcaatagtgcattcagtctctgtggaaattggttaaatgagagatacggcrgagtttcaggaacactataaagataatttgtcactcatataagaatcgacaatgtgcccttgccaaaaaccctgataggtttaaagtttgacttaactttcatttgccaggtttttttttgtgtgtgttccatccttaagtgctttgtctttgtgatttagtttcccctaactttctgtcttttttcttttattcttctacttgtcgatcttaatcttacttttttaccttgctttgtctcatctaatatttctcatcttttctccattcattttggaattggtgcaatgttatccatatgtaaatgctaaaatataaaacaaaatcaagaagccttatgcctctgattaacatgcataagcacacatacaatattaaaacaagaacgataaaaacaacaaaaacctatcagaaagataaat

SEQ ID NO: 635964 - DNA, 584 bp, Homo sapiens
tgaagcaatttatatggtaatttatgatttcctaatatcccaaagaaaataattgtatgagttctatcacaagttagcaatctctactttacagctaatttaggaagtgtctcaatagtgcattcagtctctgtggaaattggttaaatgagagatacggcagagtttyaggaacactataaagataatttgtcactcatataagaatcgacaatgtgcccttgccaaaaaccctgataggtttaaagtttgacttaactttcatttgccaggtttttttttgtgtgtgttccatccttaagtgctttgtctttgtgatttagtttcccctaactttctgtcttttttcttttattcttctacttgtcgatcttaatcttacttttttaccttgctttgtctcatctaatatttctcatcttttctccattcattttggaattggtgcaatgttatccatatgtaaatgctaaaatataaaacaaaatcaagaagccttatgcctctgattaacatgcataagcacacatacaatattaaaacaagaacgataaaaacaacaaaaacctatcagaaagataaat

SEQ ID NO: 635965 - DNA, 539 bp, Homo sapiens
atatatatccagtagtggaacggctgaaccatatagcagttttatttttgttgttttgagaaacatgcatactcttctccatagtggctgtactaatttacattcccaccaacagtatatgagggttcccatttctctacatttttgttagcatctcttattgcctctatttttgacacaatccattttaactgtggtgagatgatactgcatcrtactttggatttgtatttctctgaagattagtgagtctgagcatttcttcatctacctattggctatttgtatatcttcttttcagaaatgtctgtttatatctttttccattttataattggagtattttcttttgctattgagttgtttgaacgctctgtatattctggttattaatcccttgttagatgtattgtttgcaagtatttcctcccattctgtgggttgtctcttatctttgtggattgtttcctttgctttgcagaaggtttatagcttgttgtaaaatcaactgtctgctttttctttggttgcctgtgcta

SEQ ID NO: 635966 - DNA, 492 bp, Homo sapiens
tttccacttttttgctttagttgattgatataagcttccctcctagtattgctattgctgtatcccataaatttcagtatgttgtatttccattatcatttgtttcaagacattttaaaattttcttcttaatttcttcattgagctattggtcatttaggaacatkttgtttaatttccacgtgtttgtgacgtttccaaggttcttgttaccgatttctagttttattccattgcggtcagaaaagatatttgatatgatttccactttttaaaatttgttcaaacttgttttttggcctgagatttggtttattctaaagaatgttccatgtgcccaggaaataacgtgtattctacagcagttgtgtgaaatgctctttaaacattagttaagcctattagttctagtgtgtagtttaacattgatgtttctctgttgatgttctctagatgagttggtttctagctgcagtgaatacttttttccac

SEQ ID NO: 635967 - DNA, 454 bp, Homo sapiens
gtgtaaaagaatatttcactcccatgtttattgcagtactggtcacaatagccaaggtatgaaatcagcttgtgttcctcaatggttaaatggataaagaaagaaaatatggtatatgtatgtaataaaatactattcagccatgaaaaagaataaaattctgtaatttgtgacaacagacatgagcctaggaaatgtattaagtgaaataagccaggcacagaaagacaaatactgcatgatctcagttatatgtgagagctwaaatgttgatctcatggaggtcctaggataaaaatagtcaccagagtcaaggaagggtggttgtggtaggtggacagtggctagttatacaggttcaaagttacaattaaagaggagaaatctgttctagtaacctattgcttgtaggttgacttgttaacaatgtattatatattttaaaatagccaga

SEQ ID NO: 635968 - DNA, 664 bp, Homo sapiens
tgacacatgggaattatggggattatgaggatcacaattcaagatgagatttgggtggggacacagccaaactgtatcatgtacgtttctgtattttaatagaatacacaataaattgttacaacattggtgtagccttaaatcattttgttctgccttttctttttactttttatatttcttctttatatcaaattamaaattagctattttatccaaattgtcttaccttgtatttttcattctttttttttatataagagatttattcacataaaatttacctaccatacatctcattcacttaaaatacacaattcagtactttttagtaaattcacagtcttgtgcaaccatcacttacaattagtttgggaaattttcatctccccccaaagaaagtcatgcccatcaagcagtcactccccatgtaccctttctccctagccccggtaagccatgaatctaccttctgtttttatggatttgtttattctagacatttcatatacatggagtcatacaatatgtggccttttgtgtctgtcttggctgacttagcataatgttttcaaggttcatttatgttgaagcttataccagtatttcatttttatagtagaacgatattctactctattgttcggtcacatggtaattttac

SEQ ID NO: 635969 - DNA, 594 bp, Homo sapiens
ctgagcatccaagttataaacaaatgcagagtaccttggctaggatactggatttccgtacagaaatctagggttgaataaacattttggttggagttgttagctgagaattgactgaacacaaatgtaaaagtctaagtgttatgttaagaaaccataagttgaatgacgacaactcttaaccggaaaggaattcccaggctgctgcattcccatagtcaagaacaactaaaacgctgagtaagctgggttgactcccagaaaacatagtcctcccaatatacagcccaggtttgaaccttaaggacaatggacaagaaaaattcccttaaatgaagaawtaagaattatggataacaaaggaatttggagatttcgccagaaagcagaagttaaatagatgtattggtcaagaaagcaaagtgaaaccaaaaatactcatacctgttccataggaatcttcattcttttcttccattagggatagcttctaaacccatgatacatgctgtatgacaggggttgaaatatttaatatgtgggcaaaacatggcctgtctcctctgtttgtaaataaagttttattggaacaga

SEQ ID NO: 635970 - DNA, 542 bp, Homo sapiens
ggccttttgataatttttgtgacttgccatttttcttaaaaaattaaattgtcaaaatggttacaagtctacaataagatcatggatattatcttctatgaactttggatggcatattaaataatgaaagttctctttatgaatatccaaagataaaaatataagcagggcatttgattatcctccttktcagatgtagtagtgggtcttttatgaaaatataaataatgatctacaactatttctaagcaattttctgattttctaaggttaaaagaaatgctttgagtaggactccttggagaaatggcagaataatggaccaaagcaaaataaatacaagataatactggattatttggttacaacaaaaagtaattcgatgacctcctaaaaatgaagaggacatgccagaaggacacaggagctagccatatctgggtcaatttgagcaacatcatgagttgacacaataataaattataaagtattaaatatttgaaatctgtgagtcttaagttataataagtaaataaataata

SEQ ID NO: 635971 - DNA, 582 bp, Homo sapiens
ctctttatgaatatccaaagataaaaatataagcagggcatttgattatcctccttgtcagatgtagtagtgggtcttttatgaaaatataaataatgatctacaactatttctaagcaattttctgattttctaaggttaaaagaaatgctttgagtaggactccttggagaaatggcagaataatggaccaaagcaaaataaatacaagataatactggattatttggttacaacaaaaagtaattcgatgacctcctaaaaatgaagaggacatgcyagaaggacacaggagctagccatatctgggtcaatttgagcaacatcatgagttgacacaataataaattataaagtattaaatatttgaaatctgtgagtcttaagttataataagtaaataaataatattaaattaaatctgacttacgagtactgttatttacagaacataaacttgagtgccaacaagtaaattcagagggaaggcttgaaatagaaaaatattattttgtgacatcgctatgaagattggctcatgcaaacccattaatggatgctaaatttcagggaaaatattga

SEQ ID NO: 635972 - DNA, 582 bp, Homo sapiens
ctctttatgaatatccaaagataaaaatataagcagggcatttgattatcctccttgtcagatgtagtagtgggtcttttatgaaaatataaataatgatctacaactatttctaagcaattttctgattttctaaggttaaaagaaatgctttgagtaggactccttggagaaatggcagaataatggaccaaagcaaaataaatacaagataatactggattatttggttacaacaaaaagtaattcgatgacctcctaaaaatgaagaggacatgccagaaggacacaggagctagccatatctgggtcaatttgagcaacatcatgagttgacacaataataaattataaagtattaaatatttgaaatctgtgagtcttaagttataataagtaaataaataatattaaattaaatctgacttacgagtactgttatttacagaacataaacttgartgccaacaagtaaattcagagggaaggcttgaaatagaaaaatattattttgtgacatcgctatgaagattggctcatgcaaacccattaatggatgctaaatttcagggaaaatattga

SEQ ID NO: 635973 - DNA, 570 bp, Homo sapiens
cctatattgtcttgaatataggcttcatgtttttttaaacaaagaaaaatccagcttgaatctatcaaattataactaggttctgagaaaaagaaatgaagattttacctgggaaaatgtcagaaattgccatattcaaaatatgcaatgtactcaaaggtcttagtgaaagtagcaacatgtttgtatcagagatataatatctctgcaagagcaggcagggtccagagggattatgagggatgggttaggggtaaaggtggtaattgaaaggaaaataaatagcagttacaaactccctaatggaagcagcacaaagaagaatccaatatgctaaaagcacagtgaacaaacaaataaaacaaaagagagtataactaacacayttatttaggggtgaaacaaaatgaaacacttctcaatcaaatcaaaagaatgcaaaaatgaagacaaattatacagacgatataatgaattatgatcacatatttaaatgtaaaaaacattttgtaattacattaaatataagtggcatatacacttaaataaaaaaattaaattatgcacaat

SEQ ID NO: 635974 - DNA, 570 bp, Homo sapiens
cctatattgtcttgaatataggcttcatgtttttttaaacaaagaaaaatccagcttgaatctatcaaattataactaggttctgagaaaaagaaatgaagattttacctgggaaaatgtcagaaattgccatattcaaaatatgcaatgtactcaaaggtcttagtgaaagtagcaacatgtttgtatcagagatataatatctctgcaagagcaggcagggtccagagggattatgagggatgggttaggggtaaaggtggtaattgaaaggaaaataaatagcagttacaaactccctaatggaagcagcacaaagaagaatccaatatgctaaaagcacagtgaacaaacaaataaaacaaaagagagtataactaacacatttatttaggggtgaaacaaaatgaaacacttctcaatcaaatcaaaagaatgcaaaaatgaagacaaattatayagacgatataatgaattatgatcacatatttaaatgtaaaaaacattttgtaattacattaaatataagtggcatatacacttaaataaaaaaattaaattatgcacaat

SEQ ID NO: 635975 - DNA, 570 bp, Homo sapiens
cctatattgtcttgaatataggcttcatgtttttttaaacaaagaaaaatccagcttgaatctatcaaattataactaggttctgagaaaaagaaatgaagattttacctgggaaaatgtcagaaattgccatattcaaaatatgcaatgtactcaaaggtcttagtgaaagtagcaacatgtttgtatcagagatataatatctctgcaagagcaggcagggtccagagggattatgagggatgggttaggggtaaaggtggtaattgaaaggaaaataaatagcagttacaaactccctaatggaagcagcacaaagaagaatccaatatgctaaaagcacagtgaacaaacaaataaaacaaaagagagtataactaacacatttatttaggggtgaaacaaaatgaaacacttctcaatcaaatcaaaagaatgcaaaaatgaagacaaattatacagacgatataatgaattatgatcacayatttaaatgtaaaaaacattttgtaattacattaaatataagtggcatatacacttaaataaaaaaattaaattatgcacaat

SEQ ID NO: 635976 - DNA, 570 bp, Homo sapiens
cctatattgtcttgaatataggcttcatgtttttttaaacaaagaaaaatccagcttgaatctatcaaattataactaggttctgagaaaaagaaatgaagattttacctgggaaaatgtcagaaattgccatattcaaaatatgcaatgtactcaaaggtcttagtgaaagtagcaacatgtttgtatcagagatataatatctctgcaagagcaggcagggtccagagggattatgagggatgggttaggggtaaaggtggtaattgaaaggaaaataaatagcagttacaaactccctaatggaagcagcacaaagaagaatccaatatgctaaaagcacagtgaacaaacaaataaaacaaaagagagtataactaacacatttatttaggggtgaaacaaaatgaaacacttctcaatcaaatcaaaagaatgcaaaaatgaagacaaattatacagacgatataatgaattatgatcacatatttaaatgtaaaaaacattttgtaattacattaaatataagtggyatatacacttaaataaaaaaattaaattatgcacaat

SEQ ID NO: 635977 - DNA, 527 bp, Homo sapiens
ctataaataatgctttaatgaacatagaagtacatatatctattggagacactgatttcatttcttgggatatacacctagaagtggaattgttggatcatatcgtagttctatttttaattttttcagtaacctcattacatttttccataatggctgtaccaatttacatttccatcaacaatgtacaagggtctcctttgctccacatcttgccaacacttgttaactcttatctttttcataatagccattctaacaggtgtgagatggtatgtgaytgtggttttgatttgaatttctctgaagatagtgatgttcaggatgctttcatatacctgtcggttatttgtaagtctccctttaagaaatatctattcaagtttcttaaccgatttttttttttgagacaatgtctcactctgtcgccaagttggagtacagtggcgtgatctcagctcactgcaacttacgcctcctgggttcaagcgattctcctgcctcagcttcctgagtagccaggacta

SEQ ID NO: 635978 - DNA, 613 bp, Homo sapiens
ttctaaaactacctatggcccacctgcccccatcctgtgcctataaagaccccagactcagctggtagacagaagaagtgactggataatcagggagaggcaacctgactggaggagagaggcagagaggcaacttgacctcaggggaaagtgacctgcccttccagtactcttttcatccccgtctccactgagagctgctttcattgctcaataacattgtctgctttcaccatccttcaattcatctgcatgacytcattcttcttaggcaccaggcaagagtttggccctaccaagtgcagataccctaaagggctgtcacactggccctttgctcttgctggtggagggcagccacgcgtgtgataaggaaaagggcccactgagctgataacacattgcagtccacagacattggagctaagagaatattgttaacagtccctcgggggccttgaggtcacaagcacccccacctgtatgctgtcatggggcctacacagtgtttgctcctgccagccccaaagcggccatccagttcctgcactcatttgctctgtacttcctcccaaaaggggttgaatgtggcgggctgagtaaacacagtacc

SEQ ID NO: 635979 - DNA, 529 bp, Homo sapiens
ttcctcttagataaagaaactgtaggaaataattatcacatcaaaaaaatcaagcaaagcaaatgtgttcacaattgacttctccatttcaaatcaattttgaaaatttttatgactttgctayacaaacatagatttttttccttctttccagttgtatcacatcttatatttaacctgcgttattttctttgtacgccttatcaccatttgatatattttataactatttactttgtttatggtttctctctcaccccagtagacttataaactccatgtaagcactactgttttctactattttactaactgttgaacaaattaatgaacacattaatctgccttatttctacccttctgcaacagaaaaagaatgtagaatagcagcaatttctacagaaaagtcaggaggttttggtacagagcaagagtatatagaacatcaaataaacacatgggagaaaactaatacttggaaaatacagtaactctttgacttgaccaattagatattcaaagtgaatat

SEQ ID NO: 635980 - DNA, 529 bp, Homo sapiens
ttcctcttagataaagaaactgtaggaaataattatcacatcaaaaaaatcaagcaaagcaaatgtgttcacaattgacttctccatttcaaatcaattttgaaaatttttatgactttgctatacaaacatagatttttttccttctttccagttgtatcacatcttatatttaacctgcgttattttctttgtacgmcttatcaccatttgatatattttataactatttactttgtttatggtttctctctcaccccagtagacttataaactccatgtaagcactactgttttctactattttactaactgttgaacaaattaatgaacacattaatctgccttatttctacccttctgcaacagaaaaagaatgtagaatagcagcaatttctacagaaaagtcaggaggttttggtacagagcaagagtatatagaacatcaaataaacacatgggagaaaactaatacttggaaaatacagtaactctttgacttgaccaattagatattcaaagtgaatat

SEQ ID NO: 635981 - DNA, 529 bp, Homo sapiens
ttcctcttagataaagaaactgtaggaaataattatcacatcaaaaaaatcaagcaaagcaaatgtgttcacaattgacttctccatttcaaatcaattttgaaaatttttatgactttgctatacaaacatagatttttttccttctttccagttgtatcacatcttatatttaacctgcgttattttctttgtacgccttatcaccatttgatatattttataactatttactttgtttatggtttctctctcaccccagtagacttayaaactccatgtaagcactactgttttctactattttactaactgttgaacaaattaatgaacacattaatctgccttatttctacccttctgcaacagaaaaagaatgtagaatagcagcaatttctacagaaaagtcaggaggttttggtacagagcaagagtatatagaacatcaaataaacacatgggagaaaactaatacttggaaaatacagtaactctttgacttgaccaattagatattcaaagtgaatat

SEQ ID NO: 635982 - DNA, 629 bp, Homo sapiens
tctactattttactaactgttgaacaaattaatgaacacattaatctgccttatttctacccttctgcaacagaaaaagaatgtagaatagcagcaatttctacagaaaagtcaggaggttttggtacagagcaagagtatatagaacatcaaataaacacatgggagaaaactaatacttggaaaatacagtaactctttgacttgaccaattagatattcaaagtgaatatctgaagatttatttatcattcataactttactaagagtcaaattcaaatctgctcctttttgagctgcatcacataaacacttaccctgaacgcattatgtcaccatttcacaattacaccttcagctgggtatggtttatctacttgctgttgyaaaaatttaccacccatcctgggttaaaaatgttgctacttcattaaaaacaaccattaagcaaggtcaaacattagaagtaaaaagttgaaatggtcttactatgtgacagaaggagatgtattgttaagagatagttttcaacagaacgtgtcatgaaagaaatctaacactttgcacatttgttaatgtgagaggaaatatactccatatcattttggcattatgtagacactaccat

SEQ ID NO: 635983 - DNA, 607 bp, Homo sapiens
tcctgggttcaagcgattctcctgcctcagcttcctgagtagccaggactataggcacacgccaccacgcccagctaatttttgtatttttagtagggatgaggtttcactgtgttggccaggatggtctcgatctcttgacctcgtgatccgctcgtcttggcctcccaaagtgctgggattacaggcatgagccagggtgcctggcccttttgaccagtttttaattagattatttatttatactattgagttgtcttatatatttggagatcaatttcttattagatgcatgatttgcaagtatgttttctccatgtttagattgcctttttattttgttgattgttccctttgctgtgcagaagctttttagtctgacgtagtcctacttatttttgcctttttgcctgtgtgtttggtgttataaccaaaagattattgccaagctgaatgtcaaggagattttcatctatcttctaggagtgtcagatcttatgttcaatctttaatacattttgagtttttytgtgtattgcttaagggtccaattttattcttttatgtgaatattgagtttctcatggtcacttattggacaaactac

SEQ ID NO: 635984 - DNA, 552 bp, Homo sapiens
ttacactccagcctgggcagcaagagcaaaactccatctaacaacaaaaaaatagaataagtgactttaggcaccatttccctgccttcttatttcttatgtgtttatattttataatacaaggtctcactatattgcccaggctgaggtctggtaaccatctacagcctcaaatgcctaagctaaagttattctcccaagtcgctgggactgcaggcacctagctatcatttyccttcttattcaggggatatatacttcggggtgattgtaatttttttctttgttaactactaagaagtgatagttttcctttctaactatgactactattgtttaatgatattctaattttttttcagacatagtgattatgagcactccatttagtgaagtttgtttgagagattcaaagtttgttgaacctcatacaagtgaggtggtcacaactggaggctgctggagaagtggggttggagacagcacttttacatctatctgtagtgactgcaagatgattttctgtgaccattcttaattaaataagaaata

SEQ ID NO: 635985 - DNA, 608 bp, Homo sapiens
gtagttattaacccattatctgatacatggtttgcaaatattcttttccaatccacaaatatagttacctttcattttcttggttgtttccctggccacaacaaaatacatatgggaatgcactatccctatcaagttgagttacatcttagttttaacgaaatgagataatttgacagaaatataggacttggtcattttcatgacagcataaaggataaaaaaataaccaatgaacttgcctgagtataattatagacttagacaaaaaagagaaagaaaagataaagataaactgcaatatttgttttagaaaaaaaaatttactgtaaggaatactttgtgaatgtttactaagatgaacttacatttagaacataggtgtttcattgcatgcctgtatgtgtttggaaattatgcaccaaaaaagcaactgttcaacattttggagygctggttgcaaagtacacaatagagtagaaaaaggaattcaatagagaaaggatcgtgaagattggttaaaagatagtaaaaaagaggccaatgtcagatagaaaaggtgtgcacaatatttctggtggaataaactgtatcctaaaagtaaacac

SEQ ID NO: 635986 - DNA, 453 bp, Homo sapiens
tattactgtctttaaaaacattgtatgcccttaaatgccaaccataacattttcacaacaactttcttcatccttcagaaaaagcttggaggtatatctccaaggtggcgttagtcatttgtgtcactgaagccttgattcttttccttgaactgattccctcattactgcaacatgtatttattcagcacataagtcctaagtaacaaactggaggtggaagataaaatagtgagcgaatgcagatatgttccttgcctcttggagtgtcccatcaagcactgatgacaaacattgttcattcaatgatattgacaaaagtatcattgaaaaatgaatttagagtttatgtggaaaaacatgcygtttagggactgtacttcataggagcacatttctaaagaaaaatgtgttcattggagaattactggctatttcaggaggtgaaagtgg

SEQ ID NO: 635987 - DNA, 550 bp, Homo sapiens
cacacagttagttgacccctaaggaagaggtcacaagctttagatgtcaacctctacccatgagcatactatgagagcagagagcagaagtggtttataggtcatagtctgggtagattctcaggaaaacgccagatcccaaagtttgataaacatttcacagaccacgtttatactcttatgctcaccagcrctatgagagtgggatacatagtagtctactggtcccaacatctttgaaaataatccctgatctaaaatttctgaggttcatatgccctgcatgacaaacctcagtgaaaagtggcaattggtggtacagcttcttattaaggagcctacacattttacagtagatttcaggaatgcattaggggctttcagtaatgaatttcccaacctcgtattctcattttcttctgaagacatggaaagaagcataacactcaaggttgactcagtgcttacaagtctggattggattctcatgggaacttgtaatttcatggcctgaaatgtgcattttcaggggaaaaactaataacttctt

SEQ ID NO: 635988 - DNA, 584 bp, Homo sapiens
attctttcctaacattttaaatatattttatcactcagttgtgtaccacttttattcctattcaatttaaaataacttgtaagtctcttttaaccaataagttccctttcatttttatctttttcttaaaattgcttttataaagaacctgaggtatttgacatgtagagtcttccacagcttggattttgttgattgcacaagaatttcctctgttttctttatttttttccaaagaactgctcaatccaaagaatccagcagactcaggtgcaatttttttcattaaggtcaaatgttgataaaatgtcatctttaaagtataaaagaaagraaacaacaacaaagaaacaatgttcaatctaaaatttattccaagagaaaacataatttaaagttaaaaaactcatcaaattttaaaaattacataaatcattgctagcatattcatactataagaaatactaagctatatgtttttacatataaaggagaaataataacagttaggaatttggattacataaggcaataaaagtgatttgaatgataaataaatacttattcttaaattttaattactt

SEQ ID NO: 635989 - DNA, 584 bp, Homo sapiens
attctttcctaacattttaaatatattttatcactcagttgtgtaccacttttattcctattcaatttaaaataacttgtaagtctcttttaaccaataagttccctttcatttttatctttttcttaaaattgcttttataaagaacctgaggtatttgacatgtagagtcttccacagcttggattttgttgattgcacaagaatttcctctgttttctttatttttttccaaagaactgctcaatccaaagaatccagcagactcaggtgcaatttttttcattaaggtcaaatgttgataaaatgtcatctttaaagtataaaagaaaggaaacaacaacaaagaaacaatgttcaatctaaaatttattccaagagaaaacataatttaaagttaaaaaactcatcaaattttaaaaattasataaatcattgctagcatattcatactataagaaatactaagctatatgtttttacatataaaggagaaataataacagttaggaatttggattacataaggcaataaaagtgatttgaatgataaataaatacttattcttaaattttaattactt

SEQ ID NO: 635990 - DNA, 578 bp, Homo sapiens
atcaaattttaaaaattacataaatcattgctagcatattcatactataagaaatactaagctatatgtttttacatataaaggagaaataataacagttaggaatttggattacataaggcaataaaagtgatttgaatgataaataaatacttattcttaaattttaattacttaaaaagaattttacccaatctaactataataaataattttaactatttatattaaaaagtattgtaatggttttggaagtttatcgcatacatagaagtaaaatatactayaataaaagcacaaatgaagaggtataacttgaatgcagactgtgttagacatgcacattgtaaaatacatagttaagtgatcagtggatattaaaacagaataataaaaaaatttccaaattcagacataaataaatagaagagaaaagaaatagaatcatatgggacaaatgtcagaccaaaaaagacacatctttaagtcaaatgtttttataattatattaaatttaaattgttgacacataccaaataaaaggtggcaattatcagattgtaaaacaatataacatc

SEQ ID NO: 635991 - DNA, 582 bp, Homo sapiens
aagcatgtgcagagatacaagatatgtttcataatgataaaaatataaattcaccaataagtcatacaatcgtatatatgtatgcatctaataacagtctcaaaatatgtgaggttaaaattatttttaaaactagactgtgagagacaaattcaaaatacttggaggtttcaagatatttctgtgtacaatacatgtattcagtattcaggttacaaaaattatgtttcttatgtaagtcttacatcatcactatataatatgtaatatattcagcaaacaattcctgtatgctgaattatataattctcctatgctgagtaccaaaaacattattgagaggaattaaggaagatctagtaaacatagaaatgtgcctgtttcatgatgtgaaagatttaatataatattaattttccatttgtctgtaaatttagtgcaaccataataaatattccagcaaatatttttacagaaattgataagtgaatttaaaaattcacttatgagaaycaaaggaccaaaaaagccaaaataacttggtgagagttttacattggctgtcttaacctagctgaattc

SEQ ID NO: 635992 - DNA, 632 bp, Homo sapiens
tatgagaatcaaaggaccaaaaaagccaaaataacttggtgagagttttacattggctgtcttaacctagctgaattcaaaattaactttaaacctgaagaaatgcagactatttgaaattggtataaggataaacttacaaacaaaatacaagaatggagattccaaagtagctccacacatatctgttcagtggattttcaacaaagggaccaaagcgaattcaatgggaaatcagttgttttytcaagacatgtcttggaaaagttggatgttcattttcagaaaaattgaaccctgaccatcatcacacactatccacaaaaattaacaaaaaattggtcatagatctaaagctaaagcaaaaaaatttccagaggaaactacgtgagaacatctttgtgatcttgaatttgccagttttcttgaataggtgaaaaaatgaataaaattggagaattaaaaaacggaaaacatttgtatagtcgctcttccaaataaaatctacaaatagcaatgatgcacatattacgattatcaatcaccatgatttgtcattatggaaatccgtattaaaaccacactggaatgccactacacacctggtagaatgcctgcagtcaaaaggacca

SEQ ID NO: 635993 - DNA, 632 bp, Homo sapiens
tatgagaatcaaaggaccaaaaaagccaaaataacttggtgagagttttacattggctgtcttaacctagctgaattcaaaattaactttaaacctgaagaaatgcagactatttgaaattggtataaggataaacttacaaacaaaatacaagaatggagattccaaagtagctccacacatatctgttcagtggattttcaacaaagggaccaaagcgaattcaatgggaaatcagttgttttctcaagacatgtcttggaaaagttggatgttcattttcagaaaaattgaaccctgaccatcatcacacactatccacaaaaattaacaaaaaattggtcatagatctaaagctaaagcaaaaaaatttccagaggaaactacgtgagaacatctttgtgatcttgaatttgccagttttcttgaataggtgaaaaaatgaataaaattggagaawtaaaaaacggaaaacatttgtatagtcgctcttccaaataaaatctacaaatagcaatgatgcacatattacgattatcaatcaccatgatttgtcattatggaaatccgtattaaaaccacactggaatgccactacacacctggtagaatgcctgcagtcaaaaggacca

SEQ ID NO: 635994 - DNA, 607 bp, Homo sapiens
tatatttctttttcttcttcccttctcattgcaatttgcttattctatcactctgctgattatatcaattttcttattattatatcatttgcttattatatctgcattgccatttacatgggataaaacttgtttacccttaaaggtattgtgtgtgtgtcttttcttctcccctcatgcgtttcccgcacagaacagtggtgtttagctgtattaagtaatatgagttcatgctgatatcttcaaatataatcctttactttcttcttctgcttgtctgtaacctcccactataaaaataaatcttgactcccaccttctgacattcatttactttatttttaaaatttcagcatgaatgtgcatggtatcagaattaacacatattccttcaggaaacaactttacctactggagacgtttctatttacaattccctttcctttcagtcttacgaactccatcgttttccaagttatttaggtcaacaacttcgccccccacctcttacaaggggggcatttcatatactgtaataaartttgatggtttttacagtttgcatgtcatcctgtgattctccatcctcttaaatgttttttcgttt

SEQ ID NO: 635995 - DNA, 659 bp, Homo sapiens
actagtactttcttattggtttaattttaatatattcttgatctctgatacattatacatgcccctaagatagcccccatttttaaatatagagaaatagtgttttatagtcacaagataaatgtgtcctctgtcatagtatatactttgaaatataactcaattcctatatcaagtgaattattactctggtaacatagcatctggtaattatggcctaatgaaaaagcactggctaaagaatttagaagactccgttattcattttgattctgagtgataataactacttaatctttgaatattcacttgagttttaagcatctccatttcctcatctgtaacattacaaacctagacatgttctgtacgatacttcacgacttaaacgtttataatacggaaaagcaatctgaaaatatcttgaacgagctaccgcgctcttatcttttttttttcttttttttttcctgaatagagtgcactagatttatacaagggtgactgtgaaacatttagctattggcctactaactcagtgcaaatgaatagcaagaaaactctcatacyattttttatagacttcattcctaacactttttgtaacttaatgaccattgatgctttctttgcataatgtttctattattatctctcca

SEQ ID NO: 635996 - DNA, 568 bp, Homo sapiens
cttatacttgggggatgattagggcaattagaagttaactgggtaactgggtaacgggcgcagtggctcacacctgtaatcccagcactttgggaaccccgaggcaggtggatcacctgaggtcaggggtgtgagaaaagcctggccaacatggtgaaaccccatctcttctaaaaatacaaaaactagccaggcgtggtggcacctgcctgtagtccaggctcctggggaggctgaagcaggataatcgcttgaaacaggaggtagaacggttgcagtgagcaaagatcgtgattcagtctcaaaaaaaaaaaaaaaaaaaaaggtaactaytaactaacttggtggaaggaaaatggtgagagtaatgaaaagacttttcagagttggagccatttatgtgaaactatgagtgaatgatcacttggtagccctaggagctagatttactcacctgctttggaatgcagatcaggaaggaatggaggtggctgagttgggagaaataagaccagaatagtcaacacatagccaagaatggctacccatgaaaatgataaacttgttc

SEQ ID NO: 635997 - DNA, 571 bp, Homo sapiens
aaggtatcctccacagatagggggactattgtatacgttctatttgtaatayatacaggtatacatgtgtacctgtatgtctatatttatatgtgtacacttctatatctgtatttatctatatctatatttcaatatgtataagtaatctatattcatcataacaatacaggtaagatattgaaactatattttatattattccagcctaatgaaataatcatgaatttttgttatatgaatttatgcttgttaagttatacccaattattcacaaagctttggaaataaacgttgtaaaaaccaaaacttcacagccatgtggttggaaggatatagcagccaacactttgtgaagtgatccatagtctataaatgactccatttgtacattaacctcaatcataaaggaataatatttttctatgaatagggttgttgtagcacagatattttccaatggaattggaatagtctttggaggaaatggatattttaattttttttgataaattaatatggtgaaaaagaacttaacattttggtaaagtatgtacttaattgaatgtct

SEQ ID NO: 635998 - DNA, 595 bp, Homo sapiens
ttaattgtttataaacacacacttgtttgctggttctcaggaatatctcaggtttgtatagacttacatgaggcattatttaaatggtgactttatttgttgttactttaaatgttaaaattaatgctcaaataaggtgcatagagtttagcatattagataacttactgtttaagaagcttgtaatttaagatcttagaaaacgagaaagaataaacacaacattttttttaaaatgacagaaaatcattgcattttatatgttttaatttttgtgyctacttatttttacaatgtacattttttagatgtgtggtgtttgacattcttatattcagtgtctgtcacagagcattttaaattcttttgccaaaaacaaacacaaatgcatcgcctttaaaatgacacaggtttatgaggacatatgacgaatgtgcagaatagacctgtcaagtggaccttttgttcctttcttcagctcaccaatgtgaaacagattaaacctgagaaaaaacgcttgcaccattttccaaacgcaaaattggttgagtatttggaatgtgcagggatgcctcggggatcatatatctctatc

SEQ ID NO: 635999 - DNA, 595 bp, Homo sapiens
ttaattgtttataaacacacacttgtttgctggttctcaggaatatctcaggtttgtatagacttacatgaggcattatttaaatggtgactttatttgttgttactttaaatgttaaaattaatgctcaaataaggtgcatagagtttagcatattagataacttactgtttaagaagcttgtaatttaagatcttagaaaacgagaaagaataaacacaacattttttttaaaatgacagaaaatcattgcattttatatgttttaatttttgtgtctacttatttttacaatgtacattttttagatgtgtggtgtttgacattcttatattcagtgtctgtcacagagcattttaaattcttttgccaaaaacaaacacaaatgcatcgcctttaaaatgacacaggtttatgaggacatatgacgaatgtgcagaatagacctgtcaagtggaccttttgttcctttcttcagctcaccaatgtgaaacagattaaacctgagaaaaaacgcttgcaccattttccaaacrcaaaattggttgagtatttggaatgtgcagggatgcctcggggatcatatatctctatc

SEQ ID NO: 636000 - DNA, 524 bp, Homo sapiens
cgtggtatttggttttctgttccttgcattaatttgcttaggattatttataatagccacaaagaaaatgaaatacctaggaatactggtaacagaggaggtgaaaaatatctacaaggaaaacactgctgaaataaatcaaagataacagaaataaatggaaaaacatcacatgctcatggattagaagaattaataataaaatggccattctccccaaagcaatttacgtattcaacattattyctatcaaaactaccaatgtcattcttccatgaattagaaaaaactaatataaaattcatgtggaacaaaaaaggagcctgagtagccaatgaaatcataagcaaaaagaacaaagctggaggcatctcactactggaattcaaactacaccataaggctacagtaacaaaaagagcatggtacaagttcaaaaacaatggaacagaatagaaaactcagaaataaagctgcacacctacaatgatctgccctttgaccagggcaacaaaaccaagcaa

SEQ ID NO: 636001 - DNA, 452 bp, Homo sapiens
gtgttaacaacgtcatctttactgtacctataataagaatcaaccttcgttcagaaaaatttaggctatttcactatcagtcaataaatgaacaaccagaacctcattattgatgttaaaagcttcttcaatatccacatctttcagattgctgacatactatgaaggtataatttttgcataagtaaggtggtaagaccattttttattctcaatgacaccaccttgttcatcatcatcatcacttaacataatcacagtccagtagttgaatcaggtatgcacacctgtgtctttactcactctgttcccagcattggcaacagcatgtaaggcatcctgcatgctaaactgcctttgaaaaccttccacgcctatgcctctgctcaatgctactaacatgytattcaaggaagtattttcatatttacacttcattgatctaaggatgc

SEQ ID NO: 636002 - DNA, 589 bp, Homo sapiens
ctgacatactatgaaggtataatttttgcataagtaaggtggtaagaccattttttattctcaatgacaccaccttgttcatcatcatcatcacttaacataatcacagtccagtagttgaatcaggtatgcacacctgtgtctttactcactctgttcccagcattggcaacagcatgtaaggcatcctgcatgctaaactgcctttgaaaaccttccacgcctatgcctctgctcaatgctactaacatgctattcaaggaagtattttcatatttacacttcattgatctaaggatgcaccggtcacgtgattaattgataaagtcacatttaggagaaagcacatagcataaacagtatttttatgagaatttcagctggaggatgagcagaaaagttatcaaggaataacaaaatctcacagtcatcattcagtccaattttcctgcagtaagcatgagctgctggtagaaaatgtttgtgaaattagaccaaatgttgtccccagtaatccatgcattttttgagaacacaacagtggcctartaggaaattccctccttgcaaacagtgaggacataagctt

SEQ ID NO: 636003 - DNA, 676 bp, Homo sapiens
tagatccttgcctgtctcatgagcagcatgcaattaagtggccagggtcactgtgatgctgatggatcaattctttcaatacatgagcgagatcttcatttccagatttatgcagtgtttttgtatttttcattaacttccattcatccgtttcagcacagaacttcaacagtttattttgtttcttcaggccatgtataatggtatttctaacagcacattcttyggtaaaatatttcacacttacactgcttcccagtttcttcagcatcttgactttctgtactataaaaaaaaacataaatgcttccttttttcttatcactgttacccaagggatatctacaggcctttttgacattttccaaaatatcttcgaactgcagaacggagaaggtacaaaaaaaaaaaaatgctgagtaatgcaggtaggtcttggtcgcatgtggggcattgcagggatcctgtccttggccatccagcctgcacacgtgccattttactaccctttgtggaagtgtttgtgtaggggaatctggatatgcacagaaaagacatattacagctgaaaaagtttgggaggctcttttgtttttgttttttgcccgtgaggatgctgaataaattgtagtgcacctttcttttgatggagactatcacaagaagtcagttgtaa

SEQ ID NO: 636004 - DNA, 466 bp, Homo sapiens
agttcaaaaacaatggaacagaatagaaaactcagaaataaagctgcacacctacaatgatctgccctttgaccagggcaacaaaaccaagcaatgggaaaatgactccctattcaataaatggtgctgggataactgtctagccatttgcagaagaatgaagttagacccttatctttcactatatacaaaagttaactcaaaatggwttaaagattaaatgtgaaaccttaagctatataaattctagaagaaaacctcgagatacccttcaaaacatcaatcttgcaaagtcatcttttagaaagtgcataaacacactctttccacctctgtctctgtggctctatcttctctttccatctatacctgtatctatctatatgtttccagttctctccatcttatctgaatctctgtacctatatcattatttattaaaatgcattattggatatttgtatca

SEQ ID NO: 636005 - DNA, 514 bp, Homo sapiens
ccagtgtgaaacacagtttttaaaaataatttccagggcatattctttgctttgtataatgattttcaaatttatatccccaactctgactttcctctaaattctagatgtctgcaggatatgtatgatgcttttcaaatttatatcactaactctgacattcctctaaattctagatgtctacaggatttctgtccttgtatttttaatacatgtttcaaatttaacatactgaaaatacaaatttgattaattatttccactcttctgctattaatcttacttattgcatatacggcaaatttgttcttccatgtactctgggaaaatgttttggaattactccaataytctctttttatttcacccagtaatagatccagcaaaaaaatcctggtgtctcaattgccacatggtattgagaacaccagaactgctcaaaacttataccatgataaccttggttcacatcactaatatgcattagttggcctgttgcaatagcttcttaatg

SEQ ID NO: 636006 - DNA, 596 bp, Homo sapiens
tttaaataaatggaatacagtaaataatagttttttttaagcacataggtaaattcaaccagcatctcaaaatatctggatggaacatagtcttctggaattaactttgtaattgttctgytacaaatcccatcagacttccagtggggactgtgtgggggcctcaactccacatttcccttccatactgccctagcagatgttttccatgagggccccacccctgcagcaaacttctgtctgtacatccaggcatttccatacatcttctgaaatctaggcagaggttcccaaacctcaattctttacttctgtgcaaccgcaggctcaacaccacatggaagctgccaaggcttggggcttgtaccctccgaagccacggcccaagctgtctttttgccccttttagccatggctagagcggctgggatgcagaacaccaagtccttaggctgcacagagtaggggggccctgggcctgcccacaaaaccactttttcctcctagacctctgggcttgtgatgggaggggctgccacaaaggtctctgacatgcccgggagacctcttccctattgtcttgacaattaacattt

SEQ ID NO: 636007 - DNA, 556 bp, Homo sapiens
cacaaactataataaattctattaaaagtaaaaatgttgagattgcaaaactttattgacagaaagcaaaaacaatggtgctggtgggagaggtgactggctggaaaagtatacaagggggaatayaggctatggaaatattctatataatgattgacaaaactcagtgaatgatacctttaaaattaacttttgtctgatgcatggtatttacaaataatcatagggtcaaatcatacatgctagaatcaatatagtggagcagctaacattagtaaatagcccatctacacatttattatgtgtaatcaataggttcatacaaaagcactttaatacttcactcatacccaattgcctctttccatcacttaaaaattatggttagtaatgaatcccaatccaaaaaactattcctcttaattccctagactaacctccattaatcatttaggtgacagaagaagagaattgtttaaaagtcatttgccaaacgattacaccatagatcaaattatcagcccagactggatacattgggtgtagctttagaaaa

SEQ ID NO: 636008 - DNA, 592 bp, Homo sapiens
ctaaaaaaatgaaaaaataaaatgaaacaataaattttcatctgtctactatcagatatacaaataaaggccataaaatagaatattgttcaacaataaaatgaaccaaatacttgtatataagcaataacatgaattaatcaccagggaatggcaaatgaaaaaaacaaaaaaattcacaaactataataaattctattaaaagtaaaaatgttgagattgcaaaactttattgacagaaagcaaaaacaatggtgctggtgggagaggtgactggctggaaaagtatacaagggggaatataggctatggaaatattctatataatgattgacaaaactcagtgaatgatacctttaaaattaacttttgtctgatgyatggtatttacaaataatcatagggtcaaatcatacatgctagaatcaatatagtggagcagctaacattagtaaatagcccatctacacatttattatgtgtaatcaataggttcatacaaaagcactttaatacttcactcatacccaattgcctctttccatcacttaaaaattatggttagtaatgaatcccaatccaaaaaactatt

SEQ ID NO: 636009 - DNA, 556 bp, Homo sapiens
cacaaactataataaattctattaaaagtaaaaatgttgagattgcaaaactttattgacagaaagcaaaaacaatggtgctggtgggagaggtgactggctggaaaagtatacaagggggaatataggctatggaaatattctatataatgattgacaaaactcagtgaatgatacctttaaaattaacttttgtctgatgcatggtatttacaaataatcatagggtcaaatcatacatgctagaatcaatatagtggagcagctaacattagtaaatagcccatctacacatttattatgtgtaatcaataggttcayacaaaagcactttaatacttcactcatacccaattgcctctttccatcacttaaaaattatggttagtaatgaatcccaatccaaaaaactattcctcttaattccctagactaacctccattaatcatttaggtgacagaagaagagaattgtttaaaagtcatttgccaaacgattacaccatagatcaaattatcagcccagactggatacattgggtgtagctttagaaaa

SEQ ID NO: 636010 - DNA, 617 bp, Homo sapiens
aggaggcacggctggggctgcacactccacagagccagcaggggctggaaaaaggtgggagtcccatggcctaccgagttggcagggcaggagccccacactcccaggtgcagctgcagccacttagccattgtgctggacctgggaatccctgcattctcaaggctctggaaagccttctgcccctccggctcagaagtgcctgctcccactccctgacctctctcccctcccagcgccctctccattgcagagcaaagtcatggccaaacctgggcacttttgtgacccagctgggtctgtgggtgcttggggtggtactgacatgctagcccccttgtgcctcagtctcctctggactttgggtgccaataagcataggagagamtctgggcggttctgagggtagcttgtcatggacctgcaggtgcccctttggtccaaacaacctgggcaccgtggacagcatgttgatggtgtcaggaggcagagaggttcctaggcgggaaagggcaggtccccctgaagcatcacattcaagccagggaccacttgaagtttggcagctgggctgccagttcctgttagaatccatgacccagagcaagaacttatgg

SEQ ID NO: 636011 - DNA, 617 bp, Homo sapiens
aggaggcacggctggggctgcacactccacagagccagcaggggctggaaaaaggtgggagtcccatggcctaccgagttggcagggcaggagccccacactcccaggtgcagctgcagccacttagccattgtgctggacctgggaatccctgcattctcaaggctctggaaagccttctgcccctccggctcagaagtgcctgctcccactccctgacctctctcccctcccagcgccctctccattgcagagcaaagtcatggccaaacctgggcacttttgtgacccagctgggtctgtgggtgcttggggtggtactgacatgctagcccccttgtgcctcagtctcctctggactttgggtgccaataagcataggagagaakctgggcggttctgagggtagcttgtcatggacctgcaggtgcccctttggtccaaacaacctgggcaccgtggacagcatgttgatggtgtcaggaggcagagaggttcctaggcgggaaagggcaggtccccctgaagcatcacattcaagccagggaccacttgaagtttggcagctgggctgccagttcctgttagaatccatgacccagagcaagaacttatgg

SEQ ID NO: 636012 - DNA, 548 bp, Homo sapiens
tcaggcttagccagactcatacactcttggggacaacctgcctgtgcaaaaaaactatctacttcaggtctcctgagagctcttatgtcagtcaataaaactcctctccatctcgttaccctctagttatccacacaacctcattcttcctggatgcaggacaagaacttgagacccacagaacgacaggagtgaaaggagctgtaacacattcctggcttgctgagctgcagatggtgacatgctgccagactgtgaaagtgaagggtggggagccttcggggacccagacctcgagatcccccaagccagagctgctgtaacactatagctcttgcgccctccaccgacaccaagtgaccgtgtcacacaacgggaagcagcggtagggccaggccagcccaggaaccacaggctggagtggggaagcaggattgaaagagctgtaacaaaaacaggccaaaacatgccccactgctcgccacactgctgacgatgagaagcagagargagctgttgcccttctcgtgatccagaccttggctccc

SEQ ID NO: 636013 - DNA, 527 bp, Homo sapiens
ttatctcctttctttgtaaatgtagtacaataaacaaatgacttcataacctaaaaattatatttaatgctataaaatttaaagtacaaaacaacaaaaaaggagraattgctagtaaatcatcaaaagtaagaaaatcatccataaaaaattattttaaagaaaataaaaatgagggggaaactgaaaagatgagccaattaaaaataattactagtatggtgatgttttcatgttcagtattaattccatcatgtgcaaataatctaagcacttcaattataaaattattcagccatgagatcaaggtcaacatcaaaacgttatgttgatattatatgtgtttaaacattgtttatccattctgtagtcaatgacctttttttttccaattatgggctattaagtcttctatgagcgttcacatgtaggtctctgtgaacatatatgttcttattttccttaggtaaacagttagaagtaggattaatggcttgcatggtggcttatcttggtcaacttgtatt

SEQ ID NO: 636014 - DNA, 527 bp, Homo sapiens
ttatctcctttctttgtaaatgtagtacaataaacaaatgacttcataacctaaaaattatatttaatgctataaaatttaaagtacaaaacaacaaaaaaggaggaattgctagtaaatcatcaaaagtaagaaaatcatccataaaaaattattttaaagaaaataaaaatgagggggaaacwgaaaagatgagccaattaaaaataattactagtatggtgatgttttcatgttcagtattaattccatcatgtgcaaataatctaagcacttcaattataaaattattcagccatgagatcaaggtcaacatcaaaacgttatgttgatattatatgtgtttaaacattgtttatccattctgtagtcaatgacctttttttttccaattatgggctattaagtcttctatgagcgttcacatgtaggtctctgtgaacatatatgttcttattttccttaggtaaacagttagaagtaggattaatggcttgcatggtggcttatcttggtcaacttgtatt

SEQ ID NO: 636015 - DNA, 527 bp, Homo sapiens
ttatctcctttctttgtaaatgtagtacaataaacaaatgacttcataacctaaaaattatatttaatgctataaaatttaaagtacaaaacaacaaaaaaggaggaattgctagtaaatcatcaaaagtaagaaaatcatccataaaaaattattttaaagaaaataaaaatgagggggaaactgaaaagatgagccaattaaaaataattactagtatggtgatgttttcatgttcagyattaattccatcatgtgcaaataatctaagcacttcaattataaaattattcagccatgagatcaaggtcaacatcaaaacgttatgttgatattatatgtgtttaaacattgtttatccattctgtagtcaatgacctttttttttccaattatgggctattaagtcttctatgagcgttcacatgtaggtctctgtgaacatatatgttcttattttccttaggtaaacagttagaagtaggattaatggcttgcatggtggcttatcttggtcaacttgtatt

SEQ ID NO: 636016 - DNA, 560 bp, Homo sapiens
agtctcagtgggccaaaatcaaggtgtcagcagggctgcactccttccagaggctctagtaaagaatgccagattcttgcttcttccactactgatggctgtcagtgctctaacctccacctccatcacctccatggccacactgcatcttcttcagcctgtgtatgctgtctcacactgactctttctttttcttatttatttatttatttattttgagacagtctygctctgtcacccaggctggagtgcaatggcatgatcttgactcactgcaacctctgcctcctgagttcaagtgattatcccgtctcagccttccaagtagctgggattacagacgcattcaccatgccctgctaattttgtatttttagtagagacagggtttcaccatgttggccaggctggtcttgaactcctgacctcaggtaatccctggacctcggcctcccaaagtgctgggattacaggcatgagccaccatgcccagcccccactgtctttttcttataaggacacttgttttggcaatttagggtccatccagataatccagg

SEQ ID NO: 636017 - DNA, 537 bp, Homo sapiens
aaaacataagaaaatgtgtaagcataggagtgtttgcatatgtgcgtgataattattttatgtaaatgttggtggcaagcagtgtagcatcatccagcagcccagtgtttcttaatctatttcatttgcaaaggtatatttgaaatataggcatgygtgagacttgaggactgaaaatatttcaagcttcatcagtgaattaagtagccatgtgaggaaactggaattaagcaacactacattcctcattttacattattttcatctattcatcaaatttatgtcagtctaatcctgacaaggtagaactagacattagtctcatccaaaataaaaaagttaggatctcatcccaaataaatcaaccagagattgctcagcttaggaaagtgcaacttcctgcttgactgggcaggaaaacctttttgcaaaatatgcatcaagtgaacagtgtcatagtttaagatcttacagtttgtaagtcagctaaacactaccaggatctcaaaatagtaatttaatcttggaaatggctga

SEQ ID NO: 636018 - DNA, 537 bp, Homo sapiens
aaaacataagaaaatgtgtaagcataggagtgtttgcatatgtgcgtgataattattttatgtaaatgttggtggcaagcagtgtagcatcatccagcagcccagtgtttcttaatctatttcatttgcaaaggtatatttgaaatataggcatgcgtgagacttgaggactgaaaatatttcaagcttcatcagtgaattaagtagccatgtgaggaaactggaattaagcaacrctacattcctcattttacattattttcatctattcatcaaatttatgtcagtctaatcctgacaaggtagaactagacattagtctcatccaaaataaaaaagttaggatctcatcccaaataaatcaaccagagattgctcagcttaggaaagtgcaacttcctgcttgactgggcaggaaaacctttttgcaaaatatgcatcaagtgaacagtgtcatagtttaagatcttacagtttgtaagtcagctaaacactaccaggatctcaaaatagtaatttaatcttggaaatggctga

SEQ ID NO: 636019 - DNA, 537 bp, Homo sapiens
aaaacataagaaaatgtgtaagcataggagtgtttgcatatgtgcgtgataattattttatgtaaatgttggtggcaagcagtgtagcatcatccagcagcccagtgtttcttaatctatttcatttgcaaaggtatatttgaaatataggcatgcgtgagacttgaggactgaaaatatttcaagcttcatcagtgaattaagtagccatgtgaggaaactggaattaagcaacactacattcctcattttacattattttcatctattcatcaaatttatgtcagtctaatcctgacaaggtagaactagacattagtctcatccaaaataaaaaagttaggatctcatcccaaataaatcaaccagagattgctcagcttaggaaagtgcaacttcctgcttgactgggcaggaaaacctttttgcaaaatatgcatcaagtgaacagtgtcatagtttaagatcwtacagtttgtaagtcagctaaacactaccaggatctcaaaatagtaatttaatcttggaaatggctga

SEQ ID NO: 636020 - DNA, 557 bp, Homo sapiens
atacaatggaatgtggcttaaaaattgtctatagctcaagagttcctcrtatgtaacatggactgagaaaacctagcagcattattttcagttaaatacttgcaagagaatgttggtagagctccccaaatctgagagagatatataatttggagtggaggtgttcattttttggataagggatcaatggtataaaatattgtatcaaaggacactttgcttaaagtgttattagaagataacaataaagtatttgttgtctatttaattttaattaattaaacaaatacatctcagcaaggtacttttatgagggcagggttatagaagtgatatagtttgggtgtgtccccacccaaatctcatcttgacttgtagctcccataatcctcacatgtagtgggagggacccagagtgaggcacctgaatcatggggcgggtctttcttgtgctgttctcatgatagtgaataagtctcatgagatctgatggttttataaaagggagttaccctgcacacactctctttcctgttgccatgtaagatgtgattttg

SEQ ID NO: 636021 - DNA, 639 bp, Homo sapiens
tctgctgtattgtgtttcacaggtattgtggggatttttttaccaactgaagatttgtggcaaccctgttgtcaagcaaatacattggtaccatttttccaacagcctgtgttcacttcatgtctctgtcatatgttggcaattctcacaatatttcaaacttttaaattactattatatctgttatggtatctgttatggtgatctgtagtcaataatctttgatgttattattctaattgtttagggacaccacaaaccacacccatgtaacatagcaagcttaatagataactgttctgtgttctgactaccccacygacagggtcttctcctgtctctctgcctctcctcgagctttcttattccctgagacagaaaaatatgaaatttagatcacttgataaccctacattgacctctaagtgttcaagcaaaaggaagagtcattcatctctcactttagtcaaaagctagaaatgtttaagcttaatgaggaaggcatgttgaaagttgggacacgccaaaagctaagcctcttggacaaacagttaacccagttgtgaatgcaagaataatttctatttttttgagacaaagtctcgctcttgtcacccaggctgtagtgtaatggcgtga

SEQ ID NO: 636022 - DNA, 616 bp, Homo sapiens
tttcaaattttaagcctacaatttaatagtattcttgtagtttaccttcatttcaacagaaaagaatgaaatttattatgaaaattctaccttcaatgcacatagctattgaattgtgtcatgccattttcctgaaccaaaataaaatttctttttttctttcaccttagagccatctaagattctctattttgcaacatacagatcatgacgtacttaaaatgcaccattctggtccaggtctgcttctgaattgctgaacatgaagtccctacaacttgttgaaagacaaatttctgtgggtctctaaccatttctacaagtcttagaacagccacctactgcctttgttccaaacgatcttttcaggaacatcatgtaggaagcagccatggaagagagaggtartgtttcccatcagggtaaagggtaggctggccgcctgtagcccgggaagttagagacagtgtttacctctggagctaagggcagacatgcttattgcatattattatagattcaggttccctatgctcaaggtttctcttccaaagctcaccttgctttgtgtgagggcattcattgaaaccattccacattgccctcgtgggatttt

SEQ ID NO: 636023 - DNA, 623 bp, Homo sapiens
gagaggtaatgtttcccatcagggtaaagggtaggctggccgcctgtagcccgggaagttagagacagtgtttacctctggagctaagggcagacatgcttattgcatattattatagattcaggttccctatgctcaaggtttctcttccaaagctcaccttgctttgtgtgagggcattcattgaaaccattccacattgccctcgtgggattttggtgcaagagaaactgacacaaatattctgctcaggstaactttttttgccttcagtaatacattcatttttccctaaaccagaaaccttacttctcccagcatctgtgaagctggcatgttaacttgttaagattgtaggtagggtaaaatctcagaccttcacagttttaatttttttaaaaaatggatacatattaattgtacaaatttctgggttacatgtatcttgatgtatacacacaatgtgtaatggtcacagcaaggcatttaggatgtccatcacctcaaacatttatgatttcttttctagctattttgaaatacacaatgaattgtcattaattgtgctatggaacattggaatttatctcttctttctaactgtgtatttgcacccattaacc

SEQ ID NO: 636024 - DNA, 590 bp, Homo sapiens
aggtatagtataaaacagctgaaaataaactttttttttttttggctttagagatttagtttaagtccaacaatagataaagccaatacttaccactaccctcaggttccataactaaaagttattttaataactttcatgttgaaaatttctgttcattcatttcaaattcatggagattggaccaattatcattgcrtttttagattatattcactctttctatttagttcaaactcttggcttttattttaaattccaattttcaaggtaatataacaagatattagaaattctaatgttctctgaaatgttttccaaggcatgaaaatcaaatctgggaaaaaatggtccttaatttcttttctaaatcttttcactgcaggtaataaaactacgaactagtttgctaggtactggaagcctgaaaaggtggttaatggtagtatagaatccaaatgaaggtatgaaggggataataattaactatagaaccacttaggagaaaatcttcccagcagtaacaaagtgttatatagaaacagcagcacattttgggccaaactgcactcattagcatatattaaaaa

SEQ ID NO: 636025 - DNA, 585 bp, Homo sapiens
ttcaatgttattttcccttaatacaccaatacccaaaggtagtgccatttgaaagccagaatttttatttgatctcaaagctgttttaatttttgtgagattagatatgcagttgaaaaacacacaatcacaagtaaacaaacattcaacacataattttatatagtaaacagcaagcttaaataatttttgcttatggaaaaaagaaaagtttacattacacaaattataaatagtgtgaaaatgtgaaatacaagtctattactccataaaatattttaacactgcatttacgtgcaagatttgaaggtgctgcacccacaactcctacctgccttccattcaccatcagttcacccaaatgctggctccaagtaacttaacacatctgaggtttagatatttttctatcatctggaattgagatatttgtatctatttttggatgtattttgcattctgtatgtgtgtgtatgtatgcattcatatgcatgtaaacatacctatgtattatatattattatacataacaaatataatatatacatgtaataatatatattatatrtaacatatatattatat

SEQ ID NO: 636026 - DNA, 632 bp, Homo sapiens
gaaacatgtaaggtgcaggagatgtcactttcatcattcttcctgtgattgtttctagttcccactagtggctgacttgtttcatgatgacaaggaccctgttcctgccacacccctgggaaggggtcatcttcgaagatcagcgtccgttctgccagaccccccatgaaagtctccaacaaggagcacaagaaaaccgttggccaccaggtcagccccggaccaaaagctatgggcygaggtgcatgtgcagggctggcctctctgtagatgaaggatggcggcagggtgagagggaagccatcacagcagccttgacatcagtagcctcagccatccagctctatcttgtgtccttagaagaaggaaactccaataccttcaccacaaggaactaacagagggaggagggaaggggccgaccgtagcctccataagtatgttaacacctgtggtggggctgtgccacagggccaaagacacctagtgtgggaggcaagagggcctggaatttataggttagagaggaggcttaaggaagctgtggatcaggagactaaaagcaacttctcctgctgtggggtctctgtggctgttctgcccattgtgtctctggagagaagagaagagaa

SEQ ID NO: 636027 - DNA, 632 bp, Homo sapiens
gaaacatgtaaggtgcaggagatgtcactttcatcattcttcctgtgattgtttctagttcccactagtggctgacttgtttcatgatgacaaggaccctgttcctgccacacccctgggaaggggtcatcttcgaagatcagcgtccgttctgccagaccccccatgaaagtctccaacaaggagcacaagaaaaccgttggccaccaggtcagccccggaccaaaagctatgggccgaggtgcatgtgcagggctggcctctctgtagatgaaggatggcggcagggtgagagggaagccatcacagcagccttgacatcagtagcctcagccatccagctctatcttgtgtccttagaagaaggaaactccaataccttcaccacaaggaactaacagagggaggagggaaggggccgaccgtagcctccataagtatgttaacrcctgtggtggggctgtgccacagggccaaagacacctagtgtgggaggcaagagggcctggaatttataggttagagaggaggcttaaggaagctgtggatcaggagactaaaagcaacttctcctgctgtggggtctctgtggctgttctgcccattgtgtctctggagagaagagaagagaa

SEQ ID NO: 636028 - DNA, 557 bp, Homo sapiens
tgtccagcccagccttagaggttcaggtggaacagggtggcccaggccttgcctgggggtctgtggccttcagcatgatgaccacctggacttacactccccagacatcttacttgctgcagacagactgacagacacttgctgagtgccaccagtctgctgtccaggaggtcttaagagaaaaaatgccgttccccgtatagtggtggtcaggaatgtgcatgcttgaataaaatagagaacgttaaatgtagccatgagtacatctcacagcaagtgttaaattcaggcttggaaaggttgctggagtggtcaggaaaggcttttcttgtgttgaagaatcaagacctcacatgatgtgttggacgataggacatgaacatggtcctgtttctcacattcccrtctgctgctaagcttccagaattatccacatttgctccccttttcctcactcctcaacctactctgatccaacttttgtttctaccctgaccttgaaactttgttccggttctgtccatgctcatgtggctgacctcaccctaatctgtaga

SEQ ID NO: 636029 - DNA, 602 bp, Homo sapiens
gttttaaataggctttggaggaaaagtctcagtacttcattttttttggaagacaacatggactctcctgtattataagggagacgatattgttttgtcaactaaaaagttatcctacatagtaccctgcttggtttaagtattggtagaagcttttcaaataccagcacatcttaaacaggaagcaaagtacatttgagaacattttatagtatgtttattatctcaagctcctattcagaaaataagttaaaaaattaaaagtaaacataagatttttaaaaagcaaacttatttggtcaaaacaaggtgtgtgtatataaccttttaaaaacacatcagtgtggaaagcaatggacgtgtgtacttgtcattcctkgacaagctgaagtcaagccataagcagcaggagggagaaggggagtgaacacctgggccttgtgtgagctgttcctgcgactcctgtgctgtaatttgggtaccaacatgaccaaggttcagtctggtgaatttgtattttattttaaaatctaggttttaattgtaggtccctgtcattgagactgcacttggaagtggtaggatctctgagattcagaggt

SEQ ID NO: 636030 - DNA, 542 bp, Homo sapiens
ccattcaactgttttcataccgaaatgaccaacaaacccgttggcctcctccctgcccagcatctctgtctttccaccccaaggaggttgcatcaccactccctgtccagcactggccgtgggcattcctgctccactccccacttctgacactctttaccttgctggccttcaggatattgatctgctcttcatacaccgtgtctctgtttttctccagaaaaccatcagagaggtactccacctggggccacagcaaccagagagagacacagtcgttagtgcttcagcagtttctcaaccactttcatctcatccaggtagcattttctgaaaagagctgtgagtagataggaaacccacagatgtttccacttaaaatgcamacccaataaatggtcaggatttacatacagggaactgagtattcattttgtggaagaaattgttttaaagggagttcccataataaaaggtttcttcagggatctataaatgcagcttctcagccacacctcacacccaatgaatcaatctgtatt

SEQ ID NO: 636031 - DNA, 522 bp, Homo sapiens
gaattcatacaagttgctttatgcttgatcttatccaaaaggcctagaagtgatatgggttactttaatatgtgaaaaataccagagtcgtcagactgaggggggttcactgagcaaagtgtctgcatctctccagtttctccttggacgtgacctgggtagttgctgatggtcttatgcctgccttaagtgaggtcaggttgcaagaagccccatggaaatgggatggtcatcatgtgttttataacccccatcatatcaccctggaactccagcacaaaggtacctaataaggttgcagaaactgcctttgagtgtgcgaagtcacctgaatctgacaggttctgagaacagttctagtatgcyaccagcaccatcttgctactctatctggacactgtaatgtgctgatgtgataccatgactctgtactgtcaggtatctctgactgcagaagggagatgagccagggcccactgtagactgtaatgtgaaaaagctcatactcattgccttgttttg

SEQ ID NO: 636032 - DNA, 522 bp, Homo sapiens
gaattcatacaagttgctttatgcttgatcttatccaaaaggcctagaagtgatatgggttactttaatatgtgaaaaataccagagtcgtcagactgaggggggttcactgagcaaagtgtctgcatctctccagtttctccttggacgtgacctgggtagttgctgatggtcttatgcctgccttaagtgaggtcaggttgcaagaagccccatggaaatgggatggtcatcatgtgttttataacccccatcatatcaccctggaactccagcacaaaggtacctaataaggttgcagaaactgcctttgagtgtgcgaagtcacctgaatctgacaggttctgagaacagttctagtatgctaccagcaccatcttgctactctrtctggacactgtaatgtgctgatgtgataccatgactctgtactgtcaggtatctctgactgcagaagggagatgagccagggcccactgtagactgtaatgtgaaaaagctcatactcattgccttgttttg

SEQ ID NO: 636033 - DNA, 577 bp, Homo sapiens
ctagtattttccatctattgggagaatgcctttccctgacgccagttgagacgaatgattattttagatagtttaacaacttgcctgaccatcacctgatagtcgcttgacattcctgggcggggtgggggaggttttctcctgccctgcccaagtctgcctagctacctattctaagggaatgtagacaggaagtaataaagacaccaatacgccaaactccctcatgttaagtttaccctaagtcttgatgtgttcccagtaaccctaaggcactgtctcaaacttaagatagatatttgtttttcttttttctctacttgtctgaaagttatttgcagcttctatatmtttggctcaactttcatttagtagcataaccttaggcaaatcttccttggatctaagtttactctgcaaaatactaatgttggtagaaggagacaatgctgttgttgccttccagccagaaacctccagaaacacacctatagttgaacaagttgggtttaatgttctttggaagaagggagattgcacatcatgggtgtgcctttgggaactgcagcacatctca

SEQ ID NO: 636034 - DNA, 565 bp, Homo sapiens
ccaacaggctgtctctggatattgagacatggatcatcttcattatgccaccaagcaacatacacttcttttcctttttgaaggaacaaatcagcagagaaatagatgattctggatacaagagtttcccttggaagtgtactagggatggacaaaatttctaaagggacataagaggccagaatcagagaagagagggacaccttctcaaaggctcacaggaacaggcatccttaacctgtggacatgcggtatggtggctctacccttttctatctggaggacttgacctgattacttaacttttctygggtatatttctttatcccttaaatgaaattgtcactgtctaccttgccttcctcaatggtcaatgtgatcctttcaacaaatggtcctgggacaaatggataaatgcatacaaaagaatgagactgggctcttacatgtaaactcactcaaaatggatcaaagtcctaaaacagtaaaactcttggaagaaaacacagatgttagttagtctttgtgaccttgggttaggcaatgcacaacctaatgcaatgac

SEQ ID NO: 636035 - DNA, 587 bp, Homo sapiens
ctgcagaactttgttgcagagggaaggaaacacaattcctccccactggctccgagttggagctgagacacaaagtgaggacacaggaaaacccactccatcctatcactgcttggatgtgacgaagtggcttgtagtttacccagggggcaacacatgccttcagggtaatgattttaaggcaggatgcatttttaaatcacctggggaaacttgtcaaaatgcagatgttcaggactcagtctcaggctctgacttaataggtctgagggggcccagcttctgagactgctgagtatgtccccatgactgacgtgcagccatgcgtgaaaacccgtgggtcaggctccagtccaaaggaacgaagacagatctcacacaagagagccagacccagaggctgtgagatcctgagataatgactcatatcattccaaatcagttctctattattcttcctctgtgggatgtttaatagcaagggaagtaactgtgygtctgttataaattcaaccatgattaaatagggagaggaagcaggccgcttctaaagcttccctttagttctccaatcttatgctatttac

SEQ ID NO: 636036 - DNA, 600 bp, Homo sapiens
gaaaatgggagttcttgagccttgcctttttttcgtttccaaaccttggctagaatctcctcactttccaggactccctgcctgcctgtctcttccgtctacactggacaccctgtttttctgtcctttgtttctagcaagactgaggattgggratatttaaatgaagatggagaactcggcttggcctaccaaggcctaaagcaagttgccaggtggaacatattcctttcttcctgtgtctgctttgtccgttgggcctgctcatgtctatgcttaaccgtttttcagctacagtgggtgcgagagcacggggaacagttggcatgcagtctggctggtagcccctgtggttgaccatctgtcactgtgcccaggctgtacagatatggctgagggtggctggttgtttgggtcaaggtgatagcatttagtggacctcctgaggtccagcctacttgttctataggtgaagaaagagacaagagcaggaggtcacatagcggcaggcacacagctctttagaacaaggctgagaaggaaacatacctctggggaatcctgggcctgtgctgctttcacactacatattggccctcc

SEQ ID NO: 636037 - DNA, 571 bp, Homo sapiens
gggtcatctgttaatgtttactgaagaaacagtcttgaatcagatcccaggtcagcctctctcaagtgcccaccagctcctgggctgccatcagtccccatgtgccactcggctgtggaggagcagggagagtccacagaccccagtttctgcttcaactcactgtgattttgagcaaatccccttctcccatactcaggttcctcattcatgtcacaagaggatggaaccacatgacctcacagtcccacccaatatcacatcttyttgaaaatgtgaactgttttcaaatgtccttttaaaacacttttctgtccattaatgtgaataagttttggcaggggagtagcccatccttctctatttgccttctttccttttaccccagtcgcctttaatctccctgcactcctaagaactgaaagatcaggactaggaaaggagtgtggaataagccttcattcttccaggaatgctgccagcagttgctgtgacagttggcagaagagaggctggggcatcaactgagggaattctcacctacgctgccaacttctctctccccattccc

SEQ ID NO: 636038 - DNA, 500 bp, Homo sapiens
gcttggcagtctcacagggagtgtaagggaagtcaggggaaatggcttgaggctggagtggtggggaaggggtctgtgtagaggggaggatgtgattgtccctcctggtagcaacttgaaaagtttagcgccatcttcagatgtgctcatttttcatttccaagattccttatgaattgaattcattattctgtaagcttttgtaattttaggctttaggactttgggccttcgtgtctccacaagtttacaaccactgtggccagcactatgttccctttatttgttctaaatttgttgatttcaagctttaaagattcccaggtggttccaatacccctacaaagtttgggaagcatagctctatataattcyccttagcacattaagaattcagccttctgggatttgtagggggttgggggttagacacccaggcatgtcttagcacaaagcccaccgttagtgacatggatcttacaatcacctctgcttgagca

SEQ ID NO: 636039 - DNA, 369 bp, Homo sapiens
cagtcacaactaagggctccctttaaaattgtttttttaaataaatgtgtttatagttgaccaaaatatctagaatacatgagcttgtttaatcaaataattyaatttaggcagcacatacaatgtaggaaaacactcttcaaatgcatctaatttgctattgctggaggcagttcactcaatgacttcaggagcacctttaaattaggttggcaaattatcaaaatagatttcacttttctagacatacaagtaaaatcaaactgaaaacaacccaacaggagaaaccacatggtatgtacttctacagaataaagcctagggtggtgcaatgaagcatgatctatgtcacagttaggaaggcagggg

SEQ ID NO: 636040 - DNA, 445 bp, Homo sapiens
aagttgaaaatcaacatcccttggatagtaagacaactttgaaacaatggctaaaatatcttcaaaatggtcctgcagatgtgttttaattcctctctcacccctaagctcacagaagctgaagtgcctaggacagagttgctcatctctctggaggtttcatgggtcaaggccgcgcttgaagtcagaagatccttcctgacctggccgcactgtgctcctgctgtttgcctyctcacttactccacctgagcccagtgagcacctcattggtcctcacacccacccagcctactcatgccccaaggcctgtgcacgtgtgccacacctgtcacctgttatccccaaatcgccttggcttattttctccccttactcagatgtcttctcagaaagaccttctgtggccatcaaaagtgaaatcatacccctcaggcccccacag

SEQ ID NO: 636041 - DNA, 436 bp, Homo sapiens
aaaccttctaccaggctggtcctgggctgggctctgctgccagcagctccagttggtacttgggttacattgtccctgctccaacgcatccttctagttaaatgataactgtaggccataatactcttgagtacatggttgacatttggscattttataggtccagcagatggctgtggattggccattggctctagttagaatgccagtcatttatccaggaaaatgtattttgtaggcccagacttccaatccataacttcttacttcaaacctgatccatgtgcagattgcaaacaacttgtcctgtcttggaatgttctattgtgattaaataaagcttgtttgggtgccccagctaaatgttagcatcttggggaagagacgatgacactagttttatttctcctccacagcaactggccagtgccaggta

SEQ ID NO: 636042 - DNA, 599 bp, Homo sapiens
aattgcatttgaacaagatgcagtctgtttaaggaagtttaagataaacttacaccacatttaattaattgctggacaactgtaggggagattaagctttttaaaagagcaaaatacatctaagaagcaggctactaaaaacacacaaaccaaacagctggagcaaatctgtttaaggcagatgtcacaatctgttcttcctgggtccctcggccctaggcacagtgctcagcagagtcggacttcagtcttacataagtttctctaaaataatgcttgccttgcctcttatttgaacttcaaatattcctgcaaaagctaccactccttygaaagcctcacatttgagaagggttttgcagttttaacacagcatttcgcctttgtcacacttcacatcatggggcaggcaggtcagtgtcatcatcccatttcactaaggtgccataaagaagggagctgctggctcagggtccagaggatcagaccaccaaagatttctcctctttcccacaggactctctcctctaagactcttcctggctctgcagggcgatgctggactgggttggtacagagcagggaggtggcctgttgca

SEQ ID NO: 636043 - DNA, 599 bp, Homo sapiens
aattgcatttgaacaagatgcagtctgtttaaggaagtttaagataaacttacaccacatttaattaattgctggacaactgtaggggagattaagctttttaaaagagcaaaatacatctaagaagcaggctactaaaaacacacaaaccaaacagctggagcaaatctgtttaaggcagatgtcacaatctgttcttcctgggtccctcggccctaggcacagtgctcagcagagtcggacttcagtcttacataagtttctctaaaataatgcttgccttgcctcttatttgaacttcaaatattcctgcaaaagctaccactccttcgaaagcctcacatttgagaagggttttgcagttttaacacagcatttcgcctttgwcacacttcacatcatggggcaggcaggtcagtgtcatcatcccatttcactaaggtgccataaagaagggagctgctggctcagggtccagaggatcagaccaccaaagatttctcctctttcccacaggactctctcctctaagactcttcctggctctgcagggcgatgctggactgggttggtacagagcagggaggtggcctgttgca

SEQ ID NO: 636044 - DNA, 599 bp, Homo sapiens
aattgcatttgaacaagatgcagtctgtttaaggaagtttaagataaacttacaccacatttaattaattgctggacaactgtaggggagattaagctttttaaaagagcaaaatacatctaagaagcaggctactaaaaacacacaaaccaaacagctggagcaaatctgtttaaggcagatgtcacaatctgttcttcctgggtccctcggccctaggcacagtgctcagcagagtcggacttcagtcttacataagtttctctaaaataatgcttgccttgcctcttatttgaacttcaaatattcctgcaaaagctaccactccttcgaaagcctcacatttgagaagggttttgcagttttaacacagcatttcgcctttgtcacacttcacatcatggggcaggcaggtcagtgtcatcatcccatttcactaaggtgccataaagaagggagctgctggctcagggtccagaggatcagaccaccaaagatttctcctctttcccacaggactctctcctctaagactcttcctggctctgcagggsgatgctggactgggttggtacagagcagggaggtggcctgttgca

SEQ ID NO: 636045 - DNA, 495 bp, Homo sapiens
accctcactcaggcctctcctcagcctcacaccatggtagagggacagtgggcaaccacagcrtcactcccaaacacatctcagtgctgactgcacacgggacgctgtcctaagcatgggaacagatacaatggcatgcttaatctgtccctggccagtcgaactaaggagacacatctgtacattcacatggaaacactatgacacagctcagtcaggcaccaagccaggagtgtgtgatgtgggtgctggtggtgatgggctggaaggaccccacggaggaggtgggatgaagggtgggtgctggtgatgtgggtgctgatggtggtggggctggaaggaccccacggaagaggtgggatgaagggcgggtgggactcttacatccaggttcaaaggagctgatccactgggaaaggaccaatggaagaggaccaggacgagtgacacccagggaagggtgctccatgaactcctagtggctgaagggaggct

SEQ ID NO: 636046 - DNA, 495 bp, Homo sapiens
accctcactcaggcctctcctcagcctcacaccatggtagagggacagtgggcaaccacagcgtcactcccaaacacatctcagtgctgactgcacacgggacgctgtcctaagcatgggaacagatacaatggcatgcttaatctgtccctggccagtcgaactaaggagacacatctgtacattcacatggaaacactatgacacagctcagtcaggcaccaagccaggagtgtgtgatgtgggtgctggtggtgatgggctggaaggaccccacggaggaggtgggatgaagggtgggtgctgrtgatgtgggtgctgatggtggtggggctggaaggaccccacggaagaggtgggatgaagggcgggtgggactcttacatccaggttcaaaggagctgatccactgggaaaggaccaatggaagaggaccaggacgagtgacacccagggaagggtgctccatgaactcctagtggctgaagggaggct

SEQ ID NO: 636047 - DNA, 495 bp, Homo sapiens
accctcactcaggcctctcctcagcctcacaccatggtagagggacagtgggcaaccacagcgtcactcccaaacacatctcagtgctgactgcacacgggacgctgtcctaagcatgggaacagatacaatggcatgcttaatctgtccctggccagtcgaactaaggagacacatctgtacattcacatggaaacactatgacacagctcagtcaggcaccaagccaggagtgtgtgatgtgggtgctggtggtgatgggctggaaggaccccacggaggaggtgggatgaagggtgggtgctggtgatgtgggtgctgatggtggtggggctggaaggaccccacrgaagaggtgggatgaagggcgggtgggactcttacatccaggttcaaaggagctgatccactgggaaaggaccaatggaagaggaccaggacgagtgacacccagggaagggtgctccatgaactcctagtggctgaagggaggct

SEQ ID NO: 636048 - DNA, 568 bp, Homo sapiens
cagcgaaaccccgtctccaccaaaaaaatacgaaaaccagtcaggcgtggcggcgcgtgcctgcaatcgcaggcactcagcaggctgaggcaggagaatcaggcagggaggttgcmgtgagccgagatggcagcagtacagtccagcttcagctaggcatcagagggagaccgtggggagagggggaagaggagggggagagggagagctgtggattttttatagattccctttgtcagattgagaaagttgccatctgttcctagtttgttcagtgtttttgtcatgaaagggtgttgtattttgtcaaatactttttctgttgactttttgtgttgaaatccacattggatttcattgtttcctaagaaataagtaaaactcatttattccaagtgatatttaataatattaaactcaattagaaaagcagctttgtggtatttgtcaaatgttattcgaagcatattctgttctctcttaaccataaaggcctaaccccaaatatttatctgttaataatttacacgagatgatcgtgtaaattttttttattctgttgatatgt

SEQ ID NO: 636049 - DNA, 606 bp, Homo sapiens
tgccatctgttcctagtttgttcagtgtttttgtcatgaaagggtgttgtattttgtcaaatactttttctgttgactttttgtgttgaaatccacattggatttcattgtttcctaagaaataagtaaaactcatttattccaagtgatatttaataatattaaactcaattagaaaagcagctttgtggtatttgtcaaatgttattcgaagcatattctgttctytcttaaccataaaggcctaaccccaaatatttatctgttaataatttacacgagatgatcgtgtaaattttttttattctgttgatatgtgatatttgacaaaccttggcaaaagaatatccattggccaagaatttttttaatgacattaatttgtaaaataagataatttcatctcagtcaacagatgaaacatttagttagtagattaattgatgttatactgagttcctcccagttccatctgcattcaaaacccttaacttataaatgtgccgaatttgtcaagttttgaaaaacttgaaacctacacaaaagttaaaagaatagtacaatgaacatcctaaaaccccgtaccttgatagaccaatgttttac

SEQ ID NO: 636050 - DNA, 367 bp, Homo sapiens
ttctaattgtatctcacactgtgcactggcttcctatgtactgccatattcctaatactactagtccattagttcaaactttgattaactggattattttagcctttagttaatctagtatttttattttcaagggtgtagctgatggtgctggagctgttatcatagctagtgaagatgctgttaagaaacataacttcacaccactggcaagaattgtgggctactttgtatctggatgtgatccctctatcatgggtattggtaagtttatagtagaacaaactggttctataatatttctggaggtaagtcttctttggcattcagagtcctraaaaagtggccaacaccaaggtcacctgta

SEQ ID NO: 636051 - DNA, 550 bp, Homo sapiens
tatgagccatagtttaaaaacctctgaactaacaaaattatcattctgtcccagatttaaaccaaattgtggtgattatagcatagactctgcagttctggttgagagggcaatttaattagaagcctctatcttcaggctcttataactccaccccataccccttccccmaaaataattctttaggatgaaatttctaatgctgtctctcagcctaaaggtatattttttttgtagaaagttgagtaaggtttaatttaggctatttttaaaacacaagaaaaagggcaaaaaaagggggatttcaccacttaaaaaatcactcaaacacttttttttttttactattttatttcccaaatgcaaactgcttcctttagaactttcaagttgaccttcttagtgcctttggcatgtttgaagaaatttggttgagctgtaatgaagttgttcacaaaatgtgaattgcccgtaagaagatttatttccactttttaaaataaacttgcatggaaatggtacatgggaattataataaaaatcagatcta

SEQ ID NO: 636052 - DNA, 550 bp, Homo sapiens
tatgagccatagtttaaaaacctctgaactaacaaaattatcattctgtcccagatttaaaccaaattgtggtgattatagcatagactctgcagttctggttgagagggcaatttaattagaagcctctatcttcaggctcttataactccaccccataccccttcccccaaaataattctttaggatgaaatttctaatgctgtctctcagcctaaaggtatattttttttgtagaaagttgagtaaggtttaatttaggctatttttaaaacacaagaaaaagggcaaaaaaagggggatttcaccacttaaraaatcactcaaacacttttttttttttactattttatttcccaaatgcaaactgcttcctttagaactttcaagttgaccttcttagtgcctttggcatgtttgaagaaatttggttgagctgtaatgaagttgttcacaaaatgtgaattgcccgtaagaagatttatttccactttttaaaataaacttgcatggaaatggtacatgggaattataataaaaatcagatcta

SEQ ID NO: 636053 - DNA, 550 bp, Homo sapiens
tatgagccatagtttaaaaacctctgaactaacaaaattatcattctgtcccagatttaaaccaaattgtggtgattatagcatagactctgcagttctggttgagagggcaatttaattagaagcctctatcttcaggctcttataactccaccccataccccttcccccaaaataattctttaggatgaaatttctaatgctgtctctcagcctaaaggtatattttttttgtagaaagttgagtaaggtttaatttaggctatttttaaaacacaagaaaaagggcaaaaaaagggggatttcaccacttaaaaaatcactcaaacacttttttttttttactattttatttcccaaatgcaaactgcttcctttagaactttcaagttgaccttcttagtgcctttggcatgtttgaagaaatttggttgagctgtaatgaagttgttcacaaaatgtgaattgcccgtaagaagatttatttccactttttaaaakaaacttgcatggaaatggtacatgggaattataataaaaatcagatcta

SEQ ID NO: 636054 - DNA, 510 bp, Homo sapiens
aaaatgtccccagggcatatcagagaacttcatggcagccattcccatcacaggcccagaggcctaagagggaaaaatggtttkgtgggcaagacccagggaccccttgctctgtgcagcctcaggacatggtgacctgcatcccagctgcttcagctccagccatggctaaaaggagccaaggcaaaactcaggcttcagagggtgcaagtcccaagccttggtggcttccatgtggtgttaagcctgtgggtacacagaagtcaagaactgaggtctgggaacctccacctagatttcagaggacatacggaaatgcctggatgtccaggcagaagtttgctgcagtggcggagccttcatggagaatttccactagggcagtgtgggagggagatgtggggtcgagcccctacgaggagtgcccactggggcactggctagtggaactgtgagaagaggaccaccatccttcagacctcagaatggcagatctactgacagcttgca

SEQ ID NO: 636055 - DNA, 510 bp, Homo sapiens
aaaatgtccccagggcatatcagagaacttcatggcagccattcccatcacaggcccagaggcctaagagggaaaaatggtttggtgggcaagacccagggaccccttgctctgtgcagcctcaggacatggtgacctgcatcccagctgcttcagctccagccatggctaaaaggagccaaggcaaaactcaggcttcagagggtgcaagtcccaagccttggyggcttccatgtggtgttaagcctgtgggtacacagaagtcaagaactgaggtctgggaacctccacctagatttcagaggacatacggaaatgcctggatgtccaggcagaagtttgctgcagtggcggagccttcatggagaatttccactagggcagtgtgggagggagatgtggggtcgagcccctacgaggagtgcccactggggcactggctagtggaactgtgagaagaggaccaccatccttcagacctcagaatggcagatctactgacagcttgca

SEQ ID NO: 636056 - DNA, 507 bp, Homo sapiens
agattctacttttctaaagagtggctttctcagtcagcttggacactgaaagaactcagtagaggggtgaggaaaaataaagctcatgagaatactctactagatctacacaatattttctttagagtaagagatgatgctctggaggtttgcattgctaattataatacacagtttgagaccttgaaattgatctagtatataagcaaacgaaagcctcctgctatctggggtgattcatcaaaaccagaaagtgtgccatgtcaccccatccccccgaaaaggaaactgctggaaagcatgttatctttatagagtcatttggttcagcaaatactttcccgtcagtcagcgtcagccacagrcaaaagtgtgaaataaaaaacgtcggatcttcactatgagcaacatccctcactcaagcctctttttggttgttttggtttgggttgggttggttttttgtagaaacaggtctcactatgttgcccaggctggtctcgaatt

SEQ ID NO: 636057 - DNA, 631 bp, Homo sapiens
aggttttatgactctagttgagttacaatagtaattctgccaccttaacttgtggtgttacctgatccttagtttttttagccatacaatatgaatgaaaatatctattttgaagggttattttgaggttaaatgggataatatatggaaagtgtctagaactgagcctagcacacagtcagttctcaataaatgatagcaactattatcattttggtttatagtagctgaataagtcacatggtctctagtgtttaacagcatagaagaaggatacctttgcaataggagtactaatttatcaacatctctgtggctaatctttttaaaagataataactaaatcttgttttattatttcatctagaaattacatggacatctcactttgtcacatgtaaaataatggggtgaaatgagattttctccaaggtaaatcctagctatgaaaaatcatatgtttgtgatgctgcttactagtgaacacaccttcttattgttccattgaggatccttgatttggacaagactgcctcacacatataaaacaatttaattaagcattatgtataattgctcgtgtaagaagwggtacttgactagaattctgccatgaacctctttcttccta

SEQ ID NO: 636058 - DNA, 511 bp, Homo sapiens
atcagttaaaatgtgcactgggagatggggagcaaatcaacaggactattcggtatggacgtttaaatgatttcaacattacttttactaataacattaataatagtagtgataagaaacaatgatgactggatggtacaaaacttcattgtgtaaagaccattggttatgagagtcagacatgaaaatgtgaaattaaatcctcaatctgytcctctaaggttgctttgtacataatgaatatcttaatttttaaaaaaggaaaaagaaattgattgtaccaaacgtacagcagctcctgctgagaaaacaaaggttggtgtgtctatttcttttctaattgtagatgtccctaaacaaaacaaagcctctgtgaaagaggcttgcagataatggtagtaactcatcagccttttatcttgtttctttgtgtctgaagattttcacagataaagcattattatactcctattattcattatttccccaaggcaagggcaagcattactgc

SEQ ID NO: 636059 - DNA, 511 bp, Homo sapiens
atcagttaaaatgtgcactgggagatggggagcaaatcaacaggactattcggtatggacgtttaaatgatttcaacattacttttactaataacattaataatagtagtgataagaaacaatgatgactggatggtacaaaacttcattgtgtaaagaccattggttatgagagtcagacatgaaaatgtgaaattaaatcctcaatctgcycctctaaggttgctttgtacataatgaatatcttaatttttaaaaaaggaaaaagaaattgattgtaccaaacgtacagcagctcctgctgagaaaacaaaggttggtgtgtctatttcttttctaattgtagatgtccctaaacaaaacaaagcctctgtgaaagaggcttgcagataatggtagtaactcatcagccttttatcttgtttctttgtgtctgaagattttcacagataaagcattattatactcctattattcattatttccccaaggcaagggcaagcattactgc

SEQ ID NO: 636060 - DNA, 580 bp, Homo sapiens
agaaaactttaaatattcatgtagacatttattttaaaagaactataaacccattacatgctaaggtacataacacatagacagcatttttattccatttaaaaactatattttccaaarttaaaaatttatgagaagagtaacattactttgcatttttgcaagtctctttaacacctatgttaagaaaaggcagctaggttctcatatccacttctgcattcgctttgttgcaatatgttgttttagtggtgtagctaaagaaaattcagcttcacatgactacgcagttggaaaagggatgacctcacacataccctaagagggtccctaagtgaactgtggcactagtgagctccggaagtcataagggacctccagagcacccccctccaccccccaaagcacacttgagaactgtggcactagcagactccggaagtcataaaggagagtgactggggctgcgttctctctcccaccatctctcctccgagcactgtgctcttagatctccagcctactctgctctgccctcttccttctcaatgtaagtagtgaggaaaggtcacatctgaaa

SEQ ID NO: 636061 - DNA, 581 bp, Homo sapiens
ctaggaagctccaaaatttcccacattttcctgttgtcttcttctgagccctccaaactcttccagcctctgcctgttacctagttgcaaagtcactttcatatttcaggtatccttatagcagcaccccactctactggtaccaatttactctattagtctgttcttatgctgctataaagaattgtctaagactgggtaatttataaaggaaagaggtttaattgactcacagttctgcagggctggggaggcctcaggaaacttacaattatggtggaaagggaagcaaacatgtccttcttcacatggtggcagaaaggagaagtgtcaagcaaagggggaaactcccttataaaaccatcagatgtcatgagaactsactttcatgagaacagcagcatgggggtaacctgcccccatgattcaattacatcctactgagtccctcccatgacacgtgtgtatcgtgggtactacaattcaagatgagatttgggtggggacacagtcaaagcatatcagccaaaatggggatacctcttaaggaaagaggaatttattcattatttgatagacat

SEQ ID NO: 636062 - DNA, 412 bp, Homo sapiens
cacaagcagggtggataggaacaggaaagggggctgaatttgtgtttctcctccccaaactcctgtttctgccagactgatttcttacttccctttttaaaatcgtttttacctgcagttcatctcactgtcccagcctggcttgctgtgtgtgtatgtaaggcctgtttataccctcacctcctccagraagctttcccaacccactggccactggggccttgtactttgttcaagttccctgccccgctgtcatttaccacgtttcccccaagattccaaacatctgggggcagagcctttgcctcccttgtagcgccacggtgcctcagaaccaggtgctgattaattggttgcttgtaacccacagcatagagtgtaatattttacttgtatagtttggattttttaa

SEQ ID NO: 636063 - DNA, 412 bp, Homo sapiens
tttataaatgaaatagtttttcacaaaggagattttggtaagtttcagtggcaaaatgagagattmtattgtctgacaggtaactagaatagtatcaccaccatctaatcagaaaagcatatataagtgtagggaggatatcaagatcgcagttgcagatggaagttttccaaaattctaaaactttcacttaagagcttcaagtgaaggtctcaaagcagcaaccagttgttttccttgaggtgataagcatccttcattcaaggaaacatctgccagttacccaagactcaatgatcatagttcgtctgtcacttgctctttcagataacaatggcgttccatgaaaaagtggctagtgcagctcacaactcaaccacacaagtacttttccttgagattatcttcatag

SEQ ID NO: 636064 - DNA, 600 bp, Homo sapiens
tccaacaccatgcctggctaattagtttttagtgtttttttttgtttgtttttttgtttttttgtagagatgagattttgccatgtcgtccaaactggtcttgaacaccagacctcaagtgatcctcctgcctgagcctcccaaagtgctggaattacaagtttgaaccagcatgtgtggctgagcatttcttaattctgatcacccataaatacaatggtgtctgtgatctgaattgtgttggaaagaatttagggatttgggaagaagtcaatgaagatgattatttctgggccatcactgtaactcactgtagtatttttctatttgccccatctccaccttgcttttcttttcttttctttytttttttttttttttttttgacagagtcttgctctgttgcccaggatggagtgcagtgctccgatctcggctcactgcaacctcagcttcctgggttcaagcgatctcctgcctcagcctcttgagtagctgggaccacagacatgcaccaccacacccggctaattccaccttttatcttagtaagcagtaatatcaatgtccttctataaatatttttgctcttctataaat

SEQ ID NO: 636065 - DNA, 622 bp, Homo sapiens
ggtgatgtctatgatatgttaagtaaaacaaacaaaaacaatttgagtataatacatctgacttctctaaatattccactaggatatcagctccataagtgcagacctgtgtctgttttgtacatgtttttgtttttagagatggggtctcattctgtttcccaggctatagtgcagtggtatgatcatggctcactatagcctcaaccttccaggctcaagcaatcctcccacctcagcctccatagtattactaggaaactgggactataggcacacaccatcatgcctggctaatttttaaatcttttagatagatgagatggcactatgttgcccaggctsatctcaaacttctggactcaagagatcctcccgcctcagcctcccaaagtgctaggattacaggcatgagccaccatgcctggcctttgttcaccgttatatccccagtacctagaacattgtgtcccctggtatactctcaataaatatttgttgagctgggcacagtggtacatacctgtagtcccagctactggggaagctgaggcaggaggatttcttgggtgcaggagttcaaggccagcaagacctcatctctagataaataaatacatac

SEQ ID NO: 636066 - DNA, 594 bp, Homo sapiens
aactgcattcaaaggattattttaaaccttaaaaatttamaatttaaaaagctaacaggtaaacttttaaaatttatttacaagagtagtggtgaatgtagttgaaaactaaatcaaacaattgagaaactttaagaatttgagaccaggtgcagtggctcacacctgtaatcccagcactttgggaggctgaggtgggaagattgcttgaggtcaggagtttgaaaccagtctgggcaacatagtgagaccccaactctacaaacaaatttttaaaaattagccaggtatggtggtgcacacctgtagtcccagctacttgggaggctaaggcagggggatcacttgagtctgggagtttgaggctgcagtgaaccaagatcacaccactgcactccagcctggatgacagagtaagaccctgtctcaaaaagtaaatgaatttaaaaaataaaagaattcaaaaacttcaaggagtaacatgactgttcaatacgggaaattaccaatcaatgaaaatatgacactgcatgggcttaaaagccacacatgagaaggaaaaagaggtataaacacatcctccaatatgtgatc

SEQ ID NO: 636067 - DNA, 662 bp, Homo sapiens
aaatgtatttatgttagcctgtcgagctctgttgagcacttccgtcaaataatggaattatacaaccccccctataaaagataccaggtggagaatagcaaagagaagggaggaggaggtgaggtgtgttcagaaggttgatcaaataaaactgaatggtaggtccttggctacaccaaatgtgggttttgttttcttttaattttgccattaaaaaaaatgcggtgtcmctccttcaatctttctacaattctgcatggttgaacatttgaaatgagtttgtgtatcacccctcaggcgctgattcagacttgattgggggcaagcagactgcatgtgcttatttttatccacgtcatttgggacgttatgtcgccaaaggaaccaaaaatgtgctgctctattgccaaattatcacctatccttttatcagacagggcgatgatcctcaacaagttgtgcgaccttagtgtaacagcaatgtcaggtcaacttgagaaagtgaagagagagccctagacacaaataaaaagaaacaaccaacaatccttataattatcatcatctgctgcttttccctcttttggcaaagaaacactccatccatttgcagaaatcgcccgcggaaacgttacatcaaaactaatcacaacgattaaaat

SEQ ID NO: 636068 - DNA, 563 bp, Homo sapiens
accactggcccaggcacaatctccctgaacaaagacctagagaggaagaactgatgaggagtgggggaggtcagaaccagagtaacaatctggggaaatgtatttatgttagcctgtcgagctctgttgagcacttccgtcaaataatggaattatacaaccccccctataaaagataccaggtggagaatagcaaagagaagggaggaggaggtgaggtgtgttcagaaggttgatcaaataaaactgaatggtaggtccttggctacaccaaatgtgggttttgttttcttttaattttgccattaaaaaaaatgcggtgtccctccttcaatctttctacaattctgcatggttgaacatttgaaatgagtttgtgtatcacccctcaggcgctgattcagacttgattggggscaagcagactgcatgtgcttatttttatccacgtcatttgggacgttatgtcgccaaaggaaccaaaaatgtgctgctctattgccaaattatcacctatccttttatcagacagggcgatgatcctcaacaagttgtgcgacctt

SEQ ID NO: 636069 - DNA, 563 bp, Homo sapiens
accactggcccaggcacaatctccctgaacaaagacctagagaggaagaactgatgaggagtgggggaggtcagaaccagagtaacaatctggggaaatgtatttatgttagcctgtcgagctctgttgagcacttccgtcaaataatggaattatacaaccccccctataaaagataccaggtggagaatagcaaagagaagggaggaggaggtgaggtgtgttcagaaggttgatcaaataaaactgaatggtaggtccttggctacaccaaatgtgggttttgttttcttttaattttgccattaaaaaaaatgcggtgtccctccttcaatctttctacaattctgcatggttgaacatttgaaatgagtttgtgtatcacccctcaggcgctgattcagacttgattgggggmaagcagactgcatgtgcttatttttatccacgtcatttgggacgttatgtcgccaaaggaaccaaaaatgtgctgctctattgccaaattatcacctatccttttatcagacagggcgatgatcctcaacaagttgtgcgacctt

SEQ ID NO: 636070 - DNA, 649 bp, Homo sapiens
ggtggggacacagcgaaaccatatcacttattttstaaggaatgtactgtttattactagtcttcagtactagagaaaaaactttgaccatcatatagcataagatagccctatgtgcgtctggggaaatattacttctgcaatctctaacatgcaaaaggcagaggaacattactgtgtctcttgttgcacttccagaattttccctccaatcccgagttaccagcagttagcattcattaagaagtcaaggccaggcatggtggcttatccctataatcccagcactttgggagtctgaggcaggtgcctcacttgagcccaggagtgtaagaccaacatgggcaacatggcaaaaccctatctgtacaaagtggggaggatcacctgagcctgaggaggttgaggctgcagtgagccatgatcgtgccactacactccaacctggacaacaaagtgagaccctatctaaaaaagaaagaaagtcaatacctggaacaagtttctgagggctaactccagtccactaatgtaaataataataatataaattatttccattttatgtataggaaaactaatgttaaagaaggttaaataatttttccaaaaaattcaataaccagtgagaaacaaagccaggattcaa

SEQ ID NO: 636071 - DNA, 434 bp, Homo sapiens
gcttaataggcaaatattttcatcaaatgaaggttaaatttacttgggtacatggtgatctaagagctcagaatgaatggagctatgtcacctagttaggcagtgtgggctcaggtaggatcctagctctagtattgatttcttgttgtaattctttgggtaagcttctactccttctgcatctcaattttgttaattttcaatggggccaataataacagtcataagattattgtaaggatttagtaaaataatatgtgtcaagcaacaagcatagttcctagcatamcttggtgatcaatggataactagttctttccccttttacctccagttagattttagatatatacaacaacctaggtttataacgttttttagaagtccatacttacattatagtataatctgtaatcaacttgaatataactatg

SEQ ID NO: 636072 - DNA, 564 bp, Homo sapiens
ttcatagccaccctttggggtgagaaggtttcacaatgcccgcagagccacacagcctgtccccagggaaggccaaggggccacagggtgggggagagaggcattctttctgttcctaggcagggatcaagtgcccttcccctgccagtctgcaaacaaaggacccaacctcaaagctcttgccccagcgcgtgacctcgggggccaaaggcaaaacattttatctctgggtcctagtgacataagckcctcaggctctgcaattgtagtttatgatgtgactagaaacctttgatggaatgactattgccttctatttctctgcccagccatttattattctgtatatttttgagagctgtgggaaactttcataaccaaagcctgagccaggctaaaacttgttctatttggaatctctaatgaagtcaaaacatggcctggattttctgaaaggctcctctggctgcctgcaacagccccagggcacaatcagacaaggatggagaaggcctgggagcagattttgttaccaagaataggacagaacaatgtttgcctcca

SEQ ID NO: 636073 - DNA, 351 bp, Homo sapiens
cattcccttatttctcataaacttgttgaggggctatgtacctagcacctactagtcaacatcacatgattgatagagtytggccttgaacaccagcataagaaaatagatgtgaggaggctggttaatgacaatgatgacaacaacagtgataatgacgatgatgccagtgctgagcccttactgtatgccaagcactgtgcaccaaatacacttattaatttaacttttgacacattcttatgagttattattaagccgagactgactgaggtttaacatatttgcccacagtcatgcagctaggaagaggtggaaactagcgtcaaaggtcatgctctcagccacaag

SEQ ID NO: 636074 - DNA, 351 bp, Homo sapiens
cattcccttatttctcataaacttgttgaggggctatgtacctagcacctactagtcaacatcacatgattgatagagtctggccttgaacaccagcataagaaaatagatgtgaggaggctggttaatgacaatgaygacaacaacagtgataatgacgatgatgccagtgctgagcccttactgtatgccaagcactgtgcaccaaatacacttattaatttaacttttgacacattcttatgagttattattaagccgagactgactgaggtttaacatatttgcccacagtcatgcagctaggaagaggtggaaactagcgtcaaaggtcatgctctcagccacaag

SEQ ID NO: 636075 - DNA, 623 bp, Homo sapiens
ttagacaaaccaaataacaaagctgcattatgaacctgaggttacagatggagagcactgttaaaggtgtggcaggagacagtcttggtgttgaggaaaaagaaaggcactctggcccaagaaattgttcacctgagctctgatggggtgtctgcacaaaggaaaatggtgatctggtaaataatcggttaagttgattaaggcagccaaccaaatgggataatttaatacaaaactaargaaagccttttggctaggatttcagtaagcaaggaatttcaaattatattgcaatgttggacccaaacatttttattgccattatctgctagaaagttagacataggctggaaaacacacttaggaacaatgatttgttttttgtttgtttgtttgtttgtttgtattgtttttctctctgcacatcactgtgaaatgactcctgaaagaccatccatacttatttagaaaataagcctgggctttgataactagacaatttgactttctaagtgtttagacaagccaggtatcaggtgtgtcctgctatgagaacatccaatttaaataaacatcaagggttcagagtagacaaatcagaaggtaattgtttactttacaaa

SEQ ID NO: 636076 - DNA, 536 bp, Homo sapiens
attcagttgtattttataattgggtggtggcagtaatgagaaagaagagtatgagaaatgatgtttaggtgggctgcagtctctgtctgtaggcaatcattgtgaagcaggaaggaaggggatgggaatagctagagagaattggcttaaggggaaatagcccaaatctcagttaaaacaarataagggtcgaagagatagtatctactgataaaggtgtgttcccttgcactgccactaatgcgcgggagcattaaatgtaagggagattttctggggttgttattccctgcagtctcaggaagagaaagtatcccagtcacagaggaaaccttcaactacagacaaaccacagtccccaaatcctctcaagctataaggtttcaagcacaaaattcttgagcaaacacaccaggtgcctctctgcattgattgtgatttttggtgctaaacagagagcattgcagatgatgctgaaggtcaaatgaaggtggagaaaccgcaaaacagcatgacacaccacccaactgcaagct

SEQ ID NO: 636077 - DNA, 437 bp, Homo sapiens
ggtgaagttggaaataagaaatgtatggtgatgctcaggacctatcacaggaatggggtagggggtagtgaggaagccccttgtgccaggcctgaaatcattcatcaagccctaaatttagactttcaacttaatgtctaaatagagttatacatcgaggaaaagggtctgtatgagtcagagttctccagagatacagaatcaattagatgaagagaggagagagataaagagcagaagagtggggagaggaaaagtgggagagggagaggggaggagttgggggagaggaaaatggagagagagatatttattctaagggattggctcacataattatgagggctgctaagtcccaaatctgcmggtctggcacgtgggctggaagttgttgatgttgcaccccacagtccaccaaccgcctggacatagcaatc

SEQ ID NO: 636078 - DNA, 437 bp, Homo sapiens
ggtgaagttggaaataagaaatgtatggtgatgctcaggacctatcacaggaatggggtagggggtagtgaggaagccccttgtgccaggcctgaaatcattcatcaagccctaaatttagactttcaacttaatgtctaaatagagttatacatcgaggaaaagggtctgtatgagtcagagttctccagagatacagaatcaattagatgaagagaggagagagataaagagcagaagagtggggagaggaaaagtgggagagggagaggggaggagttgggggagaggaaaatggagagagagatatttattctaagggattggctcacataattatgagggctgctaagtcccaaatctgccggtctggcacgtgggctggaagttgttgatgttgcascccacagtccaccaaccgcctggacatagcaatc

SEQ ID NO: 636079 - DNA, 528 bp, Homo sapiens
aatcagccattaaaaaatattttgggaatatttctcagaagtctcatccccatatttttgttcttaaaacatctcaccacaaactcaaccacacctatggtttgcaaactttgggaaatgtcagtatatgccattatcatggttattagtaccattatttgttaaagccctttgaaggcaatttatgtgacttatatrtatttggtattttaatttggacattctctagttctatgcaaagatcaaaactaggcagcttcattttatagaattgacaccttttatatgtctatggggactgcttggtgtctataaattatgtatatgtgttggactgaaatcaaacttaaaatcttccatatttcaagtgtttttattctgagcagtaggtacaaaaaataatgacatagttgtgtctaattctgtatagttcagcaccctccacaggctgtcaatctctgatttgatctacttttaccagatttaacagatccttgaatttactttactgtatatacttccttcttg

SEQ ID NO: 636080 - DNA, 591 bp, Homo sapiens
ccctccctttgccacaactgttctgtcctcctgtgatggcaacactgctttcccmtgtggtctggggcaaagaactcagtgtggcctccgctctgccactaacaggtagtgttactttgggcaagacacagtctctctgtacctcattttcctcatttactcaatgagagctcaacatatctgcccaactatgaagcagtggtggctgtaatgactatgttacaaaaacaaacaaacaaacaaacaaaaaaacaagaagaatgcttttagaaaaagctaagagacactatacaaagaagatattgccatcatctttccctgttcacatatcccaaggggatatgtgaggccagctggccttctgtacttcctctccccaacagtaaagaaaacccaccgtcaaatgcatctctcaatccacctcactgcattcactattaggtgactaggaatggaaaaccagccctccttctattaaatcttggaggaccatagcaaggacaattaacatagaaaaatcaccaaagacatagaaggtcacagtgctgaaactgaagttcatgctttcctctcccaataggattagcagac

SEQ ID NO: 636081 - DNA, 591 bp, Homo sapiens
ccctccctttgccacaactgttctgtcctcctgtgatggcaacactgctttcccatgtggtctggggcaaagaactcagtgtggcctccgctctgccactaacaggtagtgttactttgggcaagacacagtctctctgtacctcattttcctcatttactcaatgagagctcaacatatctgcccaactatraagcagtggtggctgtaatgactatgttacaaaaacaaacaaacaaacaaacaaaaaaacaagaagaatgcttttagaaaaagctaagagacactatacaaagaagatattgccatcatctttccctgttcacatatcccaaggggatatgtgaggccagctggccttctgtacttcctctccccaacagtaaagaaaacccaccgtcaaatgcatctctcaatccacctcactgcattcactattaggtgactaggaatggaaaaccagccctccttctattaaatcttggaggaccatagcaaggacaattaacatagaaaaatcaccaaagacatagaaggtcacagtgctgaaactgaagttcatgctttcctctcccaataggattagcagac

SEQ ID NO: 636082 - DNA, 591 bp, Homo sapiens
ccctccctttgccacaactgttctgtcctcctgtgatggcaacactgctttcccatgtggtctggggcaaagaactcagtgtggcctccgctctgccactaacaggtagtgttactttgggcaagacacagtctctctgtacctcattttcctcatttactcaatgagagctcaacatatctgcccaactatgaagcagtggtggctgtaatgactatgttacaaaaacaaacaaacaaacaaacaaaaaaacaagaagaatgcttttagaaaaagctaagagacactatacaaagaagatattgccatcatctttccctgttcacatatcccaaggggatatgtgaggccagctggccttctgtacttcctctccccaacagtaaagaaaacccaccgtcaaatgcatctctcaatccrcctcactgcattcactattaggtgactaggaatggaaaaccagccctccttctattaaatcttggaggaccatagcaaggacaattaacatagaaaaatcaccaaagacatagaaggtcacagtgctgaaactgaagttcatgctttcctctcccaataggattagcagac

SEQ ID NO: 636083 - DNA, 591 bp, Homo sapiens
ccctccctttgccacaactgttctgtcctcctgtgatggcaacactgctttcccatgtggtctggggcaaagaactcagtgtggcctccgctctgccactaacaggtagtgttactttgggcaagacacagtctctctgtacctcattttcctcatttactcaatgagagctcaacatatctgcccaactatgaagcagtggtggctgtaatgactatgttacaaaaacaaacaaacaaacaaacaaaaaaacaagaagaatgcttttagaaaaagctaagagacactatacaaagaagatattgccatcatctttccctgttcacatatcccaaggggatatgtgaggccagctggccttctgtacttcctctccccaacagtaaagaaaacccaccgtcaaatgcatctctcaatccacctcactgcwttcactattaggtgactaggaatggaaaaccagccctccttctattaaatcttggaggaccatagcaaggacaattaacatagaaaaatcaccaaagacatagaaggtcacagtgctgaaactgaagttcatgctttcctctcccaataggattagcagac

SEQ ID NO: 636084 - DNA, 610 bp, Homo sapiens
acatttggcaatgtctaaaaacatttttagctgtcacaatgatgggatgcttgtagcatctagtgggtagaggccaaggatgcttctcaacatcctatgatgcacaggacagcaccccttgccccagcaaagaattctctractcaatatgtcagtgctgctgaggctgagcaactccgattacaggaaatgggtggagagacacagaaacttccttctaggatgatgtaactaataactgtaatcacataaatttatatactctcatgaataattcctattcagattctttcatcaggatacttatttttatttttttgagagatagtcttcctctgtcatccaggctggagtgcagtgacacaatcatagctcactgcagcctcaaactcctgggctcaagcaattctcccacctcagcctctggagtagctgggactataggcatgcaccaccatgcccagctaattttaaaattttttgtagaggttgggtctcgctatattgcccaggccgctctcaaactccttgcctcaagtgatcctcctgccttggcctctcaaagcactgccattacaggcatgagccaccacacgaggccctcaccaga

SEQ ID NO: 636085 - DNA, 610 bp, Homo sapiens
acatttggcaatgtctaaaaacatttttagctgtcacaatgatgggatgcttgtagcatctagtgggtagaggccaaggatgcttctcaacatcctatgatgcacaggacagcaccccttgccccagcaaagaattctctaactcaatatgtcagtgctgctgaggctgagcaactccgattacaggaaatgggtggagagacacagaaacttccttctaggatgatgtaactaataactgtaatcacataaatttwtatactctcatgaataattcctattcagattctttcatcaggatacttatttttatttttttgagagatagtcttcctctgtcatccaggctggagtgcagtgacacaatcatagctcactgcagcctcaaactcctgggctcaagcaattctcccacctcagcctctggagtagctgggactataggcatgcaccaccatgcccagctaattttaaaattttttgtagaggttgggtctcgctatattgcccaggccgctctcaaactccttgcctcaagtgatcctcctgccttggcctctcaaagcactgccattacaggcatgagccaccacacgaggccctcaccaga

SEQ ID NO: 636086 - DNA, 513 bp, Homo sapiens
ctgcatagaaaactggtaacattctgtctccttaaccttttccacacagagcccatctgaatggaagccaagctttattacatgacccgagtgtagaaggcagttcagatattcagtctgagagtcaaaattgtcaaagtaagttatttcacagaaagaaattatactaggcccgaaacagaaatcatgrggaaggaaagatgggaataaggtgcttaaaaaatttaaaaatacacctcctctggccagagggaacagcatgcgtgaaggcccagagcagaagagactgcagagctgagtgagaggatgttttttaaaggtttaaggtagtatttcaggcaagaaaagaggatctggaacaaggtgaataaggaagagaaaagggagaccagggtgaggaacgtgcatggagacttcatgggactttgacgtcagttagacactgggaagtgaaggagacggaagaatcaagggttaaaccatgctgtatggtggccactagcacctcggggt

SEQ ID NO: 636087 - DNA, 513 bp, Homo sapiens
ctgcatagaaaactggtaacattctgtctccttaaccttttccacacagagcccatctgaatggaagccaagctttattacatgacccgagtgtagaaggcagttcagatattcagtctgagagtcaaaattgtcaaagtaagttatttcacagaaagaaattatactaggcccgaaacagaaatcatggggaaggaaagatgggaataaggtgcttaaaaaatttaaaaatacacctcctctggccagagggaacagcatgcgtgaaggcccagagcagaagagactgcagagctgagtgagaggatgttttttraaggtttaaggtagtatttcaggcaagaaaagaggatctggaacaaggtgaataaggaagagaaaagggagaccagggtgaggaacgtgcatggagacttcatgggactttgacgtcagttagacactgggaagtgaaggagacggaagaatcaagggttaaaccatgctgtatggtggccactagcacctcggggt

SEQ ID NO: 636088 - DNA, 505 bp, Homo sapiens
agttgtggcagctgctctgaaggtcacttgttttactgtggcctggccaagtagagtaaggatgggtcacagtgagctcactggtctcttcaggctgtgctctgaatgatgacagcaataccttggccacctccaatgcaagctgatccaacggcatattttccacctcgacgcctgaaaaagaaagcagtgactgaaatctactctaataaaaaatcagattaatgaaatagaactaataacatcacatctgcattactcatccttattcagctcatctgctcaatcttttccccagtcctcaattttggtataattacaacaggcaacagactttggaaagctgaaagtttttaatcaaaaaaaacaaaaaacaaaraacaaaaacaaacaccagaagagggaggcaaactaaaaaggagatgagtggatttagggttatagagtagatttagggtatatgaaacacatacagaagcttgtgtgtgttacgggaaaggagtga

SEQ ID NO: 636089 - DNA, 546 bp, Homo sapiens
cccatttgaaaactttttacaaagctatgggaatcaaaacagtatggtactggtatacggacagacatacagaccmatagaatataagggcccagaaaaaaaaaaaaccctcatatttttggtcaattgatttttgacaagggtgccaagtccattcaatgagggaaagggcagtgtctttgacaaatggtgctgagacaactggatatccacatacagaagaatgaagtgggacattcaccttataccatatacaaaaattaactctgaatggatcaaaaacttaaagggagctaaatctgcaaagctcttagaaaacataggggaaagtatttatggttcttaaaaatgacatcaagagcataggaaacaaaaaaatatacatagattggacatcctcaaaatttaaaactcctgcatcaaaggacactatcaagaaagtgaaaagacaacccacagaatgggagaaaatacttgcaaatcatatctgataaggatttaatatccagattatacaaataactcctacaactcaatatcaaaaag

SEQ ID NO: 636090 - DNA, 556 bp, Homo sapiens
agagactcactctgcctgccccattctgcggcctgtgtctttaacaatcgactgtgtttctgtcattgcccttaggagaacaacctttagtctgactaggcaccacttcccagacgttccctctgttggcctctgttccctacttagatgctgggctaaagttcatttaggctttttttttgccatggctcttttcaaacccctttttagctcttttcagggctctctaaatctctggatctacattgaaacactrtaaggagctccaaataaaatcccaggagtattccaaagggaacaggttcttgtacaaagctccatgtttcctcacgtttcttcagtgtctttgataaacctccatttggttccctttttcctgactctccctctgatgacttccccctgaacccctttttaatccttgttttgtgtcaatatcccttcactggccaacaaggtcatttaaaagtttgagggagtgctatgtctcccctgaggtgctccccacaggtaatcatgggagaagtgtggcctgttttctgaatcactgcgacat

SEQ ID NO: 636091 - DNA, 482 bp, Homo sapiens
attaggaaattcagccgtggccttcctgtcctttttgtcccaagcatcttatgcaggacaagaaaggccttccagagcatcctttccctctgtcctccccatccctacccctgccccagytcaggaaccactgctgcctcccagggctgggagaatcaagcagagactcaggagcccacagctcctggccccaaacgaactgtctccagtgacatctccccactcccccgtgtctgcctccagtctggctgctccatccttcccaccccctctctttgactaacactgtttcctttctgtccacctgctccatgctctccaactctctcgtcacacctcctccaggtagccaccaccaccatcaccaccaccaccacaacctgagccctagctcctcctcttcctcctgcaaacaccttagcacattaaccctgcaatgccccctcctcaggtgcatgctggccgcatagcttgccaagttt

SEQ ID NO: 636092 - DNA, 628 bp, Homo sapiens
taataattacccagtctccagataagatactgattatttttaatgaaataaaataatttttacttattaacctgaaaaaaaaaaagagaaggatgttctctgggtggggcaggatcctgccttagcatgtgaattagtgtgacctgttgagggctggggtgaggaatatgccaggggagggacaagagccccaatcattaaagatttcagccaagaagactccattcaacaaccgacacccttacactccctttacctggtaactccacttacatctcacaacaagccaggaagacatgcagggaaaaggtgattcccatkttacagatgagacaccaaggcaagccagagagactgaggctggagtggacgccgccctggtgagtggtggcagagctggggccactgactctactctctgttgcatgccactgccagctccaatgtgagccaggtgaagactggccctttctcactgctggttcccatcaatcagggcatcagcaagctggtctcgactgagggtgtctcacaggcgcagccatgtgcccagagccctgcccttctgatttcagatgtggaggggacgaccaggctcttatacaacctacctgacttgaccacaaac

SEQ ID NO: 636093 - DNA, 428 bp, Homo sapiens
agtagagactctgtcctctccaccatctagggcccccagcccaagttcccacagaggcacagccaggcagtgagccaaacagccatacagaagtgagacactcccagaggacagacgggcggtggcttcctacctccagcctcctcccactatgggagagaccttggctgctcttccgccagagacaggagcagcccggaaagggtttagaaaaattgagaacacccatgaggccaccaaggggrgcgtaaggagttggggcctttttttttttttttttttttgagatggagtctcactctgtcgcccaggctggagtgcagtggtgtgatctcggctcactgcaagctccgcctcccgggttcacgccattctcctgcctcagcctcctcagcagctgggactacaggcgcatgccgccacaccca

SEQ ID NO: 636094 - DNA, 550 bp, Homo sapiens
ccactagcccggtgccacctatagatgtgttttgtttggtcaggatggtattaytttaaattttgaatttgaatgcctctgggtagggcatggacttttcaccatctctatcccttataactagcagattcacaatcatgagacctgctgggccccttaatgcaactgagtttgtgatcgatccccacagagataatcaggaattctgtctggtatggaaaatgtggtactctctaaaagaactaactctgatgctcccattaggaagaatatccacagagacaatgtccttaatccaaaacacacaatattcagtattttggcaggatatgtacatcgtaagttttttttatcttcttctttactctgtaaggcaacaagtaaataccttccactgccctgcttatttgtcttcagctgggaaacgccacaaaatactcagttcaagaatttcctttcttggcccagtatggaggctcacacctgtaatcccagcactttgggaggccgaggtgaggggatcactcaaggccaggagtttgagaccagc

SEQ ID NO: 636095 - DNA, 550 bp, Homo sapiens
ccactagcccggtgccacctatagatgtgttttgtttggtcaggatggtattattttaaattttgaatttgaatgcctctgggtagggcatggacttttcaccatctctatcccttataactagcagattcacaatcatgagacctgctgggccccttaatgcaactgagtttgtgatcratccccacagagataatcaggaattctgtctggtatggaaaatgtggtactctctaaaagaactaactctgatgctcccattaggaagaatatccacagagacaatgtccttaatccaaaacacacaatattcagtattttggcaggatatgtacatcgtaagttttttttatcttcttctttactctgtaaggcaacaagtaaataccttccactgccctgcttatttgtcttcagctgggaaacgccacaaaatactcagttcaagaatttcctttcttggcccagtatggaggctcacacctgtaatcccagcactttgggaggccgaggtgaggggatcactcaaggccaggagtttgagaccagc

SEQ ID NO: 636096 - DNA, 614 bp, Homo sapiens
gggaggagggaatgggattgtctatctccatgccttctgaaagtctaaatctaagtaatgttacacttttcaatttttattataggtagtataaaatgtttacaaacaactgaagaacytccttgtaagtttcccatatatacaactcagtcctttttttactgacacctaataattgtacaaatttatgggatacatgtgatattttgatacatgcataccatgtgtaatgattttgatattctataatgtgcctgctaccagaggaatggggaaggtggtgagaaagcacataaagatggaggaaaggagaaaaacttgcaattttactgttctctcttttaccagtgtgaggaatttgagactgatttcaagatcctctaagtgactgattaattttttcatttaacaaagtggaaattcttataataaaaactagattaattaatgaaattgtgaaaaagattctggggccagggaaaattatctataacctttagaaggatttgacagcaggaagataatgaaaattaagaataagaaaaataactgcagggagtatgattttaacagtctcctaaggaaaaaaggaaaatgcctacttaccttcttgc

SEQ ID NO: 636097 - DNA, 614 bp, Homo sapiens
gggaggagggaatgggattgtctatctccatgccttctgaaagtctaaatctaagtaatgttacacttttcaatttttattataggtagtataaaatgtttacaaacaactgaagaacctccttgtaagtttcccatatatacaactcagtcctttttttactgacacctaataattgtacaaatttatgggatacatgtgatattttgatacatgcataccatgtgtaatgattttgatmttctataatgtgcctgctaccagaggaatggggaaggtggtgagaaagcacataaagatggaggaaaggagaaaaacttgcaattttactgttctctcttttaccagtgtgaggaatttgagactgatttcaagatcctctaagtgactgattaattttttcatttaacaaagtggaaattcttataataaaaactagattaattaatgaaattgtgaaaaagattctggggccagggaaaattatctataacctttagaaggatttgacagcaggaagataatgaaaattaagaataagaaaaataactgcagggagtatgattttaacagtctcctaaggaaaaaaggaaaatgcctacttaccttcttgc

SEQ ID NO: 636098 - DNA, 614 bp, Homo sapiens
gggaggagggaatgggattgtctatctccatgccttctgaaagtctaaatctaagtaatgttacacttttcaatttttattataggtagtataaaatgtttacaaacaactgaagaacctccttgtaagtttcccatatatacaactcagtcctttttttactgacacctaataattgtacaaatttatgggatacatgtgatattttgatacatgcataccatgtgtaatgattttgatattctataatgtgcctgctaccagaggaatggggaaggtggtgagaaagcacataaagatggaggaaaggagaaaaacttgcaattttactgttctctcttttaccagtgtgaggaatttgagrctgatttcaagatcctctaagtgactgattaattttttcatttaacaaagtggaaattcttataataaaaactagattaattaatgaaattgtgaaaaagattctggggccagggaaaattatctataacctttagaaggatttgacagcaggaagataatgaaaattaagaataagaaaaataactgcagggagtatgattttaacagtctcctaaggaaaaaaggaaaatgcctacttaccttcttgc

SEQ ID NO: 636099 - DNA, 595 bp, Homo sapiens
ttgagagcaaatactgggtaggtatcataaaagcacatattaggccaagcacagtggctcatacatgtaatcccagcactttgggaggccaaggtgagagaatcacttatagcctatgaggtgtagagaggtgtggtggggtgtgtgtgtgtgtatgtgtatgtgtgtgtgtggtcataaagaagaagactgttactgcattattaacaagtatgtgggtctagtgtctcaattcctttgcccaacactcatacctataaatgtcttaagtcaacctagcagtttctattcccttttacatggcaggccaagttactctgttgaataagggccaaaatcactacagagacagcaattcccactgtctccttcagatgaggctatagattctagctaagcaagttcaaattagccagctggaagacaggcaatggcctgtgtaatctcctgagatacaagcaggacacccgtgrggaaaggggaaggaacgctgcctgaccaaatgtgcgtctccacagttccagctggcagattccaccagtaaccgggatcctccaagatgaagaaagaagcatttataaacttaatttgttcc

SEQ ID NO: 636100 - DNA, 549 bp, Homo sapiens
gagaatgagtaacacaaataataacagatacagaatgaagatgcagtttagagagagataaataggagaaaatttaaaaagaacaaaagtaggaagaaaattggaagcagaaagagtaagtgaattggcacataagagaataaagaagggaaatgagtakgttgagaaagagaataaaaataaaggtacaaaaagtcacaaattgaaactggaaaggaaggaagaaaatatagaaaaactgaagaaacaaaattttgaagtgatcacctatccaaggatttagtaacttatgtcaagagggcaggtatcataagacttctacttcagaatcaaagatacatatttgtagatacaggcaaagcaactattaagttagcataatatctaaatgtgtaactggtttactgctcatagccaagggtatccagatctggaaagccatcttccaggtgttttacacaggaaaaaaaaaattcagagttaaaagttcgaggattattgatcaaaatgtggatatttctcattctgagtgacactgaagtgaaggat

SEQ ID NO: 636101 - DNA, 549 bp, Homo sapiens
gagaatgagtaacacaaataataacagatacagaatgaagatgcagtttagagagagataaataggagaaaatttaaaaagaacaaaagtaggaagaaaattggaagcagaaagagtaagtgaattggcacataagagaataaagaagggaaatgagtatgttgagaaagagaataaaaataaaggtacaaaaagtcacaaattgaaacyggaaaggaaggaagaaaatatagaaaaactgaagaaacaaaattttgaagtgatcacctatccaaggatttagtaacttatgtcaagagggcaggtatcataagacttctacttcagaatcaaagatacatatttgtagatacaggcaaagcaactattaagttagcataatatctaaatgtgtaactggtttactgctcatagccaagggtatccagatctggaaagccatcttccaggtgttttacacaggaaaaaaaaaattcagagttaaaagttcgaggattattgatcaaaatgtggatatttctcattctgagtgacactgaagtgaaggat

SEQ ID NO: 636102 - DNA, 489 bp, Homo sapiens
attcctaagtttttttgattgtgtgatttgtttgtttgtttgttgcagctattgtaaaaagtggttgagttcttgatttgattctcagcttggtcactgttggtgtacaggagagctactgatttgtgtacattaattttgtatccaggaaatttgctgaattattttatcagttctaggagcttcttggaggagtcttctgggttttccaggtatacaatcatatcatcagcaaacagtgacagtttgacttcctctttaccaacttggatgcctttattctttctcttgtctgattgctctggctaggacttccagtactatgttgaagtggtgaaagtgggcatccttgtcttgttccaattctcagagggaatgctttcaacttttccccattcagtattatgttggctgtgcgtttatcatacatggtttttattacattgaggtatgtccyttgtaggctgattttgctgagagttttaatca

SEQ ID NO: 636103 - DNA, 571 bp, Homo sapiens
cttgttattggtctgttcagggtatctaattcttcctgatttaaggtaggagggttttctcttcccaggaatgtatcgatctcctccaggttttctagtttatgcacataaaggtgttcatagtagcctcaaatgatcttttgtatttctgtggtgtcagttgtactatctcccatttcatktctacttgagcttctttggattttctctcttcttggttaatcttgccaatggtctatcaagtttatttatcttttcaaagaaccagctttttgtttcacttctgtatttttttgtttcaatttcatttagctctgctctgatctgggttatttcctttcttctgctggctttgggcttggttcttgtttctctagttccttgaggtgtgaccttaggttgtctatttgtgctctttcagacttcctgatgtaggcatatagggctaagaactttcctcttagcaccgcctttgctgtatcccagaggtttttgtaggtcatgtcactattgttattcagcttgaataattttttaattttcatcttgatttcattgttgacccaatgat

SEQ ID NO: 636104 - DNA, 591 bp, Homo sapiens
ctgtttttctcagtttcctctggtcttttgtagcatctcgattcctttatttgcactgacacttttgttgtttttggtttctattttggtttagtttgggtctttctttctttcttttgttcattcgctcrttctttcttcttccttcctttctttctttcttcttcctgtctttgtcttttaaataagtcaaaggcccacagaaacaagaaaccacatagaaaggaccaaaatcaatttgttcttctggttagagagttaagttgcaaaagagaagccagaggaaataatgctgggaaaatatgctgggaagactatggaaataatacactaagaagtttgtatcacagtctgaagccacagggtcacaagatgaaactccaaaagataaaaggtagaaataataaaaactagaagatgtagcaaatgggagtagaagaagggacagactgcaaaatgcaaacagagaaaacactaaaatagaattcaagataaaaaagaaagattgatctttgccttttcctccataaagtttattacatctaaacttggaccactagtgctgcagagattaagccttttctgacttcc

SEQ ID NO: 636105 - DNA, 591 bp, Homo sapiens
ctgtttttctcagtttcctctggtcttttgtagcatctcgattcctttatttgcactgacacttttgttgtttttggtttctattttggtttagtttgggtctttctttctttcttttgttcattcgctcgttctttcttcttccttcctttctttctttcttcttcctgtctttgtcttttaaataagtcaaaggcccacagaaacaagaaaccacatagaaaggaccaaaatcaatttgttcttctggttagagagttaagttgcaaaagagaagcmagaggaaataatgctgggaaaatatgctgggaagactatggaaataatacactaagaagtttgtatcacagtctgaagccacagggtcacaagatgaaactccaaaagataaaaggtagaaataataaaaactagaagatgtagcaaatgggagtagaagaagggacagactgcaaaatgcaaacagagaaaacactaaaatagaattcaagataaaaaagaaagattgatctttgccttttcctccataaagtttattacatctaaacttggaccactagtgctgcagagattaagccttttctgacttcc

SEQ ID NO: 636106 - DNA, 591 bp, Homo sapiens
ctgtttttctcagtttcctctggtcttttgtagcatctcgattcctttatttgcactgacacttttgttgtttttggtttctattttggtttagtttgggtctttctttctttcttttgttcattcgctcgttctttcttcttccttcctttctttctttcttcttcctgtctttgtcttttaaataagtcaaaggcccacagaaacaagaaaccacatagaaaggaccaaaatcaatttgttcttctggttagagagttaagttgcaaaagagaagccagaggaaataatgctgggaaaatatgctgggaagactatggaaataatacactaagaagtttgtatcacagtctgaagccacagggtcacaagatgaaactccaaaagataaaaggtagaaataataaaaacwagaagatgtagcaaatgggagtagaagaagggacagactgcaaaatgcaaacagagaaaacactaaaatagaattcaagataaaaaagaaagattgatctttgccttttcctccataaagtttattacatctaaacttggaccactagtgctgcagagattaagccttttctgacttcc

SEQ ID NO: 636107 - DNA, 592 bp, Homo sapiens
gggactgggaagaagggaatgcccagtacctactgawgtgtttgcctttatctctttcagtggacagttctggaaaaatcagtaagtttggatcatttccttgccttacctatttctgtgcctaggacctttaagttctttttcccaaatgttcttgtgttacgagttcctctaccttacagcagtcaatatttcttcaataagtgatttcctcatatttcaattttaattcttcttatctattttccttttgtaacaaagtataatggtcttgtgtttgattctagttatttactaccaaagattattggtagcatatattcccagctaatctatcacaacagagcctatttcctctgtgctataatctggcaactaataatttttactaaaaaagaaaatcctctaagattgacaaaaagaatatgtgtcaggactagatgtgattttggtaattgatcaacaatatacatttttcaaacggaccagaacagtgagcaaaaaactgttttgcagaagacatatgaaagacttatcaaagaacaaagaaaggcaggaaatacaatagtttgaatttcagtagaagtgattt

SEQ ID NO: 636108 - DNA, 589 bp, Homo sapiens
ccaaagtaataaaaattgttctatcataaagaaacacacgtgtgtttattgcagcactattcacagtaacaatgacatggaatcaacctaaatgcccgtcaacgatagactggataaataaaatgtacatatacaccatrtaataccatgcagccataaaaaggaacaagatcatgtcctttgcaggaacatggatggagctggagggcgttatccttagcaaactaatgcaggaagagagaaccaaataccacatgttctcacttacaaatgggagataaatgatgagaacacatggacacagaaggaaacaacaggcactggtgcttattgaagggtggagggtgagaggacgtagacagtcaggaaaaataactaaggggttctaggcttaatacctgggtgatgaaataatctgtacaacaaacctgcatgacacaagtttacctatataacaaactgcacatgtatccctgaacttaaaacttaaataaaaataaagaaagcaagttaatactacttatcataatatttccttacaagtaaataaaggaaagctaaaaaaagccaaccaaagacataatgaaat

SEQ ID NO: 636109 - DNA, 589 bp, Homo sapiens
ccaaagtaataaaaattgttctatcataaagaaacacacgtgtgtttattgcagcactattcacagtaacaatgacatggaatcaacctaaatgcccgtcaacgatagactggataaataaaatgtacatatacaccatataataccatgcagccataaaaaggaacaagatcatgtcctttgcaggaacatggatggagctggagggcgttatccttagcaaactaatgcaggaagagagaaccaaataccacatgttctcacttacaaatgggagataaatgatgagaacacatggacacagaaggaaacaacaggcactggkgcttattgaagggtggagggtgagaggacgtagacagtcaggaaaaataactaaggggttctaggcttaatacctgggtgatgaaataatctgtacaacaaacctgcatgacacaagtttacctatataacaaactgcacatgtatccctgaacttaaaacttaaataaaaataaagaaagcaagttaatactacttatcataatatttccttacaagtaaataaaggaaagctaaaaaaagccaaccaaagacataatgaaat

SEQ ID NO: 636110 - DNA, 589 bp, Homo sapiens
ccaaagtaataaaaattgttctatcataaagaaacacacgtgtgtttattgcagcactattcacagtaacaatgacatggaatcaacctaaatgcccgtcaacgatagactggataaataaaatgtacatatacaccatataataccatgcagccataaaaaggaacaagatcatgtcctttgcaggaacatggatggagctggagggcgttatccttagcaaactaatgcaggaagagagaaccaaataccacatgttctcacttacaaatgggagataaatgatgagaacacatggacacagaaggaaacaacaggcactggtgcttattgaagggtggagggtgagaggacgtagacagtcaggaaaaataactaaggggttctaggcttaatacctgggtgatgaaataatctgtacaacaaacctgcatgacacaagtttacctatataacaaactgcacatgtatccctgaacttaaaacttaaataaaaataaagaaagcaagttratactacttatcataatatttccttacaagtaaataaaggaaagctaaaaaaagccaaccaaagacataatgaaat

SEQ ID NO: 636111 - DNA, 413 bp, Homo sapiens
ctattgtttgattccatttatatgaaatgtccagaacagctgaatctatagagacagaaagaagattagtggttgcctggggctatggtgtggagagggttttgggttgggggatagtgggaagtgattgytaaacagagtttttctggggggtgatgagaatgttctaaaattcattgtggtgatggttgcacaacccagtgaatatactaaaaagcattaaattccacactttaaatgagtgaattgtgtcatatgtgaatatcatctcaataaagctgttatttacaaagataaaaaagataaaattatgggttctaatgcatcatgaagggacagagaggagatattttccagaaaacatgcttgaagcctgctaaggtcagattatttaattaattagtcctaaatat

SEQ ID NO: 636112 - DNA, 413 bp, Homo sapiens
ctattgtttgattccatttatatgaaatgtccagaacagctgaatctatagagacagaaagaagattagtggttgcctggggctatggtgtggagagggttttgggttgggggatagtgggaagtgattgttaaacagagtttttctggggggtgatgagaatgttctaaaattcattgtggtgatggttgcacaacccagtgaatatactaaaaagcattaaattccacactttaaatgagtgaattgtgtcrtatgtgaatatcatctcaataaagctgttatttacaaagataaaaaagataaaattatgggttctaatgcatcatgaagggacagagaggagatattttccagaaaacatgcttgaagcctgctaaggtcagattatttaattaattagtcctaaatat

SEQ ID NO: 636113 - DNA, 613 bp, Homo sapiens
ttattttctgttccagtgatcttttgtcttttactgaaccaatactccattgctttcactactaaaactttataacatttattacaaaaaatagcacattatctttgttctttttcagaaatgtgttggctattctttgaccttttctcttacacaagaatttcataatttctcaaaatctatgagtcatattaggatttcattgaaatttcattgagcctgtagattaatttgtaaaatcaattattcccatgcattaacatggttgcctactattcaaattttctcatatacccttcaataatgtaatataattttcttcagaaaggtcttgcatgtcttttgctgcattaattcttatacacatacttgttttttgtttcggatgtkaatactatctctctacatggattttacaaataattattgttggaatataagttatatgttgtatatttgagagtagattttgtatctagccaccctgctgtgctcttagagttctaataattttcagattcttttgaattctatatgtaaaaaatcatgtcatctgcaaaatctgataatcttgagtttccttttccaattcttaaaaccattttcttgtcat

SEQ ID NO: 636114 - DNA, 525 bp, Homo sapiens
atctttgttctttttcagaaatgtgttggctattctttgaccttttctcttacacaagaatttcataatttctcaaaatctatgagtcatattaggatttcattgaaatttcattgagcctgtagattaatttgtaaaatcaattattcccatgcattaacatggttgcctactattcaaattttctcatatacccttcaataatgtaatataattttcttcagaaaggtcttgcatgtcttttgctgcattaattcttatacacatacttgttttttgtttcggatgtgaatactatctctctacatggattttacaaataattattgttggaatataagttatatgttgtatatttgagagtagattttgtatctagccaccctgctgtgctcttagarttctaataattttcagattcttttgaattctatatgtaaaaaatcatgtcatctgcaaaatctgataatcttgagtttccttttccaattcttaaaaccattttcttgtcatagcttgggctat

SEQ ID NO: 636115 - DNA, 551 bp, Homo sapiens
gagaggtttgtaattaaagcaagtcatctttcttgactatttacagatattacacatgaggaaaaaatgaaatttaaagatattatttaacttgacccaaggcatatagctagcaaaagagtaaaactgaggttctaaacactggcctttggactccaagtcctgaggttgtccarctacccccaggacatcattaaatgtatttactcttccaatccaaagtattctttggaaataaaatgtttgttccaaggaatttagaaaatcatgcatatgttgaaaatatattacttcaatttttaaaatgtaatttgaaaatcttaaaatgtaaattaatataaaatatcagaattagtgtgctaatccaatactgtgccataaccttatcccatgaataaggctgttttgttgtatatacaactgtgaacaggtgcccttagaaagctatcaagctcaatattttattacttttataattaaaacatgttttatctagttttactttgttttcatctaacttatggaaagggtaaaatatttgggagttgaaa

SEQ ID NO: 636116 - DNA, 445 bp, Homo sapiens
ccaaggatatttgtgctctaagggcataccatgtgcaacccagaaagaggaggccattctctggttttaagagaaggggcctccacagccttcccaagttccccatgccagggcaatggtcttcaactttaggactcagagctaaagcccttaggctttattgaccaagttagctcgattgcaggcagaatggtgtggatcttgtttattactacctctgacattggcctcctttcttgggcaaggctaaaaagcccatctgtggcctgtgtgggcctcagtttccctgggtgtgtaatgagggagctgggtttcacattgccaagttcccttccaactgtctatgactcttcagccgccatgagwctgattcttcttattgtcacgtcagggcagaccagaacacactgaccaagcctcgtagacacatagcagggatgattct

SEQ ID NO: 636117 - DNA, 601 bp, Homo sapiens
aagctttatttctagcagccccaaactggaacctatccataagtcccatcaaccggtgaatgaatttaaaacattgtggtagactgggtgtggtggctcacgcctgtaatcccagcactttgggaggccgaggcaggaggatcacytgaggccagaagtttgagaccagcttgggcaacatggtgaagaccctatctctacgaaacaatgcaaaaattagccagatgtggtggtgcatacctgtggtcccagctattcgggaggctgaggtgggaggatcacctgagcctggaaagtcgaagctgcagtgaactgtgattgtgccactgcgctccagcctgggcaacagagtgagatcttgtctcaaaaaatgccaggcaaactgtggtacatacatacagtggaaaccactcagtaataagaaaggaactactgatccacgagacaacatggatgagtctccaaaatcattatgccgaaataagccagataaaaaagggtttttgccctacatactctttacataaaatccttaaagatacaaggtcaactatagtaacagaaggcagaattgtggttgtttaggattggggatggggag

SEQ ID NO: 636118 - DNA, 578 bp, Homo sapiens
taacagtgtacactgggagacttcccctacgccagcccacctgatgtcacttggtctccctcattccttttttttttgggagagacagggtcttgctctgtcacccaggctggagtgcagtggcacaatcacagctcactgcagccttgacttcttgggctcaagggatcctcctacctcaaccttttgagtagctgggactataggcacacaccaccatgcctggatcatttttaaawttttctgtagagacaggggttcaccatgatgcccgagctggtttcgaacttctgggctcaagcaatcctctcaccttggcctcacaaagtgctgggattacaagcataagcttccacgcccagccctccctaattccatagcaagctgccaggcactgctgctgagatgctgcaggcccagccatcacctcccctctctgctgctttttttcagattcacaaagaagtctgtcctgaccctcaggcctggttcacaggatcagttcctaccctacttctaccactctttacaaactcttgcttggggtatcagaaagcttaaggaaataaaaaataacc

SEQ ID NO: 636119 - DNA, 622 bp, Homo sapiens
ggatgcgataaatgccacatacatctgagggaccaacattatccacagacgtgcagggggatgttgtctgagaaacccagatgtttcttaaactttaatataggtgagaattcactgggcattgtgctgaaatgcagattccaattcaatgggtctggggtgggccttgagattgttcatttctttctttctttttttytttttctttttttttttttttaagacagggtctcactctgttgcccagactggagtgcagtaatgccatcatggctcactgcagacttgaccttctaggctcaggcgatccttccacctcagctgctggagtagctgagactataggcatgcaccaccacgcctggctaattttttattttttatagagatggggtctccctatgtagtcgaggctggtctcaaactcctgggctcaagcaatcctcctgcctcagcctcccaaagcgctgggattataggcatgagccaccgcacccagctgatttttcatttctaaccccaatgcagctggtccacagaccacactttgagtaggaaggccttagatgtccagatttttctctgtattatgtaatcctccatccaaatgtctagaaaccaa

SEQ ID NO: 636120 - DNA, 471 bp, Homo sapiens
tagttgaatgaattaagagattgagttcaggactcgtctcctggaagtcttccttgaatctgccctcctttgctctatcccaacatgcactacaatgtmttaaatcatttgtgtgcatgctccaccagcatacccttccttctctgatggcacctagaaaggatcaacatgctttcaggacactatcaaaaacagtgttaccacactgacagtatggccattctcatcttagaaatgcctctttcaactaaaaatgaatattctttcttttttagatagcagatatatcaatttacatgaagagttcgaaggctagaacaataagcccaggtacattaagactaatggtagaaaatcggaggtaccaaggccctatgaaaaccaaaaccaccccaccttctttgctgctggccagattttggcagctgaactcagttaaagttcatgttcctgttttcttgatagatgtca

SEQ ID NO: 636121 - DNA, 599 bp, Homo sapiens
gttaggtataaactagacttaacattttcaatatatggctgactttgaactagttatctacatttgattgatgaygtttaagatcaatccatttaatgatatcccttcctaagcattaacaggttgctcgagatgttactgcactttctgaaaagaaaagttaaatacttttataatacttcttaaggacaaaagccaggaggggaatttctggaaattcctattatcgtatcacactatgaagaaataaactagcaattgtcatataggtcttgcaatcctcattttcaagacaaaaaaccccatgttacatcaataaaaacaagattagaattaagaatttccaacaatattgcaagccatgataaaggtttcaacagaactcaatttgggttctgttatcttattagaattaaacatttttctcaaatgtttattggtaggcaagatcacataagttatatactgagaataacatgttgagtgttcagctagtggagtactcacacttctttattcaaggctacatatatttatatacacttaagcaatctgccacagccagaatcttttttttttttttttgggttcccgacccc

SEQ ID NO: 636122 - DNA, 535 bp, Homo sapiens
taaattgagattttctatgttagcaatcattttacacaaacaattaaagctttactttatttgttcgaattcttaagttatcttatttttcttgctttatttcacagactaggacctccatataaaatattgaatagaagtagtgatgtgggcatccttgtctcatttcgaattttaaaactgccttgcatccttagaataaacttcatttgatcatgatacataaatatttttgtatattgctgaattctattttctattatcttaatgattttgcaactttattcctaggggttattgttctgtaattttttttttgttttgttcaaactgtctttatcttatttgagtatcaggataatactagcttcataaaatgaattggaaagtgtctcttcctcttctatttttttgtaaaagtttgtatacaattsttgttaattcttcctgaaacatttggtagaattctccaataaaaccatctgggcctggagatttctttgtgaggaagtcctttaattacaaattcaatttt

SEQ ID NO: 636123 - DNA, 403 bp, Homo sapiens
cagatctgcagtgcaggaagataaaacctaagcagaactcagtaggctctctgagttgagatcagagattgtacagtgcgggtagaccaaagccagcctgagttcgtagcacagagaatcagacccaaaggtatttagcaaagtactgaggaacacatgtaatgaaacaacctatggtccaggaatgaaccatttgaaaggattagaacggaacattactcagtactctcacaagaccaggaatagtgtctataaccaccagccagtctaaagaaacctcataatttagaggacgatgggcagagtattcataagggtcttgcatagttagtcrgaaatattagctctcaattaacgcacagtatttggtcccacttaacaaattttaaaagttaggtccttg

SEQ ID NO: 636124 - DNA, 517 bp, Homo sapiens
tatttagcaaagtactgaggaacacatgtaatgaaacaacctatggtccaggaatgaaccatttgaaaggattagaacggaacattactcagtactctcacaagaccaggaatagtgtctataaccaccagccagtctaaagaaacctcataatttagaggacgatgggcagagtattcataagggtcttgcatagttagtcagaaatattagctctcaattaacgcacagtatttggtcccacttaacaaattttaaaagttaggtccttgtattagagcatttcacactgctataaagaactgcccaagactgggtgacttataaaggaaagaaktttaattgactcatagttcagcatggctggggaggcctcaggaaccctacaatcatggtggaaggtgaaggggaagcaaagcaccttcttcacaaggtggcaggaagaagaatgaatgcaggaagaactaccaaacatttataaaatgattagatctcatgagaactcactcactgtcac

SEQ ID NO: 636125 - DNA, 476 bp, Homo sapiens
gaattccttaaaagcaaatcaaataaaagatagacctcacttcattacgtkggtcctcaagcatttccattcctgctttctcactctcccccctcatatcccgaagcaactctcactcaattcaagagtgcccatcattcccaattcccaatccccctagaaatgtgaggtaacacctcagtctgccctgtccaatgcagtaggctctagccatctgtgctactgagcagtagaaatgtggctcatccaaattgagaagtggtattataagatacagcccagtttctgaagatgtaaatagctcattaataatttgtacattggccgggtgcagtggcttgcacctgtaatcccagcactttgggaggccaaggcgggtggattacctgaggtcaggagtttgagaccagcctggccaacatgctgaaatcccatctctactaaaaatacaaaaaaatgagctgggcatggtgacg

SEQ ID NO: 636126 - DNA, 529 bp, Homo sapiens
cggctcactctaacctccgcctcctgggttcaagcgattctcctgcttcaaccttccaagtagctgggattacagacacccgccaccatgctcagctaattatttgtatttttagtagagacaggttttcaccacgtggccaggctggtcttgaactcccgacctcaagtgatccrctctcctcagactcccaaagtgctgggattacaggtgtgaaccacctcgccttgccactatccccattttagagaggcaaaatcaaggtacagaaaaacttgcccatggtaactagctagaaaatgatagaagcacttgggtccgggcagtctaattccagagtccttcaaacttcctcttgtcactgttgtcattcaaagaggagtttctgtatctagcatttacgctaagctctacataaattatctcaagtgaccttcacaaagtgtgtgagatggaggtgtcatgctcgtttcacagacaaggaaacaggttccaaacagctgggtcacttgctcagggttattttact

SEQ ID NO: 636127 - DNA, 579 bp, Homo sapiens
cttttccattgtttaactgcaaaacaagatgttaaggtatgcttcaaaaattttgtaaattgtttattttaaacttatctgtttgtaaattgtaactgattaagaattgtgatagttcagcttgaatgtctcttagagggtgggcttttgttgatgagggaggggaaacttttttttttctatagacttttttcagataacatcttctgagtcataaccagcctggcagtatgatggcctagatgcagagaaaacagctccttggtgaattgataagtaaaggcagaaaagattatatgtcatacctccatkggggaataagcataaccctgagattcttactactgatgagaacattatctgcatatgccaaaaaattttaagcaaatgaaagctaccaatttaaagttacggaatctaccattttaaagttaattgcttgtcaagctataaccacaaaaataatgaattgatgagaaatacaatgaagaggcaatgtccatctcaaaatactgcttttacaaaagcagaataaaagcgaaaagaaatgaaaatgttacactacattaatcctggaat

SEQ ID NO: 636128 - DNA, 604 bp, Homo sapiens
ctgccctttcttactctgatttttgttacaaattttttttgctttcatctacacatgacctaatattttagtaatacttgtctattcctttttagaatgtctatttaaagggaaaaatattttaagagtataaagacagagaaagcaggataaaaagttatttctagaataattttcattcctttagcatgaccaatgatatagaatcrtatcacccttcatgtcataagtgaataaatgaataatatttttctatgtaggtatgtgatgcacagaagttttttttaaagataaatttcagttttgaagcagaaaattatgtttcttacaaataattagtaaatcagataggtaaactggtagaaaggttcacatacaagctagtatttaagttgggtctaagggaagggcctttatcagctaaaagaaacaaattttataagagaaaccaaatactgttgccattttagtagaaaatacagttttttgttaaaatttctttgtttatcaaatttatataataattttcaaataaaaaagtaacaaatatttttgcttctattggcaaggtatatatccccttcccaattccgtattcttcccc

SEQ ID NO: 636129 - DNA, 570 bp, Homo sapiens
accagttctgagaactccttcttttaagagaccagagataacttgatcatttctcaccttttcgtagttgttcttttttatgttgacattccccttactgtttttaaaatgcttcaaagcattaatgattgttatgctgtgtgctttcagtactatggcaatatctttgtagcattttcccatttctgtataagcatggttttttgtttttttttttttcgttttgttttggaaacagggtctcactcttgttcaggctaaaatgcagtggcaccatctcagctcactgcaacctctgcctcctgggctcaagtgatcctgccacctcagcctcctgagtagctgaaactacaggcacatgcccccacacctagctaattttaaaatattttttgatggagacagggtttcactatgttttccaggcagcagcattttttttkgactgggatttctttatgatgctttgttatttaaaaaaaaaatgagaaggaaacattaataatcaaaattatctttaattggcctcacagggctaaaatctagaattattattactcttgggtaaac

SEQ ID NO: 636130 - DNA, 560 bp, Homo sapiens
catcttcctggacctgggacagcaaaatctgctgctcaccaaagtcagctctcttctttgcctactgtgatggttaatattgagtgtcaacttgattgaaggatgtaaagtattgttcctgggtatgtctgtgacattgttgccaaaggagattaacctttgagtcagtggagtgggagaagcagacccaccctcaagtgggcatcatctaatcagctgccagcacagctagaataaagcaggcagaagaatgtggaatgagcagacttgctgagttttccagcctcatatttctcctgcgctggatgctgcttgcacttgaacatcagactccgaattcttcagcttttagactcttggacttacaycagtggtttgctaggggctctcgggcctttggccacagactgaaggctatactgtcagcttccctacttttgaggttttgggactcagactggcttctttactcctcatattgcagacggtctattctgggacgtcaccttgtgattatgtgagtcaatactccttaataaactccccttcacatatacatc

SEQ ID NO: 636131 - DNA, 667 bp, Homo sapiens
gctccagcctaataaatcactcagcacctgtaatataaaatgatattttctgtggtaaaattttagaaaaatgacataaacttgtcagtttgcraacactatagtgtttaccatgaattcatgacatcaatatttagtttatctggcagaatgtagaaaaatgtattaatcactagaaagtatgataattattatttaaatgttatatatgttgaaagaatcttaggacaaacaggtgaagtcttatggtattttgtgatatatataataatatttttgaaactgcttttgtttgttaataaaaatagaaattgcatggagaaattgcttggccaaaaatagatacaatgactgatccagatactcttgttttcagatttttttctcatgctgttttaattgtaaactgttatacaattgggttactaaaacccttgatgggttctagtaatcaccaactagtaagtcataaaacttttgtaacttactgtatttcagaattgttattcagattttccaaattattctttgtgagttatgtatgatgtcatgaaaacactgatttttgtgtttttcattcgtattttaaaatatttagttattctagttttataactttaacatcccattttaaagcaagacttaaaaaagttttttcgtaatagaa

SEQ ID NO: 636132 - DNA, 667 bp, Homo sapiens
gctccagcctaataaatcactcagcacctgtaatataaaatgatattttctgtggtaaaattttagaaaaatgacataaacttgtcagtttgcaaacactatagtgtttaccatgaattcatgacatcaatatttagtttatctggcagaatgtagaaaaatgtattaatcactagaaagtatgataattattatttaaatgttatatatgttgaaagaatcttaggacaaacaggtgaagtcttatggtattttgtgatatatataataatatttttgaaactgcttttgtttgttaataaaaatagaaattgcatggagaaattgcttggccaaaaatagatacaatgactgatccagatactcttgttttcagatttttttctcatgctgttttaattgtaaactgttatacaattgggttactaaaacccttgatgggttctagyaatcaccaactagtaagtcataaaacttttgtaacttactgtatttcagaattgttattcagattttccaaattattctttgtgagttatgtatgatgtcatgaaaacactgatttttgtgtttttcattcgtattttaaaatatttagttattctagttttataactttaacatcccattttaaagcaagacttaaaaaagttttttcgtaatagaa

SEQ ID NO: 636133 - DNA, 592 bp, Homo sapiens
cctcccatcttggcctcccaaaatgttgggattacaggtgtgagccactgcacccaacctggtttttgtttttttgttttgttttgttttctctgcttttcaaatatttttggttctcagttggttgaatctgcaaatacagaaccctcgggtatggagggccaaatgtatagcacattttttcatggggttttgttgaaatggatgacaaagtaatgaagcgattgctggacagaaatgtggagttaaaggtttgtttattagaagatggggaaagtaatayatttgtctgctgaagggaatgatcctatagaaaggggtacagagggtagaatggctagatatttactcccgattaagtgagagcagacagaacctatcggacaagtggaagggttgacctgagataggaacatttaaggttcatccccaacaacaggagggacaccagatggaggtgagtaggtggtagatttgggaatgagagcagaagaaagttaaataatgtcttcacctgagcttgtagagaagcaggtgtgggaggcttgaggaaagtgagaacaggtgtctaggagagctagatagtgaatta

SEQ ID NO: 636134 - DNA, 592 bp, Homo sapiens
cctcccatcttggcctcccaaaatgttgggattacaggtgtgagccactgcacccaacctggtttttgtttttttgttttgttttgttttctctgcttttcaaatatttttggttctcagttggttgaatctgcaaatacagaaccctcgggtatggagggccaaatgtatagcacattttttcatggggttttgttgaaatggatgacaaagtaatgaagcgattgctggacagaaatgtggagttaaaggtttgtttattagaagatggggaaagtaatacatttgtctgctgaagggaatgatcctatagaaaggggtacagagggtagaatggctagatatttactcccgattaagtgagagcagacagaacctatcggrcaagtggaagggttgacctgagataggaacatttaaggttcatccccaacaacaggagggacaccagatggaggtgagtaggtggtagatttgggaatgagagcagaagaaagttaaataatgtcttcacctgagcttgtagagaagcaggtgtgggaggcttgaggaaagtgagaacaggtgtctaggagagctagatagtgaatta

SEQ ID NO: 636135 - DNA, 592 bp, Homo sapiens
cctcccatcttggcctcccaaaatgttgggattacaggtgtgagccactgcacccaacctggtttttgtttttttgttttgttttgttttctctgcttttcaaatatttttggttctcagttggttgaatctgcaaatacagaaccctcgggtatggagggccaaatgtatagcacattttttcatggggttttgttgaaatggatgacaaagtaatgaagcgattgctggacagaaatgtggagttaaaggtttgtttattagaagatggggaaagtaatacatttgtctgctgaagggaatgatcctatagaaaggggtacagagggtagaatggctagatatttactcccgattaagtgagagcagacagaacctatcggacaagtggaagggttgacctgagataggaacatttaaggttcatccccaacaacaggagggacrccagatggaggtgagtaggtggtagatttgggaatgagagcagaagaaagttaaataatgtcttcacctgagcttgtagagaagcaggtgtgggaggcttgaggaaagtgagaacaggtgtctaggagagctagatagtgaatta

SEQ ID NO: 636136 - DNA, 559 bp, Homo sapiens
gataagcctaagactctaagaaagataagccaagtctcaaaaacaaccagagcctagacaggaaggagtgaaggaagaatggtgagctttgctttggatggtgggagtatcaggtcctaggatggagaaggttgagctggtgcgtggatggatatgacctcagattttttgtttgttagttttgaggttttttttgcaagatcatctcactgccagcatcttccaaatcacactggcaggggaaaggaaaaatctcagggaaccaagattccctgctctctccataaccacagctcacatcatgaccttattgcaactttcttctttatggcaccttcaactggcatccataccagttatggctgcgttagtttgaaatgttgcagccaagattgtctctttccccattccttgtcagactctgacttagaattagtttctttgggataggaccttaccaaatacttccagrtccttatggagcaccctgggataatcgtgcttcctttgagtacattcaaactcctctgcttacctcagaaaccaagtgcccagcatc

SEQ ID NO: 636137 - DNA, 611 bp, Homo sapiens
aagaaggaacaaagataagcatgtgttcaagctaccatgtttaattaggagtcccagaaggctacacatgaaacaatcttttytatagttgagaaagtttgacttttttaattattagtttcttaattgacaaataaaaattgtatatatttatagtgtacaacatgatgttttgctgtatgtatacattgtgaaataactaaatcgagccaattaacatatctattacctcacatacttatctctttgtgtgtgtgctgagaacatttaaaatctattctgagcaactttcaagtatacaatacattgttattaactataatcccatgttgtacaatagatctgcagaacagattcctcctaactgaagttttgtatccttctaccaatttcccagtctcctctcctcaaccctgaaccttggtaaccaccattctactctctgcttctgtgagttccacatttaagattccacatatgagtgagatcatatagtatttgtctttctgtgcttggctttttcacttagcatagtgtcctccagtttcatccaggctgtcataaatgatacgatttttaaaatcaactttttaattaaggtgaacttgatt

SEQ ID NO: 636138 - DNA, 594 bp, Homo sapiens
tattcagatacaaatgtaaaaatatgatggctaaaaatgcattcatatagtccccaaaatagcatgtttcagaatagaaacctctcgttatagtgtacttttgtcttaatacttgagagccatgtgaacgtggcatgctatatgattatggtgtgaaagcacagtatgtaggcataaaatgcagtggataggacagaagaatcaaaattcagtctgtaatcactcaaaacaatgcygacatatgagaataactgttatctattttcataatcattatcatcatcatcctctttagagcattcgagctctgtctcagaagtgcctcaaaagtagtaaagatattcacaagagaaatcatggattaggagtcaggtctttaattcttgcctcagttctgttaacaaatcattaagcatggggttaagtatgtgtggggaaagtcaattaacttcaatgaaccctttttttttctgtttgaattcagaaaatgtgaaaaattgaaatagacgctctctaaactctcttctaacccctaaaaatatcctatggtcctatcacaagcaatttttagagatattaggatattatcaaata

SEQ ID NO: 636139 - DNA, 512 bp, Homo sapiens
tgatctggtggtctgaaagtgtgtggcacttcctctctctctctctcygctgctgccatgataagaagtgcttgcttcctctttgccttccaacatgattgtaagtttcctgaggcctcccagttatgcttcctgttaagcctgtgtaactatgagccaataaaatctcttttcttcataaattatccagtctcaggtagttctttaatagcagtatgaaaatggactaatacagaaaatttgtggcaggagttgggcactgctacaaagataccagaaaatgtggaagtgactttggaactgggtaatgggtacaagttggaacagtttgaaggattcaaaagaagacaggaagatgtgagaaagttgggaacttcctagagacttgtaccaaagtgctgatagtgatatggacaatggagtccagattgagatgatctcagatggagatgagaaacttattgggaattggagtaaagatcgttcttgctatgcagagactggcagcattt

SEQ ID NO: 636140 - DNA, 622 bp, Homo sapiens
gctggggcaggagaaacgcttggacctaggagatggaggttgcagtgagccragatcgcaccatggcactccagcctgggctacaagagtgaaactccgtgtcaaaaaataaataaataaatagaaattcattacagacataatatccatgacttgtagattgaaatctttcaataaattatctttgacaaagtgtaaggaaacacctacccaatcaagtatttcttttaagtccttaaaaagtttatattatttaaaatgtaaagatataatatagaaataattactttaaattttattaaaagtatctttaacattagtcattttattaattggaaacaataaatagtaaagactctacatcctgcagaaaacttctcaatgtcattaaaatataagtcacatgtaatttcctacatagggtagggtatatggaatagaataagaaatgatgttcagtttattgattataaattacttagcaatcactgaatctgaaacttgatcttttttgtagtaattttagtttagatttctttaagtgctaattcagcacaataatacaaaatttcattttaatgttaatgagtcacacattttgaaggctttaatttcaggagta

SEQ ID NO: 636141 - DNA, 622 bp, Homo sapiens
gctggggcaggagaaacgcttggacctaggagatggaggttgcagtgagccgagatcgcrccatggcactccagcctgggctacaagagtgaaactccgtgtcaaaaaataaataaataaatagaaattcattacagacataatatccatgacttgtagattgaaatctttcaataaattatctttgacaaagtgtaaggaaacacctacccaatcaagtatttcttttaagtccttaaaaagtttatattatttaaaatgtaaagatataatatagaaataattactttaaattttattaaaagtatctttaacattagtcattttattaattggaaacaataaatagtaaagactctacatcctgcagaaaacttctcaatgtcattaaaatataagtcacatgtaatttcctacatagggtagggtatatggaatagaataagaaatgatgttcagtttattgattataaattacttagcaatcactgaatctgaaacttgatcttttttgtagtaattttagtttagatttctttaagtgctaattcagcacaataatacaaaatttcattttaatgttaatgagtcacacattttgaaggctttaatttcaggagta

SEQ ID NO: 636142 - DNA, 622 bp, Homo sapiens
gctggggcaggagaaacgcttggacctaggagatggaggttgcagtgagccgagatcgcaccatggcactccagcctgggctacaagagtgaaactccgtgtcaaaaaataaataaataaatagaaattcattacagacataatatccatgacttgtagattgaaatctttcaataaattatctttgacaaagtgtaaggaaacacctacccaatcaagtatttcttttaagtccttaaaaagtttatattatttaaaatgtaaagatataatatagaaataattactttaaattttattaaaagtatctttaacattagtcattttattaattggaaacaataaatagtaaagactctacatcctgcagaaaacttctcaatgtcattaaaatataagtcacatgtaatttcctacatagggtagggtatatggaatagaataagaaatgatgttcagtttattgattataaattacttagcaatcactgaatctgaaacwtgatcttttttgtagtaattttagtttagatttctttaagtgctaattcagcacaataatacaaaatttcattttaatgttaatgagtcacacattttgaaggctttaatttcaggagta

SEQ ID NO: 636143 - DNA, 571 bp, Homo sapiens
tgtggctaggtcaagtgcaatggagataaagagaatgggtggaaaataagaaacaatgataaggagaagaaaggaacaaagagcttttcaaagaaacattatcactccaaggtgacccactcttttccttcttaaaaaacaacttatttatcaggagcataaatcctgctaatttgcagtttattcaaagcagtttttaaaaattgtmagttgttttctaaatatgtgaatgctaatttttcacaaacatgcaaggaacattcaaacagttaaagcacagtcatattacacttatagtcatgtttacctaggaatctaagaagaaattgattgttcacaattggaatcatctaacttcctaaactcatagaaatattcaattgttaaaaacatacactgacacaggaatatttctgaaagactttacatggtaaccataaaacaatagtagacaattaagcttggctttaaaatatcatctataagatatccagatgtaaaaataagtatataagaaattaaatcttcatctaaaataatctcagttaaaatataactgcatttctttttg

SEQ ID NO: 636144 - DNA, 571 bp, Homo sapiens
tgtggctaggtcaagtgcaatggagataaagagaatgggtggaaaataagaaacaatgataaggagaagaaaggaacaaagagcttttcaaagaaacattatcactccaaggtgacccactcttttccttcttaaaaaacaacttatttatcaggagcataaatcctgctaatttgcagtttattcaaagcagtttttaaaaattgtcagttgttttctaaatatgtgaatgctaatttttcacaaacatgcaaggaacattcaaacagttaaagcacagtcatrttacacttatagtcatgtttacctaggaatctaagaagaaattgattgttcacaattggaatcatctaacttcctaaactcatagaaatattcaattgttaaaaacatacactgacacaggaatatttctgaaagactttacatggtaaccataaaacaatagtagacaattaagcttggctttaaaatatcatctataagatatccagatgtaaaaataagtatataagaaattaaatcttcatctaaaataatctcagttaaaatataactgcatttctttttg

SEQ ID NO: 636145 - DNA, 316 bp, Homo sapiens
gggtccactctactacaggatgatctcatctcaaacctttaattacctctgcaaagacccttgctttaaatgaggtcacattctgtggttcccagtggactggaattttgcaggggacactattcgacccactacagctcccaccratatacatttcttagcttgtggtaaattctggtagcttcttttgctcctttaataattgcctacacttctttcctaatcctccttgactagtgttatttatacttggggcttattaggtagatggatttaaaacagtaatatgcctttgtgacttttttatgaccaggag

SEQ ID NO: 636146 - DNA, 633 bp, Homo sapiens
ccgtttatttatccaaatcaatgcttgaatattagcgtacaatttgtagtctcttacgtcaactgagacctattgcgtctttaaaacagtgaacatttgacagaagttctttgaatggtggtcctttctttccctcctctcccacagctcaaatctctgggtagagttgaaatgtcctccactctaccttcatcatttaattctacgtttgtcgtgattaagtcacttcacttttccagtcttaactttcctcattgaaaatgcagggaagacagagaaaagtgcttgacttctccctagcaaagacaggaagacgaaaaaaataagatgtggtgagaatgaatgaaaatgcagctacaaagaatgttttatgcttttcaaaataatgatcatagcatatatcaggttattttaactaattcttcaatttgagaggcatgtacaaaaatagcaaacaaaggtaaagaaacatcttggtctaaaaaccaattgctaagaatttttatgttgaactttttcattcccattttgcagatgcargttcagaataagatgaatatatttgctgcaattacagactttgttgaataactgtgaatcagccaactcttcacaaaccatcttctacctatg

SEQ ID NO: 636147 - DNA, 522 bp, Homo sapiens
tacaaatatattgtattcttaggcagcacaagaatgtttgcctcttgtgggaaagaactttcatagcacttcctttgccagttagcactttcagatacatgatccttcaatccatatcaaaacttcagaaaaaaaattttcattttgattgatatttacttcgcagtggcttataaaaataataccaattatttttatratcactcgactaattataagctcatcctctataaatcaacataaacttcaggaacatttacgaagatacaccccaagattaaaagtgtaaaggctctgtacagaagccacctttatagtataagtattgtaccacaaagtccacgcactgctatttcagggaaaaaacaagtttccactcctagaagacggcatatttggaaaatataagctaaactaaagggtaaatctacatattccatgtcaaaataaccattaataaatacaaacaaaatgttacttcagtgtgctaaatcagacatgtgaaagtttctcatgggttag

SEQ ID NO: 636148 - DNA, 503 bp, Homo sapiens
tccctggtcatccatgcctttttgttagcataacacagtaatggactggtaagaaattcacttcttacagacagcaaggaggcaaacttttgcctatcatagyaaatttatacacttacgtgtgcctgctgctttagcacattcccacacagttattctgtttttgacatccttaatgcctgtagggttgtctcatcagcagtagccagtgtttggggcactaatgccaaaacaagggtgtttgatctgcattatagactcgttctggtgtcagatttttatcagtgatgaccttggcacagctgttaatgattttctcctctgctttgtgatgagcagatgctctatcaccacaaatcgttaaacatttaatgctatgtgatttcttaaatttcagcaaccatcctgttgaatattcagtttcctttcattttcaattcatcgtgatagatctttgcttgtttcatgatcagcaaagcactaagtggcctgtgttcacttca

SEQ ID NO: 636149 - DNA, 612 bp, Homo sapiens
ggtttaatggacttacagttccacatggctggggaagcctcacaattatagtggaaggcaaggaggagcaagtcatgtcttgcatggatggcagcaggcaaaaagaagagagcttgtacagggaaactcccatcagatctcatgagactcattcactatcatgagaacagcatgggaaagacctgcccccrtgattcaattacctcccacagggtccctcccacaatacatgggaattcaagatgagttacgggtggtgacacacccaaaccatatcaatatctaaagggaagtcgaaataggcattgatagttactatatagtcattaattgctcactttgtaggtgctaattcaaccccaatttttgaaggtatttatttctttgcttagaatttcagcacaaacaatattaaaattcatgatgataatgctttaactgctgccaatgtttgtgctggacacgattgtaatttttctaggaaaagtctaccttgatcttagagaaactagaaagagatttactttctctttcataactgttattatatgaatcttatgctatttcaactgtgttccaacaataatgttatggttctcttgcaatcctgag

SEQ ID NO: 636150 - DNA, 585 bp, Homo sapiens
atttcctgttattaaaaaaagataaaatttctctattgtttaagtcgtgattagctggatcttcttttacatttaactaaaagtttcaaaactgtaatcctcaaaacaatattcaaaatctgccttttggcttagaagtttcttttgtcagtgtatatatatgtccactagaatgaggctatattaaatttatgtatcaacagaattaatcacttaaaacatgaaaacattatttttagacaacatgtatttaaaatgacatttttattgacatctagtcaatacataagtagtacacaaagatttataaatatggagatagtagcatttaaaggccattattttattgtygccaaaataagagaaattaggagaaacataaagtgcagtcaatttataatctctattccaaatgagaatctataatctttatatagaactaatctgtttatttaaatggactatggaaattagttttgtcaaaggagaggaggataaaaataacttctaaatagcacacatggaaaatgtgtggccatatatatgaagaaattatttatctggtttaactaaaatattgaagaa

SEQ ID NO: 636151 - DNA, 518 bp, Homo sapiens
aaatccatatccactctattaactagttgatacgtgcaaatactactgctttgtaccaagcctggttgatattttttaccccagtctcttagaagcgaggcaattgatgccttagaaggtagaattctgtcaataagtgttrgttacatacaggttcagcatattaaattttcctcgtcggtggctttttaagaaattaagtatttgacatacttttgattattttcatttgggttttgagtctgttttgtttaacataatatcattacaaaagctttttatcatttatttattgcttgtctggcatatatttttttgcctttttaatttctacctatctgcgtcagtatatgccttatgtgtggcttttataaaaagtgggtggctgagttttctagatgtgacgagcagagtgatggctagaacttacagattctgcccttggtaaaggaatgagaatcataacttaaaaggacacatttacttttacagaatatgataactttacctcttttcca

SEQ ID NO: 636152 - DNA, 564 bp, Homo sapiens
attggatcaagcagtataacgagcaattggcagagaaatcaagctcagaaaggccattttggccgggtgcggtggctcacgtctgcaaccccaacactttgggaggctgaggcgggtggatcacctgaggtcaggagtttgagaccagtctggccaacatggtaaaacccccatctctactgaaaatgaaataatcagccgggcatggtagtgtgcgcctgtagtcccagctactcaggaggctgaggcaagagaattgcttgagccctgaaggcggaggttgcagtgagctgagattgtgccactgctctccagcctgggagacagagtgagactcyacctcaacaaaaaaaaaaaaaaaaaaaaagtcattttattctcactgatggagcatgcccgaaatggaacaatcacaggtccatcttgcttccaaatctgcttccctttatctgctgtgtttgttttactgtgtcacatgctctgccacctgccagcaacaactacaccaagggcttgtgccaccttgaaattcatggccaaggaaatgtgactaagaaaaaagac

SEQ ID NO: 636153 - DNA, 564 bp, Homo sapiens
attggatcaagcagtataacgagcaattggcagagaaatcaagctcagaaaggccattttggccgggtgcggtggctcacgtctgcaaccccaacactttgggaggctgaggcgggtggatcacctgaggtcaggagtttgagaccagtctggccaacatggtaaaacccccatctctactgaaaatgaaataatcagccgggcatggtagtgtgcgcctgtagtcccagctactcaggaggctgaggcaagagaattgcttgagccctgaaggcggaggttgcagtgagctgagattgtgccactgctctccagcctgggagacagagtgagactctacctcaacaaaaaaaaaaaaaaaaaaaaagtcattttattctcactgatggagcatgcccgaaatggaacaatcacaggtccatcttgcttccaaatctgcttccctttatctgctgtgtttgttttactgtgtcacatgctctgccacctgccagcaacaactacaccaagggcttgtgccaccttgaaattcayggccaaggaaatgtgactaagaaaaaagac

SEQ ID NO: 636154 - DNA, 591 bp, Homo sapiens
accaatgatgaagtcaataataccataattaaggttttgtaaatccaggggaaatttttgcttaaatcatgatatagggacaattattaatgttgtatcaaagatgttaagagcataaagcaaagataaattctagaatcacygagaacaactgaaatcatcccaatagaatcacaaagattgaacaaattggtgtctttgagaagttaagcctgaagccaataggcatttacttgttgacaatgggatagctcaacatgtaaaaatctcagctttgctagagagatgaatctgggttcttcatttaaacattttaagtcttttaatcccaaataaggatggcaataatacgtcataggtatagcacacctcataggtatagcatacctcataggtatgctataaactaaaatgaaacaatgcgtacaaagtgctttgaacaatacttggcatataataagagctcaataattcattacttttattaagatgaatttcttataacggcatttttagaaagcagaaatcactgcctcattataccattatttcacttgaattaattttgagtacctaatttatcacatatta

SEQ ID NO: 636155 - DNA, 591 bp, Homo sapiens
accaatgatgaagtcaataataccataattaaggttttgtaaatccaggggaaatttttgcttaaatcatgatatagggacaattattaatgttgtatcaaagatgttaagagcataaagcaaagataaattctagaatcaccgagaacaactgaaatcaycccaatagaatcacaaagattgaacaaattggtgtctttgagaagttaagcctgaagccaataggcatttacttgttgacaatgggatagctcaacatgtaaaaatctcagctttgctagagagatgaatctgggttcttcatttaaacattttaagtcttttaatcccaaataaggatggcaataatacgtcataggtatagcacacctcataggtatagcatacctcataggtatgctataaactaaaatgaaacaatgcgtacaaagtgctttgaacaatacttggcatataataagagctcaataattcattacttttattaagatgaatttcttataacggcatttttagaaagcagaaatcactgcctcattataccattatttcacttgaattaattttgagtacctaatttatcacatatta

SEQ ID NO: 636156 - DNA, 591 bp, Homo sapiens
accaatgatgaagtcaataataccataattaaggttttgtaaatccaggggaaatttttgcttaaatcatgatatagggacaattattaatgttgtatcaaagatgttaagagcataaagcaaagataaattctagaatcaccgagaacaactgaaatcatcccaatagaatcacaaagattgaacaaattggtgtmtttgagaagttaagcctgaagccaataggcatttacttgttgacaatgggatagctcaacatgtaaaaatctcagctttgctagagagatgaatctgggttcttcatttaaacattttaagtcttttaatcccaaataaggatggcaataatacgtcataggtatagcacacctcataggtatagcatacctcataggtatgctataaactaaaatgaaacaatgcgtacaaagtgctttgaacaatacttggcatataataagagctcaataattcattacttttattaagatgaatttcttataacggcatttttagaaagcagaaatcactgcctcattataccattatttcacttgaattaattttgagtacctaatttatcacatatta

SEQ ID NO: 636157 - DNA, 555 bp, Homo sapiens
gcactgaagcgcaggtcttaacgtgacatcaagtgttacccacttctcctccaggtgcaccccacattacgcacatgccatggcgctcaccaaactgggtataaacacactgtaagctcaagagcagatgctgcatctcaaccattctaacatctcaacatttygtatacagtaataatttaatgaccaagtatgggttaataacctgttgttgaatgaatctgtgaaatgatgaagcagaggtttcaatgtgatctcatgtgaccacctgtgaagtaatataagtagcctgactgtatcattagggagaaaaatccgtaatgctatctgtcaagtgctgatcccatgagaaatctggagctctgagagattaagtcgattgctgcttctcaaagtcatagccagaaagtggctgagccagaattccacctcagacaacctagcactgtagtccatgtttaactatgtttcatgcaactattgtatatataacatatacagtatagaaaaataaatgatatatgatagtaatatttaatattatatgaaactaaa

SEQ ID NO: 636158 - DNA, 516 bp, Homo sapiens
tatttccaaattttaaggtttttatttatttattttactgtagcacttcacttttaggaaataaaatcaagtatttgtttcttatttgttgctttaacaattaccacaacttagaaccttaataaacaacaggaatttatctctggttctgatgtcagaaatctgaatgggtctcactggcctaaaaatcaaggcatttgcagggctgtgttcctttccttggaggctgcaggagacaagtcatacctggtcttttccgttctagaagctgtccacattctttggcttgctgccacttcatccatcttcaaagcccacaatagcagctggagtstttcttacatcccatcacccgatcctgaccctactgcctccttcgttacatactgagaaagccttgtaattacactgggtcctcccagataatccaagataatctccctttattaaagtcagcttattagcattattaatacaactttccaccttcacatctctttgccatagaacttgaca

SEQ ID NO: 636159 - DNA, 527 bp, Homo sapiens
attctttggcttgctgccacttcatccatcttcaaagcccacaatagcagctggagtgtttcttacatcccatcacccgatcctgaccctactgcctccttcgttacayactgagaaagccttgtaattacactgggtcctcccagataatccaagataatctccctttattaaagtcagcttattagcattattaatacaactttccaccttcacatctctttgccatagaacttgacatattcatagattgcagaaattaggacatagacatcttgtggggagggtatattatctggctactatacatggcttctagtttttaacagactatgaactcactgtatgaaagctagggtcttgcagatactatatttctacagtgttagcatagtggatcaataaacagttgttaaataagtgtaggtggctaatatcacctagtagaaatcaaggtcttctgtgcattcactttaagaatattaacatgagttatactcaagtagttgtaatggcatgcaaattat

SEQ ID NO: 636160 - DNA, 414 bp, Homo sapiens
tttaaaatcatgtatcagttaatggtgaaacgcgggtgatatatatagtattatcccttaattaaatttcttaatataaccgtactaaaattacttgcaatatgtgatgtaattaaagttataatctcaacactttgtagaaggtgtatcagcaccgtgcttatataactgatacacaagtagtaatttaatatttacagagtacctgaacccaggccacacattttctctagcactctgctctcttgatttttaagtagaaaggttgaaggaaataaattycaaggtcttttctaatctaaggaaaacatatatcaataatggaaatatatctaggaccccatgtgttccaatctcagatgtactctatttaaaacatagtccggcgattagccgataaataaatataaacac

SEQ ID NO: 636161 - DNA, 613 bp, Homo sapiens
ttaaatactcgtagtaatgtcctagttcctcaaactttcagctcatatctgatgtctcccagtcctgatcttaagaaagaatcaggcagctatcctttacatttggaaatacagttagtaaaagttaacgtgtcccttaagagttctggctgcagattcattgaaccttcaactctttgtctatttcctgmcagttagtgagtttaaagcatgatggctataatcaattcagaatccatataatgaatttaatcctttaacatctggtaaataaagcatattatctgtgacaaatattggtaatctttgtttggtgggtggaagtggtacatacaccattctgtggtagcaatatttgatctaaaaacaaaaactaccataaagtattttcattatgtgagtcaaacgatctttgtgatactttctgtagctgtgaagtattgaaagtgattatcctcattctagaatctgaggtatggaatagcctgttttcagtagaatgttttccccttttttaccttgtcatggattgctgtattatggattcaaaatattataaaatacattaaatagaaaatactgtctactaaacaaatgaaagtataaaaatggc

SEQ ID NO: 636162 - DNA, 613 bp, Homo sapiens
ttaaatactcgtagtaatgtcctagttcctcaaactttcagctcatatctgatgtctcccagtcctgatcttaagaaagaatcaggcagctatcctttacatttggaaatacagttagtaaaagttaacgtgtcccttaagagttctggctgcagattcattgaaccttcaactctttgtctatttcctgacagttagtgagtttaaagcatgatggctataatcaattcagaatccatataatgaatttaatcctttaacatctggtaaataaagcatattatctgtgacaaatattggtaatctttgtttggtgggtggaagtggtacatayaccattctgtggtagcaatatttgatctaaaaacaaaaactaccataaagtattttcattatgtgagtcaaacgatctttgtgatactttctgtagctgtgaagtattgaaagtgattatcctcattctagaatctgaggtatggaatagcctgttttcagtagaatgttttccccttttttaccttgtcatggattgctgtattatggattcaaaatattataaaatacattaaatagaaaatactgtctactaaacaaatgaaagtataaaaatggc

SEQ ID NO: 636163 - DNA, 613 bp, Homo sapiens
ttaaatactcgtagtaatgtcctagttcctcaaactttcagctcatatctgatgtctcccagtcctgatcttaagaaagaatcaggcagctatcctttacatttggaaatacagttagtaaaagttaacgtgtcccttaagagttctggctgcagattcattgaaccttcaactctttgtctatttcctgacagttagtgagtttaaagcatgatggctataatcaattcagaatccatataatgaatttaatcctttaacatctggtaaataaagcatattatctgtgacaaatattggtaatctttgtttggtgggtggaagtggtacatacaccattctgtggtagcaatatttgatctaaaaacaaaaactaccataaagtattttcattatgtgagtcaaacgatctttgtgatactttctgtagctgtgaagtattgaaagtgattatcctcattctagaatctgaggtatggaatagcctgttttcagtagaatgttttccccttttttaccttgtcatggattgctgtattatggattcaaaatattataaaatacattaaatagaaaatactrtctactaaacaaatgaaagtataaaaatggc

SEQ ID NO: 636164 - DNA, 582 bp, Homo sapiens
agatcaaatatgaaattgtgaaagtttgctatgtatagtttaatgacaagtatataataacaaatatctaaatctttcatcaacagatgtctgaatctgtggcctgttataaagtaaggtttagacgaaaactttcagtttttaatacaacagcactaaatacttggtatagaacacatagtaaactcaagaaaaaggaaaaatacataaagaaattactagaactcaagcagaccaatagaakaagaatatttattaaaagtaaattctagttaattgaaaaaaaaaattagccagataaacttgtagcaagatgatgaggagcaataaaaaaatagaagtcctaccaacaacataaagaatgaaatgctgagaaaatagagataaaaacagcgtagagaatatgagcaactgcatgtaaacaaatgtgaaaaccaggatgaaatggataaagttattttttaaaaaaaactgtaaagtgcaaacattcctgaagaaaaaaaataatttattgatatacccataaccgtaaataaatggaattgctgattctgctcactacctctcactccaccaaaataa

SEQ ID NO: 636165 - DNA, 582 bp, Homo sapiens
agatcaaatatgaaattgtgaaagtttgctatgtatagtttaatgacaagtatataataacaaatatctaaatctttcatcaacagatgtctgaatctgtggcctgttataaagtaaggtttagacgaaaactttcagtttttaatacaacagcactaaatacttggtatagaacacatagtaaactcaagaaaaaggaaaaatacataaagaaattactagaactcaagcagaccaatagaagargaatatttattaaaagtaaattctagttaattgaaaaaaaaaattagccagataaacttgtagcaagatgatgaggagcaataaaaaaatagaagtcctaccaacaacataaagaatgaaatgctgagaaaatagagataaaaacagcgtagagaatatgagcaactgcatgtaaacaaatgtgaaaaccaggatgaaatggataaagttattttttaaaaaaaactgtaaagtgcaaacattcctgaagaaaaaaaataatttattgatatacccataaccgtaaataaatggaattgctgattctgctcactacctctcactccaccaaaataa

SEQ ID NO: 636166 - DNA, 574 bp, Homo sapiens
tccgggtgatggtcaaattaatgcccaatacattatttgtgggaatctgtggtcataacactcaccttagtgagtaggtatttatcttttgttgttattttggtttctcctgaattatttttcaaagtgacaaagtcatccagggaagaacaaagctcatatataaaatattttttttagttttatcttttcttttcaataatattctgtattgaataaacaragtaaatttgcaaggaagtgagagaatgttggtgatatggtttggctctgtgtccccactcaaatctcagctcaaattgtcaaccccatgcacatgtcgagggaagatcctggtgggaggtgattggctcatggaatccatttccccgattatgttcccgatgctgttctcatgatagggagggagttctcacaagatctgatggtttaagcgtggcagtttcccctgagctctccttcctgctggtatgtaaggcgtgctttgcttcctcttcaccttccgccatgattgtacatttcctgaggcctccccagccatgcagaactgtgagtcaattaaacctcttttctt

SEQ ID NO: 636167 - DNA, 494 bp, Homo sapiens
gttgctctcagacccagagacaagctagatgcccctacgtaaagatggcaaaatgggtaagagcataggctgccatggtttgaacctagctttgctacttgttagccgtgtgaacttgggcagttaacttatccacattgttcttcaaygtcctactctgtaagatggaagtaatatcgttgtaagaactaagtgaattaatatacgaaaatcctttacaatccaggcactattctgagtgatcaataaatggtactatggttattagctctagtggtcagggaaggcttcaaggaggaggtgggacttggccagaccttgaagaaggatgactgagtgtgagttatagaggtggaaaggaaagggcagggctttcccaccaggagagtagcctacatgaggaatacaggggatgtgaattgagtgggtcaggacatgatgaagagacaaagttggttgtgttttatggtagataagatcagaaccttagatta

SEQ ID NO: 636168 - DNA, 598 bp, Homo sapiens
cagtgtgagaacggctgggtgataaatcccaggggaggtctgggcttgggcagcctgtgcgccgcgggcctcgggggcggggacgcgtgcgccctgtcccacgcttggccagtccctgtcctggggccgccttccctggtctgtctttgtgccttcaccgccatgtttcctggctgcttcgcctcctgtcgggggtctgcctctctacgctgggtctttgtgtgcagctgggtgcgtcgccgcctgtgtgtgggtgtggggcactggggcttgggcgctgggcacmgcctctgatccctcctgcctcactgcctgcccagtggggcatttggccggctttttcctcccgccctctctgggcacagacagggctctgtccatggtgatgtgcttgctgtctggaatctggggtgggaagtgaagagaaagggcctcttttctcctagacctgggggatttggaggcagcctgcaggtagacttggtttccttccctggtctgagggatcaagaaacccaataaagccttctctgaatgggaggccctggagcccaggggtgaagaggctgcagcctctgatcaggaaggtgagggtagg

SEQ ID NO: 636169 - DNA, 525 bp, Homo sapiens
caggataaaagcttccttcttaacaagtttttcccctttctctgtttgtgtcccccaccccacttcaggcctggtgatcctcagtcagctcaggataaagcacggatggataaagaatatttgtccctcatggctgaactgggtgaagcacctgtcccagcatctgtgggctccacctctgggcctgccaccacacccctggccagcgcacctcgtcctgctgctcccgccaacaacccacctccaccggtgagcctgggggctggctctcttggtctggcttccccattctctactgcagagactgggagctatggccacgtggtttgggtagagcagacaatggatgtggatggcaacattgttcttccgggatctcaggccagtttggggacttctcacttcgggaagaccttgttcttgtgttctggtcctgtgtcataacccgaagaacaatgttgccactaggrggcgcaggcagggacgttggcaggaaatgctctcacgtagtctctcatgtctacc

SEQ ID NO: 636170 - DNA, 595 bp, Homo sapiens
aggagagtcctgttatctgtcagtctgggaagcctattcttaacatgatgtgtcttccaagaggccaccttgttatctgacttctgagcacttatgtggcacagacagaaaagtgtgcccatggagaggagagggtgggtcccaagggcccacaggataggttttcctgaccaaggacattgtttcctgtctaatcttaagagacacaatcttcttcccaggggcctaggacagtccaaataagcaaaatgcatctgccttccctgcaratccaaggccccagatttttcctgctgtgtccccagcaagcacagagacatgtgtttagatgcagacaacacacatatgcccaggcaaagtaggggggaactcacactggatacacaaatctgggcagacttggaagtacagagccacttatggggtccttggctggggctatcctcttgtgacagtttcagggatgcaagggagcattgtgcagacttgtggagcattgactagagtgtctcccagcctgctttcccctgcagagctgctgcacaccacccgctctacaggctgtgatcgtggttagaaacagagctgaggggaa

SEQ ID NO: 636171 - DNA, 409 bp, Homo sapiens
aacaaatttctgtgaagtaaagtactgttgaaattaatatgcaaattcaggaaaactaacttattccacggtcggggagggaagttagttgaacctctactggccaggacaaaattaacatgcctatagacaacagttattttgcactgctattagttacctacgatttacagagttgtaatttccctgagaatcagaatctaattacctgtagaggtctcctctagagtctcaacagtgcatggttttccaatgaagcacatttttttcctatgtataaccagcctgtcctgtctccagaatccacacacagacacacacacagacacacacacacasacacacacacacacacacacacacacacacacactcccttcggacaacttgctgatcgtaaagctataga

SEQ ID NO: 636172 - DNA, 562 bp, Homo sapiens
aattcaatttagaaatctgagttttcaaatataattaatagaaaatttctgattgttttgcatattttaatctctcttgttcagatattgtcatcttataagtagttttataaggcttcaattttgctttcttcagtgaaatgtttttatgtttgttccttttaaatattattgagaaaattttcctttgaaatggggaggggaaaaaccagaatatgctgatctcaatgctattaagaaatttaagataagaagactattattggggttctctatttgttygaaaaacaagcaatttaatttcaattaatagtacctgttaagttttcagatgtggcaataaaacctgtgcttgcctgtttactcggcctttgtcttgacaagaataatcgtacattgtgccctcaaacacttgcttagatgaagcttagacctcatatgataatttccaagattacttgggcataaaagtcggcaatctcgttccttactttgagtggttaccagggtgactggactctggtcatgtgaatcttagagattgattgacctgctgaggagc

SEQ ID NO: 636173 - DNA, 579 bp, Homo sapiens
cgtgcaaatgtatttaacatgtttatatgggagcttgaacccgggaggtggagcttgcagtgagcagagatggcgccactgcactctagcctgggcagcagagtgagacttcgtctcaaaaaaaaaaaaaaatacaggggaaattgttcattttttttcttcagtttgagagcaagtactgtttattaactgacctgattagaaaaataatcatggtagacaccttagttcattcttctaagaagcctgttaatctggtcctccctgttgccagcatctccaccttctacaaaatagatggtcartttcttcattccacttcttggagaagataatttgaagggccacaggaagctatttgcttctttgaagcattttccaacagtataggtctcatgaatcagatcctccaggcagatggtgccatatttaccaagagattgagcaatcaaagcgttttctatcaaagcaatttgcttcttactgattttgccataaccacgctggtagattagttcatttactgacttcagatttgggtacctccatgcaatgtatggctctacaatccacagcatg

SEQ ID NO: 636174 - DNA, 604 bp, Homo sapiens
gaaaaaatgaacacaaagcaaattagagttagtacaattgtggtctactctgatggcgttcatttttacaaataaatgtagctcactgttgtcaggcactgcactcaccgacaggagccaatagtgcaacgtgcctggatgtcacctcatagtcactaggagtggtgtggtccggcagagggacccatgctgacgtggtgtgtcaccttctcagtggatgtttgtgtgtgattatgcatgcagcctcatttagagatccaatagacatctaagtagaagacctcctgggcaccaccaccattgccctccatcccccaatgggaggtcycctgagagcctcaggtcccaagattctgctcaagccagctgctcctgcccagggagtgtggctggggggcaagaagggcaggagtcaggcctcaggctggtcccacccatcaccctgcctctggcccacctggcgcccctcagagggctgagtctcactctgccactctcactagaggagggagcactctgctaccctccctgctttgctccaaatcaggaacacagtatgattattatacagtatgattattataataacagcaactatttttca

SEQ ID NO: 636175 - DNA, 490 bp, Homo sapiens
actccctcacccttgaatggagtaactcatgagcattcccaaatgagcactgggaggctgggtttgcaaagcctggtgaatgtaatgcatccagattggggagtcgcaggaggctggatatgcaggagacagcagcccctttggtggcctccctgtcctgcacaggaccttccaccctccacccaacaggccactttcaaggactgaaccatgctagaggctcagagccaaggctccccagacaagragctgggaatgggcctgggcaggtagatcctcaggggtcccccagatggctgtggccctggtcatgaaggctgtgagtgatgtcttcccacaggtcatccagacgggcctgcagcttgctcagaaccttgccactgtctgtttgttgaaactctggggcgaaggcactgtggcctggtggaggtggcgccagctgctgctggacctcctcagtctcctggtcgatggcgcgagtgaaggcagc

SEQ ID NO: 636176 - DNA, 346 bp, Homo sapiens
ttgctgatgttggcttttctaacagtccttattttagatcctttcccctctactttcagagctacctaatttcaccaattcttaaaactttggaggattctgtaatataaattgggttggttcttgtctggcaggcatagcctctttgtctgactagcccaagaggaaagacctaacaattctggcattggaggccacctcagcaaaacagctaagttaaattcccctgtaataagccccakgtcaacaaggctcaccccctactcaggtctttagcccgctacttgtaagaagacaatcaatgattatcagacatctgagcaaagcccttaacactgaaagatgg

SEQ ID NO: 636177 - DNA, 576 bp, Homo sapiens
aaatggatgtataactcacctcttcctggaagccttccctgattaactccatgcatccattcaacatgcatttatggagtgtctgccacataccctggactataatggacacagggaataccttagtgaacaagatagataaagttcctgcccctatgaagcttgcatgggagagacagggagtaaacagaaaaacagctaccatgggtgacaaataggggatcttaccctagctagagggtcaggaaaaggyccagctcactctcaaaggaaaaagaccttgtcttgagagggaagttctagtccatcttggccacaaactagtggtgtgaccttgggcaagtcacctatctctgagcttattttcctcaactgtgaaagaaagggtccctttctgctctagaattacgtgtttacttaaaagcaaatttactttcagacaggtttataaacaaattatttcttgagactttggcattgtagaaaaatgtgaaattctaattacgcataaagaaaaaataataatcacaatgaaacagtcaacctaacaaaatcattcccatcacccacaattcc

SEQ ID NO: 636178 - DNA, 577 bp, Homo sapiens
gaggaaggtgccaggttctttttcacaatcagttctcatgggaactaatagaccaacaaccactcattactgtgagaatgacaccaagccattcatgagagatccgcctccatgacgcaaacacctcccactaggccccacctccaacactggggatgaaacctcagcatgagatttggaaaggacaagcatccaaactgtatcattgctayacccaggtagtataacggtagccaaacccagaaatatccctgctcccaggggttgtccctcaagatgtctgcccagcaagatttcagaattgctatgagtcagtgtcttctgtgtctttccattcttcccttactgaatgggactggctattgtggttatcctatccctgtttcaacattgtatcttgggtgtgtggagcagaaaatttatttttagcttataggtctccagattaagaggacagtcacatctggatctagtgtatacaccataacacatcagtcaggggtcctgaactttgctttagttgctatgactagatggaacttttgggttgctttcctaggggagagggtgagtgcgt

SEQ ID NO: 636179 - DNA, 449 bp, Homo sapiens
attccatgttcatagattggaaggattactatgctaaaatgatgatactacccaaagcaatttacagattcaatgcaatccatatcaaaataccaatgacattcctcacagaaatagaaaaaaaattataaaatttatatggaaccacaaaagaccccaaatagccaaagcaaccctgagcaaaaagaacaaaactggaaacattacactacctgaattcaaatttactacaaagctatagcaaccaaatcagcatgtatctgacataaaaacagacaccatagaccaatagaacaaagtagagaactcagatrtaagtctatgtatttacatccaacttatcttcaacaaatgcaccaggaacatacattagggaaaggacagtctcttcaataaatggtactgggaagtaagtatatgcagaagaattaaactagatgtctactgca

SEQ ID NO: 636180 - DNA, 548 bp, Homo sapiens
aataagcctcctcaggagccacctccagaccctgccctcatgcttcccgtcctgcaggccgggatgggcatcttcccagctgcaccctcacccccagggcctcggtgtggcatctgactcacagaaccatcacccagctctgtgttccaccacacaccactgacagtgactccctcacctgggttggctccaagttggcattcagcatcctcctgtacccattcattcaacaaaggatggagcccctagtatgcaccaggctcattcttggcactggggacatgcctatgaagacaacagatgaggagccctgccgctgtggagctgatattgttagaatgctgaaatacttccacgccgattgctaaacacctatcccacccagcacttctcgcccctacctccccacggcccagcacctaaaggtgaacccytgtcacagctcagggggcttctaggaccctgcccagctccatgcctggtgtccatcctgatgagccagcgctggcgccacagtgctgttaaagattttgactctcacccctgga

SEQ ID NO: 636181 - DNA, 514 bp, Homo sapiens
tctccttcactccaggccccatgccagacctcaccctattccttccttggggctcagtatatacagagagaattcctctcctgcagggagagaggakagagagagaaacatcaaccatcccacaattagttttcaatcttaattatacacatttctgatgcattcatcaacttcccctattaaggctgccgtagcaccgtctctgccctagtgtgtgcagagggaaaacgggctgttctccccagaagagagggagagaggtgtcctagctaggtctagaagcctgtgttcttcagggttcagggggtccagcagccaggagcaaagacacagccagcgaggcaggagccttctaccatgtcctgacccctgtgaagtcttacgattctctaggaggaggatagagaggaccctccctccacccacaccaacaccccacaccagagatgcccagagagatggctggctagtggctgggagattattttgatgtcatggaaagagtcctgcactt

SEQ ID NO: 636182 - DNA, 530 bp, Homo sapiens
cctactgaccatgagaacttggacaagccaaatgacctctttgaacctcattttggtgaggaggttagattagataatcttgtaagatctctaccatctctaaagagtcattgggtccagaagatcagcatcaaggtcattcaagaacccctgatctggacagggagatcaaggcaggagaattatgcctattagctggccacctgttggcctggatgagtcagggaagcctcccasgtcctccctctcaagactgtggctgttgccaggaaggacaccctagcagagcctggagccttcacaccatgggctggggttggcaaggaggctgtagcagtgccagaaacctctgagcataccacacaacttcccctctgcagaggcagctgccctgtagggagtcagtacatttctagtcccaaagcttccaggagatggagagccagaaccactgcctagtgcccaatgaggggctcatggccacattcaccctgcaccaagtcctcaagagccaggtagaagctccagcc

SEQ ID NO: 636183 - DNA, 573 bp, Homo sapiens
actaacctgttgcatgagcttccccctaagagacctagtcccaacgtgtctatggttcctcatctgcccagcataccccttggctcagggcttcttgggaggtccatatgagcaaatgccctgcatcacccgtagatgccagagctgcaaagagacctggacaacaaccatcccaacctccggcttttgcagttgtagaagaggctcagataagttaggtgatttttccaaggtcacacagtatgtcctgcaagaatgaattaaaacattcatcactgtataaatataaggaattaatagaaacaatgtttatataacagatatttgaatcagtgattacctgataaaagttacagactctccctctgagaaacacacatgcgtcaaagtgcagactkctcatgtgatatgagggggttggctcctgaagcccattcatggattagcctgtggtcaaggtttccagctctgtcactaggacaacttacctaactctctgtgcctcatttcttcaacaaccaaagggaacaatagtacatgcctcatggttgtttgtaggatttaatgagtttg

SEQ ID NO: 636184 - DNA, 570 bp, Homo sapiens
ctccctgggcaaaaatattgcagtcctcactgctatgtagagtcctcacagtatgtagagcagcacctgccacatagtagatgcaggatacgcctttaccgactgaacacctattgcaagtcaagtcctggcaagcactgggaatgragcatatgtgctcacgatccatgcttgtctcacttagcttgggggttcttaccctgagataatgagggggtttatgcaggggtttcagagagtccttgaacccccagaaattagatgcaaaatgagtttataaacacttttctggggagagaatccatgcctgttatcaaatacccataggggtaagagtccaaggaactagagggaaaaagaggggactgtcaatgacactgtatggggtttgtccccagggggagggccaagcggtagctcacacaggcacaaacctgaccagatgccagggaggcaggtgtgtgaggaaccccagcaagtgtgcacacaggaatgtgcctttgccatcctggaaggcttccccagggaggtgatcagagcaggcctgagaatgagcagacaacaggcttt

SEQ ID NO: 636185 - DNA, 602 bp, Homo sapiens
gactgtcaatgacactgtatggggtttgtccccagggggagggccaagcggtagctcacacaggcacaaacctgaccagatgccagggaggcaggtgtgtgaggaaccccagcaagtgtgcacacaggaatgtgcctttgccatcctggaaggcttccccagggaggtgatcagagcaggcctgagaatgagcagacaacaggctttctgtgcagacactcttccttcctggccccaaggaaaaggaagtggagaggatgagggggtctggggcagggcagggggatgtcagtggaggctgatagaaaatgggagggggacaggtrgcctattttgtagcccggactaggcaaacattgtcaaggccagcagcagggacacatggtgaggggcagagactttggggtcctgcagacttggaggtatttaaagccatgggactggaagaaattgtctaggaagagagagaagagaagaagtacaaggaccgagccctcagaatttgaagagatgagcaagaatcagcagaggagttaagaaggggggtctgaagtccaggagagcttcccggggcctgaaatcactcttggcagctcagacaa

SEQ ID NO: 636186 - DNA, 400 bp, Homo sapiens
actttgagttctgttacactgtattgtcagttgttttccttcaggtaaagctcactttgtacaatagctttttatagattccatcagattttgtacctagagggtcttccatctttgcatacagtttaatttcttactttacaatctagatgctttttgtttcttttccttgccctgttgcattagctagcacttcagtgcagatgttgaatagaagtagtgagagcagacatctttgctttgttcctaatctcaggaagaaaacatttagtttttacaacacatttattaaatgtgttgtagctgtrtaggttttttgtagatatcctttatggagttaaagttgccttctattcctgttttgctgagagttttgttttcaggaatgtatgttggattt

SEQ ID NO: 636187 - DNA, 400 bp, Homo sapiens
actttgagttctgttacactgtattgtcagttgttttccttcaggtaaagctcactttgtacaatagctttttatagattccatcagattttgtacctagagggtcttccatctttgcatacagtttaatttcttactttacaatctagatgctttttgtttcttttccttgccctgttgcattagctagcacttcagtgcagatgttgaatagaagtagtgagagcagacatctttgctttgttcctaatctcaggaagaaaacatttagtttttacaacacatttattaaatgtgttgtagctgtgtaggttttttgtagatatcctttatggagttaaagttsccttctattcctgttttgctgagagttttgttttcaggaatgtatgttggattt

SEQ ID NO: 636188 - DNA, 598 bp, Homo sapiens
ataggattaaggagacttgcagacagctacaaagaacctttaagcaaatataccctagaaagaccagaacatgtgagacagtgatgactagaataagtaactaatctttcaatgaaaatccataaatgtacatacacaagaaacaacagcaaacagggaatcatgacctccccagatggacaaagcaaagagccagtgatcaaccctaacaagatggtgatgtgtgaactctcagataaagaattcaaaatagcaattctaaggaaaygcagtgaattccaaggtaatatagaaaatcaattcagaaaattaacagaaatttcacaaaaaggttgaaataattttttaaaaaatcaaacaaaagtcctggaactgagaaatgcatttactgaactgaaaaatacattagagactctcaacagcagaaggaagatcaagcagaagaatcagtgagctcaaagacagtttactggaaactacacagaaaaaaatgaaaaggaatttaaaatgcctacaagatatagaaaataattgccaaaaagcaaatgtatgtcattggcattcaggagggagttgagaaacagcaagagtaagaagt

SEQ ID NO: 636189 - DNA, 598 bp, Homo sapiens
ataggattaaggagacttgcagacagctacaaagaacctttaagcaaatataccctagaaagaccagaacatgtgagacagtgatgactagaataagtaactaatctttcaatgaaaatccataaatgtacatacacaagaaacaacagcaaacagggaatcatgacctccccagatggacaaagcaaagagccagtgatcaaccctaacaagatggtgatgtgtgaactctcagataaagaattcaaaatagcaattctaaggaaacgcagtgaattccaaggtaatatagaaaatcaattcagaaaattaacagaaatttcacaaaaaggttgaaataattttttaaaaaatcaaacaaaagtcctggaactgagaaatgcatttactgaactgaaaaatacattagagactctcaacagcagaaggaagatcaagcagaagaatcagtgagctcaaagayagtttactggaaactacacagaaaaaaatgaaaaggaatttaaaatgcctacaagatatagaaaataattgccaaaaagcaaatgtatgtcattggcattcaggagggagttgagaaacagcaagagtaagaagt

SEQ ID NO: 636190 - DNA, 598 bp, Homo sapiens
ataggattaaggagacttgcagacagctacaaagaacctttaagcaaatataccctagaaagaccagaacatgtgagacagtgatgactagaataagtaactaatctttcaatgaaaatccataaatgtacatacacaagaaacaacagcaaacagggaatcatgacctccccagatggacaaagcaaagagccagtgatcaaccctaacaagatggtgatgtgtgaactctcagataaagaattcaaaatagcaattctaaggaaacgcagtgaattccaaggtaatatagaaaatcaattcagaaaattaacagaaatttcacaaaaaggttgaaataattttttaaaaaatcaaacaaaagtcctggaactgagaaatgcatttactgaactgaaaaatacattagagactctcaacagcagaaggaagatcaagcagaagaatcagtgagctcaaagacagtttactggaaamtacacagaaaaaaatgaaaaggaatttaaaatgcctacaagatatagaaaataattgccaaaaagcaaatgtatgtcattggcattcaggagggagttgagaaacagcaagagtaagaagt

SEQ ID NO: 636191 - DNA, 555 bp, Homo sapiens
atatctttccagctttttgtgttctcttcaatttctttcrttggtgttttacagttttttttgcagagctcttttaacttcatagattaaatttgtttctaaatattttttatttttgaagttattgttaatgaagttgatatcttgattctttttcagatgttcaccgttgacatatataaattatactgatttttgtatgttgatttggtatatagtcacttttgtgaattagttcataaggtctaacagttttttagtggagtccttaggtttttctaaatctaagatcctgtcatcttcaaacaagagaggttgattaatggattaaaaaaacaggtagaagaaataaaatctagtgttccatagttcagtgtggtgaatagagttaacaataactattatatatgttaaaatagctggaagagaaaaatttgaatgttcccagcataaagataaatgtttggggtgacatatatcccaatttacctgatatgatcattacacattatatgaacctataaaaaggtcacgtgtaccctgaaaacatgtaca

SEQ ID NO: 636192 - DNA, 555 bp, Homo sapiens
atatctttccagctttttgtgttctcttcaatttctttcgttggtgttttacagttttttttgcagagctcttttaacttcatagattaaatttgtttctaaatattttttatttttgaagttattgttaatgaagttgatatcttgattctttttcagatgttcaccgttgacatatataaattatactgatttttgtatgttgatttggtatatagtcacttttgtgaattagttyataaggtctaacagttttttagtggagtccttaggtttttctaaatctaagatcctgtcatcttcaaacaagagaggttgattaatggattaaaaaaacaggtagaagaaataaaatctagtgttccatagttcagtgtggtgaatagagttaacaataactattatatatgttaaaatagctggaagagaaaaatttgaatgttcccagcataaagataaatgtttggggtgacatatatcccaatttacctgatatgatcattacacattatatgaacctataaaaaggtcacgtgtaccctgaaaacatgtaca

SEQ ID NO: 636193 - DNA, 505 bp, Homo sapiens
ctatggcagctatagccttacaatatttatttcttaaataatgacttgtaggttgaaattacttcttgatccatgggctaaaaaatggatgttgtttagcaggcatgaaaacattaatctccctgtacatctccatcagagctcttgcttggctaggtgcattattgatgagtagtaatattttaaaataaaattatttttttctgagaagtaggttccaatggtgggttaaaaatattcagtaaactatgctgtaaacagatatgttgtgatctaggctttgttgttccacttataggcacaggcagagtagatttagcataattcttaagggtttataagggccctagaatttttggaatrttagcagggcattggcttcaacttaaagtcatcagctgtgttagcccctaacaagagaatcagcctatccttttagccttttaaatcaggcattgaatttcatctattctcttagttagaccttctgaatgtctgaataact

SEQ ID NO: 636194 - DNA, 483 bp, Homo sapiens
ggatgtctacactcctaggagacaactgggacctaccatgtccttgacactccttccacctgtctgaggaaggcacaggtgccctttctcactcaatacaggtttattcttagaatttagggatttgtatcccaggtgctgagatatgacggtaaacatgtgaaaagtaagtcctgggagtgcctccagctcccttgccatgtgagcatctgttgacagagctggtctacccatccagattcacccaggagtctatgttcctaaaggaactcactgtgccacttggtggcaccaaaaagttgcgcaaagaactctgttctctataaatacaaactaccacccctccctcctccgctctctccccttccccccatcccccctttctcagtascggggagattgctgcacacgccgccctcagctcggctgttctgcgcacgctgagcggagggaatgagcttgagatcatcttgggggggaagc

SEQ ID NO: 636195 - DNA, 597 bp, Homo sapiens
tatttgtaaatgagatagtatcttgatattcctttatcttagttgtttaaaatgtgtttctaaaaaacattaaggcataggtttgctttcatttcctttaaattcataggagatgaaaatctatattttacctttctgaatcatcttttaactatatataacttttgtcagaagggccatcaggcaaaagtcttggtgcagactcatccctgctctaataactactatttattaagcacgtcaggcatcatgctaagcagtaggtatgttattttatttaattatcatatcaacaatacaaggcattatttgtttttccttttcagttataaaaactacgttttttattctactgtcaaagaacagtgcatagtttatgcagtgttcactgtgggtcactttatttttatttgtgcaattaattcattatacttattcaataacatgtactgccataacccatcccccattttcaaaataaggaaacatatatttcattcatatatatgtgtgtgtgtgtgtgtgtgtrtatatatatatatatataccatttaccatatatgtaaaaggcaaaaataatggaaatatatatacata

SEQ ID NO: 636196 - DNA, 614 bp, Homo sapiens
aaggaatgtgcaaatatctacttttctcatatattcaagaatattttaaaataaacatgcaaatgcttgaagataatcagaaatcaaaataatacgtaattgctatctcaaatatctccttttttagtcagactgtagaagaagtgtaaaagaaagacttagatgcaaaatatatattttctgtatatattattctattggtcttgcaaatatatcagattcaagaaaaattctctaatgattagttgttcacaataatgctggttcaggccatgggttttaaaattttgagtataaatgttctgaggaaaatgaaaacttgtaatcacagtgataatagtgagcactttaataatgcaaccttcttacattcattatattttacagaagaataatcaaaaatattttttgaaaaacaatttgtctaaatgcatagtaatgtagaattattcaaagacatagaagtaaataatrcactattatatcatttgtttaaaaataaataaaatgaaaaatcaacatgtaaattaatttataaagttatcgttattgttgcagtcttgttaaaattataataaactttgcatttcctatcaagaacagcctttgaattc

SEQ ID NO: 636197 - DNA, 598 bp, Homo sapiens
cataatttgttgagagtgtttatcaggaaatggatgtttaatgttatcaaatgccttttctgtctattartcatatgatttttgtccttcattctgtaaatgtgatgtattacagttattaacttgcatttgttgaaccatctttgcatccctgggatgaatcccactttacgaggggagtaatctttttgatatgctgttagatttggtttgctggtattttgttgaggattgtgatattggcctatatttttctttttgtgttgtgttcttttctggtttgggtatcaggacaatgctaggctcttagaattaatttcaaatgaatagtttgagaagaatgggtattagttcttctttaggtgtgtgttggaatgcagcagggaagcctttaattaggtcttgagctttcctttgattggagacttttctattactgattcaatcttggcactctttattggtttgttcagatattcaattcctcataacaatcttagtaagttgttggtgtccaggaatttgccttcttcattcaggttttccaatttgttgatatatattcatagtagtccctcatgattctttatatttccat

SEQ ID NO: 636198 - DNA, 433 bp, Homo sapiens
tgttgcttcattgatcgtattagtccattttcatgctgctgataaagacacacccaagactgggcaggttgcaaaggaaagaggtttagtggagaactcacagttccacatggctggggaaacctcagaatcagggcagaacgcaaggaggagcaagtcacatcttacrtggataaggcgaagagagcttgtgctggaaaactccctgttacagcaaccatcagatcttgtgagacttactcactttcacaagaacagcacaggaaagacctgcccccatgattcagttacttcccactgggtccctcccacaacatgtgggaattgaagatgagatttgggtggggacacaaaccgtatcattgtacatttttagtcatttatacatttagagcttttgctatatcccataggttttgttacgttgtgtttc

SEQ ID NO: 636199 - DNA, 611 bp, Homo sapiens
tgagacttactcactttcacaagaacagcacaggaaagacctgcccccatgattcagttacttcccactgggtccctcccacaacatgtgggaattgaagatgagatttgggtggggacacaaaccgtatcattgtacatttttagtcatttatacatttagagcttttgctatatcccataggttttgttacgttgtgtttccctttttgtctcaaaaaatttttgtcaattttcttaatttattcattgagctattggttattgcagagcatgtkgtttatttccacgcattgtatagattctaaagttcctcctgttattaatttctaactttagtccactggggtcagagaggatacttaatacaacttgattttttaaacttccttatgacttgttttgtggtctaacatggtctattctgcagattgttccatgtgttgttgagagtaatgtgcattctgaggctgttggatggaatgttctttaaatgtctattagttctattgtgtttagaatgtagtttagcactaatctttctttgttgacattttctctgaatgatctattgctaaaaatggggtgttaaaatcccctatttattgtggt

SEQ ID NO: 636200 - DNA, 610 bp, Homo sapiens
caaaacagcattactattttcctcatttggaatatttagaattaaatatcatttattttttccatcaagatggaaggcaaggtgttatagtaaatatgacatattaatttaatattttttatcaagaggattcaaatattagactgggaattagaatatgtgagttttatttctaccttttactccaagaggtaatttatatgtttttttaaactaatttataagggttggtttctaattctaattctatttataactgtgtggtcatggaagggtgatccagatttccaattctataatgttaaatamtccagttctaaaaatatctaagatttataaccacacttaatctttgtggatattactatgaaggaaagatttttttttaagaaaaggtattgaccaagacttttacatttcagttgtaagttataggaaaacaatttgaaataaataattattaattgatttgaaataaatttattatttatttgaaataaatagattattaaaattgggagaagtttcttggaaggcaaaaaaagcatctattttgaagacatttcatgaccagatgaatcatagtgctaggtgcaggagataacatgat

SEQ ID NO: 636201 - DNA, 315 bp, Homo sapiens
agaacgcccctgcccaccgcccccccacacacacacatatagtgaggatgttcacattgtccactactccagtagctcctctactcgtcaggcaggacttactcaggttatggaaggtagggccaaaaaaaaaaaagtctyccccaaagtgttatgcttggtggccatatggacagttagtattagtggccatatggacagtttggtctatcaaactgattgtccctgagcaactcatgctgatgcacatccctccacagtctgtggcaactcttatttggaaaatgtccagaggtgccctccctgtggtttcca

SEQ ID NO: 636202 - DNA, 397 bp, Homo sapiens
ttttctactatacaaaaataatctccattttttctaaaaaaatttgcaagttcagaattttttttttagtttaatgaattcacaatatttatagaatctatgagtagggtcctaatcaatarcaagagaaatttacttatgagtacattcaccttaaaaacaagataacctttaattgtgtgttttatttagcaaaccattttcacattactttttttagtggttacataactttgcattttttaaatactcttggaaaatttggataggtctattagtgcttgagtgtggcacagaaaaacataaaatcatctttttgtgttgtttccatattttagatatttttttcttaactactctaaagttgtataatgcctgtcatagcttcatgagaaaa

SEQ ID NO: 636203 - DNA, 571 bp, Homo sapiens
acagcaccatttggccttgagcctacaactaaaaccatttgccaagggagccagaaggaatcatgaacaccagtgtctcagcaagaaaagatcattttcctgctgacattgatctctgcaatggaactgaaacttgtcctgtggctcaattccagtccagcccagttgaagttccagcttagaactgctcacacaaggaccacagagagactttcccatatgttgcacacagaatctgagccaaaataaggggcttaccagccttcatcccatagcagatcttgagcaagcccagwctcacctctgggacctcttgttgcaatcagaaaactatcccacctgtgcagggacccacaagggtatgtgcatccagctgagctaatgaaacaggctcaccagcctctgtctcacatcatattctgagggtgccctattttggctccagctcctcgcactatagtccatgaactattctgcctgtgcaggatcctgctgggaaacacatgcctgccttattactcagtgagatgggcttgacagccaccatcctacaggagggccaaaaagcccc

SEQ ID NO: 636204 - DNA, 571 bp, Homo sapiens
acagcaccatttggccttgagcctacaactaaaaccatttgccaagggagccagaaggaatcatgaacaccagtgtctcagcaagaaaagatcattttcctgctgacattgatctctgcaatggaactgaaacttgtcctgtggctcaattccagtccagcccagttgaagttccagcttagaactgctcacacaaggaccacagagagactttcccatatgttgcacacagaatctgagccaaaataaggggcttaccagccttcatcccatagcagatcttgagcaagcccagtctcacctctgggacctcttgttgcaatcagaaaactatcccacctgtgcagggacccacaagggtatgtgcatccagctgagctaatgaaacaggctcaccagcctctgtctcacatcatattctgagggtgccctattttggctccagctcctcgcactatagtccatgaactattctgcctgtgcaggatcctgctgggaaacacatgcctgccttattactcagtgagatgggcttgacagccaccatmctacaggagggccaaaaagcccc

SEQ ID NO: 636205 - DNA, 627 bp, Homo sapiens
taattaccctgacttgatcaccacctattgtattcatgtatcaaaatattactctctaccccataaayacatataactattatgtttcaattaaaaacaactttttaaaaaagttgtaaacaaagaattctagaagctgcaagagaaaagcatctagttacatatcagcaaattcttattactctgtcagcagatttctgcaagcataaaattgcaggctagtaaagaatagggagatatattcaaattggcaaaagaaaatgcatggtactcaagaacctatattcagcaaagctagtcttcaaaaatgaaagggaaataaacaccttcctagacaagcaaaatcttaggaaattcattaccactatactggtcttacacaaaatgcttaagggagtgctacaaccaaaaatgaaaggatggtaattactatcatgaaaacatgtgaaagtataaagctcacaagtagagataagttcaaaatcaaactcagaacaccctagtgctgtaatgagccatgtaaatcttgtattcctctagtatcatggtttatagtcaaaatgatcaaaaacaatagctacaattagtggctaaggaacccatagtagataaagatgtaaatgaagg

SEQ ID NO: 636206 - DNA, 564 bp, Homo sapiens
cttcttctacttgagtcatttccttcatccttagtgcccagccataatttgaagcttcataatcacttctctggttatttggtaagtccygctgaccattcccacctctagtctctcttttttgcatctatttctgtaatttgctggagccttctttctaaatatgtgcctaaacatgtctctccttggtctgtagtgatttttgttatgtctcttcaaaatgtgctccatccaacataatatctatttctctttcaatttattattgccacgtgataaaccaatgcatacttagtcatttcttaaattagaaaaatgaaacttgaaagacatgagtctgtagttgctctaatatctgaagatagccctgcaaatatgattatagtcctgattttaattttttgcttatcatgctgttatactaattcaaactaagacagcttctaaataaataaataaacaaataaacaaatgccattggcatctgtcgtgagaaatgagtgcctattgagtaaaggcagtgataattcaaagcagtagttgtcaacctggctagattattaa

SEQ ID NO: 636207 - DNA, 492 bp, Homo sapiens
ggacttggttttctagagccaggagctgggtctggctatgttttctgccccatgtcacttttcctaaattggccattaccaaccacacttagaatagattcacctggatttgaagggttaattgcagtgacaggctaccaccagaagagggtagcagagggttgcagagtaagagctgctgctggcctargtcttcccctactgaagaatgaagttgtcttcaaacaaatggctaatatagtcagtcaagaggtgagttcactggctaaagcaatggcctgagaagaatgttatttataagagctgggactggtcttgaatttcacatgccttggaagaaatagggagtatagtgtatcagagacgattctagtgcccttagataatatagatccttaaagtatatcccataacatgaatgtctactctactatggcctctgtctattcttcaggttcctctcctgtcattcctacccattcaacccctgtt

SEQ ID NO: 636208 - DNA, 564 bp, Homo sapiens
cttcttctacttgagtcatttccttcatccttagtgcccagccataatttgaagcttcataatcacttctctggttatttggtaagtcctgctgaccattcccacctctagtctctcttttttgcatctatttctgtaatttgctggagccttctttctaaatatgtgcctaaacatgtctctccttggtctgtagtgatttttgttatgtctcttcaaaatgtgctccatccaacataatatctatttctctttcaatttattattgccacgtgataaaccaatgcatacttagtcatttcttaaattagaaaaatgaaacttgaaagacatgagtctgtagttgctctaatatctgaagatagccctgcaaatatgattatagtcctgattttaattttttgcttatcatgctgttatactaattcaaactaagacagcttctaaataaataaataaacaaataaacaaatgccattggcatctgtcrtgagaaatgagtgcctattgagtaaaggcagtgataattcaaagcagtagttgtcaacctggctagattattaa

SEQ ID NO: 636209 - DNA, 264 bp, Homo sapiens
ggacctacagctagtttgaaaatgttcatttcaataagcatgtcctctgtgactgggtgtggtgtctcacacctgtaatcccagaactttgggagcygaggcgggaggatcatttgaggccgggagttccagactaacccaggcagcatagtgagatcctgtttctataaaacaaaacaaaaaataagtatgttctctgagttgggctgtgattggttgtggcactggggatgaggggaaaggactaaaaataaaggtaacatt

SEQ ID NO: 636210 - DNA, 264 bp, Homo sapiens
ggacctacagctagtttgaaaatgttcatttcaataagcatgtcctctgtgactgggtgtggtgtctcacacctgtaatcccagaactttgggagctgaggcgggaggatcatttgaggccgggagttccagactaacccaggsagcatagtgagatcctgtttctataaaacaaaacaaaaaataagtatgttctctgagttgggctgtgattggttgtggcactggggatgaggggaaaggactaaaaataaaggtaacatt

SEQ ID NO: 636211 - DNA, 616 bp, Homo sapiens
gactgttatactcagctattctcactaataatctataaagtaaaaaacacagccttttctcccccttcatgacttctcaacacacatttactaaacacctgtggcatgctggtgcttaataatggacatggatcctgcctactagcttcttagaattgaatctgagaattctataaaacaattaagtagtctgtctttgtggtatacgaagtatttgtaatttataaggtactgatccttttagaatcaatgtaataataattgtccctatctcgttgcacacgacatctccttactctagagctgttcttaaatatttaatattcatcaggtgtcttcacagtgctgtctcatctgttaattatttcctttaccyataaaatatttaataacatattctgtgtatgtcactgtataagacactgggaatataaaaatattttagtataactattaagaagaatcatattcaaggcacattaacaggcaaaggaaggagttgatgttcattagggtggtatggaaggcattatagaaattatgtgaacaacatcttgaaggaggataagaatgttatcagatagacaaggaggtaataggatgaaggaaaaattag

SEQ ID NO: 636212 - DNA, 554 bp, Homo sapiens
gcctccatataaatgaaactacaagaaaaataatttggtgaagkattcctgaaatgtttttacattcagagtcagccccttttgagttacttttaaagtcagagtcaacaatgcctgtttttactaattatttgctttggccttaaagaatgggtaggatattagatgcatggcaaagagtgggcatgcttagccacaatcagagtcatggaatggagaagcacaagcagtgtccagagaaagtaggccatctgactttagcagcaggatcacacaggatgtgagcacatggagaatggttgcctgactcgagatattttttggaggtagaattgccaatataaaagcagtgccatcgcacaatgctccatgctcagaagcagaccctacatttgaggtttaatgatctgtggtcttggtgttgaaattcttattaatcttatctttgggtttgtgctttataagtgaagttatagggacaatggagcatatgcttggttcatatgcatcctgcagaccttttgttctttgttttcctgggatgggtcttggct

SEQ ID NO: 636213 - DNA, 600 bp, Homo sapiens
gatacctattccctgtagattgagaaagtgaatattgatttccctacccccagccaaggcctcaacatttatctggtgctgcaaattgcatagccagtcctgcctagagcaccacaatatttacaggtaagacagacgaggaagagctagtaggacacaccaagtagtaacagcaagagagaaaggcaaaaatcaaaggggatgtgattatagaaatcagtacatagaggaatgtgttttgtgaaaatgaaagtggtcaactgtgcctaatgctatcttaacatggggacttgcagggataattggattttataatatggagtctttgaaggttcataacaaactcattggycaagagatgacaggggaagatgactagagtgcctttatgtgggaatgggtagccaggaaatggaattttcatttaagatacttgctaagatttaagctttaaatcatgtagtctatattcaaatattaactccccccgttttataaactataaatgtttgatgaagccacttaacctctataagcctgttttctcattgatgagatggaaatatcaaaagaactcctctcatagaataattgatttac

SEQ ID NO: 636214 - DNA, 430 bp, Homo sapiens
attactctccttcattaaataatctgaaaaatacaattcagaaagttccctagaaaccttggcctattcaaccagaaacatgtgctatctaaatgtgagcattcaattttgtcagatccataattattagttcaaaattttaacyttattatttttctatttgatcattatatatcttgtatcacagtaatcaatttccaattagcaaaagtaaataatacattgaattaatatataacagtaaacactagtggcttcctgatataagcttaataatctccacctcactcatatatcttgacaaattcccttccttaaagtatgaatcaggtcgattttgtcccaaagtcccacaaatttctataatcacacaatttcacagtatatagtcatttactatttattttaatgatttctttttatttctatg

SEQ ID NO: 636215 - DNA, 430 bp, Homo sapiens
attactctccttcattaaataatctgaaaaatacaattcagaaagttccctagaaaccttggcctattcaaccagaaacatgtgctatctaaatgtgagcattcaattttgtcagatccataattattagttcaaaattttaaccttattatttttctatttgatcattatatatcttgtatcacagtaatcaatttccaattagcaaaagtaaataatacattgaattaatatataacagtaaacactagtggcttcctgatataagcttaataatctccacctcactcatatatcttgacaaattcycttccttaaagtatgaatcaggtcgattttgtcccaaagtcccacaaatttctataatcacacaatttcacagtatatagtcatttactatttattttaatgatttctttttatttctatg

SEQ ID NO: 636216 - DNA, 430 bp, Homo sapiens
attactctccttcattaaataatctgaaaaatacaattcagaaagttccctagaaaccttggcctattcaaccagaaacatgtgctatctaaatgtgagcattcaattttgtcagatccataattattagttcaaaattttaaccttattatttttctatttgatcattatatatcttgtatcacagtaatcaatttccaattagcaaaagtaaataatacattgaattaatatataacagtaaacactagtggcttcctgatataagcttaataatctccacctcactcatatatcttgacaaattcccttccttaaagtatgmatcaggtcgattttgtcccaaagtcccacaaatttctataatcacacaatttcacagtatatagtcatttactatttattttaatgatttctttttatttctatg

SEQ ID NO: 636217 - DNA, 430 bp, Homo sapiens
attactctccttcattaaataatctgaaaaatacaattcagaaagttccctagaaaccttggcctattcaaccagaaacatgtgctatctaaatgtgagcattcaattttgtcagatccataattattagttcaaaattttaaccttattatttttctatttgatcattatatatcttgtatcacagtaatcaatttccaattagcaaaagtaaataatacattgaattaatatataacagtaaacactagtggcttcctgatataagcttaataatctccacctcactcatatatcttgacaaattcccttccttaaagtatgaatcaggtcgattttgtcccaaagtcccacaaatttctataatcacacartttcacagtatatagtcatttactatttattttaatgatttctttttatttctatg

SEQ ID NO: 636218 - DNA, 620 bp, Homo sapiens
taataggttacccaataataaaacattgttttattcctggaaaactgtagctggtaatgatttgttatacttctaatatgtttctagaatctgtttattaagctttttaaaaatgttttgtggtaaagtatgcataatgataaaaatattaatgcattttaatgcagtaataaaatattattaacattttatctttttatattgtggtaaggtatgcataacataaaatgtatcattttaaccatttttaaatgttcagtgatattggttacatttacatttttgagttatccaaacaattttactctgctactcataactttaatagaatctttaagttgtgcatygctgattattttttcaaactatcttatttggagttttatcttttatcttctttctttcttttcttcttgttaactttgatccatcattaaagtattctcttgaaacactttaaaattcttatgtttttacatttaaacaacaggaaaactggaaaagaatgtcacaaatatataacatgttatttgcctaatgctttatcctttccatggctctttcacgttcattatcttatgtgaatctcaagagagtacccataggacatacacaatgac

SEQ ID NO: 636219 - DNA, 255 bp, Homo sapiens
cttatgtttttacatttaaacaacaggaaaaytggaaaagaatgtcacaaatatataacatgttatttgcctaatgctttatcctttccatggctctttcacgttcattatcttatgtgaatctcaagagagtacccataggacatacacaatgactatcataaacagcagtccctattagtacatatgatgtaactgattacaatgcagatgttcatatttagacaatgtgcaataaaataaatatttattact

SEQ ID NO: 636220 - DNA, 255 bp, Homo sapiens
cttatgtttttacatttaaacaacaggaaaactggaaaagaatgtcacaaatatataacatgttatttgcctaatgctttatcctttccatggctctttcaygttcattatcttatgtgaatctcaagagagtacccataggacatacacaatgactatcataaacagcagtccctattagtacatatgatgtaactgattacaatgcagatgttcatatttagacaatgtgcaataaaataaatatttattact

SEQ ID NO: 636221 - DNA, 255 bp, Homo sapiens
cttatgtttttacatttaaacaacaggaaaactggaaaagaatgtcacaaatatataacatgttatttgcctaatgctttatcctttccatggctctttcacgttcwttatcttatgtgaatctcaagagagtacccataggacatacacaatgactatcataaacagcagtccctattagtacatatgatgtaactgattacaatgcagatgttcatatttagacaatgtgcaataaaataaatatttattact

SEQ ID NO: 636222 - DNA, 255 bp, Homo sapiens
cttatgtttttacatttaaacaacaggaaaactggaaaagaatgtcacaaatatataacatgttatttgcctaatgctttatcctttccatggctctttcacgttcattatcttatgtgaatctcaagagagtacccataggacatwcacaatgactatcataaacagcagtccctattagtacatatgatgtaactgattacaatgcagatgttcatatttagacaatgtgcaataaaataaatatttattact

SEQ ID NO: 636223 - DNA, 388 bp, Homo sapiens
ctaattacattctatttgttacttctgcaactstttcaattgaaatgaaataagaatgtgtattgtcatttctttatatatgtttctcttgctagacatgaccctggttaatatatcatagtatcaatatattattatatctgtcacaatccaatatagagttaaataaatgaggtagccatcaactatacagttttggactaagtcatgtgagacaaaccacacagttagggttttaccctcaaaatattcatgattgggtatccacagggcacttgcgtgaagtagagttgaaaccattcaacaaacacttattacatatctactctgagtaagctccaatctgaggattgtgaagcctacacaagcatccaaatggtacagagta

SEQ ID NO: 636224 - DNA, 388 bp, Homo sapiens
ctaattacattctatttgttacttctgcaactctttcaattgaaatgaaataagaatgtgtattgtcatttctttatatatgtttctcttgctagacatgaccctggttaatatatcatagtatcaatatattattatatctgtcacaatccaatatagagttaaataaatgaggtagccatcaactatacagttttggactaagtcatgtgagacaaaccacacrgttagggttttaccctcaaaatattcatgattgggtatccacagggcacttgcgtgaagtagagttgaaaccattcaacaaacacttattacatatctactctgagtaagctccaatctgaggattgtgaagcctacacaagcatccaaatggtacagagta

SEQ ID NO: 636225 - DNA, 388 bp, Homo sapiens
ctaattacattctatttgttacttctgcaactctttcaattgaaatgaaataagaatgtgtattgtcatttctttatatatgtttctcttgctagacatgaccctggttaatatatcatagtatcaatatattattatatctgtcacaatccaatatagagttaaataaatgaggtagccatcaactatacagttttggactaagtcatgtgagacaaaccacacagttagggttttaccctcaaaatattcatgattgggtatccacagggcacttgcgtgaagtagagttgaaaccattcaacaaayacttattacatatctactctgagtaagctccaatctgaggattgtgaagcctacacaagcatccaaatggtacagagta

SEQ ID NO: 636226 - DNA, 572 bp, Homo sapiens
accacctcatagatgagtaggaagatcartgtaaggactcttctctgttttctgcttccatgtggtatgaacacttgggtcaaagtcctacagttgctttctaaaggcaggccgaatatcctcaattacccacccctcatctccctctctgtctctctttttacctgtctctatcccttcatctgttctgtgtttctctttgtctcctttctcttttcctatctttggatgggttttctgtcagtttctctcattgtcttcctctctccttttcctgtaagtaactggtaaatgtggaagatctgaattatttgtacctggcaaattcagctccttccttaggttgagtgttccagactataaacatgggtgaatatataaggatcctgtttgatgtctatctaaaccacattcttaaatccacttttaccatgaacactgtgtgctttggggttagtaggcatatgctttgctgattaaaaggttttcactttgtttttattttcttgtttctagttttcccatcaaatagaaccagtaggacaccctccctcctacctgatctccagcat

SEQ ID NO: 636227 - DNA, 572 bp, Homo sapiens
accacctcatagatgagtaggaagatcaatgtaaggactcttctctgttttctgcttccatgtggtaygaacacttgggtcaaagtcctacagttgctttctaaaggcaggccgaatatcctcaattacccacccctcatctccctctctgtctctctttttacctgtctctatcccttcatctgttctgtgtttctctttgtctcctttctcttttcctatctttggatgggttttctgtcagtttctctcattgtcttcctctctccttttcctgtaagtaactggtaaatgtggaagatctgaattatttgtacctggcaaattcagctccttccttaggttgagtgttccagactataaacatgggtgaatatataaggatcctgtttgatgtctatctaaaccacattcttaaatccacttttaccatgaacactgtgtgctttggggttagtaggcatatgctttgctgattaaaaggttttcactttgtttttattttcttgtttctagttttcccatcaaatagaaccagtaggacaccctccctcctacctgatctccagcat

SEQ ID NO: 636228 - DNA, 556 bp, Homo sapiens
agaaaaaacttgaaatttgaagaatagtagaggacaaagatggttgatttattctttgaacatttttccctgatttagcacctggaacagaagtagatgactttgcctttaaacgtccttcatgttttctcactatcctagtttctcgttactttaccactgaggcaaagaagaagaattgagagaaaaataatcctcttttgtggctgctgatatggtagtatagagaaggtacccctgaccttactcaatttgatgctcagatgctccaggggtatgttggattctgtattattgatgagcctagttttctgatggtatccagattcatttagttatctctcttcaagaacccactcatacaatacagccaagctcctcaacaatgtcaccaaagatatatgctgtcaaccacttctctaggttgggcaatttattgcttgaccattcagctggctaggatgcttcctaaattaygcctcccagctaactttcattaactttatgtggagctattggaacactggagcctgcttctgcacttccaagatcatca

SEQ ID NO: 636229 - DNA, 536 bp, Homo sapiens
gatcattaagagatatctatgcagtccatgtggagtgtgggagtcagtggggcaagtcaagtagattgtatctctaaatcccacagggaggtgttcaccagctgtagctgtataaggcacatatctgtcttttataatgaaaaactgggaggaagcagaaaagtgtgagttttgttaagagtagctaagccttgcttctggtatgagaaagttaaacatatattcaaaatggataccaaggtgacataaaattacaagaattcactacagcctacataaaaagcaggtgagatctacatagagttccacctgaatcttccactgagtaatggctgtgcatgagtgtgatgaattaatcaagaccaaggaaagaaacaccacaaagaggcgagagraagaagctgtgaagctcacaaatggccagaaacagtttgtgttcccactaaacagggtgaaaaacgtcatcataattcatgaagcatcaggtagaggactcaggaggctatcacctgaatagggtggaaaaaagcggcact

SEQ ID NO: 636230 - DNA, 552 bp, Homo sapiens
aaataaatcaataaaaaacaaaaagacacaggtgacaattagtaaacaagaacataaaagagttaaaatacattccatatggtaaagaaagtaggcaaaaccatgaccactttaaagagaagcatagaagacagaaaaatgcaaaattgaatttctagagagaaaaactaatygcacgagatgaaaactatcctgaagagggtaaggagcagaatagacacactgggaaaaatattggtgaaattgatgcataataaaagaaactgtctaaaatgaaacacataggtaaaagtagttaaaaaatcatagcatcagagagttaaggaaaaaaactctgcctcatattatgcataattggggccatagaaaggcattaaaatacatgaaaaaataatcaccaatacacatcataatgaaattgattaaaaattggtaaagagaaatattaagggtatccagagataaaacagagatattttgtgcagagaatcagaggtaaaaatgacaaggaaattatttattgttagaaacaaggcttgtcagaagacaatg

SEQ ID NO: 636231 - DNA, 469 bp, Homo sapiens
gtacaaccttcacaagtttaaaaaaccaactcattttaatgtcaataaactgtacagatcctctaggagaaagcacatggctttcaatatttattgaatataaataatgacacaaactgtcagtaaagtaattctcttatctcagagctcagaacatgatacccccaaaggatgacttcctggtgtgctgagtattttcagctgaaggagattgggagtgccacagaaacaagaaggtctctctgcccttcccctggcctctttttctccctygaagtgggtcatagaatccagaactccccaaagcaagccataagacctgggaaggtcattctctgacctccttccttttccccagaggaccttcatgtgacaggtgggtcgtcagggggagaaggccttgcttgtttagattcttctttaccccaggggcctaattctgagcattacaatctctgtatcatagaga

SEQ ID NO: 636232 - DNA, 570 bp, Homo sapiens
aggcttgtccaactcctccattgcaaatgagcaaactgggaggcagagtagggtcgtgcctggggtctggaggggaagcggcatggtgggaagaggctgggcactggatcaggagaaggagtggagaataacaacagggccgggtgctgtggctcatgcctataatcccagtactttgggaggccgaggcaggyggatcacctgaggtcaggagttcgagaccagccttgccaacatggtgaaaccctgtctctcctaaaaatacaaaaattagctgagtgtagtggcaggagcctataatcccagctactcgggaggctgaggcaggaggatcgcttgaatccagaaggcagaggttgcagtgagctgaaatcacatcactacactccagcctgggtgacagagtgagagtccatctcaaaataataataataataataataacaataaggctttaactttttaactgagtgtctgtttcagtgccaggcactctgaacggtatcatcctcacagctggggatgagggcagcaggggaatgaaaggtcgactggttactgatggtcaca

SEQ ID NO: 636233 - DNA, 538 bp, Homo sapiens
cctcagcctcctgagtagctgggattacaggctcccgccatcatcatgccacactaatttttgtgtttttcggagagacggggtttcatcatgttggccaggctgctctcgaactactgacctcaggtgacctcctgcctcagcctcccaaactgctgggattacaggggtgggccaccacacccggcctggctcagcattttgggaggccaaggcgggaggatctcttgagcccaagagttcaagaccagtytaagcaacatagtgagaaacccataccgatctctacaaaaaaaatagaaaaaattagccaggagcggtggtgcatgcctgtagccccagctgcttgggaggctaaggtgggaggattgcttgagcccaggaggttgagactgcaaatgagctgtgatcaagccactgcactgcactccagcctggatgactgagattgaccctgtctcaaaaaaaaaaaaaaaaaaaaaaaaaatgtgggacagataaacggggaaaatccagatgggcccagagtagacagaca

SEQ ID NO: 636234 - DNA, 592 bp, Homo sapiens
cacataatttctatgagtggagctggaatttaaactcagtttgcctccaaacactttgctttttttcctgggatcccaatgaatgagggtgggaagaatcctccaagtcccaaaatgttttacttttcttttcttattcaacttcaggaaggcctacgaaaccctgctgactgtagtcacaagcaagcatttttacagatattggcaatggaggttgccaattttctactggctgtgcagtatagtcataacgttcccagtgtataaatgcatgtgtagtgggacatagaacstgctgatagcacatggcatacttgtagccagccatctttgcatggtagcaccaaccttgaaatcacctcagacaccaactgaaactctgcaatttgagcaacggctctggtttaggtagggaaccagtctaacgcaaggagacatggatcatcatgagacttagagccccgtgacactcagggatctatctgaggatgacagaagcagaaagagaagagggacaccagtttagccacacccaactatgtgtttcattaatacctccttaggagaaaattgacaagtaacatcagaacta

SEQ ID NO: 636235 - DNA, 592 bp, Homo sapiens
cacataatttctatgagtggagctggaatttaaactcagtttgcctccaaacactttgctttttttcctgggatcccaatgaatgagggtgggaagaatcctccaagtcccaaaatgttttacttttcttttcttattcaacttcaggaaggcctacgaaaccctgctgactgtagtcacaagcaagcatttttacagatattggcaatggaggttgccaattttctactggctgtgcagtatagtcataacgttcccagtgtataaatgcatgtgtagtgggacatagaacctgctgatagcacatggcatacttgtagccagccatctttgcatggtagcaccaaccttgaaatcacctcagacaccaactgaaactctgcaatttgagcaayggctctggtttaggtagggaaccagtctaacgcaaggagacatggatcatcatgagacttagagccccgtgacactcagggatctatctgaggatgacagaagcagaaagagaagagggacaccagtttagccacacccaactatgtgtttcattaatacctccttaggagaaaattgacaagtaacatcagaacta

SEQ ID NO: 636236 - DNA, 545 bp, Homo sapiens
aaactacattattttctttaggaatgaaccagaggtagtaaaacatgaggttggaggaagcaaacactaagttctgagagctggcaacattccagtttctgatcagaatggaccgccgaggtgccctctttaaaattattctacatatatactcttagtcacgataaaaaaataaaagtccaggcagcttcatttgtccttaatcccgctagtcaattatagcagggctacggaaattgctasactggaagatagctaactctagtacagagccatttttagtttcacactttgttgttggattgcggacatctatgcacttgccatttcttctctgtaggaacattctgtaatggcgtctagcaaaggaaacttgatttctttttccggtatcttttctcttttcctcaaaatttgcctgccatgaagatgattaactgatctttttaaacctcatgccgcaaaaatcttaaagaaccacaaaagaccaagttgttaaacttgtaaacagtagacgccataacaatctcctcttcaggatgaag

SEQ ID NO: 636237 - DNA, 544 bp, Homo sapiens
ttatgaggtacataagatactttgatacaggcatgcaatgcgtaatactcgcattatggtaaatggagtatccatcctctctgtttctttattaactaaacaaatatttattcactaggtaaatatttattgatagctctgttagattctgctgatacaaagatgacaaatgtctctctctgttgaaggatcctgtcctaggtcatgtccctaagaggtctgctatttaacaggttgaattaatctgtgtcaaaacttaaacaaacctcgttatcataaaatgtcaacacctaagcctctcccacaacctcaatcctttcatactttttaacagggcgcttcagtatcttatctctggagttactaatgagggaactgggagcacagaggcaaggtcagcaatggtccagatgcctcaccctaaggccatttctcaccctaatatatatacaaaccagagtgtgaagccataagaaattagggagtcaggttccatgccaaaagtsaaactacagataatgtgttcctgcagtgtgggtagtat

SEQ ID NO: 636238 - DNA, 544 bp, Homo sapiens
ttatgaggtacataagatactttgatacaggcatgcaatgcgtaatactcgcattatggtaaatggagtatccatcctctctgtttctttattaactaaacaaatatttattcactaggtaaatatttattgatagctctgttagattctgctgatacaaagatgacaaatgtctctctctgttgaaggatcctgtcctaggtcatgtccctaagaggtctgctatttaacaggttgaattaatctgtgtcaaaacttaaacaaacctcgttatcataaaatgtcaacacctaagcctctcccacaacctcaatcctttcatactttttaacagggcgcttcagtatcttatctctggagttactaatgagggaactgggagcacagaggcaaggtcagcaatggtccagatgcctcaccctaaggccatttctcaccctaatatatatacaaaccagagtgtgaagccataagaaattagggagtcaggttccatgccaaaagtcaaactacagmtaatgtgttcctgcagtgtgggtagtat

SEQ ID NO: 636239 - DNA, 615 bp, Homo sapiens
tacttcttcacttaaacttaagttttcttattgatgtgtactctcaacctatactactagatcactgtagtaagagattacctgtatttttttctgtgaktagggaaacccaaccacacacacacacacacacacacacacacacacacacaaaacatatcttccaaaatattaacagtggtatgtttaccatgcttttttcctgctgcactttcataaaccaaacctggaggaaaacgtgtattaatttcgaatttacctttttttctcccacacttggtagaaaaaacaggagctcagtaagtatagagaaaattcattattccctttgctaaaaagaagaggcaaagtgtttggccactattcatatgcctttgattgatcttttcaagtcttcctagcttcagaaaggtggaaattgctggtcccttcaattctctgctgttcagtcacgactataagtaatttacctaaatgtacccccatagccctcttattgcataacacaactcaaggaattttagtggtagattgtctgctgtgcctagtggtagagtatgcaagataataatgaaatagtgatgccacttgaaaatcttgagtgccaagtacata

SEQ ID NO: 636240 - DNA, 628 bp, Homo sapiens
acatgactataaactaccctgaaccctccacatcaggcaggatgcactctctcttcatgcctctgctcagctggatgtttcagagccctatctcccatggagatgtcttccccatttggcaatttgccatcttaatgagactggaacatttttctttctaatatttaaaattatattttaaaaagtaatgcctacttcattgtgaatacctatacagtagtggtccatagttaaaagaagaaaagtaagatttagcctttacaggagggatcaatttccagtaacactaggcaaacttcttcaccattcagaggatcagtttctccatctataaaatgggaaatttaataattatctcagaaggttgttctgataatttttgttttcatttttttgaggcagagtcttgctctrtcacccaggctggagttcagtggcatgatctcggctcactgaaacccctacttcttgagttcaagtgattcttgtgcctcagcctcctgagtagcagggactactggtgcgtaccaccatgcctagctgatttttgtttgtttgtttgtagtttttagtagagatggggttttgccatgttggcaggctgttctcgaactcctggccccaggtg

SEQ ID NO: 636241 - DNA, 409 bp, Homo sapiens
ctcacagatagaaactgatgcagggaagaagcagaagaacagtgatcaactgagagtctataatggagtttcctgccccaacacggggcagcgagactgatgtgcctcttagtgaacatgcccacagaggccagaacaaacctggcggcagaaatggcaaatatcaatctcaagggcggctggcagcctaacaggtggcccaggaggaaaggccaggaaggtggattgctgtcactatcaccgttgagataaatgggaaagacagctcarcccttcaagagggtgatgagaaaccagtcagagctgggtgagcatctgagcagtcctgaaagtgacaaagctgcagggattagagagcattagcgtgtgtgtggtcccatccagccgaggctctgacgaggaggcagcc

SEQ ID NO: 636242 - DNA, 448 bp, Homo sapiens
atctccccctgggcaggtgctccctcactcacagatagaaactgatgcagggaagaagcagaagaacagtgatcaactgagagtctataatggagtttcctgccccaacacggggcagcgagactgatgtgcctcttagtgaacatgcccacagaggccagaacaaacctggcggcagaaatggcaaatatcaatctcaagggcggctggcagcctaacaggtggcccaggaggaaaggccaggaaggtggattgctgtcactatcaccgttgagataaatgggaaagacagctcagcccttcaagagggtgatgagaaaccagtcagagctgggtgagcatctgagcagtcctgaaagtgacaaagctgcagggattagagagcattagcgtgtgtgtggtcccatccasccgaggctctgacgaggaggcagccacagccaggcag

SEQ ID NO: 636243 - DNA, 364 bp, Homo sapiens
gactaggtgtctagtatgtaacagtgttaataaaataaaagggcataatcttgaagagaaatttatagtgatacatctaggaaatagcaaataataaccaaatggttccaagtgccctaaactattttgcatttccaaagggtctctggtttaaaaaaaaaaaagaaaaattaaaaackgctggttttttagcattgacacataaccaaaagtgaaatggagaacaaatttaattaccaaaaatagtttatgcagcatatcaccactgttttatcagtattttttctcaaaaatagttttgtaggaagttgaattttatggataattgtagcaatttaacattttatctcaatcagggtttctc

SEQ ID NO: 636244 - DNA, 364 bp, Homo sapiens
gactaggtgtctagtatgtaacagtgttaataaaataaaagggcataatcttgaagagaaatttatagtgatacatctaggaaatagcaaataataaccaaatggttccaagtgccctaaactattttgcatttccaaagggtctctggtttaaaaaaaaaaaagaaaaattaaaaacggctggtttwttagcattgacacataaccaaaagtgaaatggagaacaaatttaattaccaaaaatagtttatgcagcatatcaccactgttttatcagtattttttctcaaaaatagttttgtaggaagttgaattttatggataattgtagcaatttaacattttatctcaatcagggtttctc

SEQ ID NO: 636245 - DNA, 364 bp, Homo sapiens
gactaggtgtctagtatgtaacagtgttaataaaataaaagggcataatcttgaagagaaatttatagtgatacatctaggaaatagcaaataataaccaaatggttccaagtgccctaaactattttgcatttccaaagggtctctggtttaaaaaaaaaaaagaaaaattaaaaacggctggttttttagcattgacacataascaaaagtgaaatggagaacaaatttaattaccaaaaatagtttatgcagcatatcaccactgttttatcagtattttttctcaaaaatagttttgtaggaagttgaattttatggataattgtagcaatttaacattttatctcaatcagggtttctc

SEQ ID NO: 636246 - DNA, 364 bp, Homo sapiens
gactaggtgtctagtatgtaacagtgttaataaaataaaagggcataatcttgaagagaaatttatagtgatacatctaggaaatagcaaataataaccaaatggttccaagtgccctaaactattttgcatttccaaagggtctctggtttaaaaaaaaaaaagaaaaattaaaaacggctggttttttagcattgacacataaccaaaagtgaaatggagaacaaatttaattaccaaaaatagtttatgcagcatatcaccactgttttatcagtatwttttctcaaaaatagttttgtaggaagttgaattttatggataattgtagcaatttaacattttatctcaatcagggtttctc

SEQ ID NO: 636247 - DNA, 565 bp, Homo sapiens
ctcttgggtttcaaaggtgtcagagtctgagggatgatttctctagttgagctccaagggatcatcaggcgagatggatggagggcctgaaagccatccccttcagagagaatgggcagtgcaagatgaatcaaatggggcttgacatttctgttacatgaagcttattggtgagacacttgataagtggtgattatgcctcgtgaaaaaaggctagtgtctctggaacatttgtggcctcggaatttaggatgcatggccaggctgagtggagctacgacccttcactgtacttgttgcaggggtgttcactgagcatttcatctggcattggaaccataaacagccaagcccatctaattcttcaaaagcacaacatattatttacctttaagacgaacaatacttttttctttttcttcatttttttcttcttcttttgagaacacagaaaatccacagaatttttccccttttgaatatgctacacttagcacagtccstggcactaattggattctcgacaaatatatgttgtattgaaagggataggagcctaactatt

SEQ ID NO: 636248 - DNA, 576 bp, Homo sapiens
aggcttagttgattgaaacaggtgagagaagccttgttgctatttgtttttcagatacagaaacaaataaaatcaaaggggcccatgacaaattcatctgattacatagaaaacgttcacacagccaaataaattaagtcaaaaaaaagttagatggtgaaaagtcattaatatgctcttatcactctaacatcaaacgtaaagagtgctttagcatcctaaaaagcagcagatgtttttgtttttttcagaaaattcaagggtaatgtctattagcagaaagacactcacacatgcctcagtgtgaatctcagctttgtcacctaccagctgtgtacttcgatgcaatttatacaacttgcctgagcctcagtttccttattgtaaattagtgatagtaacacctaatatataggttgatgagtagactaaatgagatactgtgcttaaaatgcttagcgcagtacctagtacttaacagacactcaataaatgggcctcaaagacagttatggacatcagtaaaaattagtcacttttgtgttgtrtaactgtacgtagatcttagaaaggcaa

SEQ ID NO: 636249 - DNA, 592 bp, Homo sapiens
cgattgtgctcagagtttatgttcctgagttcagcatattttgtgttctccgtagttctggtgacagaattctctccttgttccagtctgctgagatgaccatgggtccatctcttcttggccttgtcactgccccatggtaacatcttctgaggtggtctcatgctcatctgaatcttaactagccagtccattcctcttgattgcagggtcctccattataaccaagagaaccctcttgtttcacccaggttgggtgtctcatttctgtcacttatggtcacttgaagaagatatttggctgcttcctgasccctgatggggtattcagccctactcagggaaacagtgttagatgcatctacccaaccatccctacacaggctgactctactgcacccttctctgccatggggaaatagagaactctttacgggtatgtatgccataaatgcttcaagtgggaagcagaataaaaacaccctctactctcaatcttataaacataaatggagcatttctgccagtaagatcccaccactcttttcagtcttagagatactaaccaggatctcactgacccttctttccc

SEQ ID NO: 636250 - DNA, 592 bp, Homo sapiens
cgattgtgctcagagtttatgttcctgagttcagcatattttgtgttctccgtagttctggtgacagaattctctccttgttccagtctgctgagatgaccatgggtccatctcttcttggccttgtcactgccccatggtaacatcttctgaggtggtctcatgctcatctgaatcttaactagccagtccattcctcttgattgcagggtcctccattataaccaagagaaccctcttgtttcacccaggttgggtgtctcatttctgtcacttatggtcacttgaagaagatatttggctgcttcctgacccctgatggggtattcagccctactcagggaaacagtgttagatgcatctacccaaccatccctacacaggctgactctactgcacccttctctgccatggggaaatagagaactctttasgggtatgtatgccataaatgcttcaagtgggaagcagaataaaaacaccctctactctcaatcttataaacataaatggagcatttctgccagtaagatcccaccactcttttcagtcttagagatactaaccaggatctcactgacccttctttccc

SEQ ID NO: 636251 - DNA, 592 bp, Homo sapiens
cgattgtgctcagagtttatgttcctgagttcagcatattttgtgttctccgtagttctggtgacagaattctctccttgttccagtctgctgagatgaccatgggtccatctcttcttggccttgtcactgccccatggtaacatcttctgaggtggtctcatgctcatctgaatcttaactagccagtccattcctcttgattgcagggtcctccattataaccaagagaaccctcttgtttcacccaggttgggtgtctcatttctgtcacttatggtcacttgaagaagatatttggctgcttcctgacccctgatggggtattcagccctactcagggaaacagtgttagatgcatctacccaaccatccctacacaggctgactctactgcacccttctctgccatggggaaatagagaactctttacgggtatgtatgccataaatgcttcaagtgggaagcagaataaaaacaccctctactctcaaycttataaacataaatggagcatttctgccagtaagatcccaccactcttttcagtcttagagatactaaccaggatctcactgacccttctttccc

SEQ ID NO: 636252 - DNA, 447 bp, Homo sapiens
gaattctagtctaaaagaccaagttgaagagcagggccgggtgcagtggctcacacctgtaatcccaacactttggaaggccgaggtgggcagatcacttgaggtcaggagtttgaaaccagcctggccaacatggagaaaccccgtctctactaaaactacaaaaaaatttagctgggtgtggtggtgcatgcctgtaatcccagctactcgagaggctgaggcaggagaatcacttgaactggggaataggaggttgtagtaagctgagatagtgccattgcactccagcctgggtgacaagggtgaaactccatctaaaaaaaaaagcaactaggaacaggattgcagatttatcataraaggatgagttgaagatgttgtgaatgtttatcctggagaagaaataggaaaatgtgttaaatgctattgaatattcgaagctgg

SEQ ID NO: 636253 - DNA, 604 bp, Homo sapiens
ctgggcttaacctgccctttagttccatgaattcaaactagaggttacgatgagagctttttacctcagtatgagaagtagtagtttcttggtcagatctatcaggagagagcctgggctccctggggaggctgagttctttatcaaatagaggctagacagaatgtttaagagaagtgctgccaaatagaaaataagaatgtgaacagagaaagatgtgtagttttaaaatttctaataaccatattcaaaaagtagaagaaatagattattttaattgcwttagtctcctattcaacccaatatatttaaaatgttatcatttcaacattaaatcaatatataattattaataagaagtttgtacatttttttctactaagccttccaaattcagggtgtattttacacttaacagctcttctcaatgtgggctagcaacatttcctccatagctacttgtgtctaattcgtgctgtactgagtagtgcaattttagagtaagcaagaataaaaaccaaccttgaattgctgtaattcaagaaagtattcttatttgactatcacaggggaagaatggacatccttttccaaataaaggcac

SEQ ID NO: 636254 - DNA, 604 bp, Homo sapiens
ctgggcttaacctgccctttagttccatgaattcaaactagaggttacgatgagagctttttacctcagtatgagaagtagtagtttcttggtcagatctatcaggagagagcctgggctccctggggaggctgagttctttatcaaatagaggctagacagaatgtttaagagaagtgctgccaaatagaaaataagaatgtgaacagagaaagatgtgtagttttaaaatttctaataaccatattcaaaaagtagaagaaatagattattttaattgctttagtctcctattcaacccaatatatttaaaatgttatcatttcaacattaaatcaatatataattattaataagaagtttgtacatttttttctactaagccttccaaattcagggtgtattttacacttaacagctcttctcaatktgggctagcaacatttcctccatagctacttgtgtctaattcgtgctgtactgagtagtgcaattttagagtaagcaagaataaaaaccaaccttgaattgctgtaattcaagaaagtattcttatttgactatcacaggggaagaatggacatccttttccaaataaaggcac

SEQ ID NO: 636255 - DNA, 562 bp, Homo sapiens
cagccaaggaacaagatggtcatttggtctatttttaatgtcatccccattggcatttccttccaggtagttttttttcctgtttttctttttttttttcttttttttttttgtggcaccacaagacattccttccctgctgtstgcttcctgctgtgatcaatgctgatgatcacacaggttacattttatatcaagaacagttgactcagtgtgctggggctgtagttcacacccccagttcttgctctcctctgctattccatgcatgtcaaggctttagaacagtgagcagaaaggaaacttgtgggactttagccacctgtatcataagtctacagtatcatctggaaaaaatatatgtagatatagatagatatagatagatagatggattgatagattgatagatatatctattctgtcttttaaaaaaatacccccttagtttgactgaatgttgtctggaaaagttaagagtttggcacaacaggtagcaggtttctctttccacctgagttataaccattattctcacccattaaacctaatgaaggttaga

SEQ ID NO: 636256 - DNA, 515 bp, Homo sapiens
attatatagagctaaaggaagtgaacctgtagtaaatatatatyagagtaatgacgaagaatgcagcttccgctcacaggtacttctaagtcctgcaatcagataagccttacagaggcttttaaaatcatggacaagactaataaagaatggccattctcaatggttttggaatactttgtgtaaccttgctgaaccttgaattctcattattgtttccctcatagagaaatgtttgatattctgtcttatgtgaagggcagaaaactgaaaaggagtctccaacaatgaagtcagttttcgctgctgaagaatgacctcactgcttcatgaggctgagagaagggaggaagggatcttcttgaagtcctccagaagttgcaccgagtggggttacataaagtatcctggagtctttattaactagattttcatccacaccatttcctaatttcatgccatgcaccctgagtgcaactttgtacaagaatggattttgagcaaggtgtgatagt

SEQ ID NO: 636257 - DNA, 492 bp, Homo sapiens
tgtaggaatctttttgaggcacttgttcattttaagagggatttttaacataaggtaatctgtgtctgtgtaaccgggcacacgtaagctaccagatactgcagcatgctgaaaacagtaaacaaaccagtaagagctccactggcttcccttggcatcttaggactctacactcatttcaggaagctttgcatgtggaccataagtgacacccaacctccgactttcaatagaggaagggtgccagaagcaatctgtgttgtaaacattaatagagttaagtgtctttcatatctgttctagatgaaattattattataaaaagaagtccaacattttcatcttgaacactaaaggatctttctcgatagctgcggtggtatttgccagttcagagaccactagttyaaagaataaagccatgtgtggatcaaaaagacttgatacactgcattgcaggtagaaaggaccaggcagtgagaaagccagcaa

SEQ ID NO: 636258 - DNA, 541 bp, Homo sapiens
taagtaatcagttaaatctcctagacctaggtgagccataagaaacacaggcagcgtctggcattcttgtagagttgaggagacagctgagagttcccagacaaaagcagctagggttcacagagcatgagcgaggggagagctgcatggggagaaaactctggcaatwtctatcaggtctttctcaagtgtttcaggagagaactcatctgcacacgtgtgggtgaaatctactcgaaactgaagaatgaacctctggaaggactaaggggaacaattcttggagctcaggttaggccaagaatattttatttttcttcaccatccagaagggtcagttcatcaagaggatatagcattgtgaagtatttatgcaagtagtaacagagcttcaaaatacatgaaacgaaaatagataaagctgcaaggagacacatattcaaaaaatagtttaaggtttcaatatcccactctcaataattgatagaaaaagttatgctaattctatacaaactcttccaaaaattgaaaagtatggaat

SEQ ID NO: 636259 - DNA, 548 bp, Homo sapiens
agcaattgacttttagaatatgtacatttctgtaatagtgttaatctgtaccagctcaaaaagagctttatttcaacagcctcacatccagtattagcaggtcacctggattgattaaataatttctgcaggacctctgctttagtggtttttacaaccactaaacttgacccttacaactataccaaagttacgcctcccctccatagtgactaatttaattggcctgaggatgtggttcaagtatctatattaaaagagaaaatacaggtgacttaaaagatacaagcatggattatgcaattctaatttkaagccaggttttgctacagaaacatttgttaatgttttagaaggtgttcattaaagtgactacctaatcactaattatttgaccttaggcacattacttaatatatttgtgaggcagagactggtaggtagttttgtcttcaataaagtagaaatgacttggctcctacctagatggatctataataatcattttgtttaacacttgtatgtcagattaaataaaccaaatcagt

SEQ ID NO: 636260 - DNA, 595 bp, Homo sapiens
gacctaatcacctcccaaaggctacacctctaaagaccctcacatttgggattaggttttaatatacaaatttgggtggacacaagcattcaggcactagcaaaggtcaaagtgagaacactatccgtattggccagaggttgaagttacctggaactcttttgttctcactccctaatcctggattgaaaagatttcaccaattcttttgtataacattaaaacaaatttagtacaaatagcttttatcttataaaaaaatttaactgagacacagaaagttacccagaattaaggttcaatataatgtaacatattttgatatactagtctaggttaaaaatgtaactacatcaaaagaaataaatacagaaactgaaattgagctgctttgtaataagtaattagagtatctaaataaattaggcaaaaatgaattgacatraaacatctattggtaattcaacttgtagaaaattggcatatggttttacataggtatttaattatattctatatttagcactttgatgtacatctttatttctttatgctgtatttgtatttgatattgatatgaaaattattttgcttc

SEQ ID NO: 636261 - DNA, 564 bp, Homo sapiens
atgatcaagaggaatttaccccaagtgtgcaaggctgattcaacagtcaaaaatcaattaatgttatccattacaataagataaagaattaaaatcacatgatcatattaatatatgctgaaaaagcatttgatgaaattcaatactcactcatgataaaaaaaaaaaacctcagtaaacttagagggaaagttcctcaaatkggtaagaatagctgcaaaaaatctatagctaacatacttaatagtgcaaagctagattttccacaagatgaggaacaaggcaggatatctcctgtcatgactacttttcaaaatcatactggaagttgtagctaatgcaataagacaaaaaataaaataaaataaaatgtttgtggagggagggagcagtgcagggcacagtagctcatgcctgtaatcctagcactttgggaggccaagggaggcagattgcttcagcccaggagtttgagactagcctgggcagcatgatgaaatcccatctctacgaaataatacaaaaactatccaggcatggtggtgtatgcctccagttccagct

SEQ ID NO: 636262 - DNA, 599 bp, Homo sapiens
ctaactcacaaaaaggaagatgtttattacatcttcaagagaatattcgagtatcttctcttttacttacacactgcttaatgggaactagagaaaagtaactctgatggcaggctaatgttgtaacatagccctrgaaatattttcagtttcatcacgtctcaaagggaatttttagcagagcgcaatccttacatttaaactcccaagaagaataaagaacatttcctaggtgaagtgaaattaatgagtcagaaaacccaggaaggagctacgacaagttcccttttgaacagagacctaagggaatggctctgtgattctgagatgccaagtaaatatagtaaactgaatacattgaacctaactagtaaaccaaacctccttgtctgagacaagggtgttctgatgggcagcatattattaaatatcacatgtgtgtattaaaatacattggaaatcagtttaaattgttgtgaaaatatatttttacaaaatttttgagtgatacattgtccttcccagatacttaattcatcctaaatacctgattctcagcatcaggcattcatttccccacccccgccccgcaaaaataa

SEQ ID NO: 636263 - DNA, 577 bp, Homo sapiens
tgtttaattgtgtccaccaaaaagatatgttgaagttgtaaatgtgacccccacacctgtaaatttgactttatttaaaaataggatctttagagatgtaattatgttaagattaagtcataatcaattagggtgattcctaatgcaatgattgttgccctcataaaaagagaaaacagataaagacacagactcacaggtaggatgctgygtaaagacagaggaagagatggaaattacatgcaagcaagcttagaaatggcaaggattgccagccactaccagaagctaggaagaggcaaagaaagattttaccagactctcacaggaaacatagtcttcctgacaccttgatatcagacttctggcctccaaactgtgagagtataaatttctattgttttaagtcacccacttgacagtattttgttatggtggccctaggaacctaatataaatatgaagatgcagttaggaaaattcacattatcaaacctgttttccacataacaatgtgtttgattaataacgactacctttactgcaaagaaaataaggtgacatatttgagtggatc

SEQ ID NO: 636264 - DNA, 575 bp, Homo sapiens
atctgcttcttttcaattgccttcagcttaaaataaccctcataccaagatggcacaatgtgaggtggcatattctggtctgcacaggaaaaaggaaaacatcctaactggtctggtatgactggcataagctggatattgaaacttgataagacattataagaaattaaaaatttggaccaaattctctaaaaaatagatctaaacattcttaagaaaatattaataactacatgcaataaatgcartagtatacaaggggtagttcagcattagaaggtagagtttataagaattccaaaaaaatgcaagtttgtttaacacagaaaatcattcaaagtaagtcagacatttacagaataaaagtgaagaacacatgatcaactcaatagaggcaaaaaaaatgaatttgaccaaatccagtactcaagattaaaaaagaaaaaaaaaagatgaaagaagaaaaggcctgagaaactaggcagaatgaaggaagtttgaggttctataaagggaattaaagaagtacacccaacagaagtaaccattagtgaaatattgaacacaccccacta

SEQ ID NO: 636265 - DNA, 613 bp, Homo sapiens
caccccactaatgcctggaacaaagttaagatgtttgcactcagtgattctgttcagcattgaacttggtcattctatctactgtaactgggcaagaaaaagaaattaaaagcttaaagtttatttaagaagaaataaaatcttgctatgtacaaatgacaggattgatcatacaataaatcctaaggaatatataaaacaactacttgggtcaataaatgaattcagcatatcacaggaaaaatcaattttatttctaattactagcagcaaatatataaaaagtaaaattaatgttatgcaaaatagcttcaaaaacaatctaaaattaatgagatgttcaaaatctctatactgtgtaaatcatcaaaacaaaataaagaagaaataaattaatggagagatactatatttttggatcagaatattcaatattgttaagatatcaattttcccccatcaatctatagattcaagataatctcaattaaaattatagaaggattttgtaacaaaaattaacaggttgatttaaatatttgtgtgaaggtgcaaaaaatttagagtagataraaaaacctggaacaaattaataaaagtggagcacttagaa

SEQ ID NO: 636266 - DNA, 507 bp, Homo sapiens
ggtgccactgcacatacactagaaaaattaaaatcaggatttccataattactggtaatagtataaaataatacaaccactatgggaaatggtagcttcttataaatatttatctgattatgacccaataattacatgtatagatacttacacagggaaatacaaaattgttcacaaaaaacttatataagaccaggtgtaggggcttacacctgtaattccagcaatttggggctgaggtgggaggatcacttgagtataggatttaagaccagcttgggcaacatagacrgactctgtctctcaaaaaaaaaaaaaaaaaaaattagctggggatggtaatgcatgcatgtggtcccagttactctacttgggaagttgaggtgggaggattgcttgagactaggaggctaaggctgcagtgagccatgattgtgccactgcactccagcctgggctacagagtaaaatcctgtcttaaaaaggaaaaaaaaaaacttatataca

SEQ ID NO: 636267 - DNA, 484 bp, Homo sapiens
ggtttctttaaatgggcgttttttttggtttttttttggtacctcctcttttcagcattgtaacctcctcactctcaaataagtagtttacaatccattaggtttgctaggtgccagcatgatttcctgttttaattgatttcatagtcaccattcatcttatagtttgatgctgccaattaacctcattttacagaggagaaatttaaagaaacttaaagacattcatttgtccaaagtcatgtagttaattagtgggggaggtgggttttgaatcagggtgtttgaccccagaacatactgtgttaytcagtatattatgttctgcaacactgaattattatatcagcattcaatctgatttctttcctcggtgccaacttgagaaaaactctcttgaagttgaccatggcttttctcagtgtcttcagggcttgccattgttaagaaacagcatagcattgtagttttaaagcttagccac

SEQ ID NO: 636268 - DNA, 581 bp, Homo sapiens
gctttccaaagtaatagtaccattttatgttctcagggcttgcagtaggttgtttctggacatggattctggagtcagattccctggcaaccagctgtatgaccttggcaaaatattcctcggctacctagttttctaattcatcaaataaacacaacaatattatccattttcctgggttgcagtagagactaaatatttatatacagtagttagaagagtgtctgcaacacattaagtatacaataaacattagctatcgaaaccatcaccagcagcayagaaaagttctctttactagtagctcaaattgcctgatttgactttttttgtttgttttctgctttttgccaaaataaatgagtgtgaagcagtttttcatgtgtgctttaatgtgctttgccctaattcctagagatcgtcttttttgaaggagcccaactccactctatctgctctgtttccctcttcacatgtaatgattttaatccttgacttggtcctgaaaccaatcccaggccaattcctcctggaggccataaactttaccctggttctcctctcagttctactccctacag

SEQ ID NO: 636269 - DNA, 585 bp, Homo sapiens
gaaaaatcaggttgaaaagatgaagaagtgacaactttagtttatctgttgctgtcatttaaattttcttccttcattatcttataaaaaggtcttttagaagaggatccttgaaaaatctcacgcatcctgttctttttttcttcaatgaccttttatttgcccttattaaaataacattcatttattaagtgtttcttcagaaaaagcataatactgttttagaggctgcatgtttgtggctcttttcttatttctcttccgactccattttaatagttaccacactggagaagaatgaaattcagctctgctttttctctttctccagttccttttcataagtgaaccacataactctatcatgatcatcttttcagcactttgatcctgagtctgtttcatttattatggctccctgtggacatctgattaggtcaactctgactgcattcatttctctgaattggttwgattgtttcaaattcttgaatcttcaaagtagaccaggtatggaacaataaaatcagtacctgctcccttacttgaatttgaatgaaatttcttttcatttagtcagaaaaa

SEQ ID NO: 636270 - DNA, 533 bp, Homo sapiens
actagtctgcaaatcaaaaattattttatcatgtataatttttgagggtgttgcaagattgtgcaaaagagtcaaaaaggaacacccatgggcccttttaggggagtattttttgacagcaatagttcctttttttcagatataaataattaaaatacacactaagtcacagacattaaagtaatctcgaattttgcatgaagatccatgaaagttaataattctcttattytaacatctagtgtatattttcatctttccctaccccaaacccattgtttattcatattttgttttcctagttttctctcttatacccctcagctcaaactttacatatttagtaatcactaagcaaagttaattctacttcctaaatatgttactcagttgtcctctttcctctgtttatcatgtcactgcttgacttattccctcttccctcttatctagaccaagggaggaggccatatgtagagaagagggtacagaacaatgtccatatggctgggataaaaggtatggtagaggat

SEQ ID NO: 636271 - DNA, 619 bp, Homo sapiens
ctttacaactttcacttagtataatttttgaaattttaatgtttgtgggtacatagtacatacatttatggagtagacatgatgttttgataaaggcatgcaatgtgaaataagcacattatggagaataggatatccgtcacctcaagcatttatcctttgagttacaaacaattcaattacactcttgcttagcataattttaatgtcagtagtgacattttattttcattactaataatgtttgttttgccttctcttttttcagtttggctgcaaatgtataagggtcactgctcctatcagaacctactttttgtkttattgatttgctctattgttttttattttctatttcattgattcttgcatttaactgtatttttttttcttaacacttgcttggcatttaggtttcacttcttttctactttctcatggtgaaagactagatcactgagatctttcttgttttctgatatagaatgtaatggtatatttccttcttggcactgttttgagtatgtgctgtaattttttttatatgtttcattttcaatataattgaatctaaaatattttctattttcccttttgattttctctatgactcacaggc

SEQ ID NO: 636272 - DNA, 484 bp, Homo sapiens
tatttgtttgtattgtgtgtttgctttttcctttcaacagtttaaaggtgtcactccattgtcttctgtcttgcatagtttctgacaaatagtctgttataattttgaattggtagtgtctattgtctggctgccttctcagcattgttttatagatccatacactgtggccaattttaataagcttttctctttgtatttcaacttggttaattaaaaaaatatttcttcaagcttgctaatttcttctttgattctgttgaatctactcatgagactaagggtttttgcatctgtgatcttttttatttattayattaaaattttacctagtcaaattgtttctattatcatacagaacttctcaatctatacatatatgctgtccattttttaactaaatcctttaaaaatattaactatagggagtataaaattcctatttcaatgtagccactataatatactccctgagtttttttga

SEQ ID NO: 636273 - DNA, 555 bp, Homo sapiens
atcttttttatttattatattaaaattttacctagtcaaattgtttctattatcatacagaacttctcaatctatacatatatgctgtccattttttaactaaatcctttaaaaatattaactatagggagtataaaattcctatttcaatgtagccactataatatactccctgagtttttttgaattctttctctataaaaaatggttattttatcttcctttatttgaattttataatttttgaaatcaaataccttatataatgtgtagaagaatacagactgaagcaaacagtattaacacctgcaaatactattctatatgcagtttgtaggagtgttaagtcaatcttgtcargatttgagctgagtttgggtttgtgattgctatggttaccttcactgcaatgtaggcttcaaatttcactaaagattttcttgcactgggagctggggagctaataggtttgggttttttgtggtccaccttcagcttttagctagccctgaacatctgtgccacataggattctctcttgaagctctgtccctc

SEQ ID NO: 636274 - DNA, 555 bp, Homo sapiens
atcttttttatttattatattaaaattttacctagtcaaattgtttctattatcatacagaacttctcaatctatacatatatgctgtccattttttaactaaatcctttaaaaatattaactatagggagtataaaattcctatttcaatgtagccactataatatactccctgagtttttttgaattctttctctataaaaaatggttattttatcttcctttatttgaattttataatttttgaaatcaaataccttatataatgtgtagaagaatacagactgaagcaaacagtattaacacctgcaaatactattctatatgcagtttgtaggagtgttaagtcaatcttgtcaggatttgagctgagtttgggtttgtgattgctatggttaccttcactgcaatgtaggcttcaaatttcactaaagattttcttgcactgggagctggggagctaatargtttgggttttttgtggtccaccttcagcttttagctagccctgaacatctgtgccacataggattctctcttgaagctctgtccctc

SEQ ID NO: 636275 - DNA, 654 bp, Homo sapiens
gctgactttcttcctctctcttagtctcctaataatacctcttgccaccctctttaactggaaacagtaacagtaattcaaggaaatgtaatttactctggccaaggtgatacaatataaagcctccacatcctcttctacttctgcacctctctgatctcccaccttacctttagtcttattatgtgtactcagtgtcgtttctcagggtcataaaaaagagtctggaagtaagtataaacaacacttgtgttaggaaatcccaggaattctatactgccatgctagctcacactggctttgtgattctgtaactcatataggtttctctctttatgaggttgagagtggtaytgtttcaaaattcctataagctagacagaagcagaatatccagtctccagatactgtctcactagttcccaaattcaactgttttggatatggtgtcaaattatttaaaatatattttcttctcctttttatgtctcccatgtaggggctccctgagtatcttttctattggatacaaatttgggtttgaaacacttatcaagtggtgtaagatttaaacctgcctatttttaaataaagaatcttgtcatatataagagggtgtggtaaagacttgaattaacgacagttcaacaattc

SEQ ID NO: 636276 - DNA, 496 bp, Homo sapiens
ctgccaaggtcaagaatcagcagaccaaatgatctccaggaccaaataaaactctctatttcaagtatcttttaagtagactgaatttttgtctttaaaatccagagatataatataactgcattcgaktcaacacattcttcttctgaggttggtaagcataaaggtaaatcaataaaaccatcttgctttgacccattttctgcagttgtccttttccaaaattgctcttccatttacttagctgagtaacaattactgccccaattcgtccaattctgtaactcttagtggctgctctaatcctgactttcttttatccctgtgatcttcagccatgtgctttcttgttttatatattcttttgaagcatactgtttatctggttgaatgtaccaatagtaacagcattctttgtggctgagtcattaaccactaagcatttccaaactttcatttatgtgtcagtcataaacccttttatcttgagcaaaca

SEQ ID NO: 636277 - DNA, 570 bp, Homo sapiens
ttcagtctgggagtttatgatttgccagtccatctaggactagtatttgagctaggtctgggtgttcaggactcctcctttcctctgtaccaacgtcactggtggctgagagaagagtcagtatgaggaggagtaaagggatttgaaagttagagtagagctttagattttcaatattttagtaatggttgtgaagctgtgwactagttaatttaactcataatggaatacacaagagagtcatagtggaaaaatatggaggcatgcaaaactacaagtaataggagacataattttcagaccacgcaccacaaaggtgcatgctgtgtggtgctaaactttcaaggtagaatattatgttggttttcacaaagtatttccctaaagcaataaacatagtaattcaattatctgttccgtttaattactgggtaatatgcttaactgatatactataattccagtcctgttaaatgtaacaaatctctggtgtaaaataattttaacaatcaacataaaaatagtgagcacattagtgttattttatattctgcatagacctttcagttt

SEQ ID NO: 636278 - DNA, 513 bp, Homo sapiens
gagttcactaatcaatggatgtatgcaggcttcagccaataggcacattatattttcctggccatcaggattgctacagatattgrccagtaatttagtccagccccagaggtgtgatccttagaacaattgttaggcctgtgagacaacagcctccctgaagtgggtggtagaagaatgtaaaggttgctgcttgctgctgctcttgtacatccgttgagaggcactattcaaagggctgagctagcccagagggcaaggggcagtgtaaagagaaattctaatcattagaattttagtttctaattaaactgaactacttgtttacattatagccaataatacctcagttttattaatccaatttaagttgaattgtcaatcacttagagcagaaagatccctgactgatagataccatcacctttctggccaacttgttgcaattcttcatttgcataagttgggaaacttttcacttcttaacagttgggatcttatcagtctacagag

SEQ ID NO: 636279 - DNA, 566 bp, Homo sapiens
ccaaggtatttttttcccagaaaaaatatcagtgtctttcttgccacatcaaccctttagaggttgcctacattcttcctagaataaaagtaacattttaaagacttcatcaagcgatgatgaatacaattactgtttttattccatttttacagccaaaaattaaagttatgatgtttgtctattgcttgtgattgtacttagtccattgcctctaagaaagaagttgaatttaagtatgtggaccatatatttcttttttgatgagygtaaatggataaaattaatatcttaatatataatcagtgtctataaaagaatccacgtagtagcagagaagcatttgtgccatgctggttacttgtcttcatttgctttgagatctcaagaaaagtttatttcccaggatggtggttcacaggcattgtggttgaggactatacatagaaaactaattgtgaaaatagaacttattcctattctttcaggatatgaaatcttatgttcatgacaatttaattgtttttataaaataattggtttggcattacagttagtaaagcaga

SEQ ID NO: 636280 - DNA, 553 bp, Homo sapiens
caataccatattattattaattactactactcatttaatggttggtacgttctaaacactgcaaaattctttctatgtcctcacagtccttactgtccttacagtaaccctatcaaataggcatcattatataacagacagcattatatgcctatgtggaaagattaaataaggaagattaaataacttcmctattgtcacccaaccaataaaggatgaggtataggatttgaagccttgattcatgttttgatatggcctctgatacggcctcagttatccgtgaagcagttattagttaatttacaattaattatttggttgccagttacttaatctactggattatttaaatctctttctttgctcctctctgctaccttttccaaatcttgactatctctgttgtggaaagttcattttatgcatgacactcctgtacgagatctgatgtagatgcatgtcaaaattgtttgtattcagggcttgggtcattcatctttgtatccaggtcacttccgtctccctttatcatcagtcaccaagagcactt

SEQ ID NO: 636281 - DNA, 599 bp, Homo sapiens
taaagtttcagcatccagttggccatttgattctagaccaaagaaggcctgccatatgctggggtctgttctgcaggagcttggagtttctcctctcctctgtgttgatctcaaaggaagttgataaaaggctttcaaatatgctagaaagatagcacacaatcatcaccgttaaatgaaaaaactacatgctcaattagggaaacaccaacaggaaggacctgttacctctgcaagatggaatttcactccacattggttaggatatctcattctctagaagtacataagggaactggtagcagccagcagacaatgagattccagagcacaraggcaattttctctgccactcggtggtctgcagataccttcatttggaggtgagtgtttggagggtgataatttgggcatctgcctcactgagatgcttttatagggttaaaggggttggcacaagattcatttcttatccttactttattggcactactttttgttcaagtacagagcaagtataacacactcttttatccaaagtaaaagtttttataggtaaaaacaaaggcttcattccttggttaatgtccttaaatgta

SEQ ID NO: 636282 - DNA, 434 bp, Homo sapiens
catatatttaatacatttctctcaatggcagagaatgtatagattattggatatgattctttaataatcatatttttgcctagcagtgtgtttttcgatccaaatgaccattggagcactgatttgtcagtttcttataaatagctctggtctatattgaattgccatgatctaaagatgatatttagggtaaaggatattagagtgctagagatataagaggacaaatggtgctaacctagttgagctgtgtaacttctctgccatcctagaccagactaaccccgattacctgttacaaagtgcttttatctgctctttgcytcataatataaatgcaattgccttttttgatacatacatatttgagtcccaggaaaaggcatatagcagtatgacacaagcaagtctctaatcagaatatatatagaggc

SEQ ID NO: 636283 - DNA, 570 bp, Homo sapiens
cacagggagaatgccatgtgaagattagagttatgctgccacaaccaagaaactaccagaagccaggagagaggcctggaacagatccttccctagctcctcagaggatgcatggccctgtcaatctcggacttctagcctataaaaccgtgagataataaatgtacattgtttaagccaccttgtttttggtactttgttatagctgccctagcaaactaatacacttacatatgcacaaactaatactagtcatacatgaacctataattcttttgcagcatcamagcaaagcacatttacaaaatacataaagccaggtttgaaatgaactccattaagttgatacaacgttcagtgcaaattgctgaaactagattttggctcccaatatgaatgtgttcctgactttccttattcgcatatgggtgtaatgaaattctcccaccctttctctaccccagaatcttccttcacacaatgcttatcgcatcattcagtttttacttggcctagtcagttctgttctgttctttcttcagtcatcctcaataattttaaaacttaaca

SEQ ID NO: 636284 - DNA, 532 bp, Homo sapiens
ccttgttaaaatattcagtgatacttcccaatgagaagtagaagagagaccattaacctagtaagaatctaactctatggaaaatagctagaggcagagtgatagtgtgtattggctacagttgtctgcctttagcaagatttacaagaaaaatatgagctctgatgagagctggttaatcttccagaaagaatagaaggatactgaggaatcctagagatcaagggtctctcaggtttagagaggctgactgctcctagtttctaagtaataagagataagactgaaaaaaagttgtaagtgataaaggcactgaaagatctctcagttaataaaagtgatagaatctttgggtaaagctcagactaagggttttaaccttgccgtttaaacctattgtttcatatagcctcaggatacccatcaagttgagagagggggacttgggtatgagtaagcaaaaagatcattctttggratcatatataggaaataactagaatatggaatttagaatatggaactaaaagca

SEQ ID NO: 636285 - DNA, 626 bp, Homo sapiens
atgttatgtccacttcctgccaatgattagttttgtacattttttcttcttaagtaatcactgaatctcttttgtaactagaaacttaattttcaatctccaattataggttataaatttgtwatctagggaaataagttttgtttcccctggagtattactaagctcaggtcttaattagctagaatgaatgatgcattgtaagagtttttgggtttcctgtgccctgctcctcagaccccatccacagggggctttccctattgcttaggaagagatgcaagtacaatgtgctgagaggtagaaatgggtagtcaaatactgcatgttctcacttataagtgggagccaaacagtgggtacacatggacatacagagtggataatagaccctggagactctgaaaggtgggagcggagtgagagctgaaaaattacctgttgggtacaatgctcactattcgggtgacaggtgcactaaaagcccaggcttcaccaccatgcaatatatgcatgcaagaaatctgcacttgtacaccctaaatatataaacacaaaacacacacagacacagacacatgacaatgtgctgagaggcctgagtaaatggctgtgagccccacccc

SEQ ID NO: 636286 - DNA, 613 bp, Homo sapiens
ctctcttgctcttgcttttgccaagtgatatgcaaactcctgcttcaccttctgccataagtaaacgcttccttaggtctcctcagaagcaagatgccagtgctatgcttcctgtacagcctgcagaactatgagccaataaaccctcttttcttataaattacccagtatcaggtatttatagcaatgaaagaacagcctaatacagagaattggtaccaaggagtggggcttttccataaggatacctgaaaatgtggaagcagctttagaattgggtaacaggtagaggctggaagaatttggagggctcaaaaaaagacaggaaaatgagsgaaagtttggaagttcttagagtctagttaaatggttgtgaccgaaatgctgatagtgatatggacagtgaagtccagcctgctgaagtctcagatggaaatgtggatcttattgggaactggagcaaaggccacaagtattatgccttagcaaagaacttggctgcattgttcccatgccctagagatctgtggaagtttgaatttgagaatgatgacttagggtatctggcagaagaaatttctaagcagccaagcattcaagatgtggcctggct

SEQ ID NO: 636287 - DNA, 583 bp, Homo sapiens
aaacatgcccacagtcacacagcaaggagaggcagagaaagaattagaaattagatctatttgattttaggactatttatgaattcattcatttgacaaatatttattcaacatctattatgtgctagatactgaggctcaatgttgagcaaatagttttgtgctccagctttcatgtagcttacagtctaatgttgcagaaagataatctaattacataaaaatatgtaattgtagtaaatgctatgaagaaaacatacagagaagcattttctatacatataaagatgtattttcaatacatatattcaatacatgtaaatacactttcaatacctgtaaagaattaccttagtagttggcactatagtgccatttaaattaacaaccaatatagctttggcattgaccaatcagaatgtatgcatgaccataagagtggagccaactggttgttctggtgtgtggtggctaaatatacatgaygcttggcacatggaaactataattgtggtgtcttgcctgatcagatctggtctttatcccattcccctactgaaaagccttgtactcgacaaatact

SEQ ID NO: 636288 - DNA, 660 bp, Homo sapiens
gtgtctatattaaaagtgatgctactaagcatcttatcacatcaagaaatagattgtattttctagcacagaatctgggagtgaaatacatcttagagtttatctagtgtaatcccttcgttttctagatgaagaaaactggtctagagatcttaactttatcaggaccaaaactccagtctcctgactccaagcctagtgtactttctaccaccccatgctcttccctctactttcccctgtccagttgttttaatctggttactagaacaactcaactagccctgggataatattaaagtttctgtcttccatcattccatccagctgttaatacccagaagttactaaacctctcttagtctcagtttcttcatttgtgaaatggggacattgatagtacccatgtcatggattcactctgaggcttaactgaaaagatccaggtatctggaatatgtcaggtgttcagtaaatgttaatggtggtattgataatgacaaatataacgrtgaatttaaaataatatttgtagtgggttgattttgtttgttctttcaatggtctcctggttcttccactatctttctcaaacttatgctcttccttatagggctctcataaaaagtgatttacattcctagtttcacttattgtatg

SEQ ID NO: 636289 - DNA, 575 bp, Homo sapiens
tactcaacctttgctttgtagccacagcatgtaaaatgagctcttctttgttttgttccacacctgtggatgatgccatgactgcacaaaagtagtgtttaaattcaaatttagaagaaatctagctttcctttttttttttttttaatggcgcctccctgtctgccctaggctgtcctcaaacttcacccctgggctcaagcaatcctccaacctcagcctcctgagtagctgggactatagacatgccctatgcccagctagttctcctttttaagaycatgtaagcccagctcatgaggttatgaaaaaaaaagagaaatcggaaggtagaactaagcaaccatcagagagtgtttacaaaaaattattacttcgtgcacttgcagagtcaaatcacttacattttagaaaaataaacacaccgctaagtgtcatcgacaatgagtttttactatactctaaactgaagccaaaatcttgatcttaatcgttcttttacttaaagatttttcataattttaatctaactcaaatggccaattgttcatgttattcctagtctgggacccctc

SEQ ID NO: 636290 - DNA, 575 bp, Homo sapiens
tactcaacctttgctttgtagccacagcatgtaaaatgagctcttctttgttttgttccacacctgtggatgatgccatgactgcacaaaagtagtgtttaaattcaaatttagaagaaatctagctttcctttttttttttttttaatggcgcctccctgtctgccctaggctgtcctcaaacttcacccctgggctcaagcaatcctccaacctcagcctcctgagtagctgggactatagacatgccctatgcccagctagttctcctttttaagaccatgtaagcccagctcrtgaggttatgaaaaaaaaagagaaatcggaaggtagaactaagcaaccatcagagagtgtttacaaaaaattattacttcgtgcacttgcagagtcaaatcacttacattttagaaaaataaacacaccgctaagtgtcatcgacaatgagtttttactatactctaaactgaagccaaaatcttgatcttaatcgttcttttacttaaagatttttcataattttaatctaactcaaatggccaattgttcatgttattcctagtctgggacccctc

SEQ ID NO: 636291 - DNA, 562 bp, Homo sapiens
ttgttagccttttcttgtagtattaaatgtctaatattaagtaggccttattatttaattggcagttaaattccagaatagctttaatatggttgccgagaatacctcataacatctattattgttacattaactcagcattattttttagtgggcatctcaaagtatttcttttagagatgaaatcaaaagagaaataaaagtaggttaaagaaaatttgcaaacatagtacattaggtgtatttattacaacagtgctcaagatgaagagttccactctttctagaaactttacagagctatttcatttatttgrgctttatcaatgtaatctaaacttttagcatgcaaaataaattatattaaacattggaatattttaaatttaagatgccacatggtcagatatttggagatactcaaatgtggctgaatttttgactttttattcttgtatggcatcataattaatacattatttgaaacaataaacctctagtagaactttcaaagaaattattgcattttgaattgaaaagcaatataccaagaaaatgtatt

SEQ ID NO: 636292 - DNA, 587 bp, Homo sapiens
aattaagcattaacacagaaagactttgaagtgtatcctttctccaacattttgctaaatgagttttacgcacactatataaaatattcaaatctattagcagcctttaaatcaatagattttyctttaaaagacattcactagtagagaaatatctttcagatgtacttgaagttgagtgcaaaaatgtttcttattcatctgtatatccctagagattagccctaggcctgttgcatattaggcactgtattaaaatgtgctgagtggatgaacaaatgaataaataaatggagacaaaggaaaggctcaagaagattatctacagattttttttttgttagaattagctcatgtcttaatccttcacttcatttgagttgttatttagaatctcacttgagaaagaatcagctccactcaatgatatgggctaatatttgttgattctgaactttctaaatttggaagatgatttgttgtaccaagctaccacagtaaagagacaactaattttagctttttcctaaagttcaattctcgttgataattattacacaataaaaaaaaataaaaccattagtact

SEQ ID NO: 636293 - DNA, 612 bp, Homo sapiens
aaactcaaatctttccctctattgggctgttccaaggtctagactgggaataggaaacctgatttggcttttacatgtttatgcttcaaccgagtctctgttggtaataaaactgatatattacttatctatttctgtgttttatcttatttctcaatttgtccagaattctaatagggaagatgatgccagtttcctagaccccttcaaacttgtcttctctaccttatctattaatcttttagggttgaggccatgtcagattcatcttgtagctcaaggactagcacatggtcagtgacatatttttttgatcgaattaaggaaatgttcaaatcagaagcttcaaactatgctgaagcagagaaatgctgggttgtcttcccgaacatattgagygccagcatttctttgtgtaatttcttgtatgctttaggcattatttaccgttgagtcagagaattactctaaagtagtccatgtgtgataaatatgacagaatcttgaggagaatagcaaaggtcccagggatgtacaggtgtccacactgacagctgaactgttcagttctctggctctgatggtcccaagtataaccaagttgtgagacaa

SEQ ID NO: 636294 - DNA, 495 bp, Homo sapiens
taaaagttttgaaatatggatttttaaaaacccatctatgactttgccatcatccccgtagttaatactgtaaatgatcaatgacagaagaaatcaggatgttatgagcaggatcttcagtgtttgtaaggaaacctgcaggatgtgtggctgggctgaactgtgcccaagcacactttgttcagtgcagtttagaaatggcttgtgatggttgggtactgtgttgcctttgctttatgaacactttagaaagctttgcactgtgtggtaataagtaggtttttcttctttttctctttctttctttcttttctttttttcttttttcttttttttcttttttttttttttgcagttgcattttgktgttgttgttccctcatttgtttttgttatcttgcatccaaatacccttcctcctcagcagcaatgttgaaatatcaggcaagtaggtgttacaccccatgatgtgaggagaagggaggcagaggttcc

SEQ ID NO: 636295 - DNA, 516 bp, Homo sapiens
ttagcgtgtggtcagtggggaaccacacgggttcaacatgcgcatcgagaagtgttatttctgttcggggcccatctaccctggctatgacatgttgttcatccacaacgattgcaaagtgttcggattttgtaaatctaaatgtcataaacactttaaaaagaagtgcaatcctcgcaaagttaggcggaycaaaccattccagaaagcagctggtaaagagcttacagtagataattcatttgaatttgacaaacatagaaatgaacttatcaaataccagcgagagctatggaataaaactattgatgcaatgaagagagttgaagagatcaaacagaaacaccaagctaaatttataatgaacagattgaagaaaaataaagagctacagaaagttcaggatatcaaagaagtcaagcaaagcatccatcttacccaagcccgtcttgcaggcaaagggaaggagttggaagagaaaatggtacagcagttacaacaggatgtggacatgaa

SEQ ID NO: 636296 - DNA, 424 bp, Homo sapiens
tgtttatcataaatgcaaggactgctactttggtgtaggaaattatttaaacgtgtaaactctcatataccaatttgcaaatcaaaytcttttcaaggctttatttcaatgtcgttgttagcttttttgacttttctcattttcccactagtttgcttgattgcacattatagaaaattcaccattctcattcattctgatcccacatttagacttctctttcaaggacttgaaagaatttataaatatttgcaatacaggatgcaaattaatccttatacacacttggaaggtaccctgcaatatctttccccatctatcactcacccactgtttattgccctctgaacaatgtccagcctagttcctttcttatttcgttacatacataaaattgcttcccatccacaatctctccttagaa

SEQ ID NO: 636297 - DNA, 507 bp, Homo sapiens
tggtggataccattaagaaaacaaatcaaataaatagtaaaaagcatcccctggctgaagtggcatatatatcttcattgaagttaatgaaaraaatgtcagtggagtatgagaaccagactggaagcctgaggggataaatggtagtgaagaagtgtagacagcaagtgtagacattcgatcatgaagagaagaagcaaaataaggtgattattagaagaggatgtgaagtccaaagagggctttttacaatttatttttttaggttggaagtacatatctttgtttttacttttttaaaacttaatctttgcaaattagggaggcacagccttccgtgtgaaattaaggtgagttcccaggttagaagaacatttgaatgctgatggaaaggatccagtgggcaagagagaggatgcctgggagagaatgcattctaggcttccttggaatgactgatctctaataggaaaaggacaaaaaaggaaagaggaggacacggtgtgg

SEQ ID NO: 636298 - DNA, 468 bp, Homo sapiens
aggactgggaggagaggagaatggggagttgttggtttatgggtaccgtgtttccatctgaraagatgaaaagggtttgtagataaactgtagtgatggttgcacaataacgtgaatgtacacagtgccacagagctgcacgtttaaaaggggttatttttatgtatatttgaccacaattaaaaacaataaaaaccaaaagagcctgaaggccagcctccaaggatctccctccagctgtcatcaatacctgagaccatacacttcaaatacaatcaccagcacagagctggtgatagaaaattgtgaataaaaataactgaacctgatgtcagcttctcatctatagcatctttcctatcattcacaggagatcataatagatctcataaatgctttagcatgtctactcacttattagctcatcgattactctacctgctttgtcacctgtagaggaaggaactg

SEQ ID NO: 636299 - DNA, 584 bp, Homo sapiens
agatctttttactaaatatgtttatttccacaacagagaagttgcttcccagtggcacacccagatgcttcatggaagggcacacctctggggtggtgctgggttcagactggcatggtatccacacttctcctgatgctagctttctctaggccctctgttagctcgtcccgcttctgatggacacatttttttttccctttgctatgtcaacaccatcactatgatctcatccatcaggtrtattactaagcaagaaaagaggctctgtcttctaaacaattcaaataagacctggtacctcttccacacaacagttccttaggtgtttctgcaaactctaagagtgccttcagatgacaccctttccccatcacccccctaggaggcagaaacaccaaacagaagctaccaaagtggccagacatggtccaaagctttcacagctgggagttctgagagttggagcagagactttgcagccaggggagatgatatattaacatatatctgagtattgatatatttgaatttttcaaatcccagaacgtaaagggtccactatgaatttgcgttccctcttc

SEQ ID NO: 636300 - DNA, 457 bp, Homo sapiens
taaataaaccacgaaattcagcatggtaagtgttcaagtagatggttgtacaatgtataggtggagcacagtggaaagaacactttgttcatttttaaagtatttaagacctattgtgtgccaaacactatgataggcattgagggagatgaaggaataagaaaaaacattcttgcaccttttctttgtgtggggtagaagcactcttgagaagaaattaattttgagaatcttcagaaggattgagaacagtcattattattcaaaaacctcctaacagatcccactaactcggkcccagtggtagaagagagagactgagaaaggaatgatccctgccaacgcttctggcccagagaaatctcttagctctctaggagctaagctgtgttgggtcaggcagttatttttctctgatgttccagaacattgcaagaacacgtggccaaatttggtt

SEQ ID NO: 636301 - DNA, 557 bp, Homo sapiens
atctccactggggatggggtgggatgggaggaaggaggcccttgaagacattttgcaagactaaaccttcccctcagctatccaaatgttgtgtgagcacagtcaaattccttgttatgtttgtcttttttccttctactccttgtggagacattccaaaaggaagaaatttcactggacatacagacacctcaaaaatcacactgcatttcttgatgtacagggctgttgtgattcatggacttggtaaatagaggccttttcaagttagacttttccaaggattggcagtaatttatacactggggcctcagggaattgaggaattcatgtattttgtaggaatgagctgagtctctcccttgggactagcactactcaaggagtacagaagacacaaaatacwgtgtctctattttcaaaaagtgtatagtcttgtcagggagataaaacagacacaaataaagcagagagcaataccagaccttacaaacaatggtattaaagtgaatatcactcatttaacaaactccttcctatatagcactaactgaatt

SEQ ID NO: 636302 - DNA, 569 bp, Homo sapiens
tccaaattttgaaaattggagaaatgcttataaagcggcttagcagagccaaaaaaactgaattcactcttgaacctgggaggtggaggttgcagtgagccaagatcrtgccactgccctccagcctgggcaacagagaaagactgtctcaaaacaaaacaaaacaaaacaaaaaactgaattcaaagctggcagtggagaaaattgagacctgatctgtaacacagaagaaatgacccaataaccccaaaattggtggcatcaggcacctttgagaatatggaataaaaaaagattgctaaagtaaggaggtttatctgaaaggctgtttaaaaatcagtgtccaggcatggtggctcacacctgtaatcccagcactttgagaggctgaggtggcaggatcgcttgagcccagcagcttgagaccagcctgggcaacttggtgagactccatctctacaaaaaagtttaaaaaattatccaggcatgatggcatatgcctgtggtcctaggaactcaagagggtgagatgggaggattgcttgagcctaggaggtggaggctgcagt

SEQ ID NO: 636303 - DNA, 588 bp, Homo sapiens
ggtagagagatttgctctatcagctaagacattaaaaagccacagtaataaatagaagacgtgatggcagggacaggcaaatagaccaatggaacagaatcagcatggaaataggctccctctgaccacttgacaaatggcagagacagtgcattaaagtaattgggagatttcaaaaaattaataaagagtactggagaaatattttttttaaattaataaatgatgctgagacagttggttttccttaaggaaaataacacaattaggtccctaacccyacactaaaatcaatccaaggagattaacatctaaatgaaaaaagtaaaaatcatttcaaaattaaaaggacatcattgagatatgctagccaagagggctttcttaaataatccttaaaaaatataaacatggctgggcaaggtggctcatgcttgtaatcccagccctttgggaggctgaggcaagatgatcacttgaggccagacgttcaagatcagcctgggcaatagagtaagacccccacctctattattaaaaataaataaataaataaacatttaaaatgctgataaaattcaatgcata

SEQ ID NO: 636304 - DNA, 588 bp, Homo sapiens
ggtagagagatttgctctatcagctaagacattaaaaagccacagtaataaatagaagacgtgatggcagggacaggcaaatagaccaatggaacagaatcagcatggaaataggctccctctgaccacttgacaaatggcagagacagtgcattaaagtaattgggagatttcaaaaaattaataaagagtactggagaaatattttttttaaattaataaatgatgctgagacagttggttttccttaaggaaaataacacaattaggtccctaaccctacactaaaatcaatccaaggagattaacatctaaatgaaaaaagtaaaaatcatttcaaaattaaaaggacatcattragatatgctagccaagagggctttcttaaataatccttaaaaaatataaacatggctgggcaaggtggctcatgcttgtaatcccagccctttgggaggctgaggcaagatgatcacttgaggccagacgttcaagatcagcctgggcaatagagtaagacccccacctctattattaaaaataaataaataaataaacatttaaaatgctgataaaattcaatgcata

SEQ ID NO: 636305 - DNA, 585 bp, Homo sapiens
ttcaaaattaaaaggacatcattgagatatgctagccaagagggctttcttaaataatccttaaaaaatataaacatggctgggcaaggtggctcatgcttgtaatcccagccctttgggaggytgaggcaagatgatcacttgaggccagacgttcaagatcagcctgggcaatagagtaagacccccacctctattattaaaaataaataaataaataaacatttaaaatgctgataaaattcaatgcataaaaagataaagcttctgtgcaacaaaggaccaataaaattaagagacaagccttaaaatagaatccaatatttaaaatgaatgtaattaatacaggattaatgtccaaattatataaagaactctcacaaatcaatgagaaaaaggaaaacaacccaatggggaaaaatggtcaaaggacaagaacaggaaatttacagaagaaacatgaatgaccaatgcatacatgcaatgatgctcactctcactaatacccaatgtaatggttgttaaaaccaactgccattctattttgaacagattggtaaatattaaaatgagtgccaacagcaa

SEQ ID NO: 636306 - DNA, 604 bp, Homo sapiens
ccttaaaaaatataaacatggctgggcaaggtggctcatgcttgtaatcccagccctttgggaggctgaggcaagatgatcacttgaggccagacgttcaagatcagcctgggcaatagagtaagacccccacctctattattaaaaataaataaataaataaacatttaaaatgctgataaaattcaatgcataaaaagataaagcttctgtgcaacaaaggaccaataaaattaagagacaagccttaaaatagaatccaatatttaaaatgaatgtaattaatacaggattaatrtccaaattatataaagaactctcacaaatcaatgagaaaaaggaaaacaacccaatggggaaaaatggtcaaaggacaagaacaggaaatttacagaagaaacatgaatgaccaatgcatacatgcaatgatgctcactctcactaatacccaatgtaatggttgttaaaaccaactgccattctattttgaacagattggtaaatattaaaatgagtgccaacagcaagtgctggtgaattggtggagcaatggtgattatcatgtactggtagtgggactgtaaattggtacaatcactttgga

SEQ ID NO: 636307 - DNA, 406 bp, Homo sapiens
agacccccacctctattattaaaaataaataaataaataaacatttaaaatgctgataaaattcaatgcataaaaagataaagcttctgtgcaacaaaggaccaataaaattaagagacaagccttaaaatagaatccaatatttaaaatgaatgtaattaatacaggattaatgtccaaattatataaagaactctcacaaatcaatgagaaaaaggaaaacaacccaatggggaaaaatggtcaaaggacaagaacaggaaatttacagaagaaacatgaatgaccaatgcatacatgcaatgatgctcactctcactaatacccaatgtaatggttgttaaaaccaactgycattctattttgaacagattggtaaatattaaaatgagtgccaacagcaagt

SEQ ID NO: 636308 - DNA, 620 bp, Homo sapiens
aatgcatacatgcaatgatgctcactctcactaatacccaatgtaatggttgttaaaaccaactgccattctattttgaacagattggtaaatattaaaatgagtgccaacagcaagtgctggtgaattggtggagcaatggtgattatcatgtactggtagtgggactgtaaattggtacaatcactttggaaaggaatttggtcacatctttaatgatgaagatgtgcattttctacaacccagcatttccactcctaagagtctatgtcagagaagctagcacctaagagcataagcagaaaygtacaacattgttctttgcagcatggttggcgatagcacaaaagctagaaacaagctagatttctctcaataggtaagtggataaataagctgaagtactgtatcactgtttgctgtatcactgttaaagataaatgaataaatcaacatgaatacatttcaaattctgaacaataaaagtgagttttagaggaatacacacagtgtaccattgaaacaaagttaacaatatgcaaaactatatatacagttaattctttacagatatttatacataaggtaaaattataaagacaaaaatgggataataaacc

SEQ ID NO: 636309 - DNA, 620 bp, Homo sapiens
aatgcatacatgcaatgatgctcactctcactaatacccaatgtaatggttgttaaaaccaactgccattctattttgaacagattggtaaatattaaaatgagtgccaacagcaagtgctggtgaattggtggagcaatggtgattatcatgtactggtagtgggactgtaaattggtacaatcactttggaaaggaatttggtcacatctttaatgatgaagatgtgcattttctacaacccagcatttccactcctaagagtctatgtcagagaagctagcacctaagagcataagcagaaacgtacaacattgttctttgcagcatggttggcgatagcacaaaagctagaaacaagctagatttctctcaataggtaagtggataaataagctgaagtactgtatcactgtttgctgtatcactgttaaagataaatgaataaatcaacatgaatacatttcaaattctgaacaataaaagtgagttttagaggaatacacacagtgtaccattgaaacaaagttaacaatatgcaaaactatatatacagttaattmtttacagatatttatacataaggtaaaattataaagacaaaaatgggataataaacc

SEQ ID NO: 636310 - DNA, 558 bp, Homo sapiens
taaaattataaagacaaaaatgggataataaacctcaaattcaaatacttctgggggaatatgatattacagaaaggtacataaggtacttcaactgtcttatatgtgtttgtgtgcactatataaaaaaatatatataattttattttatcttattttttttgaaagagggtctcactctgttgcccaggctggagtgccgtggcgtgatcttagctyactgcagcctccacctcctgagctcaagtgatccacctgccttggcctcccaaagtgctcgaattataggtgtgacccaccatgaccagtctatatatatattttaaataaagtttatttttgagtatttttaggttcacagaacaattgagtagaaggtacagagatttcccatatattccctgcccccatgtactcacagccttctctactatctacatcctgccccagagtagtacatttgttgtaactgatgaatctacattgactcatcattatcatccaaagtccataatttacattagcattcagtcttagtgtcatacattcaatgggttt

SEQ ID NO: 636311 - DNA, 581 bp, Homo sapiens
tgtgaatatattattttacggcaaaatgactttgctgatgggattaaattatggattttgaggtgggcagattacgttgggttctgtgggtgggccttaaatgtatttacaagtgtccttaaatgagagaggcagagggagatttgactacagaattggagtgttagagtaacacggagtgagaaaarcttgaccaaccactgctggcttaagaaatggaggaaggatcccaggccaaataatgcaggagacttctcaaagctggaaaaatccaggaagcagatctccctgagagcctgcagaagcaatgcagccctgctgacaccttgattttggcttggtgaaaccaattttggacttctgtccttgatatggttcagctctgtgtccccacccaaatctcatcttgtagctcccataattccataattgtgggaaggatgcagtgagagataaatgaatcatgagggtgggtctttcctgtgctgttctcctgatagtgagtaagtctcacaagatctgatggttttaaaaatgggagtttccctgcataagctctctttctttccctgccaccatcc

SEQ ID NO: 636312 - DNA, 581 bp, Homo sapiens
tgtgaatatattattttacggcaaaatgactttgctgatgggattaaattatggattttgaggtgggcagattacgttgggttctgtgggtgggccttaaatgtatttacaagtgtccttaaatgagagaggcagagggagatttgactacagaattggagtgttagagtaacacggagtgagaaaaacttgaccaaccactgctggcttaagaaatggaggaaggatcccaggccaaataatgcaggagacttctcaaagctggaaaaatccaggaagcagatctccctgagagcctgcagaagcaatgcagccctgctgacaccttgattttggcttggtgaaaccaattttggacttctgtccttgatatggttcagctctgtgtccccacccaaatctcatcttgtagctcccataattccataattgtgggaaggatgcagtgagagataaatgaatcatgagggtgggtctttcctgtgctgttctcctgatagtgagtaagtctcacaagatctgatggttttaaaaatgggagtttycctgcataagctctctttctttccctgccaccatcc

SEQ ID NO: 636313 - DNA, 567 bp, Homo sapiens
ttatgacactgttgtcgatgacagaattattataactgatagtggattttgaggaagttgcaagtcagagtaatatagacgtataaattgaaaactaaggtaaatatgttagcttgaaaattttttctataattacataaagaaattaacaaaattttacattaatgctcactcagtcttgtgacttttactgatgtaacatacaattattttttagattcagatccctaaaatgccaaaatgatagagtgatcttgtggtaaagctgaaagagatttcagtttaatgaatataatgtatatgagagtgcgaaagtctaatggtagatcacatattcratttaatgaaagcaatttattggggaaataggtatcagattgggatacaactccacttactcccttttcaaatgatcattgacacaaccataggttgactatggatataagaatttgacaaaaagagcaaaactttctgtgaggatcaaatggctatatggaatttataataaagagcattgtatatgttactattacttgtaaactgtctgatacacactctttttta

SEQ ID NO: 636314 - DNA, 623 bp, Homo sapiens
tcttttcagcaaatggcacaattatatatccatatgccaacaacaacgacaaaaaagtacctccatcatacacaaaggataatagcccaaaacgtaaaagctaaaagtaaaaaattctagaaaaaagcataggaaatctttgtgaccttgctttaggcaaaggatccttggattcagcattaaaagcatgagccataaaaaaattgataaattgaagttgaattaatttaaaaactttgacttcaaaaaatatgaagaaaatggaccactggctgggagaaaatatttgcacatcatatatctgataaaggacttgtatcaagagtctaaaaagaacttccataactcaataagaagacaatcaactcaattaaaaatggcccaaatccttgagtgaacatttcaccaaggacagcctaggaatggctaatcagcacattaagatatgctcaacatcattggttattagaaacatgaaagttaaaaccacattgagataccactttgcacgctctaggatggctacaataaaagagagaatgcaaagtgmgcagagagaaactacaaccctcatagatggctggcaggaatattgaagagtacagtcactttggaaaacagca

SEQ ID NO: 636315 - DNA, 544 bp, Homo sapiens
ttttaccaaaacctaaacagagacacaggctaacatggtgcctgctacactaacagcattcaataaatgtgttggtgagtaaataaatgaatctcaaggatgtgattaatggtttatttagtcaaaaggaagttaaagaatgctaataaatgacttttcgkttgcagagtgtattttgctacatgctgacccctggttttcccagctgcactcaggaataaatgaggggaaattaattgtaatttctatgaagagacagccacacccaggaatggatttctgaatcaaataaggtcattttaatgcatggagagctcagaaaacagagtaaggagctcctctattaggtgaatttagggttctttgctggcttgtgggtgtggacatagagccatgtccatatactgtgtcattgccttgaaatgctgtctcctgtacatcagagctggaagtggtcatacagcacctggcctgttcttcatgtcacagatgagtatgccaaagcctgggaaatggacaactcgcccagggtcccttggtcatc

SEQ ID NO: 636316 - DNA, 583 bp, Homo sapiens
ttttataaagaggaattcccctgcacatggtctmttgcctgccaccatgtaagacatgactctgctcctcattcaccttccaccatgattatgaggactccccagccacgtggaactgtgagtcaattaaacctctttcctttatagattacccagtctcgggtatgtctttattgtgagaacagactaatgcactccagctgttcctacctggcctggtggccaacccccaccccattctggttgctctcttggattgcttaattgaaggtttcacttctccctccacttgtcccatcatcatcagtccttgtccaataaaaagagaccctcaatgaagggggactcaagtcagaacaggtgcagctggctcctgaaggagtgaaaagattctaactttaggggctgagacattctagtggggaggaggcctttggggtgccccaggaagaagtcaggtcaaggcatgaacccacaggtggctgctccagggttgtggtgtgtgggcagagagaaagctaaaggggagatttcagcttttctcccagaatgttcaagccatctccaaggagcaagaaaccag

SEQ ID NO: 636317 - DNA, 593 bp, Homo sapiens
tgctaatgatgttattactcacttactgagtttgtggtcgctaaaacctttagatttttttttcatgagaaccacctgcaaagttttttccatgctgcatgtgtatagctgactttggaaatcaaatagggaaatttataagctgccagcacagtgtctagcttgttgtaagcactaaaagaatggtagctattttattagcagtagtggtattaatattatccttgttaggtttcatttccctggtttcagcagctttgctcattgaggttattttgagtaccaattctgtttctctctctctctccccacccccctctctcctcccagcctccagctaggctccagtytgaccagggtgctatctgagtctatcttggggcttaacttaatgatagaatctgatacagcctgagacacagagcatgcacaattagaagcagtgctaccacttcactccttcttttcatccagaaacagatccctcatcaatgtccaaaattttacaatgagaaaatttcttccctggctttagcattgtccttctctctattattcaaatgtaaaatacaaatgtctgtggaggaactact

SEQ ID NO: 636318 - DNA, 505 bp, Homo sapiens
gggcttttatccaatatgactggtgttcttagaggagaaaatgyggacacagacacagagggaagacgatatgaagataaaaggagacagtgcccatctgtaagtcaaggagagaggcctggaatggatccttccctcatagccctaagaaggaaccaatgctatggacactttgacctcagacttctaacttctacaactgccgagacaagcaatttctgttgcttaagccacccaatctgtggtacttagttacagcagccctagcaaaccagttggcttagaatgggtgtattaatccattctcacactgctctaaagaaatacctgagactgggtaattaataaagaaaagaggtttaattggctcatagttctgcaagctgtacaggaagcatagcggcttctgcttctgtagaggcctcaggaagcttccaatcatggcagaaggcgaaggggaagcaggcacttcacacggctggagcaagagaaagagatagagaag

SEQ ID NO: 636319 - DNA, 600 bp, Homo sapiens
aatgacttgaagcctctgaaaatggtcctcagggcaaataacaaacaatgaaacagttatcatatggccccatttttacaaaagtatttcctcctctctaggtatttctttaatcacatacgtgattttaaaaaatgttctgtcaaatggtgctcaactaataactacgattaattctcagcaatgggatgtggtgtgatttttattttcatttttgcatttttatgcactctgagtttttatttgtaagcatctatcattttaataaggaagtaaatcagcatgaatttttataaagaaggaagtttgggctgggtgcagtggctcacacctgtaaccccagcactttgggaggctgaggcaagtrgatcacttgaggctagcagttcaagaccagcctggtcaatacagtgagacccaatttctacaaaaaacaaaatttaataattagctggatgtaaaaaaaattacctgggtggcatgcacctgcagtcccacctcagaaggctgaggtgggaggattgcttgagcccaagagttcaaggttacagtgaactatgattgtgccactggactccagcctgagtgacagagcaagac

SEQ ID NO: 636320 - DNA, 548 bp, Homo sapiens
tgaacgaatcccctcccattggaagccttccttgatcccttcttggattaagtttccctgcgagttttcttctgatttagttggtctaggggtggggttcagaatcagaaatttaaaaactccttggataattctaatgtgaatcagagttgaaagccattgagggaaaagaaagggaagatgggaggaaacaagacggtggggctttccaggttcctacctgaggctcactggtcttctactgaaatgcaacaccaggaggggtgtcaggagttgaactgtgctcaccccmcattcatatttcaaagtcctaacccccaatacctcaaaatgtgacttatttgcagataggatctttacagaggtaatcaagttaaaatgaggtcatttgctgggccctaaaccaatatgactattgtctttacaaaaaagaggaaatttggacatgaagacatgcagagaggatggtgatgtgaacaggcagggagaagatggccatacaagccaaggagagaggcttggagcagaccttcccctcagaggaaaca

SEQ ID NO: 636321 - DNA, 539 bp, Homo sapiens
ttcatccaagctgtggaaacaggccagaattaagtgtagctatacagttgtccctcaatatctgcgggagattggttccaggaccctctgaagatacccaaaatccaaggatgcccaagtttcttttacaaaatggcaaagtatttacatataacctaygcaccctatgcacatcctcctgtatactttaaatcatctctagattacctataagacctaatacaatgtaaatgctatgtaaatagttatgttgtatttttaacttttaaatttgttgtgttgttattttttatcatttttaaaaaatattttccatccatggttggttgaatcccctcctggatgtagaacctacagatatggagggcccactatacatgtgtctttcctgaagaaaatcttaaatccaaaatacaaatgttcaaaacagaaaaatgtggctctccttaccctctactctcagtagaaaaatattaatggaccctgcagaaaatacagcaggcacataaccttttggattaccagtaaccaagggagat

SEQ ID NO: 636322 - DNA, 587 bp, Homo sapiens
catgagctgagggacctgggccagccacctgacttccgagagtctcagtttcctcaggtgtgaggtcagggggctccttaagatgaacccagtccctttagctttaactttccagagtatgtgaaccataaactgtaaaatgtatgaggctcctttattagtagttatcaatacaggactgagaatatcaacgtccctgagaggggaggtataattcgaaatggcctatctaacattataatttcatatttgagaaagttttcaaactaccaattcataatacaaactacaatacaagttcaacacaaccttcccagcacatggaattctgtctgccaataaacckttaccctcccagataaggttagggagtatgtaattctttagacattttagatttgacaaggatcatctgtttctctgaactttcattgcatcatccaatttcagcacgtcaaaatattttcaaatatacttaaaatctccaagttcatggatgcttaaataatttatttcattttcaattagttatttcccagtgatatagagtaataagcttcctccaaagcaggctctaagatgggtta

SEQ ID NO: 636323 - DNA, 563 bp, Homo sapiens
aaaatcactgcaagccattaaatagtctttaagtagcactgatggtaattgacatcaaattatctaagtaactttgtatccattattctctaaaatacaaaattttctgaaattcctatgcatttaatgtatgatgagccaggtgtggtggtttaaggctctaatcccagctactcaggaggttgaaacaggaggattgtttgaacctaggagttcgagcctgcactgagcaatgatcaagttgctgcattccagcctgggtgacatagtgaaactccacttttaattaacaaaaaatgtaaaawttaaaatgaaaataaatatgtgataaatgtgaatgtagtgtggaggataggtctaggtcagctctgttctacgtcacagatttttgtacatctgccttcgccattacatttaatgtcctggaaaacagacacatagtttgaatatctttggaagagctacaactttgaatggagttgccatacaaaataggtactcagtagttgtttagttaatttgaactgaaatcctgtgtgcttataaaagtcaggacttaaaaa

SEQ ID NO: 636324 - DNA, 561 bp, Homo sapiens
aacatgctgcctgtcaggagctgtaattttggagggacatggctgctaccacaaaacatggcccagaagaggcagacagcaggctagacatgccacagtctakctttcctcccttcctctgagctcctactaaggtctatcattggctacacccaaccaaaaactgaggggtaagggtttgtctcttggaacacaaagcagcagaacaaaaaataacttttaaaatgcatctggtggcagtgggtggaagaaagcagaataattagcatatgatagaaataaagaatggtagaattaaaagaaaaacaaagtacatttgggtcaagtttctttgttttacaaatgagatgagagaatctcagaggcatttgaaccagagtgactccatcttgaatagtgaattggtaaaataaggctgagacttactgggctgcatttccaggaggttaggcattctaagtcacaggatgcgataggaggttagcacaagatacaggttataaagaccttattgataaaacaggttgcggtaaagaagtctgccaaaacccaagatggtga

SEQ ID NO: 636325 - DNA, 476 bp, Homo sapiens
tggtcaattattcttctgagaatatcagaggttttgaggtttctgaagtatttggaataatgggatgatattgaactataccaggggctctcaagctctggattctttactacaattaaaaataaaagaacagtctgtgcaaggttttgtagacctgctcattggagataaatctttgcccaataaagattatacagacacaagaatacaaggtgtggaatrctagaagctcatattagccttactcccaatgatctggaatggcatggaaatttttgctctataccgatgcatgaagcattcagctttttgaaaatttaggaaatcaagggcttcattagtctgtaatatattcagaagtctgtgtcactaaaaattagagatttggatccagtggatgtgagggctcaggctgactgatctttcctcatcaaacaaatgcttttagatccatgtcagagttaggtctaacacac

SEQ ID NO: 636326 - DNA, 565 bp, Homo sapiens
tgacaccagtgctttagcatccatgattataagaatggtactgagaagggaagactgtagagtcatcagcatcttcaaaaaagtgtaaatttttgcagtttttgttgatgcataaagttcaaaaagccagagtagaggagagaaggcaytcatatgtaattaaaaaaatagaagcaagaataaggagctgggaagcaactgataaatgggaagaaaggaaagacccaaggtgtctcttaaaagattttaaaagtgaagtggtagaaaacaaagccaaataaaagtttatgactttggcagtgacatgacaaaggccttgttaatggagatgactgcatcaactgtttgctgaaagagtagaagagagtgccagaagggagggaggcaagctgagagcctgctacagcaaaccacccccacaaggtttacatacacacaaaactgaattataaaactttaagagcatgctatgcttctattatcagttttatattatacttcgtctgactttgtttaaaaggcagcagaaggttccataaatggtttggtgtttccctcaccaaac

SEQ ID NO: 636327 - DNA, 565 bp, Homo sapiens
tgacaccagtgctttagcatccatgattataagaatggtactgagaagggaagactgtagagtcatcagcatcttcaaaaaagtgtaaatttttgcagtttttgttgatgcataaagttcaaaaagccagagtagaggagagaaggcactcatatgtaattamaaaaatagaagcaagaataaggagctgggaagcaactgataaatgggaagaaaggaaagacccaaggtgtctcttaaaagattttaaaagtgaagtggtagaaaacaaagccaaataaaagtttatgactttggcagtgacatgacaaaggccttgttaatggagatgactgcatcaactgtttgctgaaagagtagaagagagtgccagaagggagggaggcaagctgagagcctgctacagcaaaccacccccacaaggtttacatacacacaaaactgaattataaaactttaagagcatgctatgcttctattatcagttttatattatacttcgtctgactttgtttaaaaggcagcagaaggttccataaatggtttggtgtttccctcaccaaac

SEQ ID NO: 636328 - DNA, 573 bp, Homo sapiens
cagcttgtctttttgcatgttaatctctgcagtgcaattagacttagctactttccccattctctgtgaacatcatacagtgatatatcccattaccatcacctccattaccacccttgtcttccaaagctgttcttcaataggtactttatgccacaagggataatttaagtacctgttttatgactacataccactagtattcttttttaaaataataatttaattttcagtgctttcaattcttataaataatcccagaagcccaatctgaakttttgactagttgtttgcctgtttacctgaagctacatttgagttaataatatataagttggctgggtgcagtggctcacccttgtaatcccagcactttggaaggctgagactggtggatcacctgaggtcaggggttcgagaccagcctggacaacatagtgaaaccccatctctactaaaaatacaaaaattagccagggctggtggcgggcacctgtaatcagctacttgggatgctgaggcaggagaattgctcgaaccctggtaggcagaggttgcagtgagcaaagactg

SEQ ID NO: 636329 - DNA, 535 bp, Homo sapiens
ataaaatactgtaactattttacgtggaaatgaattaataaagagaatgaggtatttacaaattactctgaataatggagaagtgaaaactgtagattgggcatccaaaataagttacagaaaacagtagtattgacttgccagtggagctgctacatcttccataatcagaaagactgagtggcagacttggattattggcttcaagatcacgtcatattggctgggatcaggaagctgccacctacaactgttgcctctagaattatgttatatctgctatatcgtcacttgcagacaatatatgccctactttctgccttttaatatgtgtaaagctagtgatagaacactaaaagttatattgttgytattacagagaaacccaatacctccatggatatgcttgacatcagaaaaatcataacaagcattcctgtgaacttcaccatacttctgccttccaaaactaagcaagtgcatctgattagttgaattcaaatcatatatagaacctaagtcacaaaggagcctg

SEQ ID NO: 636330 - DNA, 533 bp, Homo sapiens
cttgcttttgttggctttgtcaaagataagatggttgtaggtatgatgttacacacctacatgcttctgaattttctattctgttccattggtctatgtgtctgtttttgtacaagtaccacgatgttttggttactgtagcttttcagtatagtttgaagtcaggtagagtaatgcctccagctttgttctttctgcttcagattgctttggatatttgggctcttttatggttctataggaattacagaatgaataatttttctaattctgtttgtagaatgacattggtaatttgatagaaatagcrctgaatctgtagattgctttgcacagtatggccatttttacaacattgactcttccaatccatgagcatggaattttttttcatttatttgtgtcttctctgatttctttcagcagtgttttgtagttctttatgtagagatctttcatctccttgcttagctgtatttctaggtatttcattttctttgtggctattgtaagtggaattgtgctcgtaattt

SEQ ID NO: 636331 - DNA, 552 bp, Homo sapiens
atgagtatgcacatgcgtattttgtaattattttcgtagataatataattgagccagcttgcttcagattgttctatgaccaaatgtggtagctaaccaacatcccatcaaggttagctcttcttgggtcaaaactagagtctgaaatttttaaatggtctcttctagcttttgagttctaaacaaacttgtgtctctctctaacagagagattacgaaaattatagttgtgagtttgttatccactcacttgttctttttgtttgtttgtttgttatttgctttgggtttgggcatttcagcctgagaatagacagtttaagatttgacaaatgcctggagggaatactgcacacagaatttttggcttacttaatttgaacttggagtgttmaacttctaggcaacacaaattctaaattatctaccctgatcttacatctcagcagacctctgcaagtcagtggccccaggtttaccttaagcctttattccctgctctgtgaactagcaaataacgcaagagaaaaagcagtggcaaatctgaggctt

SEQ ID NO: 636332 - DNA, 552 bp, Homo sapiens
atgagtatgcacatgcgtattttgtaattattttcgtagataatataattgagccagcttgcttcagattgttctatgaccaaatgtggtagctaaccaacatcccatcaaggttagctcttcttgggtcaaaactagagtctgaaatttttaaatggtctcttctagcttttgagttctaaacaaacttgtgtctctctctaacagagagattacgaaaattatagttgtgagtttgttatccactcacttgttctttttgtttgtttgtttgttatttgctttgggtttgggcatttcagcctgagaatagacagtttaagatttgacaaatgcctggagggaatactgcacacagaatttttggcttacttaatttgaacttggagtgttcaacttctaggcaacacaaattctaamttatctaccctgatcttacatctcagcagacctctgcaagtcagtggccccaggtttaccttaagcctttattccctgctctgtgaactagcaaataacgcaagagaaaaagcagtggcaaatctgaggctt

SEQ ID NO: 636333 - DNA, 577 bp, Homo sapiens
tgagaacattcaatatatatatttcaaataaataaatggatggtggggctaggataaaattcaaaaaatccttagaaagactaaatttacaggattaggggttacacgttctgtaacgaagacaaaggtatctcttcctttgtctgggacctctctctctcactccctttctattcttgggtgctgtagtacatctgaaacagttgatgattaaataaccaagagtttacagaaataaagaaaaaaattatgatttcagaattataaataagtccttgctttagttcagctatttagaagtaggtgttccccagatctcatacattaaaaatcgagctaacctctatggcmaaactgcccttcattagtctatttaaacattagagacaggaacattcattagtacttggaagatggctaaaattcaggctaatttttttttcttttttttttttttaaagtgacagcaagttaattaagaaagtaaagaaataaaagaatggctactccataaacagagcagcctacttacctactattataagatgatgttttatggaatagcttcatttaatat

SEQ ID NO: 636334 - DNA, 635 bp, Homo sapiens
aggtgatggagctgagtggacagstgagcattcttaatgctaccgccttgtgtaagacccactactctggctggcaggtcaccagtcttagtgctgggccccctatggcagccaagcccacctaagccaggagaacttggagaggccttcacctgggtcccatggagaaggctggtcaatggcattttggcttttgtggacaggtgagtgtcccctctgcacccccaccccaaccctcttgatgatattgggtgagccagggaaaaaagcctgtgaatatgtggtcagtttaaaagttctttgtcatttaggtacccaaatagaagtacctccttttcatcacttcccctggtcttttctcctctaacatcattgaattgctccaccaaccattttattttattttattttattttattatagtgtaagctctgagatatatgtgcagaatgtgcaggtttgttacaaaggtatacatgtgccatggtggtttgctgcacccatcaacccgtcatttacattaggtatttctcctaatgctatcactcccctagtcccccatcccatgacaggccctggtatgtgatgttcccctccctgtgtccatgtgttctcattgttgaactcccacttat

SEQ ID NO: 636335 - DNA, 573 bp, Homo sapiens
ttgaatctataagtattcatgtttccacaaaaaattgtttttatttttgcacgatgttttatttgggtgtagaattgtcgatcgagcactttttcttccactactttaaagccgtttctccattttcatctctcttgaattattccttatgaataatcttcagtcctttcctttgtatgcattttttttaaaaaaaaatttaatattttcttcccctcttcctctccctcttttactaatttgattatgatgtgtcttggtgtaattttcttcgtatttcttggacttgagcttcttgaatgtaaattttgtattttccaacaaatttgggaaaaattgccattatttcttcaaatatgtttgttattcttcatcttcctcaccttcaagaataccaataatatgtatattgggtgacatgaagttgtgcttctgctcactaatactctgttctttcttcccccctcccctgtggtttaattttaatagtttatgttatttttcaattcacttatcacttttttagcagtctaatctgccattaatmccttctagtatattttttttatctca

SEQ ID NO: 636336 - DNA, 513 bp, Homo sapiens
gggggaatagttaagtatgtgtgtctttttccatttctgttggctttatgcaaggaaaaaaaattgccagttttcagagaattcagggatgtttaaagaggagtttgttaagttggccaagtcttttgacttaacttggcatgacatgtaaatatttattattatccacttcttataccatagatgaaaaagaaaggattccaagtactgcccatgaacatgcagatggaatggccactcataatcaaggctatgccatttgttgtgtgggaggagatgtggttccagatctagatgccccccagtgggattaccagaggggttcccagtrtctcaaatgcaatcacatgctagcttgtttcatagagaatatttaaaaatgtgtaacgacggttatgacaagtttagagaaataactcaggggaaatataaaaatcccaacctgtttcagagccacttgtttgaggcactcaggaaatatactaatgcagacccagactccctagaaaggtg

SEQ ID NO: 636337 - DNA, 272 bp, Homo sapiens
tgtaagccttcaggtagtactctacatggggtagtacactacagtggrtagtgtttgggaggagtgccatgtctttccttgggcgagagtgagccccttagaaaactctgagttgacaacagagcacatggtactctcctatagcagtgggaatgtgtggggctgggccagggagaggtgaactaattctgtgtgaggtcatgtttttaagaaaaataccaacatttcagctattctgagggaattaggcaatatccaggagaatttcggaa

SEQ ID NO: 636338 - DNA, 615 bp, Homo sapiens
tgccttggccagtttttaaaaatatgatgttgttcatataactgtacttgggtcattcatcaaaatcaaagaccttgagaatgaagatcatgtcatttgtgtgcatgtgtgtgtgtcccataacacgtaattcaagcttgatcacacaatgaacactaaataaatactagtaagattgaaatgttcatcatatagtttacaggcatcattagctctcttttttcctactctggtttttgctccctatgctctaaagtatatttgagattctttgaaagttgagaagccctaaaggccctcacaatgttaaaattgcattaaaatgaagaagaagaaagatgtccggggtggggtgggaaacaaaagcccaaagaaaaatctgaaagaaaatccagccttttcactaaacacttcaagctcrcccgcttcagcctctgcaggcagcaattacatttcgaaggaaaatgttttacaattgtaattacacataataggaggaatgtatttttccttcatcctactcccatggcgagtcaatttaatttttaaatacaagagacataattgattttagccctagattagtgctgaaaatgatctatatgtgttctcgct

SEQ ID NO: 636339 - DNA, 457 bp, Homo sapiens
aactgccaggcagctgatgggtgactgaagtagaacagcttaaggcaaagctatgaaataggcagtttatgctctgccattttgccatcaaaacaagcccttaagcacaaattctgagttcaattcttactcttactgagttgtcaactaatccccctctaaagcaggattagtaactgggatgttagcttctaagactataattcccaggtgtatttgcattttaatcaaagactccaagaaggccgaatgggcatggacccatcactggcaaggtagtgcggagacctaggatccasctcacaccagtccatttaccagccaggtaacttctaagctatgaaacaggattatgctcacctcatgaaattgctgcaataattaagtaaattatgtagtatattgtgactatcacaagcagggtgctcaacacctttgaatatgtcttaaggtggga

SEQ ID NO: 636340 - DNA, 346 bp, Homo sapiens
atcaaagcatggcagtttacagacattttgagaaatgaaaagatagcatgtatttctctttgtgtgtctatgtccgtggatgtctctgtgtgtgtacatttgtaaatctgtgtctatctctgtctgttgtgcctgttttctttcccaaatagattatctttggtagatttaggaatcatatagcttgtccttaatgtgkctattcaatataaggaaaattatctgtattgctaggaaagtctacaattcactgaatagccaaattacttatgagtggtttaatgtacctttaatgttcaaactcatacacccaagcatactcaccggagtttgaaatggtggtaag

SEQ ID NO: 636341 - DNA, 591 bp, Homo sapiens
ggatggttactgaatggacccacttactgatcatcattgctcttattaagtagawggagatcctaatggctgtttgatatagtttggatgtttatgctctgcaaatatcatgttaaaagttgatccccagtgttagaggtggggcctggttggggctgtttggatcaaggggctggattcttcatgaacaacttggtgccatccttgtccttgtgggagtgaatgagttcttagttcctaagataactggttgctaaaaataaattatcctctcctcccctctctcttgctttctttctttctcatcatgagatacctgaccccctttaccttctgccttgagtggacgtttcctgaagtccttcccgaagcaggtgcatgtgccatgcttcttgtacagcctgcagaaccatgagccaaataaatctcttttcttcataaattatccatcctcaggtattcctctgtagcaacacacagagaccaagacccagttctagtgcccagttaagagcaggggatgactcatgggtgggtccttccaaggacaaggatttcaggtgacaggacacttcctgagatgcctggttg

SEQ ID NO: 636342 - DNA, 563 bp, Homo sapiens
tgcactgggcttctgacttgcactgacaagtagaatgaggcagaagtgatagagggccaggtgtgaaccaaggtcttaaaaagcacagaggtttccacatgttctcttgctcctctgccttcaatatgacaacatgccctgctggaaattgcagcatgtagagcagagctgagtgactcccagtaattccacccaagatcatcctagattagccaactcccaccagatatatataagtgaggccagagaaactacttaactgaatccagcctaaatcactgaactgcagactatgagctaaataaatktgtgtttgtgtattttacggcactgacattttatgattgattttgtttataatgcacatcaaattgcctgtaattgatgtaagacaggaattggtggcctagaagatcaagaggcaaaaatgcaggaagaaatacaaaaagatgggaagcattaaaaaacaaagcatatatgaagggaagatattcagaagccctaaattgccaataaatagaagtttctattactggaaaaaaaggaaaataaaaaaaagaaga

SEQ ID NO: 636343 - DNA, 553 bp, Homo sapiens
ttttactggttttgactgcttaccctaagaagcacaaatattacctagaattacacagtctctctctgttaacacttatcacgtacctactccctgttaggcactgcatgacttcagcagactaaactttcattgaatattcgtatttacataacatgacacaaatgagatataaacagctctttgtacaaagacaaatatcataagaaaagcatatctaataggcaaaaggaatagggatataactttttctttattttatgtgtgaatagcgagaaatcataccttaacttgttttaatccatttgggcagctatcacagaatatcttaaatttggtgggttataaacatgaaatattgatttctcacagttctggaggctgagatgtccaagataaagacactggcagatcctgcgtctggcaagaacccatttcataaatggggctctcttgatgtatcttcacatggtggaaggggcaagatctctctaaggattgttttataacggcactaatttcatttatgrtggttttaagcccatgatctaaa

SEQ ID NO: 636344 - DNA, 561 bp, Homo sapiens
ccttaacacattcatcctaaaattttttaaagaatatagtattacaaatcaagagagaagaaaaattataaaaataataaaagatgaaagttaatgaaacataaaacaaaaaagcaaaatgaaaaggttaattctacytaaaagttattctaggaccaatgtctcacagttgttttaactatataaccattgaaaaacagttaattccaatgtaatgtaaattgtcccccacaatgagtgggataccagaccttcataaaagtaatatgtaaaaaggaaacatatagataatgttgcttaggaatatgcatgtaaaattctcattaaaaggggaagtagaattcacacaggtgtcaaaggataatatacttcaaaaagattgaatttactccaggaatatagtaatgagtctgcctctagaagcctatcaatataattaattaatgaaaggactataatcatcttaagagttgttatcaagagtcatctgataatacttgagatactggtgtacagaggtgatagtgaaaactaatttttaaagaacagtgttgtataaca

SEQ ID NO: 636345 - DNA, 608 bp, Homo sapiens
catttgtttctcctttcacaaacaaaatcattatggcttgtgagaggctggtatttttgtccatctgtgatcaatctcaatagcttgaggggttgagaatccaacacatggttacacaatcatttgacatgacacataagcaagagagtcagacactcatttaccaaaatggattgagcagaaaatcctagcacatttaatggaaatgaatgggtaagtttccaggaatctaggttactttaagcaatggagagtaatcggttcttaagttcttcaatagcacggatccccaaaataggaacttaagtaatctgttgaataccagcctcccaaatattaccagaacttgttgctatgagaaagctaaacttgtggcttattagtataagggtcactaccacctcaaacatgaaaaagggcagcatcactatttttattgagactttaaagtttggtttaaaagtggagagaatgyattaagattaggtgaaggttattatatatatagtcatatgatgccaaatgatttgatcaatgacagatgaaatattcagcagtgatcccctaggattataatggagctgaaaaattcctatggaccagtgatg

SEQ ID NO: 636346 - DNA, 557 bp, Homo sapiens
tgtacaaagtgtctgtgatttaagctaaatattaatatagcagaatcaaaaaagtaaaaaaaaaaagctttaaagtttaaagtgaaaaaaatgacaagctaaggttaatttatttttaatgtagcctaagtgtacagtgtgtataaagtctacagtagcgtatagcaatgtcccagccttcacattcactcatcactcacttgctgactcacccaaagcaacttctagttgtgcaagctccattcatggcaaatgccctatgcaagtgtactatttatatgtatattttcactgtaccttgtctttccctgtttctatgtttaggtccacagatatcattgtgttaccactgccaacagtaacatgccatacaaatttgtagcctaggagcaataggttgtaccatatarcttaggtatgtggtaggctataccacctaggattatataaatacagtctataatgttcatacacaacaaaattgcctgaagatgcatttcccagaacatatccccatcattaagtgatttatgactgtaatagtttaggattggtga

SEQ ID NO: 636347 - DNA, 552 bp, Homo sapiens
aaacatttatgcctgaagagaatgatgattaccagcatttgtaaatatgcacacatataaacttttcctgaagtttacacattatgccatatattgtgcacaatatttctcttaaagtgccttgtcttggacagtcaacttgctacatgggccaataaaatgtgtatgctaaacatacagattgagtttattgctgcaataaaataaaactcatggcaaatttagtaggatatatttctaatgacatgcataattgtctttttgctacatgctaattatgtagatataaatgaaatgcatttccaaataatactaactatagtcacttaagtggaacaccaaatcatgtatttaattctctgaggtttctaatagatgttttcactaggagtgtttaattctcctgtgcatccttgtgaggcaaagtgaacaaacaccattacctgacrttaccatcttctggggcagttggatttaacactttactctgagattctctatgttcattttctattagtgactgtctcctctacatatcatatctctaagtta

SEQ ID NO: 636348 - DNA, 540 bp, Homo sapiens
gttgataaatggttaaaaatacggattcaaagagccagactagactagaaatatatttgggatcataaattagaattgacagggttaaatttcctttgtgaaataatgtaggggagtgtgtagataaataaccaaaaaggctgtaggttctaactttgaaggacattattatgtagaaagcaagaaaaggaacagaatctcatgaagaaaaacacaaagaaattacaggtctaggaagatcaagagagtgtcagaaaatgaaaaatgaggaagagaaaatttatgagtgagtaactatcaatggcacaggaaaagtgagggagcataactattgtttcaatggagaattcattggattttgtattagatgagggcattaatgatgttaacaggaaaaatttcagtggagtagcagagggyagaggacagataggttgtagtcaatggagagaatttgttctactccacttcagactacagcttaagtattgtttttgtttgttcagagaagtgcattttaaggggtacttagagacacaa

SEQ ID NO: 636349 - DNA, 551 bp, Homo sapiens
taaacgataatagcaaacagttacagaacatacactataaaacaggcactcttttaggagtctacccatattaacacataatacaaattgttactcgaaaygctttgatacaaaaaagggtatggtaacccatgtaataccccataataaggggttgtttacttatgtataaatataagaactgtttatatccataaattcgatagcattattaagcatcaattatgtgcaaaaaattgcacatgtaactctatacaaaataaactctctagggaacctttgatttcagttgtggagattaaaaatattgtgtatattaaaacagtatgactcagtgaatacaatattccaggtaaatgtttaaaatgatatttcagatatttcaggcttaatctccaaacatcgtctttgcctagaatgtaatcaagctatatagtggtactgttagttccgaagcacatgcagaattccagataatccaattcaatggaaaacactgattatctgatacctaacaagaaatatatgtcccgagtaaataaataggtcat

SEQ ID NO: 636350 - DNA, 578 bp, Homo sapiens
aggggagatagcaaaattggaaagaacaagatccaagtgaagggaaaatcacaaacaatttggttccttggctgaaaaaaaaaaagtaaagaagaaaaaaactgtattactgaaagycaaaatataaccaaacatattcaaaactctagaatctgtctacttgaagttaattatgaaacaagttaggaattaaaatgttgtcctgatgaaatattgtaaaagtatcacaactgattccacttctcattactcaaagcattctaaagatatggattctgaacaggtaactcttgagatacaggtaattttgtcaaggaattgactcgtattgtggacagatacacacagttcccagagtacttttattgcaaataattttacattttattaacaagggtaaatttcactggctctgctcatgactgaaagaagagaggtgtttaagttaacacaagattctcggtaggcaactacattcaccactgtgtgtgtgagagatgacacgctttatcctatcactaatttactaatctatattaaaggaggagttagatcaaaatattgggagaaggacaact

SEQ ID NO: 636351 - DNA, 578 bp, Homo sapiens
aggggagatagcaaaattggaaagaacaagatccaagtgaagggaaaatcacaaacaatttggttccttggctgaaaaaaaaaaagtaaagaagaaaaaaactgtattactgaaagtcaaaatataaccaaacatattcaaaactctagaatctgtctacttgaagttaattatgaaacaagttaggaattaaaatgttgtcctgatgaaatattgtaaaagtatcacaactgattccacttctcattactcaaagcattctaaagatatggattctgaacaggtaactcttgagatacaggtaattttgtcaaggaattgactcgtattgtggacagatacacacagttcccagagtacttttattgcaaataattttacattttattaacaagggtaaatttcactggctctgctcatgactgaaagaagagaggtgtttaagttaacacaagattcycggtaggcaactacattcaccactgtgtgtgtgagagatgacacgctttatcctatcactaatttactaatctatattaaaggaggagttagatcaaaatattgggagaaggacaact

SEQ ID NO: 636352 - DNA, 578 bp, Homo sapiens
aggggagatagcaaaattggaaagaacaagatccaagtgaagggaaaatcacaaacaatttggttccttggctgaaaaaaaaaaagtaaagaagaaaaaaactgtattactgaaagtcaaaatataaccaaacatattcaaaactctagaatctgtctacttgaagttaattatgaaacaagttaggaattaaaatgttgtcctgatgaaatattgtaaaagtatcacaactgattccacttctcattactcaaagcattctaaagatatggattctgaacaggtaactcttgagatacaggtaattttgtcaaggaattgactcgtattgtggacagatacacacagttcccagagtacttttattgcaaataattttacattttattaacaagggtaaatttcactggctctgctcatgactgaaagaagagaggtgtttaagttaacacaagattctcggtaggcaactacattcaccactgtgtgtgtgagagatgacaygctttatcctatcactaatttactaatctatattaaaggaggagttagatcaaaatattgggagaaggacaact

SEQ ID NO: 636353 - DNA, 578 bp, Homo sapiens
aggggagatagcaaaattggaaagaacaagatccaagtgaagggaaaatcacaaacaatttggttccttggctgaaaaaaaaaaagtaaagaagaaaaaaactgtattactgaaagtcaaaatataaccaaacatattcaaaactctagaatctgtctacttgaagttaattatgaaacaagttaggaattaaaatgttgtcctgatgaaatattgtaaaagtatcacaactgattccacttctcattactcaaagcattctaaagatatggattctgaacaggtaactcttgagatacaggtaattttgtcaaggaattgactcgtattgtggacagatacacacagttcccagagtacttttattgcaaataattttacattttattaacaagggtaaatttcactggctctgctcatgactgaaagaagagaggtgtttaagttaacacaagattctcggtaggcaactacattcaccactgtgtgtgtgagagatgacacgctttatcctatcmctaatttactaatctatattaaaggaggagttagatcaaaatattgggagaaggacaact

SEQ ID NO: 636354 - DNA, 555 bp, Homo sapiens
gctcctgaggctatatcttcagaatatattttctgctctgtcactcctggctctggaacaaatagacagtgtgtggctgcacagctaaggaaagcatatgcttctgaggactstgaccatgcccaccttgggcccagctaatctgggaatgaagggtttgacatctactgacaacttatggccttatcttccagctcacatggtccctccaaggagcactgtgtaggctgtgtgggggtggccagcagccaacctgtaggctggtcctgattctttcttgatacctgattttttttttttttttaagacagagtctcactctagttgtatttttagtttcaccatattggccaggatggtctcgatctcttgacctcgagattcacctgccttggcctcccaaagtgctgggattacaggcgtgagccactgcgcaagcttcttatcatcaccctctcttcttttctctacccactgccaccttcaaggtcaatagttaccttcaccacctactttgttctctctcctccaaaagcaacatctttccaagatcgc

SEQ ID NO: 636355 - DNA, 555 bp, Homo sapiens
gctcctgaggctatatcttcagaatatattttctgctctgtcactcctggctctggaacaaatagacagtgtgtggctgcacagctaaggaaagcatatgcttctgaggactgtgaccatgcccaccttgggcccagctaatctgggaaygaagggtttgacatctactgacaacttatggccttatcttccagctcacatggtccctccaaggagcactgtgtaggctgtgtgggggtggccagcagccaacctgtaggctggtcctgattctttcttgatacctgattttttttttttttttaagacagagtctcactctagttgtatttttagtttcaccatattggccaggatggtctcgatctcttgacctcgagattcacctgccttggcctcccaaagtgctgggattacaggcgtgagccactgcgcaagcttcttatcatcaccctctcttcttttctctacccactgccaccttcaaggtcaatagttaccttcaccacctactttgttctctctcctccaaaagcaacatctttccaagatcgc

SEQ ID NO: 636356 - DNA, 398 bp, Homo sapiens
catggttaatcaatcctccaaagacaaaattgtggccccattcctcctcrcttaagcaagggccaagaggcccatgattttacctcttgccagactataacaagttgcaagaaaaacccatgcctgggtggtcttcagaaaaggccaaatagggagcccagacattcaccgtcatcctccccattccctgcagtgtcacagagcgtgtgaggatccaggactttcacctccatcaggcagtactgagagtaacgaggcttcccttacccatcctgcctgggtggtgtcagaggaggcagaatggatgtttgaaactttcaccaaccccagcagcaagacatccccactgtggtgtcagaagaggccacatcaggaggagtaggtagacatgcctcctc

SEQ ID NO: 636357 - DNA, 561 bp, Homo sapiens
caagcatagaaagacaaacaacacaggatctcactcgtatgtggaatctaaaaagagtttatctcatagaggtataaattagaataacaatttccagaggtttgggggaggtatggggaggagaatatggggtgatattggtcaactggtaccaaatatcaactggtacagactgataggaagaagaagttctggtgttctattgcagagtagggtgctgatagttaaatrtattgtactgtatatttcaaaataagtgtaagtaataattttcaatactctcaccacagaaaaatgtttgaggtgataaataagctaactactgtgatttgttcattacacaagacataattgtatcaaaacataaggctatattccataaataagcacaatgattatgtgtcaattaaaaacaaaacaaactttttaaaaagtgaataaggagttaaactttcccacctatatgaagaaggtacttgaaagttgagagataaattgtataatattgtaatggttgtatagtttaatgatataatattaaaaattactactttaattaat

SEQ ID NO: 636358 - DNA, 561 bp, Homo sapiens
caagcatagaaagacaaacaacacaggatctcactcgtatgtggaatctaaaaagagtttatctcatagaggtataaattagaataacaatttccagaggtttgggggaggtatggggaggagaatatggggtgatattggtcaactggtaccaaatatcaactggtacagactgataggaagaagaagttctggtgttctattgcagagtagggtgctgatagttaaatgtattgtactgtatatttcaaaataagtgtaagtaataattttcaatactctcaccacagaaaaatgtttgaggtgataaataagctaactactgtgatttgttcattacacaagacataattgtatcaaaacataaggctatattccataaataagcacaatgattatgtgtcaattaaaaacaaaacaaactttttaaaaagtgaataaggagttaaactttcccacctatatgaagaaggtacttgaaagttgagagataaattgtataatattgtaayggttgtatagtttaatgatataatattaaaaattactactttaattaat

SEQ ID NO: 636359 - DNA, 519 bp, Homo sapiens
ctaaatttgtgaaaccaacacaaaatctcaatgtcagcactagaatactgaatctagcagcaattcaacagagaggatgactcggtgtctgaggagccctacaagtgaagggcaagagttagctgcagaaattcccagagatatttagatattgcttgtgtcaaacctagatagatctcacttagggagagagctgaatgtggagggatgtcaattttgtgtgtagcagtagttgcaaaatccaaggctagggaaatgagaaaaggcattgttgtaaatataatagtttttgcttgtatttattgtcaaattttgtatcttgtatactatttgtctgtttcaacacttcaaattgataatgtayaggaaaccaactatcttctctagctttaatttatagatccaagctcctaggactgtgacagattctcatttgatgtcactggccaaggtttctaaagatacagattgcttggtctcaatacaatcctaaagtattgtccaggaatcaagctatct

SEQ ID NO: 636360 - DNA, 623 bp, Homo sapiens
cattgtgtatatgcactacatttttttatccattcatctgttaatgggcactgagattgatacttttataaatagggtaaatattaaaaattaaatattgtaaatagttctattcaactgaggttgaggctattgtaaatagtgctgcaataaacataggattgcagctatcccttcagcaaactcccttcaagtcttttgcattaatactcattagtggaatttctggattatatgataattctatttttagtttgttgggaaatctctatactgttttccataatgactgcacaaacttatttgtttgtgcacatttgtatactatttccaccaatagtatacaagtgttcccttttctctatatccttgccaacacttatcttttttkgatataaaacgttcctttttgaaatgaagtatgagataaaaatataatagtaaacattttagaagacattctgacaggtgagagatggtatctcactgtggtttgaatttgcatttctctaatgattattaatgagcatttacccatatgtgatggccatttggcactatatatatctgttggtatctttatgtatctatatagatatatagacatgtatgtttaagtttaa

SEQ ID NO: 636361 - DNA, 568 bp, Homo sapiens
attctaagacccagttgctgctccttcgggttgctcttctggaattctgcctttcctgacgtcttgagtctctgaaaatactaggataaactgcaaggtttcacatccacacactatattccttatacaacatcagtgctatcagggccactaactgccctttggcaacataagaaccatgcacccagcaggaatgcatttggtcttttcctcaatctaaccaacttctaatgttattttttgaagcatctacaaatctcaggtttcattgagattgtacacagtcctctaaccccgtatttatatttctaattaatatatgtggtctttaaataaatatggaaagagaagatactttgagtggtagggaatgtktctcatttcaaccatggcataagaatgggagtggaaataattattgtcatttattggttcatgatcgattcagtttaaaacttgcttaagagggatactttgatggataaactagagatgttttctttatattcctatttactgcacacagtgactgcaaagcttttccttgatggaatttctctattttatt

SEQ ID NO: 636362 - DNA, 600 bp, Homo sapiens
gttttggttactatcggcttctagtaaaatttgaaggcaggtaaagtgatgccttaagttttattctttttgcttaggattgccttggctattcacactcttgtttagtttcatttacattgtaagacagttttattctcattctgtgaagaattaattgrtagtttgatagcaataacaatgcatctataaattgcttcaggcagtatgaccattttaacaatactgagtcttcctatccgtgagcatagaatggttttctgttcgtttgtgtcacctctgatttctttgagcagtgttttgtaattcttgttgtagagatattttacctctctggttagatgcattcctaggtatatattttcttctttttgttgctattgtgaatgggattgaattcttgatttctcagtttgggtgttgtcggtatatagaaatgctactaatttttgtacattgattttgtatcctgaaactttcctgaagctgcttatcatatcaaggagcttttgggcagagactatgggtttttctaggtatggagtcacattgtctgcaaggagagatactttgacatcttcacttcctacttgattcctg

SEQ ID NO: 636363 - DNA, 598 bp, Homo sapiens
attaatttgttcacaaaagcaactcctggattcactgatttttttgtatgatttttttcacttctcaatttcgtttagttcaggttcaattttggtcatttcttgtccttcactagctttcaggttggattgctcttgtatctctagtacttctagttgtgaaatttggttgttaatttgagatctctctgactttttgacatgggcatgaaattccctcttaatatagccttaagtgtgtcttagatattctggtatgttgtatctttgttctcgttagtttgaaaaaatgtcttgatttccaacttattctcattattttcccaaaagtcattcagaaacaggttgtttaatttccatgtaattatatggcattggacaattctctttgcattggtttttayttttttattgcactgtggtctgagagtgtggttggtatgaatttcccttttttgaacatgatgagaattgttttatgtccaattatgtggtctattttagaatatgtgccatgtgcagatgagaaaaatctatattctgttgttctttggtggagttttctgtagatatctatttgatccatttgatccatttg

SEQ ID NO: 636364 - DNA, 572 bp, Homo sapiens
cacttgtgcatggctttgtcccatcttgacctcttcagggcattaggacaacyattttcctctgtccctggtatcctcaggattaccctcatctgcatttgaatattgctctcatataaaaagttacttcttggacctccccattaacaccagatccatctttttttcttgattttccagtctttccctgctatctctgtattaaaactgttcttgtaaaaagcccctaataactgacaacgactgaatgtagagtaaattctcagtatccctcttgcgtaacctttccataacttctcagccttatttaacagtgccgattatttccttttccttacaatactgttcctagaccatgctttcatggctttcctcctatttcgccactacccttcccatttttcctttggtgcttcccttactttctcttaattgactgtggtgattcccagggcttagtctttgaattcttcccattttatatccacatttattcccttgatcttctctagaaatatcttcaaatatatctcaagttggtatgtcagcatggaccagtcctgttaactcga

SEQ ID NO: 636365 - DNA, 568 bp, Homo sapiens
tagtcttcttggtctcccagtccctcggtggcagatgttcctcctagctggtctagtcggccatcttgcctccatctctccagttccctttttggaagtcaaatttatttggtataatatagtcattccagtcttccagtacttactttgcacagtttaattttcaatcatatgtacttttttattgtgttgttttggttaaagcatgtctcttgcaaacagcatatagttgatattgctttttcattyattatgaaaatattttaattagagtgtttaatttgataaaatttaaagtagctaacaatgcagttaatttagttccaccattttataattgatttcctttaggcttcttgttttctgtttctccttctgtgttttctttgagagtaactgaatatttaaaattctatttaatttatctttggaatgtttagctctgtatatttgtattatatcatgatggttactctacaggttaacatatatatccataagtttgtataatctacttataattaatgttgtggtccttaatgggaaatatcaaaatcttttaatcata

SEQ ID NO: 636366 - DNA, 547 bp, Homo sapiens
ggtttttatttaaatagcaaaattctgttttgcgctgcataatgaagtttcagtcaactacaaagcacatatacaaagacaatcctgtgagattataatgtgatgaaaaattcctatcacctaatgaattttggctatcatataatgctgtggcacaatgcatgactcgtgtgtttgctgcggtgctggtgtaaaggaacctactgagccatcatttgtataaaagtgtagcacatacaatcacggaccatacataataattgaaaatgataatataccaccatgttacttgtttatgaatttactatactatactatttgtcattgtcttagaatatattccttctacttatgtaatcttctacttatattaaaatagtaaactataaaacagcttcaggcaagtttttcaggaagtmttccagaaggcacaagatgacagcttcatgtgtgtcattacccctgaagaacctgcagtgagacaaggtgtgaaagtggaagacagtgatattgatgaccttgaccctgtgtgtaggcctacatttat

SEQ ID NO: 636367 - DNA, 591 bp, Homo sapiens
tataggtttagtgcattccctttcaaaataccaatgacatttttcacagaaatagacaaacaatcctaacatttatatggaaccacaaaaaaactcagaatagccaaaattattctaagtaaaagaaataaaactttcagaatcacattatctgacttcaaattatactgcagagttatagtagacaaaatagcatggtactggcatgaaaacagacgcgtagactaatggaacacaatagaaatcccagaaaycaatctacacatctacagtgaactcatttttgacaaaggtgccaagaacatacattgaggagaagacagtgtcttccataaatggtgctggaaaaactggacatccatattcataagaataaaactggacccctatatctcactataagtaaaaataaaataaaaatgcagtcaagacttaaatctaagccctcaatctatgaaactacaagtaaaccatcatgaaaatatccaggacgttggtctgggcaaaaatgtcttgagcgttacctcaccagtacaggcaaccaaagcaaaaatgaataaatgggatcacatcaagttaaaaagcttacag

SEQ ID NO: 636368 - DNA, 532 bp, Homo sapiens
agccattttctactaaatctattasctgggccatccgttcatttgtttttctatatactctttcctctcattattaacaaaatgtaattcttacatgactaataatattttgttgttttctgtgtgttggaggctaaggaacacaagataagattatgttttctccagagtgagctgcttcttcagctggaaggttgataagaagctgaataactcaatcatatcaaagaaataacttagtaaggcctgagtttgagtttttggaagaccttctctgtctggtttgttctcaatcacagggtgtatctttcaaggactttccttggtaagcatggagggcatttgtctctttcgtcttcaaggatggggcggattcccttcatgccttctggagtttcagttcattagcatcccgccacatgaagagtcaaagtagaccaagtatcttgaaggaaacattggtcatgtgtttgagaacatccaagtcttcaatattgtcacagcaaccctatttgaacaccaaaatcgttgc

SEQ ID NO: 636369 - DNA, 532 bp, Homo sapiens
agccattttctactaaatctattagctgggccatccgttcatttgtttttctatatactctttcctctcattattaacaaaatgtaattcttacatgactaataatattttgttgttttctgtgtgttggaggctaaggaacacaagataagattatgttttctccagagtgagctgcttcttcagctggaaggttgataagaagctgaataactcaatcatatcaaagaaataacttartaaggcctgagtttgagtttttggaagaccttctctgtctggtttgttctcaatcacagggtgtatctttcaaggactttccttggtaagcatggagggcatttgtctctttcgtcttcaaggatggggcggattcccttcatgccttctggagtttcagttcattagcatcccgccacatgaagagtcaaagtagaccaagtatcttgaaggaaacattggtcatgtgtttgagaacatccaagtcttcaatattgtcacagcaaccctatttgaacaccaaaatcgttgc

SEQ ID NO: 636370 - DNA, 573 bp, Homo sapiens
ttttggctgtattttacccatttcctttaacacattaattagacttattttaaagccattttctactaaatctattagctgggccatccgttcatttgtttttctatatactctttcctctcattattaacaaaatgtaattcttacatgactaataatattttgttgttttctgtgtgttggaggctaaggaacacaagataagattatgttttctccagagtgagctgcttcttcagctggaaggttgataagaagctgaataactcaatcatatcaaagaaataacttagtaaggcctgagtttgagtttttggaagaccttctctgtctggtttgttctcaatcacagggtgtatctttcaaggactttccttggtaagcatggagggcatttgtctctttcgtcttcaaggatggggcrgattcccttcatgccttctggagtttcagttcattagcatcccgccacatgaagagtcaaagtagaccaagtatcttgaaggaaacattggtcatgtgtttgagaacatccaagtcttcaatattgtcacagcaaccctatttgaacac

SEQ ID NO: 636371 - DNA, 442 bp, Homo sapiens
cagtaacttgccctattggtatacttcttaaagattcagtttaaatcaagcaccttttcaggattccagtaagatcctacctctcccttggttcattstactctataccagctttatttcctgtctgctccttacctaaattcagctgagacttcgttgttactacagctgggggtcttgcagatgtagtactaaccacattgcaacacccaagacagctcaagcctgttgcaaacatagtgaagtaaaacaatattatgttatttgagaaattccttaattctaagtgttgtgtattattcaaatcatttgtctcatgcactaagcccttctgttaaaactttgagagaataagtatgttttaacatatttggtcacaaatatcttagctaggattggtttgctgaattaatttctaatgagatatcagggaaggggacgt

SEQ ID NO: 636372 - DNA, 582 bp, Homo sapiens
atatacctgatactgggcttatatccataaaatatgaagaacttctataaatcagttacaaatggtataatttactttaaaaattatcgaggaaatatagcacttcaaactagaacaaaatcagaaaaatatatgaatgtatgctcaactttgtatgtcttcaacgaagtgcaaattcaaccacaaggaaatattactacaggcataccttggagatattgagggttcagttcaagaccaccacaataaagaaaatatcacaataaagcgggtcacacaactttttgatttcccagtacatataaaattatgtttacactgtactctagagtctattaagtatgccatagcmttatgtctaaaaaaagtgcatgccttaacttaaaaataatttattgctaataagtgctaatgatcatctgaacctccatcaagtattaatatagtttgctactggaaggtctttcctggatgctgatggctgctgatttttcagggtgatatttgctataggttgaggttgctgtggcaatttattagaattaacaataattttataaaattgacaacaatgaattttgc

SEQ ID NO: 636373 - DNA, 604 bp, Homo sapiens
ttaaaattttatagtgaagttgcagcaattcagtcatatcttcaggtttgacttctaatactaattctcttgctatttctaccacatctgcagctactttctccactgaagtcttgaagaaactcaaactcaactgtaggggttggaatcaactttttcgaaactcctgttaatgtcaatattctgacatcctcccatgaatcacaaatcttcctaatggcatgtagaatggtgaatttcttccagaagggcttcaagttactttggccagatccaccaaactaatcactacctattgtgttatcaccttacaaaatgtatttcttaaaatattaagacttgagagtcgaaatgactccttgatccacagtctgcagaattcatgttgtgttagcagggatgaaaacagcattaatctccttacacatctctatcagagctcttgggkggccagatgcattgtcaataagcagtaatattttgagaggaatcttttttttttttttctgggcagtagagctcatcagtggtcttaaaatattcagtaaatcatttcataatcagatgtgctttcatcaaggctctgttattccatttataggat

SEQ ID NO: 636374 - DNA, 430 bp, Homo sapiens
attgaaactcttcatgatcaataataagctggactcagtgtcccaagaagcagtgccctggaaaaggaaaactgagaggatggcttaaacatcctgtgtgtcatccaatcataacaggactttccagtttaatgtccatctgaatatttgtatttattatccatgtattcaatacctttgaatttaataccctctaatacccatgtctgattaggtattttttcaaattataagtgttacaatttctgactataaaaacaacatacagacatrgaagaaacaccctattgcatagagaaggaaataaaagtcagcggtaatccatctgtagtgaattgaaaattgtccctttgttcctcccatagtcacatccacaggacattcagaatgagacattattaggaaatagggtcagggctgatataatgtg

SEQ ID NO: 636375 - DNA, 510 bp, Homo sapiens
ctctttctcaggtatatgtgggaggatgggaaacccaggtctggaggtaatttacatatgttaatatgagggagaatagagaataagggaggaaacacctaacacttacttaattttgttaccattttgaaagcacttgctttttgaattagaacatgttcctgtagaattcaccctacacattccaacccatttaagagtgaaaatactgagaataaatctctctggaatatgttctgcaaaattcccctgttcatttcttctaaactgtgtgatgtattttttctacaatgtgggatgtaaattgtgtatatgtgtgtgtgtatgtgtgtgtgtatccctgtgtgccttggcatccacaaaggtgtcaccacagggtttgggcaatggcatatatatatatatatgccatatgtgtgtgtgtgtgtgtgtgtgtgtgtrtatatatatatatatgcgccacatatgtgtgtgtatatatatatatgccatatatgtgtgtgtgtgtgt

SEQ ID NO: 636376 - DNA, 431 bp, Homo sapiens
aagaattaactgaaggaatttggggtagcactggagtacytgtcacactggagagacaggcctggacaggggtcagggaccaatgaagcctgggcatccagaatcacagctgttagtgtgttttattatttaagagtgagctcagaggtcactgttcaaagctgggcactctgtctccaactatccctcttcacatcccagactcaatagcacctttctgcatagttacttctactgaatacttcactgacagcaatgaaggattgttggtttatgtgtctgtctcgtatagattaggcacctcttcagagccacagccacatcccaatgatttatctccagtcccaagcaccgaatcagaccccttgaccgtttactccattcaagtgatgatctcaggttagataatcatgaggtcagttggtcaaagc

SEQ ID NO: 636377 - DNA, 431 bp, Homo sapiens
aagaattaactgaaggaatttggggtagcactggagtacttgtcacactggagagacaggcctggacaggggtcagggaccaatgaagcctgggcatccagaatcacagctgttagtgtgttttattatttaagagtsagctcagaggtcactgttcaaagctgggcactctgtctccaactatccctcttcacatcccagactcaatagcacctttctgcatagttacttctactgaatacttcactgacagcaatgaaggattgttggtttatgtgtctgtctcgtatagattaggcacctcttcagagccacagccacatcccaatgatttatctccagtcccaagcaccgaatcagaccccttgaccgtttactccattcaagtgatgatctcaggttagataatcatgaggtcagttggtcaaagc

SEQ ID NO: 636378 - DNA, 431 bp, Homo sapiens
aagaattaactgaaggaatttggggtagcactggagtacttgtcacactggagagacaggcctggacaggggtcagggaccaatgaagcctgggcatccagaatcacagctgttagtgtgttttattatttaagagtgagctcagaggtcactgttcaaagctgggcactctgtctccaactatccctcttcacatcccagactcaatagcacctttctgcatagttacttctactgaatacttcactgacagcaatgaaggattgttggtttatgtgtctgtctcrtatagattaggcacctcttcagagccacagccacatcccaatgatttatctccagtcccaagcaccgaatcagaccccttgaccgtttactccattcaagtgatgatctcaggttagataatcatgaggtcagttggtcaaagc

SEQ ID NO: 636379 - DNA, 431 bp, Homo sapiens
aagaattaactgaaggaatttggggtagcactggagtacttgtcacactggagagacaggcctggacaggggtcagggaccaatgaagcctgggcatccagaatcacagctgttagtgtgttttattatttaagagtgagctcagaggtcactgttcaaagctgggcactctgtctccaactatccctcttcacatcccagactcaatagcacctttctgcatagttacttctactgaatacttcactgacagcaatgaaggattgttggtttatgtgtctgtctcgtatagattaggcacctcttcagagccacagccacatcccaatgattyatctccagtcccaagcaccgaatcagaccccttgaccgtttactccattcaagtgatgatctcaggttagataatcatgaggtcagttggtcaaagc

SEQ ID NO: 636380 - DNA, 521 bp, Homo sapiens
tgaggcttccaaactggtagccaaaagtaaatcatccacatactgaaggaccagagtccctgaacttgagaagtggccgagatcttgggccagtgcctgaccaaacagatgagagctatccctamaccttgaggcaagaccgtccatgtaagttgggatgtgtggtctgtgggatcctcaaaggcaaagagaaactgggagtcagagtgcaggggaatgcagaagaagccatccttgaggtccagaacagtgaacaattctgcttcctctggtatttgagagtagggtgtaggggttgggtacagctggatatagaggaattactgcctcattgatgagtctaagatcttgcatcaggactctctgagtgccagagcttctgccacctggatgttttcctgggcctccccttctccccacccctggttctcacctggacctgtctgacctgtttccaggtgcttatacattgccacgaccaccatcagatcaatgaaggagaaatcccatccacatggctg

SEQ ID NO: 636381 - DNA, 583 bp, Homo sapiens
gatttgcaattggtagttactcatatatagataagacttttgcctattatcttttagatgttctcatacataacttattcagcacctttcattttaaagcacttttaatgaaaattttgtgaatgatgccatcgtagtcagtaagcaaaagtgtctctgaagcagattcagggattagatagcccttatccgtaatgaaagacttacattataaaagaatataagtttccatggtttttatctttcaggattaccmatgatgtgacttttacatgttaattgttaattttgcatcttaaatatctgaactgacaaaattttaatttaagttttgtaccttttaactcccttttgggccaaaaggaattttcaaaaatatgtattccattcccacagcttgccagttgcctccaccgtaagaaaatgctgaatatgacatcatatcactaatatgccctctcagttgccaaatattttggttgttagattttttttttttttgagaggatggtactcataaaatcaagatcgctctgtcacaggaaatgtatttataggaactgttttaaggcgtttattaaaa

SEQ ID NO: 636382 - DNA, 539 bp, Homo sapiens
actgcctctgactaatattagccagcagacatatttgtcccaagatttgttaaacttactccacaaatttactaaggtgcataaaaactttccaggggacatgcatgcagggatagttaagggagatgatttccaaaaccttaactttcctgggtgccctaagctggctctcatttcccaagtccatttctcccaagtcacaaaggaaaatggaacgaaccacttgcccatgccaaatctcactgtggtgcataaccccaaagtgtagaaacctgcagggcatgaaacaaagaggggacaagtggagaatgcagrctcacgagagggagtgttttatgaaggcaaactaggggagtgtcggaaataaatattgaaggctcatagcaagactctgtgccttgtctttcttttgagaattaaaattcacgagaaacacggttgtttggggaacacttatgtgaactgataaatgaaatcagattttttctgaaagtggatttgatgtggctgatgaaattgcacaataaatgtgggcttta

SEQ ID NO: 636383 - DNA, 608 bp, Homo sapiens
aaatggaacgaaccacttgcccatgccaaatctcactgtggtgcataaccccaaagtgtagaaacctgcagggcatgaaacaaagaggggacaagtggagaatgcaggctcacgagagggagtgttttatgaaggcaaactaggggagtgtcggaaataaatattgaaggctcatagcaagactctgtgccttgtctttcttttgagaattaaaattcacgagaaacacggttgtttggggaacacttatgtgaactgataaatgaaatcagattttttctgaaagtggatttgatktggctgatgaaattgcacaataaatgtgggctttattagcttacatgatggatactttgtgtcgtttttttgagctatatctgaagccttggtgaaaagatacttgaagcactttaaaaaacaagagcattttttaatcaacgagattgtattggcttaggtgtattgaaattaacagtatttccattttctcaacttgttctgagaataaacaagatgcctaagtggcagagtatcaggtgtaattactaagagtttttcgatcagacttggtaaagcctttttggtatatttcccagaaactagaaaaa

SEQ ID NO: 636384 - DNA, 503 bp, Homo sapiens
agatccctaaacaacttcaaaggaattcagaggattgaggaatgctactgtagcaaaactcttcccattcccacctacctatttatgtgagcaagttttctcagtgcatacgatataaaaagaagagtaggaatcgattatgaatactcaactattaaaccaataggcaatatctatccatggacatgagaaaactgggaaaaaagagaaacttctgcatattttgttagacatgttttccccatggatttkgtttttaccatttatatattaaaattattaatatttatactgtatacataatatttttctcagttgtatactagtaataattctaataatagctcaatccagtataattttatgaaactattagggcatattggtgacgtgaaataaaaataaacttcaattttctacacatttttgatgtgcgtgtgtttgatgagtaaagacttttaaatataaaaatattttaggttagggaaaaatgtctatcagaa

SEQ ID NO: 636385 - DNA, 591 bp, Homo sapiens
cagtgtttcagactgtacatctttacctgggtaaagagagacacagacctcctgaagtctggctcagtcttccacatttttacttctcttcattctaattgctaaatcaagtcaaaaagccagatgagagtcaatggatgaggaaataaactgtagctcatgagaggaggtactgaagtcacatggcagaggagtgggagcacagggatgagaggagttactttggccatctttgcaaaacatctacactagggacattatctttcaagcttcctttaggggcactataaacaaaagtgtttgaagaccacaagccaaattcrttagtgataaaaagtgagaagttttgtctttccaaaaaccaatagagtttttggggactatatctatgacctactaactgtgatctcagaatttagtttcctcatctaccatatgaggctaatattaggacctatctaattgggttgatgtagaaactaatgaataaaagcaaattcttataacgatggtatatgttaaaagctcaagaaatcttagctgctatcatcattaatatcaccatcatcattgccatcatcatcatttatt

SEQ ID NO: 636386 - DNA, 591 bp, Homo sapiens
cagtgtttcagactgtacatctttacctgggtaaagagagacacagacctcctgaagtctggctcagtcttccacatttttacttctcttcattctaattgctaaatcaagtcaaaaagccagatgagagtcaatggatgaggaaataaactgtagctcatgagaggaggtactgaagtcacatggcagaggagtgggagcacagggatgagaggagttactttggccatctttgcaaaacatctacactagggacattatctttcaagcttcctttaggggcactataaacaaaagtgtttgaagaccacaagccaaattcgttagtgataaaaagtgagaagttttgtctttccaaaaaccaatagagtttttggggactatrtctatgacctactaactgtgatctcagaatttagtttcctcatctaccatatgaggctaatattaggacctatctaattgggttgatgtagaaactaatgaataaaagcaaattcttataacgatggtatatgttaaaagctcaagaaatcttagctgctatcatcattaatatcaccatcatcattgccatcatcatcatttatt

SEQ ID NO: 636387 - DNA, 560 bp, Homo sapiens
aattcatagcctgctggcttgccctatagattttcaatttgctaggccccaccatcacatgagccaatttcttaaatctctctctctctctctctctctctctctctctstgtgtgtgtgtgtgtgtgtgtgtgtgtgtgtgtgtgtgtgtgtgtgtatcctatgggttatgattctctggaacataacccgtaagatccagaatgatatcatatctagatccttaattacatcaccaaagacccctttcccaaactgttttcattcacaagttctgaggattaggacttagacatatagtctcaggggcaatcattcaacacactccaacccttttataaaacctttatttaaaatctgattttccttttctcttgttcaactccaattccccagctgtggatgttcttccaagattagtttccaggctactgaagatgactcagatagagcatatggggaagataatgatctcatctttagtagacattgggaagaaaagaagcgaggtgggtttgtagctgtcctgttttagtggccctggcatgatctttgggcaa

SEQ ID NO: 636388 - DNA, 385 bp, Homo sapiens
gtgggaagaaacccagatggaaaaaatattcctgacctattgaaaggtatggttcatttgaacttggccagcaaatgatagagctatctgacctatgacatctgccgaatttctgtctcatctcatataattcctctcatccagaaataagaggcaacttcaagcacaggtgcagaaaatcatgtcagtctcaaaaacctgaactgacmtgtttgcatctgctttcttccagaggaatcttctagatagtgggggcagatgtcacttgggaaccttttgaagattatctcagactcattctccttttgaacaccttgttatcaccacagagaatctcacagtgtaaatgatttctaacagcctttgtagaaaatgacacagtctg

SEQ ID NO: 636389 - DNA, 563 bp, Homo sapiens
tggttgatacttaaaagcagcagaggctcagggttctcagatttgtacattcagttccttggaagatagtaagagacttttctcatttttccttttgcttctytggcttctctttttttgccctttttcccaatttcttttttaaacaatcaagaacacaagtaattgtcaccttggtatttaaattcagagatctagaaggctctttattctgggaaacacgtaggctgagcattcctgaaatggaatcaacgaaacctgtgcactcccaggtgtgaagaggtaattgcaggtgcaaatcggcaatggcctgaacagcaggcaagtgaatgtaataagcaagctgcatccagacgccttggtactgctttttggaactcgtctttttacttgaattcatttgcattacttcagcataagatgtacataaagaaacactctttatatattccaccaggctcatcagtctatgacaggaattttgccttcagctagtccaagtaactcataggtgtgtgtgtgtgtgtgtgtgtgtgtgtgtgtacccgtgccttcaacagcaa

SEQ ID NO: 636390 - DNA, 563 bp, Homo sapiens
tggttgatacttaaaagcagcagaggctcagggttctcagatttgtacattcagttccttggaagatagtaagagacttttctcatttttccttttgcttctctggcttctctttttttgccctttttcccaatttcttttttaaacaatcaagaacacaagtaattgtcaccttggtatttaaattcagagatctagaaggctctttattctgggaaacacgtaggctgagcattcctgaaatggaatcaacgaaacctgtgcactcccaggtgtgaagaggtaattgcaggtgcaaatcggcaatggcctgaacagcaggcaagtgaatgtaataagcaagctgcatccagacgccttggtrctgctttttggaactcgtctttttacttgaattcatttgcattacttcagcataagatgtacataaagaaacactctttatatattccaccaggctcatcagtctatgacaggaattttgccttcagctagtccaagtaactcataggtgtgtgtgtgtgtgtgtgtgtgtgtgtgtgtacccgtgccttcaacagcaa

SEQ ID NO: 636391 - DNA, 527 bp, Homo sapiens
aaatgcttcctataatgttaaggataaaaacaatggggctgtgtcctataattccagcaatttgggagcctgaggtggaagcatctcttaaagccaggagttcaagaccagcctggggaacatagcaaaaccctgtctctacaaaaaaacaaaaaaattaactgggcatggtgatgcatacctgtagtaccaactacttgggaaggtgagacaggaggatcgcttgagcccaggaggtcaagggtgcagtgagctgtgatcacaccactgcactccagcctaggtgacagagcaagactctgtttctttaaaaaaacaaacaagcraacaaataaataaataaatgaaaataacaggacgctgtcctttcaactgcatctcagaagaatctatcataaccccatggacataaggagtcttgcttcccctggccatagcctgctagaggttggggataccataataagcctggcagctatttctcaccagaattggaaagtacatcttatgtccaatagatgacagaa

SEQ ID NO: 636392 - DNA, 503 bp, Homo sapiens
ctaatgtcacccccacttcccacccccaaagtcgtattattttaggttaaaaaccctgagaaatcttgctaatagtccttctgatttaaaaaaatcatagagaaagatactgaatcatagcctaatctttccccacttctgactagtggaagggggaggaggggactaaagaactaaagaaaaggaaagagtggggttgtctgtccctgtgagaaatgaaattccctaggactcatgttgaaatcagaaagaacttaaaacctgagaacattcccttgtgcgagtgggatgaacaacaaatttaggtagaataaacttttgtatgatattttaagactatctcagagaagaaaagaaattcaggtattttttaaaaaccgcctgcctctacactgccatttgcccaagctacacaaatgtgaaaagtaagacatacccagccctcagcttgtgtcttagaaggaagaaggagagagaagagargggaaacagagttaagaagt

SEQ ID NO: 636393 - DNA, 386 bp, Homo sapiens
ttacaggtgaacttcagaacaatatccctcacaaacacacatatataaattattaatattagcaattttaaatccagtaatgtataacaaggataatacattatgatattgatcccaagaatgcaaagttgttttaacattcaaaaatcaatgtaatttaatacattaacatattagagaaaaaatatgatcacttcaatagatccagggaaatcacrtgacaaatttaatacccatttataataaaaatgctcagcaaactaggaagaagagaaaatatcctaaatctcataaagaacatctataagaaacatagagctaacagcatacttagtaaagactctatgtttcttccctaagattaagaaaggcaaaaaaatttgtat

SEQ ID NO: 636394 - DNA, 638 bp, Homo sapiens
acacccttcttttacccattactgtgctaaattcttaaaagtataaagcatggagagtgactgtgaagagtttaaaagtccagttggcaagacataacttktatgtacacatgaaacaatttaaaagcgatgcaagacgccatgttctgaaatgccaaattctgtggtttgaactaaaaatgtaataggaatttttggaaggaagagatcaatgtcagatgaagttgctggcaatcggggcttgtgacacattaaagcgagtacagaacttgattttagtgcaagagctacccacatgtgtgccgaggaaattcactaatggagagtgtgtgattaaatccagatttcattcatcagaagatcttctacagaaggagaattttaagcaaaatttgaaggagagatggaaattataggaattgctaaatatatgttagagaggaagtaacctcagggatcaccttttcagttttatatttttatgacaaaaaaaacctcaggtccagaggaagtctatagtttgtaagagagaaaggggagattgtgtcaagggcaggaaatcagatggggaatacagagacctgttaaactttggcaaaacattcagcatttctaaaccttttggtatgtggcatttt

SEQ ID NO: 636395 - DNA, 538 bp, Homo sapiens
ttcaaggttgcagtgagctatgactgtgccactgcactccagtctaggcaacagactgagactgtatctcaaaatatatatatatagtattatatatatatagtataatagtaaaatatatataccatattatatatagtataatagtaaaatatatatactatattatatatagtataatagtaaaatatatatagtatattgtgtgtgtgtgtgtgtgtgtgtgtgtrtatacatatatgtatatgataaagtgatggagaatgattgccaggggctatgaagaagtagtaacttaattaggatggtcagagaaagccttattgaggaaatggcatttatgttgagatttaactgataagaaggagacaatcatgtcactgtttgaagggaattcatttcaaaaagaagggacaatgagatgggtagatatcctagttgggaagttgagtaggcatctgaagctcaggggagagaaccaggctggagacataaatgtggagtcataggacaagctgggaccacctggaaataaatt

SEQ ID NO: 636396 - DNA, 575 bp, Homo sapiens
aggttcattgcactctagtttgggggacagagtgagacttcatctccaaaaaaaaaaaaaaaaaaaaccttcaagaatagcttttattgctcaattgttggtcaagctggatctaaaacaaagaaaatgaaaagcaatttgtttaccttttggcaagtgaagacaattattagcaatctaaattacttaaaatatgatcttaraggttttttgtttttcttttatccccaacaattgacaggcatgatttttgagggtttgttttgtttttgtttttgttttgagatggagtctcgctctgttgtccaggctggagtgcaatggcacgatctcggctcggctcactgcaacctctgcctcccaggttcaagcgattctcctgcctcagcctccgagtagctgggactacaggtgcatgccaccatgcccagctaattttttgttttgttttgttttgttttgttttgttttgttttgttttagtagagacgggttttcatggtgttagccaggatagtctcaaactcctgacctcatgatcctcccatcttggcctcccaaagtgctggtattac

SEQ ID NO: 636397 - DNA, 598 bp, Homo sapiens
gcgtggtggctcatgcctgtaatcccagcactttgggagtccgaagtgggtggatcacctgaggtcaggagttcgagaccagcctggccaacatggcaaaaccccatctctactgaaaatacaaaaataatccaggcacgatggtgcacacctgtaatcccagctgctcaggaggctgaggcaagagaatcgcttggactgagaggcggagattgcagtgagccaaggttgtgccattgcactccagcctgggtgacaagagcgacattctgtctcaaaaataaataaataaacagatagatagatagatatatttataaatttatagtycctaaagtgcccaaaagttctaaagttcattagaagaaataaattttaaagtttataaagttttttttagtttactaaatcagaatactacagagaaaccctttcattaattcagacatcgttagaatagattttaatactgaatcagacacttacaaactttaaaacttattttttaaatgaactttagaattattaggcactttgggaactataaatttatagatatatctgtttatttatttatttttgagacatagcgtcgctc

SEQ ID NO: 636398 - DNA, 572 bp, Homo sapiens
tctaatgaatgatagacaggtaattagtgatctcagagtttgaaggcagagctcactataaattagaatggttagaaggactgagtgggatgagtgtttgaaagacctcaagtgacaaccagtgttctgtgggaaatattatcctccagacaatggaacacccttggacatttttaagcaaaagctagaatgtactaacataacttgagaaatgactttgaggcatggcttcctgaaaataaattaattctttagttttccaatgcagagttacaataattttcaggcattatagtgccttcccagctccatagcacttgtctaattgctaagtctctccattttggttttctgtagtctgttatttaagtatattttgatctacaacaacttgggatttttctgtctttctagggaaggcactttaaggcccgggacagtgcctagttctattgtgcttctctacgaaacatatctatctctctgtatctrtctttctttctctcaggcaccacccatccccctgcccccgccacacacacacacacacacacacacacacacacacacac

SEQ ID NO: 636399 - DNA, 603 bp, Homo sapiens
ttctttcaacactgaaaatctacttaacattcacccagaattttcagtcttgggtatttattccagagaaataaagtcttattttcatgtgcacaaatgttcatagcagatttattcataataatctcaaactggaaactacctatatatcccttaatgggtgcatagttaaataaactgtggttatacataccatggaataccattcagcaggaaaaagaaacaaattattgagaaatagaacttggacaaacctcaagaaaattatgctaagtgaaaagccagtctcagaaggayatgtattggttccatttatgtaactttcatgcaataacatacctaaagagatggagaataaatttgtggtttccagggattagggatattggggaaggaaagagtgagtgtggctataaagggatagcacaagagaaatcttcgtggcaatggtatagtcgagtgtcttgattgtggtggtggttatgcaaagctacatgtgtgataatattccatagaactgtaaatttgcatccctcaacatacacaaatgggttatagatttaccatctataactggtaaaatatgaataaactatggattat

SEQ ID NO: 636400 - DNA, 543 bp, Homo sapiens
acaaactcaattgcttggctctccttaaaaaactattaaaaatatttaaatcagtataacattttgatagcaacaaaaatatttttgtttcattaataataggtaaaatgaaatttaaaataattttaagaatataatgtatttcaagtttatctcatcctgttaaagtttgtatttaagaaaaagagggcacatatttttagtatgtatttaaatggtatgactgttcaaaattatgttactaatatcactgcatgatcaaaaatctggagcccactgctttaaagttgtcctttctttttcaaaaaactcctcgagagtttattcactcacttggtatttaatcctcaaagatcttaactttctatggcctargaagcattaaagcttcttgaagacagcatgtgttgtcctttttcatacccttcaaaacaaagaacacagttcctgtgtcatagtagatgtttgattaatatttcctgctagattgtttcagactgtcaactcctagagcccaaatcctggagagcattcatctttata

SEQ ID NO: 636401 - DNA, 594 bp, Homo sapiens
tgcagagaaaatctaggtgttggaattaacaaacaaggacttccaaaaaactatgttgaagaaaatagagtgaaaaaatgggtgggatagataaacagataaaatatttcagtagcgagtaagaatctactaagaagtcattaaatgaacattctaggagtacaaatataatatcagaaattgcacgtgtttaacagcagactggacacaacagaggataggattattgaatctcaagagaggttacgggaaaatacctgaaccaaaacatgggaagagtaaaaagaacaaaacagaagggaatatgtgagatgaatgaagccattgaatatgcatgtaattgtattcttaagagaayaggaaagaaatagtatttgagggggaaaagctcaagaactttccaatactgatgaaagacactaacccacatatttaagaagctcagtaagccataagtggtaaaaacacaaaaatgttatatccaggcactatagagtcaaacttctggaaatataactgaaaagaaaatttccatagagagaaatactggcatgagggaggaagtttgatttctttaaatagcctttagatact

SEQ ID NO: 636402 - DNA, 423 bp, Homo sapiens
gaaccaaacatttcacaaatacttcctatgcgttggccacaaatttggttataagacataatttagtttaccttgaaaaaagcctgatgaatcgtgcaaattatgtagtgtcttatcaggttcaaaaagatgacttgttcaggatacccagaactctcctaacattaacagtagctaggaatgtctcataaagaggactactagccatcataaagaggactctgagtaaaagaattaacaacaccctttacaaaatcatttgggtagtgacacagcacatactccttggaagcttttcttatgaratccctcagcattgaccaatgacaccatacagaaatacaatctatataggtaacaccacaggagaataaaacagtatataatggggccccagacatgcagcaggggtatttccgagtc

SEQ ID NO: 636403 - DNA, 482 bp, Homo sapiens
aaactagatatcatcaaaatgaaaaacttctgtgcttcaaaggacaacatcaaggaagtgaaaaagacaacacaaaagaacttgagttgaaaatttgggttgaaattttttttgcaattatccatctaataagggacttacatttggaatatttaaaaaacttttataattcaataattttaaaaacccaattaaaaatgaacaaagggtctaaatagacagttctccagagaagatatactaatggccaattagcacatgaaaagatgktcaacgtcatcagccatctggggaatgcatatcaagacccccatgaaacaccacttcacatccactaggatggctaaaatttaaaaaaaaaaaagtgttggtgaggatgtggataaattgaatccttatacattgctagtgggaatgcaaaatagtgtggcccctttggaaaacagtctggtagctcctcaagcagtagcacatgacccagt

SEQ ID NO: 636404 - DNA, 392 bp, Homo sapiens
gaattcatgaagaaataggagacttcaaacaaaacactaaaatcaacaacaaccataatggattcctgcctaggcaggtcgggacattaagaaaaaaaaaggtctcgctgtggtttgctattagatggagagatattcagatttcatttttaaaatgaaagtgaaagattaaagaattttggcatcctgaccctttgtagaggccattcctcagaggcacagtgtgcagacaaaactatcctagaggtgccaaccagaacaagctctaatgtctgtctcattcctgagccttggtgccttgacgagtcaccacgctcaggaagaaagctgcaactcgccaggatgaaaytgggccccgcttcttagaacccttccccgcttccttcccctgc

SEQ ID NO: 636405 - DNA, 554 bp, Homo sapiens
gctgatctcaaacttgtttggagtttcggattcttggtgcattctgggaagaaagtgcctagggtcagcgcaacgtaacaaagggaacagcctcaaaaaagtgggcttcagataccagcaattgcttagggtattttttgttgattcgattttctcgaggtggaaaaacaagtttcatttctagctctgtcagtcccttccagtctcggggccttgctataaaacggattcaatgacttttaagattctttccagtgcttttttatttttgaacaaagtatatagattcaaatttgctacatattattkgctgattcatatgaatgttacttgaattgggaaattgcttgagtaaaattgaggcgttgcttggtgctggcggaggctactgataaacgtttttcaccattattttttttctctccaggcacacatagttccttttggcgtcttatcttctgaagctgcctcaaggccaagcaaagaaagttgttaaaaagttaagttacttttcacagcctgcaaacccttcaaaggcaagaactcaaatagaa

SEQ ID NO: 636406 - DNA, 605 bp, Homo sapiens
tttcatgcctgcaaacatgacatctgatttggtttggctgtgtccccatccaaatctcatcttgaactgtagcctccataattcccayatgttgtgggagggacctgatgggagatgattaaatcatgggggtggttcccctatactgttctcatggtagtgaataagtcttatgagatctgatgattttataaggcgtttcccctttcgcttgtctatcatcattctctcttgtctaccaccatgtaagacgtgcctttcatcttccaccatgactgaagcctccccagccatgtggaactgtgagtccattaagcatcgctgttttatgaattacctagtctcaggtatgtctttatcagtagcgtgaaaacagaggaatacgacatccattccacagcctacggatcaaagagtcatttggacttgcaagtcttcttagttaaaaatacattccataaggctatatctgccatagatagtgagtcctctgatggacctgggcaaagtccattgaaaaccttctggaggattatttgtaatccaaaggataaatgcttgaggggattgcttgaggggatggataccccattctccatgatgtg

SEQ ID NO: 636407 - DNA, 560 bp, Homo sapiens
aagcttgttgagggcaggggtcttgttcacttgaaagtattccccaggccaggcacgcgtggctcacgcctataacctcagcactttgggaggccgaagtgggcggatcacctgaggtcaggggctcgagaccagcctggccaacatggcgaaaccccatctctactaaaaatacmaaattagccaggcatggtggtgcatacctgtactcccagctactcaggaggctgaggcaagagaatcacctgaacccaggaggcgaaggttgcagtgagccaagatcgcaccattgcactccacccctgggggacagcctgagcgacaagagcgaaactccatctcagaaaaaaaaaaaaagaaaaagaaaaaagaaagaaagaaagtatttcccatggcccctggcatggagcctaggactatggtggggctgaggatttggtaaatgaatgaatgagtggataactaatgaatgctattgcgtcattcacaccatttctattctggtcagaatctaggcaaacatccttaacaaagaagcacttgggaaatgcattcattaa

SEQ ID NO: 636408 - DNA, 530 bp, Homo sapiens
ggattgtccccgggtgtgtccatgagggtgttgccaaaggagattccccttttgcctcagtgtggccgtggagaggcagacccaccctcattctgggtaggcmccatctaaatcagctgccagcacagttagaataaaacaggcagaagaaggtgggagaagccaactcgctgagtcttctgggcctcatctttctttccctgctgggttcttcctgccctccaaattcttcagcttttggactctccgacttacagcagtggtttgccaggagctctcagaccttcagccacagactgaatactgcaccataggcttccctacttttgagattttgggacccggactggcttccttgcacctcagcttgcagagagcctattgcgggacttgtgatcatgtgagtcaattctcctaataaactccccttcatatttacatcctactagttctgtccctctagagaaccctgactaatacagtcatgatatcaaaaagtcacctgcatgcattggtttattgcagcacaa

SEQ ID NO: 636409 - DNA, 580 bp, Homo sapiens
gttgtatgaagaagcactttggtctggcataggaggaggttttccagacttaggaagtaaaaataccagatacccagttaaatttgaatttcagaaaagaaatgaataatatgttttaatataagtatatcccatgctatgtatggcatatacttgtttaactgggtgctctgtaccttatatggcaaccctatgggaaactgttttgaaaaactttttttttcttttcttggactattctaaggtcttattctttcctcartagtctcatcctgtgtttgacaatggtggtgcttgctgaagcagcaaactgtagtgatggcctgggcataaatgccctgttattggagcactccttgttcttcatttgtgatacagtctactacacaggtttgcatattgttacaattcaattggttaataaatatcatggatttggaaacatgactggcacttaataagttttccaaatgttaattatttctatatttaatttattttagtatgttcacttttttcacattttaagattttaaaatttgaaagtgtgtttgaattgatgtcgatttacaattgctgt

SEQ ID NO: 636410 - DNA, 427 bp, Homo sapiens
cacactgtcttctatgatggttgaactaatttacactcccaccaacagtgtaaaagaattgctatttctccacatcctctccagcatctgttgtttcctgactttttaatgattgccattctaactggtgtgagatggtatctcattgtggttttgatttgcatttctctaatgaccagtgactgttgtttataaggtacccagtctacagtattttgtcataacagccaggaaagataagacaatctctctatgcttcagtttgtcatctgcaacataggaattataataatacttacctctttggtttattgtgaataytacataagtgagtacgagaaaatcacttagaacttttcctgtcacatagtaagtactaaacaaatgctagctattttattcttaccataacggtagtagggcatac

SEQ ID NO: 636411 - DNA, 522 bp, Homo sapiens
tatatgtctaagtacatctaggagatttctctaaatattataactcaaagtgagaagaaagcattgggtcacttcagttggtctcattattttttgaaatatctgtatgacttasaaccaaaggaattttagaatctataaatgaagtattgtttattttctctagccttgctcccactaagaataatgacaccaacattcccaggggatcgtcttcattcggttgcttttattgagcacggccttctcttctaggcactttgtgttaagcaaaggatgaaaaagcaaagaaaacagaagtgaacctgacattgtggactttttgttctaggcctgaggtcaaaagaggtcaaaaggttctaggcctatgaaagtccagatgttaacaagtttaggctttctggactgtacagcctccattgctgctactcagctctgtcactgtatcctaaagacagccataaacagtgtctagatgaatgagtgcagttttgatgccaaaaactttatggacactggaat

SEQ ID NO: 636412 - DNA, 522 bp, Homo sapiens
tatatgtctaagtacatctaggagatttctctaaatattataactcaaagtgagaagaaagcattgggtcacttcagttggtctcattattttttgaaatatctgtatgacttagaaccaaaggaattttagaatctataaatgaagtattgtttattttctctagccttgctcccactaagaataatgacaccaacattcccaggggatcgtcttcattcggttgcttttattgagcacggccttctcttctaggcactttgtgttaagcaaaggatgaaaaagcaaagaaaacagaagtgaacctgacattgtggactttttgttstaggcctgaggtcaaaagaggtcaaaaggttctaggcctatgaaagtccagatgttaacaagtttaggctttctggactgtacagcctccattgctgctactcagctctgtcactgtatcctaaagacagccataaacagtgtctagatgaatgagtgcagttttgatgccaaaaactttatggacactggaat

SEQ ID NO: 636413 - DNA, 596 bp, Homo sapiens
tcttctaggcactttgtgttaagcaaaggatgaaaaagcaaagaaaacagaagtgaacctgacattgtggactttttgttctaggcctgaggtcaaaagaggtcaaaaggttctaggcctatgaaagtccagatgttaacaagtttaggctttctggactgtacagcctccattgctgctactcagctctgtcactgtatcctaaagacagccataaacagtgtctagatgaatgagtgcagttttgatgccaaaaactttatggacactgraatttgaatttcccatgcatttttaaatatacatcacaaaatatccttattttgattttttctgcttagaaatataaaatgcattcttggctttcaggctgtaccaaatccagagattggccatattttgcccacaggctatagtttttcagaccctgttctagaggatgaggaaggtaaaaataggcaaacaggcaaatgaagtgagtacatactgtgaggaagcacacacgagggctaaaccggagaccaggagacaatgcctcccataggaagggaaggctggaggcttctgcaaagatgaaacaggctgagaagcagctg

SEQ ID NO: 636414 - DNA, 509 bp, Homo sapiens
ataaggactgttttaaaccttctggaccttgttaaacctccagttcctcagcacacacacccttcctyctccccagatggccttgggccttgctttacagagaaaatagaagctgtcaggcaaagaaaccctcaacttgctggctccaaatccatccttccctggcatctgtgcccacaccgccttcctgctccctggttaaatgggaaaatgggacacctggcccctccccaccccacacacctgtgggaagacagcgcattcacttctgctgggggccagaccctcacggctttgaggaaaccatgcccctctgttttatcttcaatgttgccctccctcagatccttttcctattagcatcttgaaacttacaggttttgtacatctcatgaacaatacccagtgatcctccaaggaaatccgcatacctctccagggcctgtcctgtttggctcctcccctttgcagcagtccatttcctcactgcttaacaagtttgaatgctg

SEQ ID NO: 636415 - DNA, 473 bp, Homo sapiens
tgctacttacaaatcgatgacaacaaaggtgatggtttgcccacatgcttaggttctgtaacctgacaggggtgataggctgtccctcctgygcgtatatcacattaaataagactctgtgagggcagatgagctggagccatctgtgggctgcatggagctgaaagtcatgctggaaaagtgcacgtggctggtggctgtgagctctggggagtctctagggcccaagggtggcaccctcctaatagcccttggttgtacaaccataaggaaaggtattctgccagcaacctaaatgagctcagaaatggattcttccccagctgagccttcagatgataatgtagcccagccaatgccatgctttcagccttgtaagatccacagcagaagatccagataaacacatgaatgaaagttggaaaatttacattcatgaaaaaagcatgaaaaacggtggcttagttcagagt

SEQ ID NO: 636416 - DNA, 503 bp, Homo sapiens
aggaaaacaatgaacagctgaaaagagaagaccagcagtatgtgggtaatgagtcaatcatgctgggcatacactaaacatgtcctggtgtcactgctaggaaataaacgttgccaatgactatgagcctgagtcattcattctaataagtgttcttgatagaaaacgcagccaagtaggcagcaattttagagaattttcaatctctaaattttgaattgtgaagaacaacaaattttgcttattaaatgggcatcrtgttagttttctactgctacaggaacaaattaccacaaactgaacagcttaagaaaacacagggttatgttcacctgagagttctgcaggtcagaatcctgggcgatgctcctctccaaaggttctgagaaagaatccactcaggatgctggcagaattcagttccacgcggttgtagaactgaagcccttgttttgttgatggctgttgtcttcacaatgcctttaacttttagagaaaatgtt

SEQ ID NO: 636417 - DNA, 503 bp, Homo sapiens
aggaaaacaatgaacagctgaaaagagaagaccagcagtatgtgggtaatgagtcaatcatgctgggcatacactaaacatgtcctggtgtcactgctaggaaataaacgttgccaatgactatgagcctgagtcattcattctaataagtgttcttgatagaaaacgcagccaagtaggcagcaattttagagaattttcaatctctaaattttgaattgtgaagaacaacaaattttgcttattaaatgggcatcgtgttagttttctactgctacaggaacaaattaccacaaactgaacagcttaagaaaacacagggttatgttcacctgagagttctgcaggtcagaatsctgggcgatgctcctctccaaaggttctgagaaagaatccactcaggatgctggcagaattcagttccacgcggttgtagaactgaagcccttgttttgttgatggctgttgtcttcacaatgcctttaacttttagagaaaatgtt

SEQ ID NO: 636418 - DNA, 559 bp, Homo sapiens
gtttaacattctatctttggccctgtatttaaggccccgtattgcaggcatagccaagaacagaagggtgtgggagcttttctgcaataagcttgtagtgtgttcgggaggtgaggcataaactttggaaacattaaggagtcccataaaagcatatgcagtgatgacaaagactttgtctatgaaattcaaactgtgatctcaaacagagactgaaaatgtcctgcacttgtctcttgacgatccaaggaacatcctttcctagtgtcacctggcagagaacccaggggtcttgctggatgatgaagaatcaggctggtgcaggcacatcagagaccagaagattcccaggcctggagtggaaactctctagatgtctgatcaaaaggacagtaccacctgtaatcccagcactttgggaggccgaggtgggcggatcacttgaggtcaggaattcaatatggtgaaaccctgtctctactaaaratacaaaaaatagccaggtgtgtaatgtctacaatcccttaggaggttcacgtaaggttaaagtatttatgtt

SEQ ID NO: 636419 - DNA, 584 bp, Homo sapiens
cccctcctctgttttaacaaggttttcttatcatctttagtttactgtggtttgaatatgataggtctgtgtgtggattcttttttgtttttaatatgtgtattgctccacattctctaacactgtgagtctatggtttggtatgtgttattaattttggaaagactttggctattattaattcaagtatatctttgcttggttctttctcacccttctagtattccaatttgttgtatgctgtactttagagtccttgggcattctgttctgtatgtttcattattttcttctacatgtttcagtttacgaagtgtctgttgacctatgtgcagtctcaatgatttatttattcatttatttatttatttttgacagagtctcatctctgtcacccaggctggagtgcaggggcacaatcttggctcactgcaacctctacctcccaggttcaagcgattctcctgtctcagccwcccgagtagctgggattacaggcatgtgtcaccacacccagctaatttttgtatttttagtagagatggagtttcaccatgttggtcagtcttgttccaaactcctga

SEQ ID NO: 636420 - DNA, 571 bp, Homo sapiens
gagacagacagggattgtgttacaaaaagatttgtatgccatgaaaagtaatttgagttccatcttgtaggcaacagatcgtggatgtgtcttaagttacagaagattctaaccagactttcatagaagaaggattcttcctgttgtggtggcatcgatggatagttcttttccaggagttcactagagagatattagaatgtttgacaatgtgctgattcatacaaatatggttagggcatttccaaattttctgagaagttctaaagtgttgacaaataaattagaccactaaagaagtctgcaataaatgctaatgcaatagtagaaaaagaaatgttctrtgagcaaggaattgggaagaaatttattcagttgcaaaatagaaggggttcatgcagaaacatatcttaatgtaagttaaacaaagctccctttttagacaagaaatattcgttattgcttatgattctgagcagatattctgctggtttcttgtgggacattcgtgcagctgtgttcaggggtggtgactgcaagccaggctctgtgagttttggttgcctcattg

SEQ ID NO: 636421 - DNA, 571 bp, Homo sapiens
gagacagacagggattgtgttacaaaaagatttgtatgccatgaaaagtaatttgagttccatcttgtaggcaacagatcgtggatgtgtcttaagttacagaagattctaaccagactttcatagaagaaggattcttcctgttgtggtggcatcgatggatagttcttttccaggagttcactagagagatattagaatgtttgacaatgtgctgattcatacaaatatggttagggcatttccaaattttctgagaagttctaaagtgttgacaaataaattagaccactaaagaagtctgcaataaatgctaatgcaatagtagaaaaagaaatgttctgtgagcaaggaattgggaagaaatttattcagttgcaaaatagaaggggttcatgcagaaacrtatcttaatgtaagttaaacaaagctccctttttagacaagaaatattcgttattgcttatgattctgagcagatattctgctggtttcttgtgggacattcgtgcagctgtgttcaggggtggtgactgcaagccaggctctgtgagttttggttgcctcattg

SEQ ID NO: 636422 - DNA, 557 bp, Homo sapiens
ggtgactgcaagccaggctctgtgagttttggttgcctcattgagctctcccctccatgagctcaggtatcctacaccaggaacaatgaggtcggatgccttggggatgcgtggagggacggggtagtggtcccttgcctagtttacctttctacagttgacttttagaacaaacttaatgtttcacagtctaaaagtgaataaatacataaaatccacaagtatggaaaagataactacaaaaagaaagaaaaacagaataaaatgagtgaacttaacgtttttcaaatgagtggcctcagcacactgaagggtgaggagaggagagtgagtctaagtggctctgggatgcactgtttgtgagcaccgtgctttggctctgtaaatacggaggtgtggtttagaaatgatgcarctactctctggcagcttttcataagaaaataagtaaatagattcgtggtaccgggaataatgtgagtggggcaagcctagaagaaaccttctggtgttggattgggatcagagagatcagtgtgaactcatgatttttaaca

SEQ ID NO: 636423 - DNA, 645 bp, Homo sapiens
cagcacgggtgaaagatgtaggctgggaggctagaccagtctctcttttcacattttgctgcctgcttacattctagctgtcctggcagctgattagatggtgctaacccagattaaaagtgggtttgccttttccagcccactgactcaaatgttaatcttctttggcaacaccctcacagacacacccaggatcaatacctgtattcttcaatcaagttgacacttagtagtaaaaatgaatgtgatagttaaaggttatatttctatttgctyaaagtgcagtgaagtaatactaagacaatggagaagtgagaatagcacattgagtttgatatcagctactcctgtgagtctacttggaatataatctatggtgttttccccaacaactctttgaccacgtgctttggggttgtgttgccctcatagtttccttgatctctgtgacctgctccaccaagctctgtttgttactgtacaaagcaggccccctttctgggtacagttatctctcttaaacagacccagatattccactcaaagtagggaggtgtgggcctggataacaagagtaaagaccaattccaaacatgaaaattaacaatgcaattatggttttcttccagcacatttttactttcc

SEQ ID NO: 636424 - DNA, 584 bp, Homo sapiens
aatcaaccggtacccagataaagtagagaataccactcatcaatcacaaagggggaagggtcgttggtagacacataacatgcatgaatctcaaatgcactaccctatgaaagaagccacattctaaaggctacatgtttagctacatgttatgtgactccatttttatgactttcttgtagattaaaaaacagaatgaaggcaagcaagtcagggattkccagggattaagcgtttgacttcaaagggccaccagggggatttttttcaacagtgatcaaacgattctgtattttgattgtgatggcatttgcatgactatgcatttgtcaaaactcatagaactgaacagtgaaaatggtattgtgtatacatttaaaaataaatgtaaaagaaacacaacccaataatgaaagtggatcctcagaaatagataatttataagcacacacaaatgtattgctatgtatagttctctacagcatttgaaactgtctattttatataactgaaacttgtttgtgtgtgtatataacctataataatataatacattacattatagttcactgaatgcaggaaac

SEQ ID NO: 636425 - DNA, 607 bp, Homo sapiens
tgagcccactctgtattcacctgtttgggactcagggttatagaggacccctctaaggtcatagatgatcacaaaatgctagaatggaggcttcatgagagagcctgctcctttctatgggaagagtcacacacatcatccaggtgaggcttgacagaaccggcctctatcagtgcaggactcacgtgcctccagccacttcatctcatgctgagctttcaggttcctagagggagagcagaatggagaaacaggtgttcagcctcactcttgatccctatcagcaacagccactgccyccccaccccacccgccaccccagggttcggcagacggttcctgatgctgctgtaatgaatgtcagtttgggttaaaacaccccagaagccacagagggagggaatccttctaaccatcatcctccagcaggctcagtgaagtggaaccacagaacaattccatcttctgcctctttggtaccgtccccaagctatgtaaaatataaacaaaatagaacaaagctattcatctttgatggagaagatttgctcaaagtttagaggacctggtttctcagcatccagaaagccgaaaatatttactatct

SEQ ID NO: 636426 - DNA, 607 bp, Homo sapiens
tgagcccactctgtattcacctgtttgggactcagggttatagaggacccctctaaggtcatagatgatcacaaaatgctagaatggaggcttcatgagagagcctgctcctttctatgggaagagtcacacacatcatccaggtgaggcttgacagaaccggcctctatcagtgcaggactcacgtgcctccagccacttcatctcatgctgagctttcaggttcctagagggagagcagaatggagaaacaggtgttcagcctcactcttgatccctatcagcaacagccactgcctccccaccccacccgccaccccagggttcggcagacggttcctgrtgctgctgtaatgaatgtcagtttgggttaaaacaccccagaagccacagagggagggaatccttctaaccatcatcctccagcaggctcagtgaagtggaaccacagaacaattccatcttctgcctctttggtaccgtccccaagctatgtaaaatataaacaaaatagaacaaagctattcatctttgatggagaagatttgctcaaagtttagaggacctggtttctcagcatccagaaagccgaaaatatttactatct

SEQ ID NO: 636427 - DNA, 529 bp, Homo sapiens
ttccagaagtccaacaagaaaatataatcagtcctcaagacctaacagtgactctagttgctactgtacctcgagatggagaagatgaaaaagcatttattttaactctggtggaaatcccaaccaatctcctttactttctccattaaactaatggagagtagaagaaataaccgaagccactgcacagttaatgccaaaccctttactgccagcttccatattggtcaaatcaatgaatactgaagaaaggggtggcatgagtgtttaccagcaacttcagttggtcaagatgacatgggtttatccatttctgkaagagatagcttttctaaaaagcttcctgataatttggatcttgtatctaggaagagatttctttgcaggcttggtgaaaatgaccacgttcctcctgccaaaaactgttcactcactttaagagatgatggtcaagcatagacctctgaggtgcgctcagaggaattaacaaatgtttttgaggaaacaggggagtctcacaagggacaag

SEQ ID NO: 636428 - DNA, 529 bp, Homo sapiens
ttccagaagtccaacaagaaaatataatcagtcctcaagacctaacagtgactctagttgctactgtacctcgagatggagaagatgaaaaagcatttattttaactctggtggaaatcccaaccaatctcctttactttctccattaaactaatggagagtagaagaaataaccgaagccactgcacagttaatgccaaaccctttactgccagcttccatattggtcaaatcaatgaatactgaagaaaggggtggcatgagtgtttaccagcaacttcagttggtcaagatgacatgggtttatccatttctggaagagatagctyttctaaaaagcttcctgataatttggatcttgtatctaggaagagatttctttgcaggcttggtgaaaatgaccacgttcctcctgccaaaaactgttcactcactttaagagatgatggtcaagcatagacctctgaggtgcgctcagaggaattaacaaatgtttttgaggaaacaggggagtctcacaagggacaag

SEQ ID NO: 636429 - DNA, 529 bp, Homo sapiens
ttccagaagtccaacaagaaaatataatcagtcctcaagacctaacagtgactctagttgctactgtacctcgagatggagaagatgaaaaagcatttattttaactctggtggaaatcccaaccaatctcctttactttctccattaaactaatggagagtagaagaaataaccgaagccactgcacagttaatgccaaaccctttactgccagcttccatattggtcaaatcaatgaatactgaagaaaggggtggcatgagtgtttaccagcaacttcagttggtcaagatgacatgggtttatccatttctggaagagatagcttttctaaaaagcttyctgataatttggatcttgtatctaggaagagatttctttgcaggcttggtgaaaatgaccacgttcctcctgccaaaaactgttcactcactttaagagatgatggtcaagcatagacctctgaggtgcgctcagaggaattaacaaatgtttttgaggaaacaggggagtctcacaagggacaag

SEQ ID NO: 636430 - DNA, 530 bp, Homo sapiens
ccactgcacagttaatgccaaaccctttactgccagcttccatattggtcaaatcaatgaatactgaagaaaggggtggcatgagtgtttaccagcaacttcagttggtcaagatgacatgggtttatccatttctggaagagatagcttttctaaaaagcttcctgataatttggatcttgtatctaggaagagatttctttgcaggcttggtgaaaatgaccacgttcctcctgccaaaaactgttcactcactttaagagatgatkgtcaagcatagacctctgaggtgcgctcagaggaattaacaaatgtttttgaggaaacaggggagtctcacaagggacaagatatttttcctacctcaggaagcacattgacaactccagaacctcaaaaagtgcaagtcgaaccaacttttcagagtacaggatctagatctcccgatacatgcatggacaagaatgtgcctcggttacctcagaatgaaatgattgtgtctgataaggaagaaagaactgttgctgctc

SEQ ID NO: 636431 - DNA, 598 bp, Homo sapiens
ttctgagtggaaactgtctacaagtaggcatttatttcrtgattaatatgtcagagaaatcatggcagtaaatcacattgctattttaataccctgtttttgtaagtttttaaaactcatattctgaagagatttctttctcttaatgttagtttgggagttagattgccatgattaaagtattatttatccttgtgtaataataatttttaactttaacaactgtctctttttaatctataataaactagttttatggaagatagaatttcttgctatataaagaatacagggactcattgtactagagaatcaagtcagccggctaaattatcctaccattatatccttaaacctaattttggaaaagagaaagttaatcagtgtattcaccttacatggtggcaagaactatgttaggcctgattcatgtaaagaagatgttgcaaagaatttatttcataaatcttaaaggagatatgattaaaggtttttatctgttcttgattttttctcctgaacacttatgcattagcaagtgatcagcatgcgggtttgacacctaattgttggtaaatggttgaggcacgacaaaaat

SEQ ID NO: 636432 - DNA, 598 bp, Homo sapiens
ttctgagtggaaactgtctacaagtaggcatttatttcgtgattaatatgtcagagaaatcatggcagtaaatcacattgctattttaataccctgtttttgtamgtttttaaaactcatattctgaagagatttctttctcttaatgttagtttgggagttagattgccatgattaaagtattatttatccttgtgtaataataatttttaactttaacaactgtctctttttaatctataataaactagttttatggaagatagaatttcttgctatataaagaatacagggactcattgtactagagaatcaagtcagccggctaaattatcctaccattatatccttaaacctaattttggaaaagagaaagttaatcagtgtattcaccttacatggtggcaagaactatgttaggcctgattcatgtaaagaagatgttgcaaagaatttatttcataaatcttaaaggagatatgattaaaggtttttatctgttcttgattttttctcctgaacacttatgcattagcaagtgatcagcatgcgggtttgacacctaattgttggtaaatggttgaggcacgacaaaaat

SEQ ID NO: 636433 - DNA, 514 bp, Homo sapiens
tgtactagagaatcaagtcagccggctaaattatcctaccattatatccttaaacctaattttggaaaagagaaagttaatcagtgtattcaccttacatggtggcaagaactatgttaggcctgattcatgtaaagaagatgttgcaaagaatttatttcataaatcttaaaggagatatgattamaggtttttatctgttcttgattttttctcctgaacacttatgcattagcaagtgatcagcatgcgggtttgacacctaattgttggtaaatggttgaggcacgacaaaaatattaatatccattgtttaccatcatgttatttgaaacagaagtggcatgtgtactctcttgcttgaagaagtctttgacaaaaaaaaaaatcatgtcatttataaattttcttgttctaaagaaatcagttatgttatatatatgtatacatataaattatgtaaataaaagttattttataccaaaaaaaggataaagtaatcaagaaaacgtaa

SEQ ID NO: 636434 - DNA, 514 bp, Homo sapiens
tgtactagagaatcaagtcagccggctaaattatcctaccattatatccttaaacctaattttggaaaagagaaagttaatcagtgtattcaccttacatggtggcaagaactatgttaggcctgattcatgtaaagaagatgttgcaaagaatttatttcataaatcttaaaggagatatgattaaaggtttttatctgttcttgattttttctcctgaacacttaygcattagcaagtgatcagcatgcgggtttgacacctaattgttggtaaatggttgaggcacgacaaaaatattaatatccattgtttaccatcatgttatttgaaacagaagtggcatgtgtactctcttgcttgaagaagtctttgacaaaaaaaaaaatcatgtcatttataaattttcttgttctaaagaaatcagttatgttatatatatgtatacatataaattatgtaaataaaagttattttataccaaaaaaaggataaagtaatcaagaaaacgtaa

SEQ ID NO: 636435 - DNA, 598 bp, Homo sapiens
ttctgagtggaaactgtctacaagtaggcatttatttcgtgattaatatgtcagagaaatcatggcagtaaatcacattgctattttaataccctgtttttgtaagtttttaaaactcatattctgaagagatttctttctcttaatgttagtttgggagttagattgccatgattaaagtattatttatccttgtgtaataataatttttaactttaacaactgtctctttttaatctataataaactagttttatggaagatagaatttcttgctatataaagaatacagggactcattgtactagagaatcaagtcagccggctaaattatcctaccattatatccttaaacctaattttggaaaagagaaagttaatcagtgtattcaccttacatggtggcaagaactatgttaggcctgattcatgtaaagaagatgttgcaaagaatttatttcataaatcttaaaggagatatgattaaaggtttttatctgttcttgattttttctcctgaacacttatgcattagcaagtgatcagcatgcgggtttgacrcctaattgttggtaaatggttgaggcacgacaaaaat

SEQ ID NO: 636436 - DNA, 514 bp, Homo sapiens
tgtactagagaatcaagtcagccggctaaattatcctaccattatatccttaaacctaattttggaaaagagaaagttaatcagtgtattcaccttacatggtggcaagaactatgttaggcctgattcatgtaaagaagatgttgcaaagaatttatttcataaatcttaaaggagatatgattaaaggtttttatctgttcttgattttttctcctgaacacttatgcattagcaagtgatcagcatgcgggtttgacacctaattgttggtaaatggttgaggcacgacaaaaatattaatatccattgtttaccatcatgttatttgaaacagaagtggcatgtgtactctcttgcttgaagaagtctttgacaaaaaaaaaaatcatgtcatttataaattttcttgttctaaagaaatcagttatgtyatatatatgtatacatataaattatgtaaataaaagttattttataccaaaaaaaggataaagtaatcaagaaaacgtaa

SEQ ID NO: 636437 - DNA, 581 bp, Homo sapiens
atatatacattatatggatataaaatcattataacttttttgtatgagtgctgataaaatcaaccaagactttaataggacataactccaaacacttggattacccctgacactgtgtttgcggtgggataaagctttacgtggtgacacattctgcgtggaatgctggctccatctgctttcaacattccacttatactcaaatgtacataaattatatacatatataaatttaaaattatgctcataagttttaattgcccattttatacttattatctatgcatcattggctatcttgcaccactctaggtcttattttcctaagtataaaataagcctacttgatcaagaccctgggggtctgtgtgtgtgtgtgtgtgtgtgtgtgtgtgtgtgtgtgtgtgtacatatgtcatcctttgtccataggattacacttcatacaaagtagggtcttgatawatatgtgttgtttgatgattgatgtgtttttctataaatatacttaactcactgacttgtacagcaatatttaatgaatactacttttgtccaagtatacaaaaacagactcacat

SEQ ID NO: 636438 - DNA, 581 bp, Homo sapiens
atatatacattatatggatataaaatcattataacttttttgtatgagtgctgataaaatcaaccaagactttaataggacataactccaaacacttggattacccctgacactgtgtttgcggtgggataaagctttacgtggtgacacattctgcgtggaatgctggctccatctgctttcaacattccacttatactcaaatgtacataaattatatacatatataaatttaaaattatgctcataagttttaattgcccattttatacttattatctatgcatcattggctatcttgcaccactctaggtcttattttcctaagtataaaataagcctacttgatcaagaccctgggggtctgtgtgtgtgtgtgtgtgtgtgtgtgtgtgtgtgtgtgtgtgtacatatgtcatcctttgtccataggattacacttcatacaaagtagggtcttgatatatatgtgttgtttgatgattgatktgtttttctataaatatacttaactcactgacttgtacagcaatatttaatgaatactacttttgtccaagtatacaaaaacagactcacat

SEQ ID NO: 636439 - DNA, 581 bp, Homo sapiens
atatatacattatatggatataaaatcattataacttttttgtatgagtgctgataaaatcaaccaagactttaataggacataactccaaacacttggattacccctgacactgtgtttgcggtgggataaagctttacgtggtgacacattctgcgtggaatgctggctccatctgctttcaacattccacttatactcaaatgtacataaattatatacatatataaatttaaaattatgctcataagttttaattgcccattttatacttattatctatgcatcattggctatcttgcaccactctaggtcttattttcctaagtataaaataagcctacttgatcaagaccctgggggtctgtgtgtgtgtgtgtgtgtgtgtgtgtgtgtgtgtgtgtgtgtacatatgtcatcctttgtccataggattacacttcatacaaagtagggtcttgatatatatgtgttgtttgatgattgatgtgtttttctwtaaatatacttaactcactgacttgtacagcaatatttaatgaatactacttttgtccaagtatacaaaaacagactcacat

SEQ ID NO: 636440 - DNA, 574 bp, Homo sapiens
gatggttttataaggtggagtttccctgcacaagctctctctttttccttgctgccatccatataagacgcgacttgctcctccttgccttccaccgtaattgtgaggcctccccagccacatggaactgtaagtccactaaacctctctttcttttgtaaatcatccagtcttgggtatgtctttatcagcaatgtgaaaatggactaatacaggcacaatccaggacaactcawttcctgccttttccccactccttaattctgcaaatgacatttctcaggctactttgacaagtggctttcccttgggtttagccaacagagagcctagagagcagtggaagaaagaaaaaaccagcatgtgtgtttgcactgtctctgtattagtccattttcacactgctatatactacctgagactggatagtttataaaggaaagaggcttaattgactcacagttcagcatggctggggaggcctcaggaaacttacgatcatggcagaaggcaaagtagaagcaagcaccttcttcacaaggtggcagcagacagagaggagtgagcatgggaa

SEQ ID NO: 636441 - DNA, 579 bp, Homo sapiens
gggtgacagcagtggttaggtgagtacacagtctccctgaggatgttcaatgtaaagtcatagcctgttttgtgtaataagaagtttcttagaaagcactcaattttctgaactttctgaaattttattttaattaaacatcataacaatgtgcagagaattggattagtcatcaccctgcttcatgacacactgttgccattggtccatgcacagccccacttaatattaattacataataatttattaaatgaataatccagtccaaagtctcaaaaattatctacaatatatacttaccaatgttctctttccctgtactttgcatctgcttaccctcatccttacctgcaaatagcaacattatgaatgtttctttgattcttttattttttgatgtatagctttacacacacacacacagacatacacacagacacacacacacacacacacacacacccctgaaacatatattttctagtttgcctgttactgaagttaatgaaacattttcttctattttattctgtgattttttwaaaaaaatcaacagtactaaatcttatttgttgtgt

SEQ ID NO: 636442 - DNA, 539 bp, Homo sapiens
gaagctataacacaaatggagctgaaacatgccccttacttgccakgttgtgggtgaagagaaggaaagaagaggttcagcctctttgggagcacagacttaggagcttcctgagccaaggctgtgccttcctttatggggtcctgtggtgcctggcatctccaagcttccaggtgccactaagttccctggtgccagccaggaaagctgcctgtagtgtgcctggtccagacacagcctcacagagagccagttcctgtgccagcacctagagcttcctgctttgctgtggcagccagcatatctgactgtgcagttgctggaccctacgcttgctcacacacccctcaccactccatgcctgacttgcccttggcaggagtgggatccaggctggtagtgtaagctgagtgcagcctgccagaccgagttggtggaatgagcccagtgggcccaagcaaaactcaggcaaaggtgccactagccagaggtttcaggccagaaaagcaacaccccaaggatcctgtaacaatataatg

SEQ ID NO: 636443 - DNA, 627 bp, Homo sapiens
ataacgttaagacattgaggagctgagggaattaacctgctcacatttatcctgttgctcttttattctacctttctgcatataaaatgacagacatgtactttctgtgtgtttatttacaataacactgttcaatgttgttataggcagttgcttcacccagtaagcttgggcaaagctcttgttgctgcctcacttttcaacccagagacagctgtgctggactgcagctgacttctctcaatccctgtgagaatgctctgtctagatttctggtctttcctttccactttcctttgtccatttatttcttccacagatgtttattcagatactacaatgtgctgagaatatggtggatgttgggaatccaaygttgagcaagtattttcctcacctttatgttccatattagtgaggacattcatctttcctggtggcaggatgagtcacaccattattcagagccaataaagaaactaattaaccatccataacatctagataacactagataacttctagaaaaatgttacaacattttctttgtgatttggcatctccctaactatctttacagagagagtgttttcatttaattcctttctgcttgaatggtggtcagaa

SEQ ID NO: 636444 - DNA, 627 bp, Homo sapiens
ataacgttaagacattgaggagctgagggaattaacctgctcacatttatcctgttgctcttttattctacctttctgcatataaaatgacagacatgtactttctgtgtgtttatttacaataacactgttcaatgttgttataggcagttgcttcacccagtaagcttgggcaaagctcttgttgctgcctcacttttcaacccagagacagctgtgctggactgcagctgacttctctcaatccctgtgagaatgctctgtctagatttctggtctttcctttccactttcctttgtccatttatttcttccacagatgtttattcagatactacaatgtgctgagaatatggtggatgttgggaatccaacgttgagcaagtattttcctcacctttatgttccatattagtgaggacattcatctttcctggtggcaggatgagtcacaccattattcagagccaataaagaaactamttaaccatccataacatctagataacactagataacttctagaaaaatgttacaacattttctttgtgatttggcatctccctaactatctttacagagagagtgttttcatttaattcctttctgcttgaatggtggtcagaa

SEQ ID NO: 636445 - DNA, 587 bp, Homo sapiens
tagaaaactttattttcttttaaatattatccagttatgggattactaggtcaaatgatagttctgttttaagttctttcagaaatccccagattgccttccacagtggctgaatgggtttacatccccaacagtgtataagcattcccttttctccacagcctggccagcatctattaatttttgacttgttaataatagacattcttgctggtgtgagatggctttctcattgtggttttgatttgcatttttctgatgattagtgctgagcatattttcatatgtttgttggcttcttgtatgtcttgttttgagacgtgtctgttgattgttgatatccttggctcactttttaatggggttatttgtttttgcttgttaagttgtttaagatacttatacattctggatattagatttgttggatacacagtttgtgaatattttctcccattctgtaggtttcccgtacatgcttttgatagtttcttttgctatgcagaagctgtttaattgarttaggttacacttgtcaagttttgtttttgtcacaattgcttttgaagacttagtcataaattatt

SEQ ID NO: 636446 - DNA, 630 bp, Homo sapiens
tttactgtctcccacttataatgtaattgttgtaactatttccttcacgtacactgagaacaaccttaggcagtattataatttttgcttcaactctcaaatataattttaaaaactcaagagagaaggaaagtctgttgtattttaccctttctactttcttaaccttctgatrtttcatgtttctttcagttaataacaattaaaagaaagaatatggcagagtgcatagaaaaatgatgcaattatattgtgtacaagaaactctcttcaagatacatataggtttgaaataaaggggagcaagaaatatatcatgcagacattaatcaaaagaaagaaagtatgtctatagaaatattaaagtatatttcacagcaaagaaaattaccaaggacaaagaagaatattacataataataaaaatgttaatctatcaagaagaaatagcaatcctaaatgtgtaggcaccaaacaagtaaactataatatatataaaggaaaaactgaaaaaattgaattgccataaaggtcaatctataattataactggggaattcaatattcctttctcagaaatttactgcattagacagaaaatcagcaaagatatagaagaactcaacaccg

SEQ ID NO: 636447 - DNA, 555 bp, Homo sapiens
acatcacaaggaagacagtatccacagatttagtccaggtaagctactaaacaaacaagcagcaacaataaccattcccaggaggcatcgcagtccagaactgctacaatatattacctacattatccagtttggaacaacaaaaagctatgagacatgcaaagatataggaaaacatgatccacactcagtaaaaaaaatttagtcaataggaatggyctctgagtgggcccagatgttggatttagcagacaaagtctttaaaaccaataattatgttcagagaactaaaggaaacaatgtttaaaaaatcaacaaaaatatgaatcaatgactcaacaaataaagaatcttaataaggagatggaagtcatgcaaaagaaccaaataaaattttagagttgaaaagttcagtaactttctaaaatgaaaaagttaatgtttttagtattgttgtggtgagcaaccaacagactttagatgacggaagaaagaatcagtgaacttgaagacagattaatggaaacgatccaatacaatagagagaaagaaaca

SEQ ID NO: 636448 - DNA, 555 bp, Homo sapiens
acatcacaaggaagacagtatccacagatttagtccaggtaagctactaaacaaacaagcagcaacaataaccattcccaggaggcatcgcagtccagaactgctacaatatattacctacattatccagtttggaacaacaaaaagctatgagacatgcaaagatataggaaaacatgatccacactcagtaaaaaaaatttagtcaataggaatggtctctgagtgggcccagatgttggatttagcagacaaagtctttaaaaccaataattatgttcagagaactaaaggaaacaatgtttaaaaaatcaacaaaaatatgaatcaatgactyaacaaataaagaatcttaataaggagatggaagtcatgcaaaagaaccaaataaaattttagagttgaaaagttcagtaactttctaaaatgaaaaagttaatgtttttagtattgttgtggtgagcaaccaacagactttagatgacggaagaaagaatcagtgaacttgaagacagattaatggaaacgatccaatacaatagagagaaagaaaca

SEQ ID NO: 636449 - DNA, 517 bp, Homo sapiens
ccttacatctttctcctgcaaactaaggagatgcggataagcttcttcatggcagctccccrtaagactgcttatccccctcattacatgaggaatagcaaggtgttttaccaagacttgggtcaaattacagttaagcattgcttctatgtcctatgtgggcatgtactggggtggcagggcaccaccccagagctattcctctacacatagatgtaataggagtcccagaaggaaaggagagagagaaataggcagaaagcagggagatggggatgtctaatgggtacaaaaaaaaatagaaagaatgaacgagacctactatttgataggacaatagggtgactatagtcaataataacttaattatatattttaaaataacttcaagaatgtaattggattgtttgtaactcaaaagataaatgcattaggggatggataccccattattcgtgatatacttatttcactttgcatgcctatatctaaacatctcctgtactccataaatata

SEQ ID NO: 636450 - DNA, 606 bp, Homo sapiens
ctcccccatgacagccccatgaggtgggtgtgattattattggcattttgcaaatgagaaagctgaagttcamgaaagttaagccccttgcccaaagttacatacaaatgtagtggcagagtcaagatttgaacttgtgcacttggtgctgctctacatggtaaaactaggggggaaggagggaatgatggaaggccctggaaaagcaagttatattcacatatgaaagacttcgaaggctttcagactggggcccacaggatgccctctttgactctgctcaaatgtccatggaatgtcaggactgaatggaccttaggaatcactgagtcattctctcaggtcacgactagtagtgactaaagcccagagaaggacattgacttacccaaagtcacaatgtatgttagggggaaagtcagaagtggaacctggatctcctggcctgtccagtgctctttccattacactgcataccctccacttgaccaaatgcaccctggcctcatccaggtgagcctcctacagcctttctcgttacacttggtataaattctgcaatccaagttctgcatgctctggcccctccacctcttcgacctgatt

SEQ ID NO: 636451 - DNA, 602 bp, Homo sapiens
gggctttctttttaatgaaggcagatgagaaatggcaagagcaatgatacttaatccagctaaatcatggtcacactcgtgacacagggcctccttcatgtccagcctccctcagtgcctttaagaagctacgtccacccacactgacaaagaggaaaaagaaaaaaacctcctgatgcatctcccaccttgtctaatcactgggacacaagcacccttttgagcatatttaggttaaaaaaaaaaaatgataaccctacagcaagatctctcaaccacatcacttttggggctggataattctatgctgtgggcactttcctgtgcattgtaggattcttggcaacatctttacctctacccactaaaagtcattagcaccrccctctgcatgcacacacacaattaaaaaaagcctccagatattgccaagtgccccatggcaggcaaaatcaccccaatttgagaaccactggtctaagccatacattctcagtgggggcaaaaattggttctcggaggacaaaaaaaaaaaatcttatcttctctatgtataaagcatagatatatgtatagtacacaaacaggtatacagtatattt

SEQ ID NO: 636452 - DNA, 552 bp, Homo sapiens
tctttaatttaattaggtcccagttgtcaaattttttgttgctacagcttttgaggacttagtcataaattatttcccaaggctgatgttcagaatgatgtttcccaggttttcttctaggagtcttatagtttgaggtctcatttatctctttaatatatcttgagttaatttttgtatatgttaaaaggtatgtgtccagttttatttttttggtatattgctagcctattatcccagcaccatttattgaataagaagtcttttctccattgcttatttttgttgactcgttaaagatcagacagccgtgtttgcgtgtgtggctttctttctaggttctctagtctgttgcactggtctatgttacwgtttttgtactagtattatgctgttttggctactgtagccctatagtatgttttgaaactggataatatggtgcctccagcttagatctttttgctaaggattactttggctatttgggttcttttccattttcatatgaattttagaatagcttttctaattctgtgaaaaatggcgttg

SEQ ID NO: 636453 - DNA, 571 bp, Homo sapiens
aataacatcacataataataaaagtgctaatctatcaagaagaaatagcaatcctaaatgtgtaggcaccaracaagtaaactacaacatatataaaggaaaaactgaaaacaaattgaattgaggtaaaggccaatctataattaaaattgggattttaatattcctttctaaacaatttgtaggactatatggaaaatcagcaagggtatagaagaactcaacaccatcagcaaacaggatatcagtgatagttatagaacagtccatctcacaggactagaatacatatttgttccagcacttgtagaacatatatcaagatagattatacataatctatataattttagaagaatggaattcacacagtgtgtgttcctgaccacaatgaaattgaacgagatataaacaacagacacgtaacaggaaactctccagacagttggaaacaaaacaatgcatttataaacaatccttgggtcaaagaggtagtcacaagggtaatacaaaacattgaactgaatgaaaatacgacacttaaaatttatggggtgcagctaaagcagtg

SEQ ID NO: 636454 - DNA, 576 bp, Homo sapiens
atattaccaaggacaaagaataacatcacataataataaaagtgctaatctatcaagaagaaatagcaatcctaaatgtgtaggcaccagacaagtaaactacaacatatataaaggaaaaactgaaaacaaattgaattgaggtaaaggccaatctataattaaaattgggattttaatattcctttctmaacaatttgtaggactatatggaaaatcagcaagggtatagaagaactcaacaccatcagcaaacaggatatcagtgatagttatagaacagtccatctcacaggactagaatacatatttgttccagcacttgtagaacatatatcaagatagattatacataatctatataattttagaagaatggaattcacacagtgtgtgttcctgaccacaatgaaattgaacgagatataaacaacagacacgtaacaggaaactctccagacagttggaaacaaaacaatgcatttataaacaatccttgggtcaaagaggtagtcacaagggtaatacaaaacattgaactgaatgaaaatacgacacttaaaatttatggggtgc

SEQ ID NO: 636455 - DNA, 571 bp, Homo sapiens
aataacatcacataataataaaagtgctaatctatcaagaagaaatagcaatcctaaatgtgtaggcaccagacaagtaaactacaacatatataaaggaaaaactgaaaacaaattgaattgaggtaaaggccaatctataattaaaattgggattttaatattcctttctaaacaatttgtaggactatatggaaaatcagcaagggtatagaagaactcaacaccatcagcaaacaggatatcagtgatagttatagaacagtccatctcacaggactagaatacatatttgttccagcacttgtagaacatatatcaagatagattatacataatctatataattttagaagaatggaattcacacagtgtgtgttcctgaccacaatgaaattgaacgagatataaacaacagacacgtaacaggaaactctccagacagttggaaacaaaacaatgcatttataaacaatccttgggtcaaagaggtagtcacaagggtaatacaaaacattgaactgaatgaaaatacracacttaaaatttatggggtgcagctaaagcagtg

SEQ ID NO: 636456 - DNA, 608 bp, Homo sapiens
gaaaaagaattaacttaattctatacaatttctttcagaaaacagatgtgaaaagaacattttccaacttattttatgaatcccatattaccctgctagcaaaagcagacaaaatagcacacaaaaaagaaaaccatagttctgtatctttaatgaatatagatgcaaaaatcttttaaaaatttagcaaatagaattcagctatgtgtataaaatcatacacaatggccaagttgggtatattcaggtctaaaagagaaaaatcacaggatcatataaattgatgaacaaaaagaatttgacaaaattcaatatctacttaatatcttaaaaatctctgaaaactaggaaaagagggcaatttccacaactgatgaagaacatctacataaaaacctatagctaacatcctacttaatagttacagactaaatgcttgcycctaaaattgggaacagctgaggatactcattctcttcggtgctattcaacatagtttgggaagttctagtcaaacgaaaggatatataggcataaaagtgatacagatcagaaaagaagaagtaaaactgcaatttgtagatgacataatggtttacgtagcagat

SEQ ID NO: 636457 - DNA, 608 bp, Homo sapiens
gaaaaagaattaacttaattctatacaatttctttcagaaaacagatgtgaaaagaacattttccaacttattttatgaatcccatattaccctgctagcaaaagcagacaaaatagcacacaaaaaagaaaaccatagttctgtatctttaatgaatatagatgcaaaaatcttttaaaaatttagcaaatagaattcagctatgtgtataaaatcatacacaatggccaagttgggtatattcaggtctaaaagagaaaaatcacaggatcatataaattgatgaacaaaaagaatttgacaaaattcaatatctacttaatatcttaaaaatctctgaaaactaggaaaagagggcaatttccacaactgatgaagaacatctacataaaaacctatagctaacatcctacttaatagttacagactaaatgcttgctcctaaaattgggaacagctgaggatactcattctcttcrgtgctattcaacatagtttgggaagttctagtcaaacgaaaggatatataggcataaaagtgatacagatcagaaaagaagaagtaaaactgcaatttgtagatgacataatggtttacgtagcagat

SEQ ID NO: 636458 - DNA, 497 bp, Homo sapiens
catccatacatccatacatccatccatacacacatacatagatgataaagacatagacagactagtgatagataaatagattagttagatggaacatagataatagatgagagattagataggtgatagatacatagatagayggaagatagataagatagatgattgatagataatagtagataattgatagatgatagatagaagatagtagataatagatgagagaaattagataagtgatagagataaatatatagatagatggaagatagtagatacatataaatgatattggaccagaatgatctatcagatgcttagccacagagacagaacaatctatgtaaaggtaggcacatagatgacatgggctggtacagtattaagtattaccaggcactagacacctggcagacagtgggctgaggcagctgatacactcgcttacctggtcagatggcctctaaacttggactgggctgaacctcctgacg

SEQ ID NO: 636459 - DNA, 621 bp, Homo sapiens
tgtttcctcatatgcaaaacgtaggtaataatggtacctacctcaaagggttgatatcagaattgaatgggttaatacaggtaatgagacaagtaaaggcaggccgggctcacagtagacatcatgtaagtagtggctagcaccctcatcctgccctcgtcattgtcttgatatgattgtcatcttgttgcttctccctccttcaacatctcagttgcttactacaactcctaaagtgtgtgtgcttggcattgactaagactgttcttacgtggtccatggaaggagatttcatcctcaaaaaacattaggcagagggaagagggctttgtgccctcaggggtggtctacctgaacactawtgtgtaccccatctcttcctcatcaccagtaaatttctaataaatatctcttttaaacttttattttaggttcggaggtacatgtgaaggtatgtacacaagtaaattcgtgggttcgttttacagattatttcatcaaccaggaattaagcccattacctaatgattatcttttccactcctctccctcctcttaccctccacccttgagtagaccccagtgtctcttgtgtcccgctttgtgctcataagttctcat

SEQ ID NO: 636460 - DNA, 539 bp, Homo sapiens
gggatttgaatccaggtaatttgactccaaaccattagtctacactgcctttacacatgaggtacaggaacgctttggattcagtctagcccactctgtttcattgctaagagataataaaaagccctaaaaacttagttaatttcttcaagttggttcaatatgttggccaatgtgatatttctcaatyccttgactgcacctttcttttaccctcagctttcatgaaagaatgcaggaaatagcaacattccatgcatttatttttatcaattatcatcataacaatagtcatctacagcatttctaggaagttctttcttatccatcattggatatgattttcacccaagccacatgagaggcacagaaaaaaaattgccatgtcaattttacaatcaaggaaacaagctacaaaaagtgaggaagtttgcctaagactccacaccaataaataaattgtggatcttgtatttgaaccttgtctttggatctcagctaggaagtactcaagggctcaacctgatccagggcatttg

SEQ ID NO: 636461 - DNA, 548 bp, Homo sapiens
tcacaataactactcaatgcatgtacaaaataagaggttaaattctgtctgaggaatggccagagatgtccctgattctcgagggagcttcagttttccaatctagagaactttaagaaaaagggatagatcaactgggaactggttaactaaatcatagtatacaggcatacctcattttatttcactttgctttattgtacctcatagatatcacatttttaagaattaaagatttgtgacagttagtcmagttgtgaatgcaaaagaaaagttcttagccagacatggtggtccatgcctgtagtcctagcaacttgggaggctgaagcaagaggatctcttgagcccaggagtttgaggctgccatgagttataatcacaccactgcactccagcctgggcaacagaatgagaccccatgtctaaaaaagaaaaggaaaaaaaaaagttctcagaagaaattaaaagttgcttcctgatcaggatagtggttgctaaaggttggggtggctgtggcaatttcttaaaataagacaacaatgact

SEQ ID NO: 636462 - DNA, 525 bp, Homo sapiens
gcccaggagtttgaggctgccatgagttataatcacaccactgcactccagcctgggcaacagaatgagaccccatgtctaaaaaagaaaaggaaaaaaaaaagttctcagaagaaattaaaagttgcttcctgatcaggatagtggttgctaaaggttggggtggctgtggcaatttcttaaaataagacaacaatgactgggcacagtgcctcaggcctgtaatcccagcactttgggaggctgaggtgggtggatcacgaggtcaggagctcgagaccagcctgaccaacatagtgaaacgctstgtctactaaaaatacaaaaattagctgggcatggtggcacgcacctgtaatcccagctactcaggaggctgagacaggataatcacttgaacccaggaggcggaggttgcagtgagccgagattacaccactgtactccagcctgggtgacagagcaatactccatctcaaaaaaaaaaagacaacaatggagtttcccatatcaattatatcaatt

SEQ ID NO: 636463 - DNA, 574 bp, Homo sapiens
tcacagcatcttcaccaagagtatattccaactcaaaaactcacttttttggccaggcgagatggctcgtgcctgtaatcctaatactctgggaggccaagatgggcagatcacctgaggtcaggagtttgagaccagcctggccaacatgtgaaaccccatctctactgaaaatacaaaaattagccgggcttggtggtggtgcatgcctgtagtcccagctactcaggaggctgaggcaggagaattgcttgaacccaggaagcagaggttgcagtgagctgagatcacaccactgcactccagcctggatgacagagcatgacactgtctcaaaraaaaaaaaaaaaaaaaactcacttttttattcttctgaaagaagcaactcttcatccattcaaatattatcataagattgcagcaattcagtcacatcttcaggctccactttcacttctagttctcttactatttccaccaaatctgcagttgtttcctccactaacatcttgaacccctcgaaggaaactatgacagttggaatcagcttcttccaaattacggctaatgttga

SEQ ID NO: 636464 - DNA, 574 bp, Homo sapiens
tcacagcatcttcaccaagagtatattccaactcaaaaactcacttttttggccaggcgagatggctcgtgcctgtaatcctaatactctgggaggccaagatgggcagatcacctgaggtcaggagtttgagaccagcctggccaacatgtgaaaccccatctctactgaaaatacaaaaattagccgggcttggtggtggtgcatgcctgtagtcccagctactcaggaggctgaggcaggagaattgcttgaacccaggaagcagaggttgcagtgagctgagatcacaccactgcactccagcctggatgacagagcatgacactgtctcaaagaaaaaaaaaaaaaaaaactcacttttttattcttctgaaagaagcaactcttcatccattcaaatattatcataagattgcagcaattcartcacatcttcaggctccactttcacttctagttctcttactatttccaccaaatctgcagttgtttcctccactaacatcttgaacccctcgaaggaaactatgacagttggaatcagcttcttccaaattacggctaatgttga

SEQ ID NO: 636465 - DNA, 594 bp, Homo sapiens
agaaattaaaatggacagctacaaaatatttgattatcccaaagaaggcaggaaaggagggaaagagggacaaataaacacatgatacagaaagcagtcaaataccagtaaagtatattgagaaactgacaatattattaattattctaaatgtaataatattgggactaaagcctccaattaggcaggagagacttctggtttggcaaaatgaagaggtcagcaaatcttctccccaaaaagcaactatatatactaaaatcaaaactgtcaaaaacaatgattcagagctctgaaaatcaaacagagccatacagcaaataaagtttgtattcatgaaaaactgctaaatttgggataagaactgcaggagtttgtggtattcaagcttcagactgaagctgctttcatcctccccatccccatccagcttggtcggcagggtagttctagcccaatgggactggctgtgaaaaccagcaacttgctgcagagaggactcacttggkttggaatgggagggaaaaaaaaatccatatccatcatccctgtcagtaatgctagcaatcttcgtgaccagtaaactgggaaagc

SEQ ID NO: 636466 - DNA, 378 bp, Homo sapiens
actaattattcagaaaaggatacaaactaaacccatagacagaacaacacaggatgaacaatccttacattttagtcacttacaacatttttwaaatgatctcttctgaaaagattagctcttaatctgacagtgatgtgccaatcaatgttgtatgtttttagctcatttcagtcctcagacactgagatctttacaagtcctatccccacaggcctcagaaataaaatgccccatttgaagcaatcagaaaaccttatgctaggaagcaaccagccttgcaccagatgtgaaaaagaaagttctaagatgaatctaataaaaagcctatgttttcataattagttatgcatttttgaatatctggagaaagcagat

SEQ ID NO: 636467 - DNA, 378 bp, Homo sapiens
actaattattcagaaaaggatacaaactaaacccatagacagaacaacacaggatgaacaatccttacattttagtcacttacaacattttttaaatgatctcttctgaaaagattagctcttaatctgacagtgatgtgccaatcaatgttgtatgtttttagctcatttcagtcctcagacactgagatctttacaagtcctatccccacaggcctcagaaataaaatgccccatttgaagcaatcagaaaaccttatgctaggaagcaaccagccttgcaccagatgtgaaaaagaaagttctaagatgaatctaataaaaagcctatgttttcataattagttatgcatttttsaatatctggagaaagcagat

SEQ ID NO: 636468 - DNA, 640 bp, Homo sapiens
ttttcttttcttctcttgagaggtatttttctctacagccaatctatttgtaactgtaaagtaaaatttgaaagattatttctttggataatatatgcagaaaagaaggaaggaaaggaaagacagtggagtaaatcttcacggatattggggtattagggacaaatatccatcttttccctagtttccctgacaaattaggaaatcartgcaggagtcagaaaaatatagagcatatcaattttgtcactggtaaatataacttcaatattcagctataccttcttgcaagtgtacatcttaggaaaacaacataccatgcagagtctggtgctaccgagcaggctcatttacccagaattcataccttatatccatcaattcccaacaatgagaattaatgcagaattataggcttaaatctagaacttaaatatgggatcagactttagtgttcccgttgtaaaaaagtaaaataaaatatgtgtattaaaacatacacagatgtgtatgtattatgtgaaatatatgcacatatatgtgtatatatatgatatacatatatatattatatacatgcaggagatatatgattacaggagataaaacccaaaactgagaaactcaagagcttatacag

SEQ ID NO: 636469 - DNA, 499 bp, Homo sapiens
cacctaactttacacgtcaaggaactagaaaactaagagcaactaaacccaaagtcagcagaaggaaagaaataatgtagattagrgcagaaataaatgaaatagacatgagaaatgcaatagaaaatatcaacaaaactgagttggttttttgaaaagacaaatgctattaactagcttttaacaaaactgaccaagaaaaaatgagagaagattcaaataaaattacaaatgaaaaaggagacattacaactgttatcacagaaatacaaagaatcagagactactatgaataattatacatcaataaactggttaacttagaagaaatatacaaatttctagaacatatcacctgccaagactaaatcatgaagatatagaaagtccaaataggccagaaggagtaagaagattgaatcagcaatcaaaaatctcccaagaaagtaaagcccaggaccaggtggtttcttgagtatattctaccaagcatttaaag

SEQ ID NO: 636470 - DNA, 499 bp, Homo sapiens
cacctaactttacacgtcaaggaactagaaaactaagagcaactaaacccaaagtcagcagaaggaaagaaataatgtagattagggcagaaataaatgaaatagacatgagaaatgcaatagaaaatatcaacaaaactgagttggttttttgaaaagacaaatgctattaactagcttttaacaaaactgaccaagaaaaaatgagagaagattcaaataaaattacaaatgaaaaaggagacattacaactgttatcacagaaatacaaagaatcagagactactatgaataattatacatcaataaactggttaacttagaagaaatatacaaatttctagaacatatcacctgccaagactaaatcatgaagatatagaaagtccaaataggccagaaggagtaagaagattgaatcagcaatcaaaaatctcccaagaaagtaaagcccaggaccaggtggtttmttgagtatattctaccaagcatttaaag

SEQ ID NO: 636471 - DNA, 567 bp, Homo sapiens
cttctaactaatctgagtaaatactccttctttacctactttaatcttccttcctcttagatataaattaccaacatagctaatcaccarttcttttgctaacactcatctcagaatttaggaggcatccactccctaaatccttcttagaatcacccagcacaaaactaaatcctataatagggcttctcggttccctcttatccaacactctgctccctctggtgcatgctcactcttgctgcggcacacgaaataagcctacctttcttctgcatgtgagttcctgatgcttgttggctctcgggcattgacagtataaattgtgccaggcatatctcttacctctcttgaacattgcttctttttattattcatttttcttgagaaattaatttgtatgtgtctactactgtttaaatacatctgtttttaaagttgaaaatgtactattcaagttattttccccacttacttaaaattgcatatatgcttccagatggtgttttccttacatacacacacacacacatacacacacacactcaggatttttaaagttaaaat

SEQ ID NO: 636472 - DNA, 618 bp, Homo sapiens
tttttcttcggtaaaaatgagtaacatctgtacctacaactgcaggaatctacagtggcagtrtttttcaatatttctcctttctagtaggtggcacaagaatcaaaataactttaaaagcatattatgagaacatttaaaatcctctcttttagccattttaagaggattttaaatgttctcaccacaaagaaatgataaatatttggggcaatgaatatgctagttaccctgatttgatcattccacaatatacacatgtatcaaaacatcacactgtacaccataaatgtctacaattattatgtgtcaattaaaaataaaataaactttttaagaaatatattttggaacatattacttcatttatctagtccctgacttgttcccacaaaaagcctaaagcatattatcagctctctaaatacattttcaattttgagaaactttaacccactgtaatacaaagcagttttcatgagatgccagtctgtagaagttattttaatgtagaatgactcatttaataaatgaacatatgctttctatttgaggcaaattattctgcaaaactgcatcatagatgatcagaaattgagatagcttcagtctagacta

SEQ ID NO: 636473 - DNA, 595 bp, Homo sapiens
aggtgggaggatcacttgagtccaggaggttgaggctgcagtgagctatgactgcaccactgcattccagcctgaaatactcagggtgacagagtgagaccctgtctcaaaaataacaacaacaacaacaaaacgaaacaaaacataaaagatctgaatttctatggatttggttctgatattatatatagatgatctacttttctcagagagcaaagaagcctgcgaaaaagattccactgactttctctcagccttggtagaaaagggacataatgtttcagaagacacattaccattttgcaaaaacatagtttattatttaggacatgccctatctaaggaggaaaaagcattctcttctgatagactacccargtttattccagatctctcacagaatgacaattgagaggatttctaggtttaattggatactgcaataagggccaaatttttctaaaattgctacactttttttgtgaattgactaaggactcagtttgctttgggagcataaacatgcacaggcctctgggacctgaagaaggctcttcaacggccccttcccttagcatccctaactgcaaagctt

SEQ ID NO: 636474 - DNA, 595 bp, Homo sapiens
aggtgggaggatcacttgagtccaggaggttgaggctgcagtgagctatgactgcaccactgcattccagcctgaaatactcagggtgacagagtgagaccctgtctcaaaaataacaacaacaacaacaaaacgaaacaaaacataaaagatctgaatttctatggatttggttctgatattatatatagatgatctacttttctcagagagcaaagaagcctgcgaaaaagattccactgactttctctcagccttggtagaaaagggacataatgtttcagaagacacattaccattttgcaaaaacatagtttattatttaggacatgccctatctaaggaggaaaaagcattctcttctgatagactacccaggtttattccagatctctcayagaatgacaattgagaggatttctaggtttaattggatactgcaataagggccaaatttttctaaaattgctacactttttttgtgaattgactaaggactcagtttgctttgggagcataaacatgcacaggcctctgggacctgaagaaggctcttcaacggccccttcccttagcatccctaactgcaaagctt

SEQ ID NO: 636475 - DNA, 628 bp, Homo sapiens
ttggccaggctggtctcgaactcctgacctcgtgatccgcccgccttagcctcccaaagtgctgggattacaggcgtgagccaccacacctggccttgtttattttttagagataaggtctatcttgcccaggctggcctcaaacccccaaggtcaagtggtcctcctgcctcagcctcctgagtacttgggactacaaaattgtgtccccacactagataaagctgtttttggaaagttcttcttcctagatattttttcttattctttttcttttttcttttttgaaacagagtcttgctctgtcacccaggctggagtgcagtggtgcgatctcagytaactgcaacctctgcctcgcggttcaagcaattctcctgcctcagcctcccaagtagctgggattacaggcatgcaccatcatgctggctaattcttgtacttttagtagagacagggttttgccatgttggccaggctggtcttgaacttctgacctcaagtgatctgcccgcctcagcctcccaaagtgttgggattacagatgtgagccactgtgccctgccaacatttttcaatacggagttaaatagcaaataacactgagaagccctgctataagctccca

SEQ ID NO: 636476 - DNA, 597 bp, Homo sapiens
attaaggaatacaattaaggaaatatagaaaacaaatagcaaaatggcagaagtaaattcttcattatcagtaatcacgttaaatgtaaatggattaaattcaccaattaaagggcagaggccagcaatataaatttaaaaacatgatccaagtatatgctgcctacaagagactcactttagacccaagacaaaagttaaaagtgaaatgatggaaaaaattccacacaaagagcaaccaaaagagctggaatggctatacaaatatcrtagcaaatagatttaagtaaaaaatagttatgagagaaaataggacattatatattaataaaagggtcaagtcatcaataaaatataacaattacaaatataagcatatatgcaccaaacaatggagctccaaaacatatgaagcaaacattgacagaattgaagggagaaacagttctacaataataattacaaatttcaatacctcattttcaataatgagtggaatatctagacaatcaattaaaaaatagaatttaaacactataaactaattagacctaacacacacataaagaatacttcatccaacaacagaacataaat

SEQ ID NO: 636477 - DNA, 597 bp, Homo sapiens
attaaggaatacaattaaggaaatatagaaaacaaatagcaaaatggcagaagtaaattcttcattatcagtaatcacgttaaatgtaaatggattaaattcaccaattaaagggcagaggccagcaatataaatttaaaaacatgatccaagtatatgctgcctacaagagactcactttagacccaagacaaaagttaaaagtgaaatgatggaaaaaattccacacaaagagcaaccaaaagagctggaatggctatacaaatatcatagcaaatagatttaagtaaaaaatagttatgagagaaaataggacrttatatattaataaaagggtcaagtcatcaataaaatataacaattacaaatataagcatatatgcaccaaacaatggagctccaaaacatatgaagcaaacattgacagaattgaagggagaaacagttctacaataataattacaaatttcaatacctcattttcaataatgagtggaatatctagacaatcaattaaaaaatagaatttaaacactataaactaattagacctaacacacacataaagaatacttcatccaacaacagaacataaat

SEQ ID NO: 636478 - DNA, 597 bp, Homo sapiens
attaaggaatacaattaaggaaatatagaaaacaaatagcaaaatggcagaagtaaattcttcattatcagtaatcacgttaaatgtaaatggattaaattcaccaattaaagggcagaggccagcaatataaatttaaaaacatgatccaagtatatgctgcctacaagagactcactttagacccaagacaaaagttaaaagtgaaatgatggaaaaaattccacacaaagagcaaccaaaagagctggaatggctatacaaatatcatagcaaatagatttaagtaaaaaatagttatgagagaaaataggacattatatattaataaaagggycaagtcatcaataaaatataacaattacaaatataagcatatatgcaccaaacaatggagctccaaaacatatgaagcaaacattgacagaattgaagggagaaacagttctacaataataattacaaatttcaatacctcattttcaataatgagtggaatatctagacaatcaattaaaaaatagaatttaaacactataaactaattagacctaacacacacataaagaatacttcatccaacaacagaacataaat

SEQ ID NO: 636479 - DNA, 633 bp, Homo sapiens
gccaaacttctctccacaaaataaaaggttatgcaagatcaggccccacctgcctctctgacctcttttcatgtcattcttccctgcctcttcactatgccacagcgacgctagctttctgtcagtttccttaacctgccacactcagtcccaccttagaaattttgcactggttgtgctctctggaagaggcaaaagggaattttttaggggaatgaaaatattctgtatcttgactgaattggttgttacacagatagatataaatgtgtttgtgaaaattcatcaaactgtatacttaagtccattttattatatattgtattgttgacgtacattgtaatacacctcaacaaagttcgttaaacaacaaaaaaagattcactagttcaattgtagaactcaacaataaagtagaattgattttacaatatttcttttaaaaaagaattttscaggaatgtgttatcaattctttaaagtgactggtaaaattccacttatgtggaatttagaagctgattttcccagacattaaacataaatgaatggacatagattcagcctaaaggaagtggaatttggcaaggggcagactgcatgaactgaaaatgggtggtggactaagaattc

SEQ ID NO: 636480 - DNA, 559 bp, Homo sapiens
ttgcccataattctttatcttcacttattgacataaactggtaaaaggaaacaggaatcatttagagaggaattagagcacaggaagcctggagtctcctacaatgaccttatcagaaacccaaggaaaaatatgtgtcacatataaaaaataacttgactgtagctcacgttggcaagctaaaatgggaaatgaggaatgatcagagatggttgagagaagggataagatcatctttaaaggaaatcaagagatgcacaaactatggcaggttaaaacagtaaaacaaagttgtactgggtaaataaagagttatgctctatatttaattgacagactagtataaataagtcatcagggattctggtgaaacttttggctagaatgtgcaagctgtcatgctaagctgacttgtggtagcaaagactaatggttttcagtacacagtgtccattgggaggaaactggaagcaaacctgggaacttcrgagtggtgattcgtatccccatacttgtcaggagggcagcagctggaaagaatgatggcatcatgaattcc

SEQ ID NO: 636481 - DNA, 525 bp, Homo sapiens
cattcctgcctgcctccagccttgccttccatagtatattctttattccaccatcagagtaactctctagcacatctcttatttgtacccacccctgcctgcaaatatttaattggccagactgtaggaactctccaccatagctcagaaggccttctgcagtagggcctcttcccatctcatcttcctccatagctcctctcctgaaacacctgctagcctgcatgccctccaccacatcatgatgctggtgcctgccttcatacctcagtatatgctcttcctttttctcagaatgcacctcctgtccctcgggcaccaagtgagttgtctttgaagactcgacttaaatgttcacctcagttaaatctccgtagacctccatgaaggtagagttagargtttgcctctctaccctcattacagctcttagcagactgcagacagcaaagctttttgaaagcaaaatgggcttttcttatatgtatctttagagtcccttacagtacctggcacatagaaggt

SEQ ID NO: 636482 - DNA, 608 bp, Homo sapiens
aatttcttccatggatatgagttgaaatgctgactcaaacataatcatggtaaaaaattttaatccactctctgagaatgtgttcattcaatcatttttttttcattcaataaacactgagtaccttgtatgtgccaggcactattctaatttctggagacaacagtattgactaaaaccaggtcattgcccttatgaggcttccattctagaggaagatataaacaattaaaaagatgaacatatgtaattttctcacattatcccaaagtttctcaagattttattttttctgaatggtaaataagcttaacagatacaaattgtatgtcttattcttttttaacacaagacatattttatttattttaattgtttgctaattaataaacaagggatcattaataactattattaaaactattattaataaatgagccaaccaggacaatattagaacaygtttaaaagaaaactaaatgagtacaatatgagcaatcagggatgctgaaattactttgtaaatagatacaaaactgatttcttggaggtacattagaaaaaattgatttatgcttttatgaataagaatcatttttattgctacc

SEQ ID NO: 636483 - DNA, 592 bp, Homo sapiens
cctgtcacatgtcctgcaaggggggcctggaaactctcccgtttcaactccaggattttccatatttctgaatatttgtattaatataattttacctaggtaatacacacactatccagaaaaggctgtgtctttcctgacctgacaaattttcccatgtaactcctgtaataatatcacatcacatgaacataaatttgactcatatctttcttcctataaggtaaaagaacatatctttgtgatttctcatggggcctctgggaaatctcaaatataggtttaggtgaaaaatatgycctgaaaatgttttcattatcttctaaattcagggaccagtttagggaaggcaaagtcaagagttgtcagaggcaattttggaggtttaataatatagaacgggtatctaagaaacaattcctagttgcctatttaataaaactgatgttattttgaaaacaaacctagaggatagtatcattataagaacgttagctcttgcataagtgaggaagttttgttcttttttgtttatttttttcttaaataatcaggaacataataaagtcaatataaagcatagaaaattgtt

SEQ ID NO: 636484 - DNA, 617 bp, Homo sapiens
gctctttcatatttgctacatgttgagcctttttttttaggacatcatatggtctgggggtccttggaaaaccctcggaagatctgtgaggtcaaaactatttttataataatgttaaaatgtcatttgtcttttttattctcatcctctcataaatgtgcattggagttttccagaagctataggmgtgatactgccatagattggatgcagaagtaggttgagaatctacctgttctctactaatttatattaaagacatttacaaaactgtatagcaatgctactcttctcactaagaacttttttaaaaccattgtttttataaaaatgttttctattaacatggaatttgcttaccacttctatctctaaataaatcaatgaaccagtatttaaacagtaaacatttataatctttaatatggcaaaatattatagttctaatctgcaaaattatgcggtttgagatcttcagcaatttctaagagtggaaaggtattcagagaccaaaaggtttgggaaatgcagctttaagaaagttctactttttccttaaaaagcaaacacacatacacagtcatttttctctgtcactattactccctgtttagtct

SEQ ID NO: 636485 - DNA, 617 bp, Homo sapiens
gctctttcatatttgctacatgttgagcctttttttttaggacatcatatggtctgggggtccttggaaaaccctcggaagatctgtgaggtcaaaactatttttataataatgttaaaatgtcatttgtcttttttattctcatcctctcataaatgtgcattggagttttccagaagctataggcgtgatactgccatagattggatgcagaagtaggttgagaatctacctgttctctactaatttatattaaagacatttacaaaactgtatagcaatgctactcttctcactaagaacttttttaaaaccattgtttttataaaaatgttttctattaacatgraatttgcttaccacttctatctctaaataaatcaatgaaccagtatttaaacagtaaacatttataatctttaatatggcaaaatattatagttctaatctgcaaaattatgcggtttgagatcttcagcaatttctaagagtggaaaggtattcagagaccaaaaggtttgggaaatgcagctttaagaaagttctactttttccttaaaaagcaaacacacatacacagtcatttttctctgtcactattactccctgtttagtct

SEQ ID NO: 636486 - DNA, 617 bp, Homo sapiens
gctctttcatatttgctacatgttgagcctttttttttaggacatcatatggtctgggggtccttggaaaaccctcggaagatctgtgaggtcaaaactatttttataataatgttaaaatgtcatttgtcttttttattctcatcctctcataaatgtgcattggagttttccagaagctataggcgtgatactgccatagattggatgcagaagtaggttgagaatctacctgttctctactaatttatattaaagacatttacaaaactgtatagcaatgctactcttctcactaagaacttttttaaaaccattgtttttataaaaatgttttctattaacatggaatttgcttaccacttctatctctaaataaatcaatgarccagtatttaaacagtaaacatttataatctttaatatggcaaaatattatagttctaatctgcaaaattatgcggtttgagatcttcagcaatttctaagagtggaaaggtattcagagaccaaaaggtttgggaaatgcagctttaagaaagttctactttttccttaaaaagcaaacacacatacacagtcatttttctctgtcactattactccctgtttagtct

SEQ ID NO: 636487 - DNA, 488 bp, Homo sapiens
tgggtgattataaattatattaaagtaacaaaccaaatattgggagagggggcaatgttgaatagggttcaaaaaggaatttatatgtgtggaccaatgtatttttctctgattatatatttttttattgtgtagatatgaaacccttttcccttccatttgacaattcaaagaaaaaagagctaaataaaaagaaaattccgaagttgtgagtatgaattttaatagtacaagtgtatatattttaaatgatcagtataaatttaaaagaaacagcttaatgaaatacaagtcaktttatttgatattcagcctacagctttccaaagcagcagttgaacatgttgttgagtttataccattcattcattcatttattttttctttctttctttcagaaaatactgggtgtttgatatttgtttcactgtgctagtttctgggaatgtgtaagtcatatgccatagttcctattctctatttatctc

SEQ ID NO: 636488 - DNA, 601 bp, Homo sapiens
ttcagcctacagctttccaaagcagcagttgaacatgttgttgagtttataccattcattcattcatttattttttctttctttctttcagaaaatactgggtgtttgatatttgtttcactgtgctagtttctgggaatgtgtaagtcatatgccatagttcctattctctatttatctctaatttaggaggcattatttttatttagtgaaatataaatcaacatagagaagagtcaggtggtcgtactgagcagtcagagaggtctaattcaaatgccttctctgtctttaccagrcgaatgactagaaaatcttatctaagttgaattttcttaccagaaaaatagaggtaattttcttacctagagttttgtagattaaccagattggcagtttaatgtggttaactgagtttagacatcccgtaataaatttcaagcctccaaaatggaggcttccttccattaatttggagtttgtcacaataaccatttctcttgaacagtcattgaaaaaagtcaatatatatagtaaactctgctgtcaatacttagcaattaagtaaaacaaaaaacacctgagaaaatgtaaacaatga

SEQ ID NO: 636489 - DNA, 601 bp, Homo sapiens
ttcagcctacagctttccaaagcagcagttgaacatgttgttgagtttataccattcattcattcatttattttttctttctttctttcagaaaatactgggtgtttgatatttgtttcactgtgctagtttctgggaatgtgtaagtcatatgccatagttcctattctctatttatctctaatttaggaggcattatttttatttagtgaaatataaatcaacatagagaagagtcaggtggtcgtactgagcagtcagagaggtctaattcaaatgccttctctgtctttaccaggcgaatgactagaaaatcttatctaagttgaattttcttaccagaaaaatagaggtaattttcttacctagagttttgtagattaaccagattggcagtttaatgtggttaactgagtttagacatcccgtaataaatttcaagcctccaaaatggaggcttccttccattaatttggagtttgtcacaataaccatttctcttgaacagtcattgaaaaaagtcaatatatatagtaaactctgctgtcaatacttagcaattaagtaaaacaaaaarcacctgagaaaatgtaaacaatga

SEQ ID NO: 636490 - DNA, 600 bp, Homo sapiens
ctcatggagaaatcatgtgggtcatagaatttggaccattctcatcatggacagtaagttctcacagcaaaataataaactggttgaaatataatttggtttcctttgtgacttgactgcaggtaaggaagaggctggctgtgtggatgagagcaacttgctttttacaataattatttgttattgtaaattaacaatttgctcttctggtattatatggaagtatttgatcctgttgatggcactgcctttgcttttgcaagattaaaatgaaatgaagtttctgagatgttaactctattcttgacctcaaacatgacaccaagatgactggatacaagaagaaaattaatgtcacctcaggaagtatctcccccatactscatcaagagcacttacgtggccataagcactggccacatccccatgcacctgggaacaatccatttattttctaaaactttaaaactttctacaaacctgatttttcaatttttgatatgtttcttaaagtattttatcaagattttttatttatttccaaatactggcttggatttttttctcatctgaacactgagaaattccaggaaaaaaaac

SEQ ID NO: 636491 - DNA, 600 bp, Homo sapiens
ctcatggagaaatcatgtgggtcatagaatttggaccattctcatcatggacagtaagttctcacagcaaaataataaactggttgaaatataatttggtttcctttgtgacttgactgcaggtaaggaagaggctggctgtgtggatgagagcaacttgctttttacaataattatttgttattgtaaattaacaatttgctcttctggtattatatggaagtatttgatcctgttgatggcactgcctttgcttttgcaagattaaaatgaaatgaagtttctgagatgttaactctattcttgacctcaaacatgacaccaagatgactggatacaagaagaaaattaatgtcacctcaggaagtatctcccccatactccatcaagagcacttacgtggccataagcactggccacatccccatgcacctgggaacaatccattkattttctaaaactttaaaactttctacaaacctgatttttcaatttttgatatgtttcttaaagtattttatcaagattttttatttatttccaaatactggcttggatttttttctcatctgaacactgagaaattccaggaaaaaaaac

SEQ ID NO: 636492 - DNA, 291 bp, Homo sapiens
agatgtgagacgcaataggtggttaagcaagtatgtactggagtcagactgatctggttatgaagcctcaactcatttttttatttttatttttattttttttttaccatttctggggacsaaaataaggtccagaaactcttatctggaacttaattgggtgagatccatttgtttgtgggaccatctttccttttggttttcacaggtcagtagcagaggcaaagaggagaaaactcccctcaggccttttccctcatcgggagggggcagtttttttcagaaaataat

SEQ ID NO: 636493 - DNA, 614 bp, Homo sapiens
atgtaaggcttctgagcatgtttaaggtagatgaggctgagctctggtattcagtaggttagstgtattaaatatattttgacttagaatattttcaacttacaattggtttatctagatgtaaacccattgtaaaatgaggagcatctgcacatgaaggtattttgaggatccaagcactgtgagaattacagtttaaaacaatttgagaattattttctcatatacaaaatacattgatagttttaatttttaactttattatttcagtataattaaatgaatcactttattttatcacaacatggatatttgtaaagcattcagtattaaattgttaccacttaaaaataagaggtaaattcttacaggtgtatgtatttagggaaaaaaattcattaatgtttcatagccctttttttaagattatgaagcagtttaatgagaaacatgctattttagccggtgaatactacctttgccatcaatcctataatttatgataaaattataaaagtgttatttctcactcactttggtatgtcataaacaggaaatgcatttctggcagtttttcctataattgtttaccaaagtttttgctcacataaaac

SEQ ID NO: 636494 - DNA, 558 bp, Homo sapiens
tcattgttacatataaaaacattccttcttcttttctcagaaattcaaaaacaagtttcatatttgcagtctggtggggaatgttcttagctagaaaacataccgagaattaattttctagaaaattctcagaaacgtcaatatattttggaaattactcttgggtgtttattgttctagataattaagttgtctatttctgttcctgacagactctcacttctccaacacttaagcatattttccaattattctttttttaactttttaaaaatatttctccccacatttrggtctttgtgatgaatcagaaagatcttggaagcagaggttctttagggaacaaggccctttgagtctgtagctataaatttattcttttctagtgcaatttttccattccagaatatctaaaccttgatttaaaatcatgcagtgctaaaaaaggataataaattgtgcggcagagcatttctttttctcaccttaaatggtgacatcgattttattcacttgcttgagaggttaattaataatttcaaaacaatagtaaaagag

SEQ ID NO: 636495 - DNA, 456 bp, Homo sapiens
tttaccactaattagatgtgtggtcttgggtaaaaatagagaactttagaatgagatgaggactcaaaggcctcagtgaagacattttctccaatagagaggaccgtaacagctgatcttacagcctctgctttcacacttatgttgacaaaaactcactccttcatgaagcagacagtgttttytataaattacctgtgattacttcagtttaaatacagtcatataaatgtgcatgtctcctatggataattagttaactggaagaatcctaatcaagaccatacaccctgggccaggcacagtggtttactcctataattccagcattttgtggggatgaggcgggaagatagcttgaagccaggaggtccagatccccatctctacaaagttttctaaaaaaaaaaaaaaaaaaaaaaaatagctaggcgtgatggcatatagctgtagccc

SEQ ID NO: 636496 - DNA, 456 bp, Homo sapiens
tttaccactaattagatgtgtggtcttgggtaaaaatagagaactttagaatgagatgaggactcaaaggcctcagtgaagacattttctccaatagagaggaccgtaacagctgatcttacagcctctgctttcacacttatgttgacaaaaactcactccttcatgaagcagacagtgttttctataaattacctgtgattacttcagtttaaatacagtcatataaatgtgcatgtctcctatggataattagttaactggaagaatcctaatcaagaccatacaccctgggccaggcacagtggtttactcctataattccagcattttgtggggatgaggcgggaagatagcttgaagccaggaggtccagatccccatctctacaaagttttctwaaaaaaaaaaaaaaaaaaaaaaatagctaggcgtgatggcatatagctgtagccc

SEQ ID NO: 636497 - DNA, 615 bp, Homo sapiens
gtcattatccctgctcagtgtaagatggtwtgctaatcagtctaaggaaagttagtagtgctttttctgtgataaaatgagtattgcctcagatgacatggacttatcacttctcccactgattgaataggacataccccaccctgggtgaataccctccaaaatagtgtcttacgtttccagggtataattttccaagctgaatagccaaataaaaaaaatttggtactgggaaattgtcccaattaccacaagggacttttaattaagctcattgtaagagggcccccccaccccaaaaaaaaaaaaaacttcatcaggtttgctgatgaaggtcgaatgcctgatttgtgtgtgcttgctaataaatacatgtgtggcagaattcagcctgggagttgcttttattgtaacacaccaaatggtagcagggtgctgcaggctgtagatatctaaccaaaggaacccaatctttctgaaattcatttaggtagattcacaacagcaggccattctgtttttatgtttgtattaatgtctcggaataccatttattaatctgcaaagagaatatccaatttgaagtagactagaccatgtaaattagctgatgaa

SEQ ID NO: 636498 - DNA, 387 bp, Homo sapiens
ctcgttcattctttcctcatttaaacacgttctttacttggcctctggaacaccccrgcttgatttttttttttttttttaactcactggcctccacttctgttctccttccctagtttatgtacttattgtccaactgctaaaccctggtgtgcccaggagtcagtcttaagcctctgcttggtctgcacacaactccaaataattttttcttatcccataacttttaatacatctacatgctggtaacttttacatgtaaatccttaatctcaacctctttgctgaactttagagttgtatacccaaccatttcaacacttctcaatgaatatctacaaaaatcttattttttcccactaattccaaatgttaaaattgctaatt

SEQ ID NO: 636499 - DNA, 419 bp, Homo sapiens
tctggaagagattaagcctttatatatcttgaaaaaataataatttcaatacacatttttaatgccactcatattcagataatcactaattgtaaaagcctatgtcttgctacttttgcttgaaaattggaatacatcctcatagtgcttaataaatatttgttgagcagacaaaatcaatgytgtcactggtggttgtatttctgacctgacccacaacgttctgtttaagctatggattgtgcataaagaataactctggcctagcattgccaaaaaattattaaacgtaagataaattcagacaaaatcccaaatccagatgacaccttcacacctcagccgtgacttcaaactgagaaaactctgcgcggttgcagtgcttggtattgtatgagctctaagctactgttgggagt

SEQ ID NO: 636500 - DNA, 591 bp, Homo sapiens
aaatcctttaacttggtagcttggaaacaggggcattcaaggtgaagaatatttttctattgttcagtgattgaattctgtcctgctttgatttgtgatttatagtgtactgtgttttttattgctgttgtttgtggctttttttctttaagaaacaaaaccacatccaataggaaatgacaatagacgattaccttccagattttaataaagttatgcagagggtatttctaatgaactttaaaacattttatggaaggamatacaatatcttaagaatctgctatgtgctagacagtaggttaagtgtttaacaaattatttcatttggttctcataattaaactgataaaatatttatttttatctctgtcttgttgatgtagaatttaaggtacaatgaagtaaactgacaagctcatagtcatccagccacaaatgtgattttaggaactcaaacttcagctctacctttgtttgacaaagaaatccattctgtgttaccacactataaagcaaattgcatacattttctcctcatttttaattactaattttgtcacataagaatatcttatacaaaatatgaat

SEQ ID NO: 636501 - DNA, 574 bp, Homo sapiens
tgtacatctgttctagagaataatcttgaaaaatcccccagatctgtaataatatatagagcttttgacccaataattttttgctaggaatttgtcttaatgaaataatcatgaatgaatacaaagatttgggtgaagagttgaacagatgttcacttaagctaattgtttataataatgatgacatggaaatatgtaaatgaaatttcttagatcaagtatgtcaggataaaatatgatgcaacatttataaattataatttagaggaatatgtaataataagaaaaaatgtccccaatatattatttataaagcagatgtaacaagaaaacaagaaaagatgaaatatgtatatatattttaagacaaggtctcactrtattgcccaccttggccttgaactcctgggctcaagccatcttcccacctcagcctcctgagtaactgggactacaggtgctagccattgtacccagctctctctatatttatcaacatggtaatgatagtatttcaaatttctaatcaatatgcttttcatccctcttctcacataaggttacttaacttgtt

SEQ ID NO: 636502 - DNA, 523 bp, Homo sapiens
caacactgaggaatccctgagtaccagcaaggtagagaaccagatgacaaattactccatatacggtaaacgaagtgatctgagatcaaggttgagaagttaatactcccttgctccactgagattcatagcacctgcacaaccccrtctcaaattatcctcctttcaccaaatttaggtgggaagaaagcgattaaaaggatttgcatcaaatgtaaaatcattaagaaatccttcaatttaaatgagattagatatattttttctttaggcaaataacttgcttggattcaaaaaataaatggaaccaaattttataaaaattaaaaaataaaatgagctagagtttataaagttgcatttccttggaaatatttttcatggataaatttatacttgcaactttaaattgtccttaatattagtcattttgaaaaataaccaatatattcaaaaatttggccagaagaatggtattattttacatttttggaaatctctttgatatcttaatcaaagacag

SEQ ID NO: 636503 - DNA, 594 bp, Homo sapiens
aaattgataaataagatagaatatctatgtaacgaaattatactctgcaacacggaaacatatgaaaataattatgctgaatataagacgtcagatgaaaaagagttcatagtgaatgattccattgtatataaaatttcagaaaatataaatgaatctatagygactgaaagcagattagtggtttattgggtttgggggatgctggggagtgttgagagggaagaattacaaagcctgatgagaaaatatttgggaatcatgtctgagctcattatcttgagtgtaatgataaattctcatcagatgattgatagatgacagatacatagataactaaatatgttatgtcaactatagctcgttaaaattattttgaatacaacaagatagtttgaacagaattctaagtacaaggtagaaaagaaatttatgttattggaggacaaaggaattggtgatcactgagaactggagcaggtaccggagatattttagaaagtatgagacttaggctgtatgttgaaggcaatgggtgtgttcatgaagataatttatgattcaaaaaatgggccctgtttttggatgatgtca

SEQ ID NO: 636504 - DNA, 570 bp, Homo sapiens
gaaagaatacgcctctatatggtgcaagcaaaaaacaattgtattcaatttcccttttgcccattcaaaactttctcacgaggctagttattttctgttcctgggtgacatctacagcagtccgcatgttgtagcctagtcgtagttcaggaattaaaatgtccagataatttaattgtctaaactcccaattttatttctggtcagtgatctttcttcatccctccttgttgtaccttttcaggtacggagcctgcaatgaaaaagggaatgtgtctccatcatttctattttgtaactattgcttctttttgtccccaggtttctatcctctatagcataagaagaattagaaaaaagagcagtgagcgaagaaacattatgacttgtctgttactgttgtgatcctgctttaggaaacgtttacatytgactctttcacgaagtcctactgcacttcccctgacttggataataaattgtattatttttcccttcccactcagtcttagatttctgaagatatatccctttggttgagatcatatcaaacctgcagatggtcctctt

SEQ ID NO: 636505 - DNA, 444 bp, Homo sapiens
gctcaggaacctgtatgttctgttttttgacttcaggagctgtatatatatatatatatatatatmtatctccaggagacatatgtattgtatatatatgtatatacatgtacatgaatgtatatatagatacatttatatcttatatatacattcatatacagatacagatatacagatacatatatctatacattcatatccacatacagatatacagatacatatacatatgtatatatctcaagctctctaggtgattagattaaagatcccatagctgacttcagttaaggctagggcaccctccattcttttttgcctctttgaatagagacaaaaaaaaaatccatagcagttcagcaactgtataaaaaaaaatcctcttagctctttaacctgaaaaatgttgtgctataaaggatatgtagctagagttcaaga

SEQ ID NO: 636506 - DNA, 444 bp, Homo sapiens
gctcaggaacctgtatgttctgttttttgacttcaggagctgtatatatatatatatatatatatatmtctccaggagacatatgtattgtatatatatgtatatacatgtacatgaatgtatatatagatacatttatatcttatatatacattcatatacagatacagatatacagatacatatatctatacattcatatccacatacagatatacagatacatatacatatgtatatatctcaagctctctaggtgattagattaaagatcccatagctgacttcagttaaggctagggcaccctccattcttttttgcctctttgaatagagacaaaaaaaaaatccatagcagttcagcaactgtataaaaaaaaatcctcttagctctttaacctgaaaaatgttgtgctataaaggatatgtagctagagttcaaga

SEQ ID NO: 636507 - DNA, 526 bp, Homo sapiens
cattctaggaggtactattaacaaagtataatttagtaagtcctatatattatgatataatttacaaatttgtactctagtcaccactaaataagcctaataaccaaactttcataaaagtaatgtataattttctctgattaaatacattattacagaaggcaaaagcagattttgccaaagtatattcctttgacactctgagttgcatatgattttcataaatacttttatgcattatattgagttcaaaatccatggcatatgtttaacattacatgttgaagaaattccaagtttacattcaatagttaaagtaaacaaatgcttagaaacacataaaatttttataaactgtcactacctaactgtcacctgtcartgtaaacattttaaaattaacagacatgtaatcactggctggagtgatcacatgaaaaccatggccagataaactttgggaaaatgaacataaatgtttcatgcagataaaagaagacaaaaaagaagatggtccattacaatt

SEQ ID NO: 636508 - DNA, 563 bp, Homo sapiens
tgtgttaggtaacatatatgtatataygtatatttacatatattaatatgtataatgtgtataaagcacaatggtttgaattagcattttaataacagcagacgtttgaataaagagttacaggaaaagaattcaagcttaagtgacatggaggaaatggcatgatgagcaaaaatagcaaaatcaaaagaagtacttatttgggaataggagacaaggtagtacaacgaattcaggtttattttggaacatgttacatttgatttactaaatggatccccaggaaggaaatttaggtagtcagaagtgaaagattagtaatgcataataaaataattggggaggaaagcaacatctaaattccaaaataactggagtaaaactgccaagatttttaaggcataaatatgtatatttctattaacacaatattaaagaaagactaaaattttaatggaatgggtagagcaaattctgcattttaacagtaatttagtaatttctgccagtgcttctattaaagcataggcaatatgtgttatgaatttataatatattactta

SEQ ID NO: 636509 - DNA, 561 bp, Homo sapiens
tattggttagaaatgcctcaagagcattctgtggctaagggttttgtattctttttgggttctgctcagtcacagaggaagttgtaataaaagttctctcatggaaagacacttaattttacttcagctactgtctcctcccactcgccataaaaagtttatgtaccacagaccataaagaatacaaccgaagacasagactcacagaacagggttgatgtaatctgtgctttgcaaacactcttcctatacgccatttgtggaaaagcacaataacttttcagacatctgtttttgaggttacaaaatccgaaaacatctacagacttcaaataactttgtaaaatttaacggaatctgccatattggaaactaataccagtcaaaatatattatcttaaagcaaccttttcttcttccatatattatttggacaattattccattatccatttgtctagcactgagtatatttactgtacctggggatgctccttagagctaaaataacattacaaattgagcaagattgcatacttgtcctttcacatgttcaagctt

SEQ ID NO: 636510 - DNA, 425 bp, Homo sapiens
ctgcaaattcattcaatgcgagcccagtcaaaatctcagtagactttgctgtagaaattgtttgttttaaaatttatatggaaatacaaagaacttagaataatgaaaacatcattgaaaaagaaaaataattttgaaggacttttcactatctgatttgaagacttattatacaagtttagtaatcaagaaagtgagtattgctgtaatcataggaaaacagatcaattgattatagacattaaatataaattcatgcatttatggtcaatcaatttttgccaaaggtccccargaatttcaactgggaaggataagcatttcaacatacgctactggaaaaattttatagccataggcaaaaaaagaagccttattttatgtcatacgtaaaaataactcaaaatggatcaaaaacctaaaac

SEQ ID NO: 636511 - DNA, 570 bp, Homo sapiens
gacaaactaagttaatctgacagagatactgagaaaagttatgttctcttcctcaagaatcaaatgtatgtagaattagggctgtcakctgccatcttgttgacttgtggaaaaaacctttctgaaattgaagccaaagagaagcagggagagatgagagataaagttctaacgacaatgtttagatttctgaatccagctatgtccatttgcaaaggtcaataaattctttgatttggcttaaattagtgtgaattggatttgtgtcacttgcaaaaaaagtgactggaaaatagcatttcattctgaaagcaacagttccatctgatgcctggcaaatccacacagatgtctcataagtacaacatcttaaaaaataaacttgttttcctctcccatattccatgtcaccaacaaacaaacaaaaaacaaaaaacactcccactgacattttgcttacgtaagtactgccacacattcacttgaaaatgcctgaacccatcctctcctctgttcttccactcttgctgcttaatatataatctcaatatttttttggctaacctactg

SEQ ID NO: 636512 - DNA, 489 bp, Homo sapiens
tcagctgccatcttgttgacttgtggaaaaaacctttctgaaattgaagccaaagagaagcagggagagatgagagataaagttctaacgacaatgtttagatttctgaatccagctatgtccatttgcaaaggtcaataaattctttgatttggcttaaattagtgtgaattggatttgtgtcacttgcaaaaaaagtgactggaaaatagcatttcattctgaaagcaacagttccatctgaygcctggcaaatccacacagatgtctcataagtacaacatcttaaaaaataaacttgttttcctctcccatattccatgtcaccaacaaacaaacaaaaaacaaaaaacactcccactgacattttgcttacgtaagtactgccacacattcacttgaaaatgcctgaacccatcctctcctctgttcttccactcttgctgcttaatatataatctcaatatttttttggctaacctactgcaa

SEQ ID NO: 636513 - DNA, 599 bp, Homo sapiens
cttcctattataatttgtttataatctctgttttttacagaaattgtcttctatattaattcatttacttattctaattctgttgccccttaatgggatgtcttattattcttttcctaggacaaaaaataataactagctttagttacaagaagcatctttagtaaatataacttgaccaaataaaacattcaatgtaactaccctgcagagactatataaaaagttctggtaaaacaaaatataaaaataaaaataacctaaaatatacaagtaaaacatacagaggcatttaaaagtagtttaaaataatgtaagtagtagtaacataagtagtttgaaaatgtattgaaatatgctcaaattaatatcaacagaaaggcaaataaaaaagcaagaaaatattatgtgttatccataatattttaaaaatttgatttgaaggataacattgcatcttattacagttattggaaaatggggatctcatatggtttcattgaaattgtaaattggtcatttgtcatacaytacaaaataaatatttgtagaacacataagagaataaaaaatatagagtcactgttttcaaaaatttt

SEQ ID NO: 636514 - DNA, 543 bp, Homo sapiens
ttatctggtagcagcctgcagtatggtttgaaaacggctttgacaagactacctaagtaggctgttgtaataatccagatgtgaggttataatggaatagactagagtgtgagctgtgggaatataaaggagaagacaaataccagagacagtaagaaggaaatcgcaggctgggttaaataaygcatgtggggaatggtgaaatattaggcaagagagactaccttggattacacagagcctttaatgcaagttcagggcctgtgtattttaaatagcaaggagccaaaaaaaagttttgagcataaaaggaagagtggttgaagactattaatagtgaaataaatatttttatcttattctacagcaatgaaattaaaatataattctaaaaacccaggaatctaaagtctcaattccataaatcaggaattcctttcctcaaagtgtaacacaaagttgtttatttgtcatattcgatcacagccagattagcttgtttctgccattgcgtgtttaaaaggaagtgtacgtaaatgatta

SEQ ID NO: 636515 - DNA, 387 bp, Homo sapiens
aagtttttttattttcaatattatttatttagatataattccacattgcctgaagattttaaagaatatcacaaagaaactcatctacctagattcatcaattttatatatattttatcatcctacccatgtatctatctatctatctacctacctacctacccatctattttctgaaacttggagacagtaagtctctttaaatactgcactgtgtattttcttaggtgtccagttctttttagaatgtggcagaatcagaaatttgtccctagcttttgaatctagtgacaaaacccagagcaactaagagtctaactcagycatactattacaaaaacattctataaagtataattttcctaaaaagcaaactgataaacagta

SEQ ID NO: 636516 - DNA, 569 bp, Homo sapiens
tgacctaggagaataaaaagcaacagaaagccaaatatctacaaaaaattccatctcttagatagtccagggtaaaaccattctaagcataacttcaatgctaagatcttccttttccctcgtcatctataagtgacacaatttgcaattaaaaartagttgatttagcaccttctacgtagcatgcattactcagtcactttatacataacacaatttaatcttcaaaacaatcctatgtgtaactaatgactgagaagaaatcattattgaaaaatatgtgaccagaatataaatattatatactagaatataatcataatagaatataaatataataagatactaaatacttaaatataaataaaatgacatgatacacacataataatatctcactattcagggtcattcttttaaaatcatatttcttttctcatactattgggtgtcatttggagaaaaaaaattaagaagttgcttcagaagttctcctttcttaaacctcacctggtgtcttctttttctgctacctgtaacagatagtatggctggagctccagtgatta

SEQ ID NO: 636517 - DNA, 569 bp, Homo sapiens
tgacctaggagaataaaaagcaacagaaagccaaatatctacaaaaaattccatctcttagatagtccagggtaaaaccattctaagcataacttcaatgctaagatcttccttttccctcgtcatctataagtgacacaatttgcaattaaaaaatagttgatttagcaccttctacgtagcatgcattactcagtcactttatacataacacaatttaatcttcaaaacaatcctatgtgtaactaatgactgagaagaaatcattattgaaaaatatgtgaccagaatataaatattatatactagaatataatcataatagaatataaatataataagatactaaatacttaaatataaataaaatgacatgatacacacataataatatctcactattcagggtcattcttttaaaatcatatttcttttctcatactattgggtgtcattkggagaaaaaaaattaagaagttgcttcagaagttctcctttcttaaacctcacctggtgtcttctttttctgctacctgtaacagatagtatggctggagctccagtgatta

SEQ ID NO: 636518 - DNA, 609 bp, Homo sapiens
tttgctagtggaatcctgtctagcacccagttacacttcagtggagccaaggttctcaattcctcaatcacttacaccagccaggggctcctctgatgggcacacgygcttttcccaccagagccatgattctctgctgatttgtgctgattctacacacttctggttgtcagctcatatttggatccaagcagtgagatctgttcagactccagggcccattaaacttcatcatcttgaagttcactggcatagttattattttcaagaacacttaaagtatgaagcccacattccacatttgctaagtatagctttcatcactaagaaaattttcatattcaaagtatgagcttagatttgatctatgctttatgaaagaaatcattagagagaaagtctccattacagttgaatacattctctttaatttgtgttttttcaagagattagttatttccaaaaagaagaaacattatattgagaaaccagaagattcgcctataagataactttaaacataagcatcattacatcttattctggcctcacatcaactccagctgatgctctggagaacaggaaggccttcataacaatgccttttgt

SEQ ID NO: 636519 - DNA, 579 bp, Homo sapiens
tacacttcagtggagccaaggttctcaattcctcaatcacttacaccagccaggggctcctctgatgggcacacgcgcttttccyaccagagccatgattctctgctgatttgtgctgattctacacacttctggttgtcagctcatatttggatccaagcagtgagatctgttcagactccagggcccattaaacttcatcatcttgaagttcactggcatagttattattttcaagaacacttaaagtatgaagcccacattccacatttgctaagtatagctttcatcactaagaaaattttcatattcaaagtatgagcttagatttgatctatgctttatgaaagaaatcattagagagaaagtctccattacagttgaatacattctctttaatttgtgttttttcaagagattagttatttccaaaaagaagaaacattatattgagaaaccagaagattcgcctataagataactttaaacataagcatcattacatcttattctggcctcacatcaactccagctgatgctctggagaacaggaaggccttcataacaatgccttttgta

SEQ ID NO: 636520 - DNA, 475 bp, Homo sapiens
gcagtaaattcccaattagggaaatgctatattactgaacaaatatataatttagtgtcatagccagtgtgacaatgttttaaaattatgatttcactataactagggatttatataattgatcacccaaattttaacacttttgcaaatgartgtgggcatgaacggtcatcttaactatatccacatgaagtgaggggttggcagtgcaatttaggagagtctgggggtaaaaacatcagaataaaaataatgactaattatgtgcttataatccccttaggacataattataatataaaatagtttttaaacttagagtaggctttttaagagtttgagtactctatcaaaggttaaaaatggtttttcttaactactttcattgtctactcaacgttaagcatggttccataaattagggacatgctggttagacaacttgaagtgggttccattctgcagagctctttag

SEQ ID NO: 636521 - DNA, 622 bp, Homo sapiens
aaaacaatttagtttagtggagacaaaacacactggtggtcagaagtcctgggttttaggcccagttttgcctcttactagctgggtttccttgggtgacttatttaacttttagagcttcaatttcctagacaacgaaacaaaatacagcatttttcctatgctatgcatatactaagatatcaagcttaaacctattttaatcatacattgctaagagctgtgagtgtgcagatttacaaggctgcacatgtgaggcaaaagaggaaactcatgatcaggacagagccgaggtaagtttgagttccaagtcaccaataattagtaaaccttgggcaaatcacttagtgtctggcacctcagttttctcaatacaaacatgaaaataaaaatccttccctaaacacatttctccccatttccsaaaacttcagaagttaatgagatcgacctttgaaagaaatgtgtaagctgtaaagcattatgcaaaagttagtaattacataaggaagcaattaaaataggggtaatatgttttatagcttaagaaatacatcccacagataagactgtctatacatattgtatccagcaatgattattcatgcttcctggagatatg

SEQ ID NO: 636522 - DNA, 538 bp, Homo sapiens
gtccagggactaccctttgagaaacactgccccaggatgctttagaaaaatgtgcatggtaaaagatccagaccttggcctgctttcctcccatcttcatgatccctgaaacactcacgctggtcttcctgcaaagaagaccagcaaatagcaggacgaggggaggagggcrgggaggatgcatcagcagagagcccaggatgtttcactagcaccaaaggctcaagactagccgtccaagattagccttttaatggggttcttgtctcccatgcatccctgcaggcctcccacccagaggagaatggctgcaggaaatcactctacagtgacagagttcattctcaagggtttaacgaagagagcagacctccagctccccctctttctcctcttcctcgggatctacttggtcaccatcgtggggaacctgggcatgatcactctaatttgtctgaactctcagctgcacacccccatgtactactttctcagcaatctgtcactcatggatctctgctactcctccgtcattacc

SEQ ID NO: 636523 - DNA, 568 bp, Homo sapiens
tctatttttaaaagaagaagaaacagaaataaaaattatttttcctagacccacgaccctcaggtacataccagtgaacccatccaagaagctctggatcagacagagctagccactgaaccattgaatagagagacaggcaagttcacctttaataattgtgaggtcttgggaaagactatctacatgtttaaaagttgtaaattaagctagcaaagtgttaaatattttccttcctcctaccctgatagatataccttcataacaagctagatgtccaggttcaaatttagaaatctcagaattctaagagttccatgccagaawgtggtactaggaaagggctcttcctggcacctggcattctccccacagacacagctttccacctctgcttcccactccccattgtgtcccattccacaagggacctcacatgtacacatgtatgggcaacctggtattcaaactcttggtccatacacctgcacaaagcaacccctgactgtcccttttatctagggttgaacagccagtagtggtctgccttcaggacattgttctgggg

SEQ ID NO: 636524 - DNA, 589 bp, Homo sapiens
tacatgacttttttttttttgagatggagttttgctcttgttgcccaggctggaatgcaatggtgcaatctcagctcactgcaacctccacctcctgggttcaagtgattctgctgcctcagcctccgagtagctgggattataggcatatgccatcacaccctgctaatttttgtatttttagtagagacagggtttcaccatgttggccaggctgttctcaaactcctgacctcaggtgatccacctgcctcggcctcccaaagtgctgggattacaggcatgagccactgtgctttgccagagtttacttttcttttatcaagtaggaaaggaaaaaaagctagaaactaacatcttgaggactagcacagaaggaagttttctgaggtctttgaggaagttggaaggaggtttctctgggaggcagttcttgggaacaaggctcgggtcttgatgcctagttctctcgattccttaggccctagagggagtgcatcctctggctgtagcaggatggtattgctatgtttggcctaaatagtttggcattatcttttwattactgggtagcagagtgttttagaac

SEQ ID NO: 636525 - DNA, 635 bp, Homo sapiens
tcctcttgtctaacatagacctgctccttaagatcacagatttcattatatttctaccctctttgggaacatgattcatcctggtctcttttggtaaaagtggatcaaggtgattcagtgcagcccattggttttggttattaatttgatctcagtatattgaaagctcaggagctcagaggactgatgtttactaagaggtgtcaggctagttcaccacctgctaggttaaatgacgtttcaatttcttttccagatatttaatgctacaagggagttgtctaacactgcggcatatcagtctgtccgcatcctctcygtctctcccattcaagcagagcaggagctggaggaccttgttgcggttgacttgcagtggtctaagcccacctcaggtatgtgacggcttgaacgtgctgtctcttatataatgggttagcgccctaagtggaatctgtaagactgaatttggttcttatgtgtctatttattattactcatgccttttattcctttcttattgactcttcatccttcctgatggtgactatttcaggtttcttcccaagactaccaacaaatcttccctcttgctgtggggaaatgagtcttccttcaacatcttcagtgaaaat

SEQ ID NO: 636526 - DNA, 661 bp, Homo sapiens
taagcactttatatatataaattatgaatatattgaatatatattattatatattaatatattgaagtgtagatattaaagaccatgggtgaagacactacatttcagagagacttagtaacttgctcatgagcatgactagtaagtggcaagtctggcttcagtgtctgtgcacctaaccattgtgctgtattgcctagaagaataaacaatccaacaggaagaacaaatgttataaacatgtactcaaagaaatgtatcagtatactgattatgaacacctgcttaggaaaggctggatcaggaagaatacytggggagggaaagggctagtgaatacaaatcccgatactaacatcaatgtagagatgagcagtatgtgacttgctttcatggaccatgtctcattcacgctgggaagccctgtgggaggaggatgggcttgagctctgggtatagtttgggtaaaagcttgcctgtgggggagtgaagatattcaactttggaacaggaagaatggcctgcagtagagtaggagtgagcgttagaccagatctctgggggtggaagggataatcccgagggtgtgggcaagtgggcttctcacacgcagcagctacaggataaattcatataaatattctacagagaaatttgagaa

SEQ ID NO: 636527 - DNA, 581 bp, Homo sapiens
tgttagttaccttgtttttttgccttttctcaagaatttcatccctgtgttgtctactttccaagtattgcaaatagttgctttatacactttttccagcctttttttttctttctttttttwtgtggtcagaggggtaagtgcaataatagctataccatcacacttgaaataaaaagtctcataacttatgtttccattatttgtgttttacattccagccaaaatgaaggtcaggtgagttaatggatgaggagagattggaaatgcggagacttagaagagatctgtgaccttgggtgaatggctttacttctttgaactttttagaggtctttgcctgtaagatgagggcaaataatagttctgtgaatctatcagttcctggcattggaaatgcttgggaagattttaaaaaaacacagccaccatatccatatctatggagattctgattccaaaggtatggttggagcccagcatttctttttaatgaatattttagataattgtgataaccagctaggtttgggaaacactggatgagatactctctcaagtcttttcgggtctaaaatttt

SEQ ID NO: 636528 - DNA, 536 bp, Homo sapiens
gtgtgaagaaaatgattacctatatctcaatgtggtagtttgagttattggtcaaaattcgtcattcatctagtagtattatatatccattcccttgccatggtctcacagaagtagggtatatttttccttgcctatgactgttggcttggccaggtgaactattttggctaataggatattagtagatgagatgttagcaggagcttggaatatctttgcatggtatttgccctcttyggcttctgccattgccttgagaagagtccctcctgggtaaatgctgccgctcccaactaattctcaatatgaacacacgaggagcagtgttcactgtgcagagcaagcagtgcggcccagctgagcccagacaagacgaactaccacaatcaatttgtagacatatgagaaacaaatattccttgttgtatgccaatgagattgtgtttggttgtataataatagctaactggtctactccaccattcggagaacaggaaaggagaatattgtctggaatatgaaagtctcttcca

SEQ ID NO: 636529 - DNA, 541 bp, Homo sapiens
ccaccacagctggttgctggaagacactgtctttgtctttgctttgtgaactctctatgaccctggtttcttcataatatttgttttggaagccaagacctatgcagagcatctgattggctgagatggggtggtgtggttgggctgtggattccaggagtctgagagctagtgtctggtcttactagtgggaagatttcaactaagattcacacaagggcagattccccagtgagaacagggttctgatactgagaagccaaatctctcttgatcytagccaaaaggcagagaagcaatgagaagccagatagtgactgcacttccttatccttcgggtatctgaatttcacttcttcagagaggctgtaccttaccttagaaagtcagttcagtttccccagttaatgagtccgtaagaccctcaacttacctttggagcacttaacccacttctaattagttataaataatgacatctaggacttccttctaatagatgtttggcttggggttttacatgtcatgtagaggtaatgta

SEQ ID NO: 636530 - DNA, 637 bp, Homo sapiens
cttttcctttctctctgttttccctttccatccagagtcaaggttgagaccagcctgtatcctcaccatctccctgaagggacacttcttttctggctcattcactcaggctttacatacttttggcgttggtttatgagggttgtggggaggtaaggtggcctctaattctacatccatcctgcctgggctccaggcttcatctctcgcccctcatgtgtcaaaacccaggctgcaggcctcctasgactggcagacacttccaagggaaacagtggctccagccttatctatactgttagatgctgtgcttctgtctttattttttacttctaaaatctcttatttttagaccagctaagccaattggtgggttagtatgtttgttattaacattttcattcagcatttttctctgttttagagggaggacatttttttttttcctgaacattcaaactgctaagtggttagaaataacaattcataaaattaataaatagacttgttttttgttttaataagcacaaaataattccttctctcttatgctttctttggctatttcttggtattgggtgaaactcatgggagaaaaataatggggaaaaaggtcacattttctaaaataaagtca

SEQ ID NO: 636531 - DNA, 431 bp, Homo sapiens
gaaaacatgagctcatctcatctcaaatcctagtagcctgggccaacaatcacaagttaactcctatttctgaaaaatagagttataatatcaattttcaagactgttttaaaaataaaaatcaataatatacatggaaatgttttccagataattcagttgctgtacaagtatgagttttcattagccatctggactttgttcaaattttttattgaacctgaggtcctagggtagttatccttaattttgctacacrttatgatcacctacggagccttaaaaataattacatcaggtttcaacctataggaattctgtcttaattaatttgtggcattttctgggcattgagctctgtgtctctgggtatgcagagaagttcagccatagaagaaagtaaagattttgttatttgactgttttgtgta

SEQ ID NO: 636532 - DNA, 466 bp, Homo sapiens
caataccagttaaaatgccagcagacatgttgacagaaattgacaaaataattctaaaaattatatgaaaatgcaaaggacctagaatagccaaaacaactttgaaaaagaagaaagttggagaacttacactatttgactccaagaattatrtaagtttcagaaattaaaacagtttagtagagaagtaaagacaggcaaatagattaatagagcagagcacagcacccacaaacagacccacttatagggtcaattgatttttttttttacaaaagtgctaaagcaattcaacaagagaaaaaaaatttgatgaatgattctggaacaactaaatagcaatatataaacaaaaatgatcttttaacccctatcttattctatacatatttaattcatgatggatcagagacttaaatataaaatctaagcctacgaacatctagaagaaaatcagaccttagaa

SEQ ID NO: 636533 - DNA, 437 bp, Homo sapiens
tcctgtacaagttgggttggaagagcaagaagctggagtcttgggaggccatcaggcagttagctgtgttcatctaccctcccttcaaaagaagtcatctcaaggagtgaggcctccagcttagatggacttgatcttgactcactgttgagtatcctagcacatgccccaaacatccttgtgatgtttgcaggatttgtcacctttgcaggtattttcttgccctaaaatctattggtattttattagaagatatacaggcataccttggagatactgcaagttcagttctagaccaccacaataaagcaagtcactcagattttttggtttcccagtgcatataaaagttatgtttactgtagtctgttaagtgtgtagtagtgttgtgtctgaaaacmatgtacataccttaatttaaaaatacttcattggta

SEQ ID NO: 636534 - DNA, 556 bp, Homo sapiens
tgcttgttattgttgcaaaacaaatgtgtattgactcttctgcctgctagacctgagtactaaatgagttccaatcctatgggcagaaacttcaaccctgtggttgacactggccccgtctaggaacccaattctctttaggctaattttctgctctggtgcttcatgagttgctacaagatctgacctttcataaaaaggtctttatggaaatgctcaaatgccttttaatctttataaatagtgcagaaataaccctagtatttagatgtgtcttcatttggaaggaatacatgtgtgtagtgacttggtaaatatctgtacataaatgagccaacccttagcacccaacacaaagtgtctcccccaaaaagaatayatataactgtcaaatattgtatgatatggtatgttaaatatctgcttctgtaggaaatttgtttgatgtaaaaacgtgtgttcaaggaaatggttaataaaatggaaggagcagaccacctgtttgaactggtcattctgatatccagaatggttttggtctttctgccaattcgtt

SEQ ID NO: 636535 - DNA, 480 bp, Homo sapiens
cccttctcaccttggtctgctattaaaatgagggcattgattgggaaggaatgggatctgcacatttggaatagggccatatgggaacatcctgatgaagctggggatgttaaactcctaaatttgactcactcttttttgccagtagaagcagttcttccacctctgaggaggttaactctgctttgcctgaagaacctgtaatgacctcccttgaggtagttaccttgcaagacattgccggttttcctcaggaatccgtgaagagctctggggttgcttttctcttcaggtcagagattgcagtgggagctgttgccactgactgggggtccttagctgcagcagggatggytggatctaggatggcaggggctatgtgatcaccaaagagtaagtaggtgtgttgccatcatgggggacagcggagtcaaagcaacaatctgaacagcctgacttgggggtcctaattgggtaggt

SEQ ID NO: 636536 - DNA, 628 bp, Homo sapiens
ggttacaggcatgagccaccatgccgggaccaaaacttattaaaacatatatatcttagtgtctcctctaaaaggagttacttttccagaactgtccctagaatatgtttgctggtgaaaaaaagaaaacaggtgtcaggacctacagttccatggcctacatcttttcattctttcttctctctgttmcaacgctccaggaaagcagaaaagttgtactggttctagtgctgaacccagataaaagctggatgcttcaggaaaagactttttgggacaaatatcaagaaacagatccatttaaacctctgacctggtcgaaagcagtggcatccgactgctctttccacctctggtctggtctcaaagtccctccaaaccatcccccattatgccacccaagtagtgtcctaactcttatctggtcatgtcctttcctgctccaagtcctttacacgcccaccagagtgacttggtcaagaagtaggaaaaccaaaggatttttcaaactacatgctattactgcttctgtccccagacagccatggtaacaggtcatatccccaagtgcagtactgggagagaaggaagactgctgaagaactgtgaaggccattagcactacttc

SEQ ID NO: 636537 - DNA, 596 bp, Homo sapiens
ttatcctctgagcctcaggctgcccactaaaaaaatgtgaaaactggccaggtgcagtggctcacacctgtaatcccagtactttgggaggccaaggcgggaggattgcttgatgaggccaggagtttgagaccagcctgcgcaacacagcaaaacttcatcagcacaaaaagtttaaaactgagacaggtgtggtgacacacgcttgtagtcagttactcaggaggctcaggtgggaggatcaccttccagaaggtgaaggcctcagtgagctgtgatcacatcactgcactccagcctgggcaacagagcgagatcctgtcattaacaacaaaaaaaaaaaaataggaaaaaaattagtgaaaagttaccattctgcctacttcatggaggtaattataaggataaagaagtcagagtatgcttaaagtacttaaactgaataaactctctaaggaagtttaatgtccatttgatgaatatgattctactgatcaataataaaaatgctcactgaatattttaggtctgtccaaccaaacattgtctggtaaggagaaaaaggaaaaacmatcaatggctgtgtaattgaagct

SEQ ID NO: 636538 - DNA, 544 bp, Homo sapiens
catccaagggtactctccagtttggctgtggagacttgagcaagccctaaagtcccctgctccctggacttctcctgggttgtgcttttttgggggcaacataccttggacaaagctgagctgacagctaatgtttattagcctcctacctaagtcagtcactttgctaaattcttcacctgtggtaactcattttgattgttataacatctcagcaccrttattcccattttaatgatgaggaaactgagtcatagaggatacagacttgcccaaaggagagccaggattttcacaccccctcctcaagctgggcctgccctccaagtgcttgttatatacctccacgggtgtcagcccagatgactcctcacccatccaccacctgcagcttgagatgttaactattagagctccattcttttggttcaaaacgttgatacttacttagatgttccctgagaggagtgtttatttctgagtaaggggctttgttgaaagagggggttagagagagcaagacagcacttgagtgcactggcag

SEQ ID NO: 636539 - DNA, 619 bp, Homo sapiens
caacaggtgaggaatgggggaatacttatatcagttacttggacacagtccagttaactagagaggctctatgtgttttgaagatctagttccttgaagctatgtaaatatgttttaatattaccaagatgagcagatggcattttttttctaagggtcaggggccagggtggtacagggaagctatttcccccacaagggaaagagggggtttgtcagaaaaccagacaatggccagaggccagggacctattgttttccagtcacaggacataaatcctcttgggcccaggttgaattgctcagggtctcagtatccaggaaatgaagctgtgagaagagtgaatctgaacatgagcccaggacttccaagttcattgagaattcaccaaggagccccggaattagacaggagcagtaaggagtaaaaaaaaagaaaaaaaaaaagaggtattcttyagcattatggacattgcatctgtaagggggctcttggcgacaaaggaggcttcacttgtgggcagcgtggggtgtcattctcagggaaagagctgtctgcatcagcttggtagaaaacccacctgaacttatccaaataggttctactaggtaaggttgt

SEQ ID NO: 636540 - DNA, 594 bp, Homo sapiens
ataaatttttaaaaataaactcagtgtagtctaagtgtacagtatttacaaagtccacagtagtatacagttatgtcctaggccttcacattcactcactgactcacccagagcaacttccagtactgcaagctccaattcatggtaagtactctggtataggtgtatcattttttatactgcatttttactgtaacttttccccatttaggtatgtttagacagaaaaatatttacatgttacaattgcttacagtattcagtacagtaatgcgctgtacaggtttgtggcctaggaacaataggctgtaccatctaggtttgggtaagtataccctatgatgttctcacaatgacaaaattgcctaactatgcatttctcagaccacatctctgttaagcaacgtgtgactgtatacaagaactcttaaaactcaacaataagaaaacaacccatttacaaaatgggaaaaagatctgaacagagccctcattaagatctacagatggcaaaaaamacagaaaaagatgttcaatgccgcatcattagaaaattgcaaattaaaaacactaagacactactacaaacttatt

SEQ ID NO: 636541 - DNA, 581 bp, Homo sapiens
ttgcggtgagccgagatcgcgccattgtactccagcctgggaaacaagagtgaaactccgtctcaaaaaagttgtctgaatccggagaatagttacaaagattatcaacttttaaaatgaaacatatgttaggttaaaatctaacagaaaagggtttatcatataagacaatttggattaaacctattttacttgctaagaaaagatgaattattaaaaacagtaaaatagggggatctcctcttttggctttggaggccccccccttctgtctctgtacaggggagcttcttccttctcccttccttcttgccccttcttgcctattaaactctctgctccttaaaaccacacacaaaacaaaacaaaaaacagtaaaataaatgctaaattttgctaacaaatcaggtggcatgcagatcactgaataagaaaaaacaaatataattatacttaaaataattatatctccatttatcaacgggagcaatgtcaaacagatgactactaccatggaaaatcacataagtctaacaattatytgaccacaggaagttatgaatgatctaccaatttttaag

SEQ ID NO: 636542 - DNA, 604 bp, Homo sapiens
gtggggaggtgccccacacttttaaactaccagatcttatgtgaacttagaaacgagagctcacttatcaccaaagggatggcccaagccattcatgagggatctgctcttatgatccagtcaccactcatcaggccccatctccaacactggggattacaattcaacatgagatttgggtagggcaaatatccaaactatatcactttcccttatcaaccatggcttctcagatttaaaggtagatttcctaccacccttatcagtgggatacaatttactttgtaaaagcaaacactcggggagtagtcagcaaagagcaattggccacttacataaaggttagatgtcaggaggtaataagcctgcagaaagaattgtaaaggcagaaatgtcacagcctggcttgtaactcttttttttcttcragacggagtttcactcttgttgcccaggctggagtgcaatgacatgatctcagctcactgcaccctctgcctcccaggttcaagtgattctcctgcctcagcctcctgagtagctggaattacaggcacgcaccaccgcgcctggctaattttttgtatttttagtagagacgagg

SEQ ID NO: 636543 - DNA, 522 bp, Homo sapiens
gagccccttccagctgggtccccgctggaggccccggcaggcgatgcggaggcagccggagagaggctgggtgctgcccgtggacactacctgcgctggtgcaaccttggttctggtggagcgatagcgcacacgggaccgcaggtgtcgggacgggaatgcttcccgctgaggccggtttctgcggcctcagygcgctccgcctccgctctggatagtccctgcctcttcagttgcgccttttgagcagaaccccgccttatgctgagattttgcccagtacgttagacgtgggctggtttccctctccgaatcctgtagtcattcttacttctcttttgctacattctgggttatgtgattttcattctgggcttctctctttctgcttcgtttcgctgtaaacggcctgaggacaaagcaggtctccctgacgtttgcgcccctcgggaaacccagcccctagctgtgcacgggagcccagtgagcgctgaaatcgacacattcatggagaaaggcagt

SEQ ID NO: 636544 - DNA, 522 bp, Homo sapiens
gagccccttccagctgggtccccgctggaggccccggcaggcgatgcggaggcagccggagagaggctgggtgctgcccgtggacactacctgcgctggtgcaaccttggttctggtggagcgatagcgcacacgggaccgcaggtgtcgggacgggaatgcttcccgctgaggccggtttctgcggcctcagcgcgctccgcctccgctctggatagtccctgcctcttcagttgcgccttttgagcagaaccccgccttatgctgagattttgcccagtacgttagacrtgggctggtttccctctccgaatcctgtagtcattcttacttctcttttgctacattctgggttatgtgattttcattctgggcttctctctttctgcttcgtttcgctgtaaacggcctgaggacaaagcaggtctccctgacgtttgcgcccctcgggaaacccagcccctagctgtgcacgggagcccagtgagcgctgaaatcgacacattcatggagaaaggcagt

SEQ ID NO: 636545 - DNA, 590 bp, Homo sapiens
cacatgtacacccagaatctaaaataaaagttaaaaaaaagggaaatggcagaagtcaaaaaaacactgtgacagaaatgaagaatgcctttgatgggctcgtggtcagactggacatggccaagaaaagaatcagtgacttgatatgtcaacagacagttcccacactgcaaagcaaagagaaaacatagaattaaaaaaaattgaatggaatatccaagaactgtgagacaattattaaaggtgtaacatatggacaacagaaacactgaaaggaaaagaaaaagagaaatgagcagaagaaaaatttgaagtaataatggctgagaattttccaaaattaatgacaggcaccaaaacactgatccatgaagctcagagaacaccaggcaggatcaatcacaaaaaaatccacacctcggttttgttgacaaaaagagtgaaactctaaaatatttgaagagatttattctgagccaawtatgagtgaccatggcccgtgacacagccctcaggaggtcctgagaacatgtgtccaaggtggttagggcgcagcttggttttgtatattttaggaaggcgtaagacat

SEQ ID NO: 636546 - DNA, 401 bp, Homo sapiens
aaagggcattgacagtatttttattctttttttttgagacaagtctcactctgttgtccaggcgggagtgcagtggcgcgacctcggctcactgcagcytcctcctcctgggttccagtgattctcttgcctcagcctcccaagtagctgagattacagctgtgtgccatcacgcccgtctaatttttgtatttttagtagagacggggtttcatgttgccaggatggtcttgaactcctgacctcaagtgatccacccgcctcagccaatcaaccagtatttttcttgttagtggcagcattttccccctgccggctctgttcccgccacactggtctgcttgctgttctttggcgatgaccagtcactcctgccctagggcctttgcactggctattcc

SEQ ID NO: 636547 - DNA, 327 bp, Homo sapiens
ggcgcgacctcggctcactgcagcttcctcctcctgggttccagtgattctcttgcctcagcctcccaagtagctgagattacagstgtgtgccatcacgcccgtctaatttttgtatttttagtagagacggggtttcatgttgccaggatggtcttgaactcctgacctcaagtgatccacccgcctcagccaatcaaccagtatttttcttgttagtggcagcattttccccctgccggctctgttcccgccacactggtctgcttgctgttctttggcgatgaccagtcactcctgccctagggcctttgcactggctattcc

SEQ ID NO: 636548 - DNA, 327 bp, Homo sapiens
ggcgcgacctcggctcactgcagcttcctcctcctgggttccagtgattctcttgcctcagcctcccaagtagctgagattacagctgtgtgccatcaygcccgtctaatttttgtatttttagtagagacggggtttcatgttgccaggatggtcttgaactcctgacctcaagtgatccacccgcctcagccaatcaaccagtatttttcttgttagtggcagcattttccccctgccggctctgttcccgccacactggtctgcttgctgttctttggcgatgaccagtcactcctgccctagggcctttgcactggctattcc

SEQ ID NO: 636549 - DNA, 401 bp, Homo sapiens
aaagggcattgacagtatttttattctttttttttgagacaagtctcactctgttgtccaggcgggagtgcagtggcgcgacctcggctcactgcagcttcctcctcctgggttccagtgattctcttgcctcagcctcccaagtagctgagattacagctgtgtgccatcacgcccgkctaatttttgtatttttagtagagacggggtttcatgttgccaggatggtcttgaactcctgacctcaagtgatccacccgcctcagccaatcaaccagtatttttcttgttagtggcagcattttccccctgccggctctgttcccgccacactggtctgcttgctgttctttggcgatgaccagtcactcctgccctagggcctttgcactggctattcc

SEQ ID NO: 636550 - DNA, 327 bp, Homo sapiens
ggcgcgacctcggctcactgcagcttcctcctcctgggttccagtgattctcttgcctcagcctcccaagtagctgagattacagctgtgtgccatcacgcccgtcwaatttttgtatttttagtagagacggggtttcatgttgccaggatggtcttgaactcctgacctcaagtgatccacccgcctcagccaatcaaccagtatttttcttgttagtggcagcattttccccctgccggctctgttcccgccacactggtctgcttgctgttctttggcgatgaccagtcactcctgccctagggcctttgcactggctattcc

SEQ ID NO: 636551 - DNA, 534 bp, Homo sapiens
acctccaaccccagttaagattcctcacttaggcagtagagcaggcagcaggcagcaagagcacaagcagaaacaggagcaggggactcaccggcctggcgccccccatggcatggaagcacggagacactggatgggggaacgtcattatttttttcaaaatacaagttcacagaagagacacaccatacctgctcatccgtgcaagtaaacatgtactccaaatgcaaatcaaaggagctggcattgcttgcgtgtgtgtctctccctcacattaggtataggaagcgggagcttccagcacaacggatgagctgcagccactcaatgggtgaccgtggatatttctggctgtgtggcctgayctctcccatctcacaggggacatcccagggtcacaggagatgctaggggcagggaatgtcctttattaagtgtaaatctctgcacaggcaggattctgtttctttcctcaaggactctgtgattaagaactagaggattaggggccagttatgaggagaaacaggatca

SEQ ID NO: 636552 - DNA, 518 bp, Homo sapiens
tcaggggtccctgcaacttccgggcttggctcctgttgtattactctccaatgaagcctacctagacaatgaaggcatcagcacaaaatataaaaagaaacagtataatatcctaagggagatattatattactacaaccataaaataagaacagcatgttattaaaaataataaacaatgagctcagaaaagactcactgtaaattaagaatgatacacaggccaggcgtgatatggctgacatcagtaatcccagcactttgggaggctgaggtaggcggatcacttgaggttaggagttcaagaccagcctgggtaacatggtgaatccccatctctactaaaaatataaaaaaattagccaggcatgatgacgcatgcctgtaatcccagctactctggaggctgaagcaggagaatcacttgaacccaggaggyggaggctgcagtgagccaaaattgtgccaccgcactccagcctgggcaacagtgcgaagctctgtctcaaaaaaaaaaa

SEQ ID NO: 636553 - DNA, 618 bp, Homo sapiens
ccttcctacttttccatgatcacaaaagcaatattaagttatttacataccatttctrtttttactttctatactcagcaataacaagtttggccaatcatttcacatataccttaaaagacttaaactatactccctgtatcacaagccacttccatgtaaattgctaggccagcttcccttaaacataactgatgttagtctttcccctcccttgacaataaatctgccttcctctttcatccatctcctggcttaacattcattttgaaccctttatctcactagcttcttttctctcttgaaggtatcctatcaatttctaatccagcatacatatcatacccatcttattccatctccctgtacaaaccatgtctcttccttctcttatcctacagcttcttcaaagcctggctccaaaacatgcctgttcaggaagttgcagattgactccaatggctggtgatctcctatctaaatgtgctcaggttacatagcattaatatatcttcaatttgttgcctttaggaacaatttcaagatttcctccaaatcctccagtatggtgttttgcccagaaatgtcactttaataagcaaaaggaactcatatttc

SEQ ID NO: 636554 - DNA, 618 bp, Homo sapiens
ccttcctacttttccatgatcacaaaagcaatattaagttatttacataccatttctgtttttactttctatactcagcaataacaagtttggccaatcatttcacatataccttaaaagacttaaactatactccctgtatcacaagccacttccatgtaaattgctaggccagcttcccttaaacataaytgatgttagtctttcccctcccttgacaataaatctgccttcctctttcatccatctcctggcttaacattcattttgaaccctttatctcactagcttcttttctctcttgaaggtatcctatcaatttctaatccagcatacatatcatacccatcttattccatctccctgtacaaaccatgtctcttccttctcttatcctacagcttcttcaaagcctggctccaaaacatgcctgttcaggaagttgcagattgactccaatggctggtgatctcctatctaaatgtgctcaggttacatagcattaatatatcttcaatttgttgcctttaggaacaatttcaagatttcctccaaatcctccagtatggtgttttgcccagaaatgtcactttaataagcaaaaggaactcatatttc

SEQ ID NO: 636555 - DNA, 556 bp, Homo sapiens
ctcattttcttatatttaaagctacttccttaggtatagtatacatgaatttttaatgtttaatatatcattggaccaaaatggtagaactattctaagaaagagtagggaactgacatttaagcacctactgggagccatgacctgtgtcaaacacgtkttttaattctctcaatgatctattgagtgttcatctctgttttatagataaagaaagtgagcatcaagcaggtaaaggaatttgcccaaggttagaaggctaataaatattggatcgatccaagatttgagcccaggtctgtctgaatctaaaccctttatagtctctaaactatactgtctttctggagttgaatatgaaactaaagtcatatgaattttatttataatgtatcaaagattttttaatcaagtaagccactgaatagtacttttgctatattgttaaagtttgagttaatggtacctctagaaaaggttgaatcatacaagcggtccttgttagtctttggtattctagagtagtgcttcttaatttgtaatgtgtcaaggaatt

SEQ ID NO: 636556 - DNA, 556 bp, Homo sapiens
ctcattttcttatatttaaagctacttccttaggtatagtatacatgaatttttaatgtttaatatatcattggaccaaaatggtagaactattctaagaaagagtagggaactgacatttaagcacctactgggagccatgacctgtgtcaaacacgtgttttaattctctcaatgatctattgagtgttcatctctgttttatagataaagaaagtgagcatcaagcaggtaaaggaatttgcccaaggttagaaggctaataaatattggatcgatccaagatttgagcccaggtctgtctgaatctaaaccctttatagtctctaaactatactgtctttctggagttgaatatgaaactaaagtcatatgaattttatttataatgtatcaaagattttttaatcaagtaagccactgaatagtacttttgctatattgttaaagtttgagttaatggtacctctagaaaaggttgaatcrtacaagcggtccttgttagtctttggtattctagagtagtgcttcttaatttgtaatgtgtcaaggaatt

SEQ ID NO: 636557 - DNA, 454 bp, Homo sapiens
acttaacctctttaagttttagcctcctcatataaagtggaaatgtaatagaaccgtggtaatccacttttttggatgtatagcatattttctgcttccataactataagcacatccttgactgatgcaggaatctagcttactccttttcctaatgtcaggcratgctgctcatatacagtgctgctcctctaattctagtaactgttcctcattttgagtttaggattttcactactccttccatctggttgtcatgttgttgattccacctctggctgagtagtatgtatctcagatctggccaatagcatttctaaggctacagggattagttaacagatggtcaaagtaccccacttaagccagtgtcacaagatgggatttctgttgagattcttgggaatcttgagataggtgttattttcccactggttttttgaactgacaggat

SEQ ID NO: 636558 - DNA, 658 bp, Homo sapiens
cctcaatttcccaggctcaagccatcctcccacctcagcctcctgagaactgggtgagacttcacttatgcaccaccatgacagactatttttttttttttgtaragacaaggtttcaccatgtttcccaggcgggtctcaaactcctgggctcaactgatcctcccaccttggtctcccaaagtgctgaaattataggtgtgagccactgtacctgcccaggacatacagctgaaataaaacatccacaattattttcaaacccactaaaaccggctggacatggtggctcatgcctgtaatcccaacactttgggaggccgaagacaggcggatcacctgaggttgggagttcaagaccagcctgaccaacatggagaaaacccttctctactaaaaatacaaaattagccatgcgtggtggcgcattcctataatcccagctactcaggaggctgaggcaagagaatcacttgaaccagggaggcggaggttgtggtgagctgagatcgtgccattgcactccagcctgggctacaagagcaaaactccatccaaaagaaaaaaaacaaaaaaacccactaaaaccaagttgatacatacctttgacttaaagcataaatttcagccgaaatactctcatttctctagaccatca

SEQ ID NO: 636559 - DNA, 542 bp, Homo sapiens
gatattgagaaaaggaactccatgactttaaaaaaaaaaaaaaaaggtcaaggactctaatacggtgaaatttttaaaattaattcamcccacaaaaccttgtgtgtgctaatagtttccaataaaactttataccctaaaaggtcagatttaactgggcttaacggggattccacatggagcagggagaggcagcaaagctcttaaagactttctatattttccatattatgtggctctttttctcaaaagtttatgaaaattcttcacatacagcaaaattggaagacttgtacagcgaacattcatatacccatcacctaaattctacccatatatgtgattttgataaatttgttaacaaggatattaaaacattatatggcacccagtttaaaactgaatatcccacaaactttaaggagagagagatgtagtatattaattccattcactaagagatattatgcactagtttctacactcagggttttaacatgataccctattctcttagtaactctgcttagtaggtattacca

SEQ ID NO: 636560 - DNA, 546 bp, Homo sapiens
tttgggtgttaaaaaaagtaatgaggtatgttaataatttgcaacttcagattctgtttactatttgaattagcccttgtgattggaacaggaaaccaagtaagatagagaatttaataaatgcggccaattgtwtggactggaacaataacagccatgtttccttaaattatctctaatgaaatgaatgaattcagtttctccacattttggaaattctgaagaatggtgttgcggaatttttttccctgacataaggttatgaaagatgatgacgaacgctttaccaactgcagagatcaggaagaacaaagctttttaaagaaaaaaattttttcctttaaaacagtgaaataaaacaacttttctgtaagcttaagtagactattgattacacacacagcttggtcttttgttttaagaggaggaggtactttaaaaaaacactaccaccctccagcacgttatgtacacacaggcatacagttagatgtgcccagaaaaagtttcataaaattctcttattgcatttagtttccctttttg

SEQ ID NO: 636561 - DNA, 597 bp, Homo sapiens
ctggtcttcaactcctgggctcaaaggatatgcccacctcagcctctcaaagtgctgggattacagacgtgagctamgacggctggccatgaattatttctggaattctccattttaatatttttacaccacagtgatggcaggtaactgaaactttggaaaggaaactcatggatggtggggagggactaccgcacatgaaggaataagagtgagggaggactgttttataaatataaaacaaaagaacccccacatctatttccatatacaggaaaaaaaaatccacatcttgcttcacctcctaggtggcagcgtatgtactttttatcccaaaagcctgctccttattagtcagttcaggatatacgagaagttgaatttcaagcaactttctatactacattccattttgtcaaagcacacagtaacactttaacaagcacactatctttactccaaatcccaaatcaaatctgcagcaattttcatgcaagtatcaactctctaaacatacttactggccaaataaataccttactttaaaaacaaacagaactcctctccctttaggttaagcaatcaattggaagaaga

SEQ ID NO: 636562 - DNA, 597 bp, Homo sapiens
ctggtcttcaactcctgggctcaaaggatatgcccacctcagcctctcaaagtgctgggattacagacgtgagctacgacggctggccatgaattatttctggaattctccattttaatatttttacaccacagtgatggcaggtaactgaaactttggaaaggaaactcatggatggtggggagggactaccgcacatgaaggaataagagtgagggaggactgttttataaatataaaacaaaagaacccccacatctatttccatatayaggaaaaaaaaatccacatcttgcttcacctcctaggtggcagcgtatgtactttttatcccaaaagcctgctccttattagtcagttcaggatatacgagaagttgaatttcaagcaactttctatactacattccattttgtcaaagcacacagtaacactttaacaagcacactatctttactccaaatcccaaatcaaatctgcagcaattttcatgcaagtatcaactctctaaacatacttactggccaaataaataccttactttaaaaacaaacagaactcctctccctttaggttaagcaatcaattggaagaaga

SEQ ID NO: 636563 - DNA, 597 bp, Homo sapiens
ctggtcttcaactcctgggctcaaaggatatgcccacctcagcctctcaaagtgctgggattacagacgtgagctacgacggctggccatgaattatttctggaattctccattttaatatttttacaccacagtgatggcaggtaactgaaactttggaaaggaaactcatggatggtggggagggactaccgcacatgaaggaataagagtgagggaggactgttttataaatataaaacaaaagaacccccacatctatttccatatacaggaaaaaaaaatccacatcttgcttcacctcctaggtggcagcgtatgtactttttatcccaaaagcctgctccttattagtcagytcaggatatacgagaagttgaatttcaagcaactttctatactacattccattttgtcaaagcacacagtaacactttaacaagcacactatctttactccaaatcccaaatcaaatctgcagcaattttcatgcaagtatcaactctctaaacatacttactggccaaataaataccttactttaaaaacaaacagaactcctctccctttaggttaagcaatcaattggaagaaga

SEQ ID NO: 636564 - DNA, 591 bp, Homo sapiens
aagctttaggaaagggtatttttttttaaatgtgactttaaaaagaaaattagcctaccaycttgcagtcaattgagtctgctacatttaaacttccagagatagttctagaattctttctagaactaagaatcataatttttaaacacaccaagtgacagtctgttctttgaatgatgctgcaaattaattaaataatgcaaagaagttctagtgaacttctttcttagttcacactaaaaaaattccattattttccccagggaatatgttaatctctatgttctatttactctgtcacatctactatcttccaactgtttttcttctgccactggtgaatacagtttctccagggttctctccctaaatcactgtggcactgtgtgccattcttccctgggatgcccacccactgagcagaagtaagctctcccccaccccccagagctaagggcgtactttcatcttctctctccactcagcctcaatagcaagacaaacaagcagagactggccttccctcaaatagggaaatacttcgtgattgcaatttgaactggttttttgtttgtgtatacatgtgcacgt

SEQ ID NO: 636565 - DNA, 591 bp, Homo sapiens
aagctttaggaaagggtatttttttttaaatgtgactttaaaaagaaaattagcctaccaccttgcagtcaattgagtctgctacatttaaacttccagagatagttctagaattctttctagaactaagaatcataatttttaaacacaccaagtgacagtctgttctttgaatgatgctgcaaattaattaaataatgcaaagaagttctagtgaacttctttcttagttcacactaaaaaaattccattattttycccagggaatatgttaatctctatgttctatttactctgtcacatctactatcttccaactgtttttcttctgccactggtgaatacagtttctccagggttctctccctaaatcactgtggcactgtgtgccattcttccctgggatgcccacccactgagcagaagtaagctctcccccaccccccagagctaagggcgtactttcatcttctctctccactcagcctcaatagcaagacaaacaagcagagactggccttccctcaaatagggaaatacttcgtgattgcaatttgaactggttttttgtttgtgtatacatgtgcacgt

SEQ ID NO: 636566 - DNA, 296 bp, Homo sapiens
actggccttccctcaaatagggaaatacttcgtgattgcaatttgaactggttttttgtttgtgtatacatgtgcacgtgtgcaacttaacatttaatggccaaattacaagcttttcagttttaaagggaaactctgggttmtacttgatacagaacgaaacagtatagccttattcttcatgaaacttccttttaaagaggcataatctttattatgaagatacactgtatatgttctgtatacaatgtataaataccaggtacactgtatatgataacaacatacactgtata

SEQ ID NO: 636567 - DNA, 402 bp, Homo sapiens
atatatctttagttaaacttagaaataagatgttgaaccatgactgattataaaggcaaaactatgaaacatacaggcagtagctttcagaaaacttgtacctatttatttatattgatcctggatttcaaaatttaatcctcttcacttttatagggtattttgccaggtatggtgttaggtactaagcaaaacacagatatgaatcacagtgagttacatgtggcacttctgttcttaaagctgccttggaaccactgtcattgtctagcaatattttctctattacraaaggatttaatgttgggtatcaacttttgtaatgtaatgtgtgggggaagaaaagagtcatatctatttccatgcattaactgtcataatgttagaactggagtctaatgt

SEQ ID NO: 636568 - DNA, 585 bp, Homo sapiens
tatcaacttttgtaatgtaatgtgtgggggaagaaaagagtcatatctatttccatgcattaactgtcataatgttagaactggartctaatgttctttgtcatcacagttgtattttctattttaaaaataatttgctagggtgaaattcacacaacataaaattacccattttaaaatgaacgattaagtgtcattcagcattttcacaatattgtgcaatgaccatctctctcgagttgcaaaatatttccacaaagcttagtaaaacttattcatttagaagtttctccccatccttcctctctatactctaacaaccccccaatctgagttatgtctccatggatttatatttcatatagaatcttacaatttgcatcctgtttgtgtctggcttctttcactaagaagaatgcattggaggattttctgcctaagaacacacctattcactgctaaataatgctcatcctcaaaatatttgagtgaaaaaaacagaagatattggttcagataaacctgggctaaatctctaagtttttaattataatacttgaaatatactgtacattattcaacttt

SEQ ID NO: 636569 - DNA, 545 bp, Homo sapiens
gaaagcaatgagtcccattatggaagtaataggtctcaaagcaggcagcttgttagagattcatctatagttgcaggatgtagacaccttagtgaaagcgtctctgacctggacactttcagactctgggatggtgatggcaacacggtcctctctgggagatgtcatcaaaatcagaagctggagacacctctcytgaaatgtaattagaaaattcaatgctgcttttgcactatctcaagcaattttaccatgaaaaatgtgaaagaaaacaaccctacacttcactcagtttaaaatctctccatcttcctggcaatacctgatttgaattcatagactgcacattacaggctatgtgtggacatttatacctacaacaggaattatttccacataacgataaatagacctgagatacgagcacttctaaataagtgtctttatggaatatattatttcaatatgcattttcctctcctcccccttcattgggatgtgggttagaggttcctattctttaaacacgaatgaggctgggcagc

SEQ ID NO: 636570 - DNA, 588 bp, Homo sapiens
cccccacaatcaaccttctgcaactcaaggagaacacaactatggccgggctccgacaaattaggcatgaacaaatgtttcacattaactgagttaaaggaccttgctgaaaattacaagggctgcttaggaaagcaatgagtcccattatggaagtaataggtctcaaagcaggcagcttgttagagattcatctatagttgcaggatgtagacaccttagtgaaagcgtctctgacctggacactttcagactctgggatggtgatggcaacacggtcctctctgggagatgtcatcaaaatcagaagctggagacacctctcctgaaatgtaattagaaaattcaatgctgcttttgcactatctcaagcaattttaccatgaaaaatgtgaaagaaaacaaccctacacttcactcagtttaaaatctctccatcttcctggcaatacctgatttgaattcatagactgcacattacaggctatgtgtggacatttatacctacaacaggaattatttccacatracgataaatagacctgagatacgagcacttctaaataagtgtctttatggaatatatta

SEQ ID NO: 636571 - DNA, 467 bp, Homo sapiens
ttcattatcaaactggttattgtttgtttgtaaaattattcaattgtgcatttcctaacttcataaccagcaaccattctgaattttccactgtatttcttttctgaaagatttttagagatgactggagttctacaaaaataatatacatacgtacagttttagtttcctatttgcaatatttgaagcacttatttcacattttatatttgtaattatattttagatagcatttcaagaaaagttaaatcaatggacattaatgtcttaytcctgactttatattccattatttataattatcttctttgctgttatgtattttataacttattgaggaaatatttattaatttctatattttataatgaggttgctaaacttcttaaaaggttgtttgagaaataatacatgcatttcagaactttctgtactattttattctgaccttttgacaaggaaaaaca

SEQ ID NO: 636572 - DNA, 517 bp, Homo sapiens
ttttcattctctaggtcagaagaagggaaggattggaagccttctgctagccttgtctttatatgaaattgttggagtctagaagacccaaacattacaaggagttaagcaagagccaaattttagtagtaaaaagatagctcttgaaggtcctaggaagggtaaaaaccaggtgacattagtgaaagcacttttgatagtggacsagatgtagtgggggcgagtgccctggttatatctatgtaaccaggtggcttgcttatagatcttttggatgttaaccttaatttgtctatagtgattcatataaatgcagcaggtcttattaataacttcacagactccacccagttcagctagtcaataatccaatgtcagtctgttgtcaaggactacatttaccaaataatctagggatccttgaagttcctttcatgcttgacctgtgctggtggccaataatattagagcttttgtcaaatttcttaggggtgactcatggtaagtaaagtcactc

SEQ ID NO: 636573 - DNA, 586 bp, Homo sapiens
acccccagagaggcaatggtggccaatgtatatttacccctgtttcgagtttttaatatgcaagggatgacaactcttaaagaaataggtggctcttgagggagtcaagagtgggtacagagtggaatttcttcccactcatggccacaaacaaaaatgagcccagttggcacacaaattaggccctattgaatgtgatgtctctctgctgagccaaattggctctctatagatatttttcccttgtccaatggtggtagttgaacaatctttgttttctagaagagggcaatggtggtagttgagcaatctttgttttctagaagagggcagtactcccaccttcccatatcaggcggttgttctctggtgcatgttttgatccaggaggaggcaygatgtacattttccttgcgtataagtaggattttatttatctccttgtggtcttgggaatttatccactagggcaaggaagctttctcttttgtgtattcacacaacaatgaatacaaaagatagtatcattactgcactgaagatatagatacccgacttcccaggtccagataatagtggtgttgtg

SEQ ID NO: 636574 - DNA, 607 bp, Homo sapiens
gtggtaagaggggacattcttgtcttgtttctgatcttagctagaaagcttcaactttctcaccattatgtatggtgttatgtgtacrtgatttgtagatgtgtgttatcaagttgaagaagttctccccattcctagtttgctgagagtttttatcatggatggatttgattttgtcaaatagttatcccaaacctattgatataatcatgtgatttttttccctccaattgcatcttcaagttgtgtgagtgaaagttgggcatcaaattattggcaggaatgagtcaaattggcttctgagtgacatctgtgttacacacatgctcagagtgactggttatgacgttctctgtcagcattagttcaacatgtttgaacaacacaaaaatttagacattttaaaaataaaacacaaattattaaaattgattttaaaatacctaaaacttatacataaaataaaaggaagaccttaagggaaaaaagggtaacagagttacggcttcaaagacattgtatcagacacttccacaataggtcatgatgaagttatgagtaatggatttatcctcccattttaatcaactcaaaatcaggacaaata

SEQ ID NO: 636575 - DNA, 667 bp, Homo sapiens
ttattggcaggaatgagtcaaattggcttctgagtgacatctgtgttacacacatgctcagagtgactggttwtgacgttctctgtcagcattagttcaacatgtttgaacaacacaaaaatttagacattttaaaaataaaacacaaattattaaaattgattttaaaatacctaaaacttatacataaaataaaaggaagaccttaagggaaaaaagggtaacagagttacggcttcaaagacattgtatcagacacttccacaataggtcatgatgaagttatgagtaatggatttatcctcccattttaatcaactcaaaatcaggacaaatatataaaacaaaggtttctagacaacgggcagcagaaaatggaagtcagtgatgtttaaaagaagagaaactaatcaggggaaccctacaattgcccagattgcttctaaaaatgtttgctagcaataatgcagatggcagatacaagcagagattgacagctttcttaaagtaaagatacagagctcagaaggtgcacaaggcctcctagacattactgcagaaaccactatagctgatgtaaaatagacccaatttaatgagccatctaggagaagagaatagattgatagtagaataacatcattgaagtttatcccatcccattgtg

SEQ ID NO: 636576 - DNA, 614 bp, Homo sapiens
tgtggtaagaggggacattcttgtcttgtttctgatcttagctagaaagcttcaactttctcaccattatgtatggtgttatgtgtacgtgatttgtagatgtgtgttatcaagttgaagaagttctccccattcctagtttgctgagagtttttatcatggatggatttgattttgtcaaatagttatcccaaacctattgatataatcatgtgatttttttccctccaattgcatcttcaagttgtgtgagtgaaagttgggcatcaaattattggcaggaatgagtcaaattggcttctgagtgacatctgtgttacacacatgctcagagtgactggttatgacrttctctgtcagcattagttcaacatgtttgaacaacacaaaaatttagacattttaaaaataaaacacaaattattaaaattgattttaaaatacctaaaacttatacataaaataaaaggaagaccttaagggaaaaaagggtaacagagttacggcttcaaagacattgtatcagacacttccacaataggtcatgatgaagttatgagtaatggatttatcctcccattttaatcaactcaaaatcaggacaaatatataaa

SEQ ID NO: 636577 - DNA, 607 bp, Homo sapiens
actaattgtcgcaaaaagcagaagcagatttttgacctctcttttcagggactgaggtgacaggccctcctccttccccttccttaagttagcagtgattaaactcctttcaaagagccagactcagacattattatatcaagacttccattctaggcagcggtgtcttttyttgttcctttttctttttttttttttttttctttttctccccagagaaagtgaacaagaggcagttttagcttgaactagactctctgtagttccctgatctttattcgggtttcagacctgtacttgcagtgccttatgctgtgctttgactttgcagactctgggggagaagctgcttcagttaccactgaacgcaaaggtaaaactgaccttataatttgtgttaaaaaacaaaagacacagtttcctttaagaagtaccagtggacatggaatggagttttatgaaaatagttttaagaagaattatgatttaaagattgttatacattttagaaagccatttcacagatattatgaaacctgatcctctcaatgcctcggagagataggcaagatatttttaatccttactttgcaaatgtgagaaccaa

SEQ ID NO: 636578 - DNA, 567 bp, Homo sapiens
gaggcagttttagcttgaactagactctctgtagttccctgatctttattcgggtttcagacctgtacttgcagtgccttatgctgtgctttgactttgcagactctgggggagaagctgcttcagttaccactgaacgcaaaggtaaaactgaccttataatttgtgttaaaaaacaaaagacacagtttcctttaagaagtaccagtggacatggaatggagttttatgawaatagttttaagaagaattatgatttaaagattgttatacattttagaaagccatttcacagatattatgaaacctgatcctctcaatgcctcggagagataggcaagatatttttaatccttactttgcaaatgtgagaaccaaactcaaggagattaactgaattccccaaggctttgcttctagaaagcatcagaattgagcaagaaatccagaagattttgtcctcaattcaattatttacccatttcactcattgccttatcctccatatgctgcctccactagcacgtgtttccagactgtctgctaatttcatctgcagaggtggaa

SEQ ID NO: 636579 - DNA, 587 bp, Homo sapiens
tcctcttcgtaagttttcccactttattcaaaaaataatttacatattttttaggtttattcatggtttaggaacttttctgtgccccatctggtagctgggagtaatgttgtacatttatctcattaattcatagggacttgttcaaattttgctttaaggactatttcaagttttgacatagatttgacttgggytctactaaaagaaaaaatatatattttttaatcttatttttgctacacatgcttaaaatacatttagttaactattttgagtttcactttctttatttgtgtaaaggacatgactgatccagttgtcttgaggctattgtgagaatcactcagcaaataacagaagaatcatatgctaatgatttgtgacattttcaaaatatttctgaagaaatgttccttttatgatcgtgtgtgtgccgctttcacaagcggtcaatagaaattactttgtataactattcatcaagttagtaaaacttaagaagcatatgtgaaaagaacattgatattttgaagaaataaagtaaaataataaacattaaatgttaacattaattattaacatca

SEQ ID NO: 636580 - DNA, 434 bp, Homo sapiens
agatattattttctcttagaaggatgtcatgaatttttgtacatatgtctgtcaagtgcttacactttatactgtgaacatttatttacgtggtggtttttcttagagataygttggtctttctaattctgaatggcctagcttcataaacaatactttagaagtgctatttccttcaatttatgcaaaatatcatatatttatgtcattcataatattctctgagatctcaacctgtgtttgcaatgtctaataaaccagagacacctcaaaattgcatatcaaatgagcttgtgctgagtgggcatcttaaactctatccttcagactaaaactgttcaataatgaataaattattatctatgtgtatttttaaagatgctattagtatcatcagtatcaatatcaaacatacataaaatgcctgccttatt

SEQ ID NO: 636581 - DNA, 434 bp, Homo sapiens
agatattattttctcttagaaggatgtcatgaatttttgtacatatgtctgtcaagtgcttacactttatactgtgaacatttatttacgtggtggtttttcttagagatatgttggtctttctaattctgaatggcctagcttcataaacaatactttagaagtgctatttccttcaatttatgcaaaatatcakatatttatgtcattcataatattctctgagatctcaacctgtgtttgcaatgtctaataaaccagagacacctcaaaattgcatatcaaatgagcttgtgctgagtgggcatcttaaactctatccttcagactaaaactgttcaataatgaataaattattatctatgtgtatttttaaagatgctattagtatcatcagtatcaatatcaaacatacataaaatgcctgccttatt

SEQ ID NO: 636582 - DNA, 582 bp, Homo sapiens
tcttctctactgccacacagttaagaggagtcagccattttctgtgtttgtttctttatatcttattaatacatcttcctctgtttcttcatggtgtatgtccccacatcatttcagattgaccatcactggaaactaacaaccccacttgggtcctactatatcataactttcagtttaaatgcctacttctgtctggtgatttttttctgcaatatgttggtgaagattgtcaaacgagaatctrgcagcacagattctagttttcttcatttattgaaggcttttaacacagagaaaatttagtatgttccagggactgtttcagttattagggacagagcattaaacacacagaaaaattatcttcatttgtactcttgtatttcagtaatataaattgcttttcagctcaagcctaatgagaaggtacagacaaagaaaaaaaaaggaaagcaagagagtgtcatgatatagaagcataaaagctaagagaaaagtctgtttcttttttaatcctcaacacttttcaagctgctagatttggtgttggcaagaacatatggaaggaaatatacagag

SEQ ID NO: 636583 - DNA, 601 bp, Homo sapiens
ttgtcagcagtaatttctaaataaggtgcatagttaggaagacaaatcccttaattcgtgaagcttttagtttaggaattaccaaatttagttgatggagatgatggagatgtacaggacaaaatgtcagcaaaaacagcagggtgtatatttaatgccacggttaagtagcagctgatcaggccttggctactgagtacatgctttcaaacyggtgagtattctgggcactcagctaatctttggtgtccaaaaaacaatatttataacacacagaacctttccaattttcatctaatgtgtgtacataaatgtaagcccaaactggtcctcgtcctacttaaatctattttgcgtgacttcccatgtgcaaatatagcaaggcacaaaaaatttgtttgcttcttgattgagagaagctgactgcctctcttgggaagtactcttgttcattgtagaagaggaaaggcttcggctgcaaaagaaccggctgcatgattttttctgacattttgtctttatataacttttgttctaaaataatcattaaagttatagtacaattttagattgagtaaaaaatggtgaagctactacagag

SEQ ID NO: 636584 - DNA, 476 bp, Homo sapiens
aacgatttttaaggtatggtcttaagaaaaacggcttacaaaaatgaacttcttaaatatcctcttgtgtctgaagttatttctttttttacacaatatctactatattatctagaagaggaaaaggcactcacatatgtggagtgggtacttttagacagaagctttacattatcacctcattagaatgttcaagtccacatgatgtttgtttaawcatatttttttttcagataaagaagtgaaaaagtaataactaaaccatttttcaaacacatgagatggtatttgatcactggtatatcttttttttctgaaataattttctttccataaatccatttttgttgtggctaatttgcttgtattaatttaatggctaagatgattagaaaaggatgaacattaaattcgattgagcccataatggaattttcaggtgcttttaaaaacaattagagcttactctttctcaa

SEQ ID NO: 636585 - DNA, 629 bp, Homo sapiens
tcacatgataataaaacatatttttacagctgtgcatggtggctcacgcctgtaatcccagcactttgggaggccaaggtgggagaatcacgaggtcaggagttcaagaccagactgaccaacatggtgaaacttcgtttctactaaaaatacaaaaattagctgggcagagcggtggggacctgtaatccaaacagttcgggaggctgaggcaggaaaatcgcttgaaccggggaggcggagtttgcagtgagctgagatcacaccactgcactccagcctgggcgacaaagtgagattgttgaaaaaaaaagcatatttttacatgtaaacatagagactttattgaagagttttaacatgcagatgtgtattgtcaaataaatcaagggaagatttctaaaaaatatatttgagatgttcatcattttagataaatatatcattgatacagcaaacttatttcawtagggtcatcaataaaccctaaactgtacgagttgtttttgtggctctcacgttcaagtaaattccacgtatattttagcagtgggctcaacgttggctggacatcacaatcatctggaaagctgtaaaattccaatttctagaccacaccacaaatgatt

SEQ ID NO: 636586 - DNA, 595 bp, Homo sapiens
acatagaaaaaaaagtttaaaaatgttaaaattcaccaattctctttttaaaaaaaaattataaaactaacattaagagggacagtccttaatgagataaaaaggcatacataatatttaatattaaaatattaaaagcttccttctaagactttgaataagacaatgatttctgcattattgcttatatttgccagggtgctgaaaatcctaaccagtcccagagaaagcaaatacaattaaatatgtaaggaattgtgcctaaagaaataaagtaattatttacaacttacatgattacatatagagaatactcaatagtagctacagaataacttttagaattactaagtgaattaaataaaactgttgactacaaggccaatacttattaaaaatctatttctacaartaagaaataaggaaaaattataatatcaacaacacaaaaatcagagacgcaagaggtctaaaggaaactataaagtatttttgaaagaaataaagaaggcctgtattcatactttataagactcaataatgaaaatgtctattctcccaccacagatttatagatttaaaacaatccaaaatc

SEQ ID NO: 636587 - DNA, 595 bp, Homo sapiens
acatagaaaaaaaagtttaaaaatgttaaaattcaccaattctctttttaaaaaaaaattataaaactaacattaagagggacagtccttaatgagataaaaaggcatacataatatttaatattaaaatattaaaagcttccttctaagactttgaataagacaatgatttctgcattattgcttatatttgccagggtgctgaaaatcctaaccagtcccagagaaagcaaatacaattaaatatgtaaggaattgtgcctaaagaaataaagtaattatttacaacttacatgattacatatagagaatactcaatagtagctacagaataacttttagaattactaagtgaattaaataaaactgttgactacaaggccaatacttattaaaaatctatttctacaaataagaaataaggaaaaattataatatcaacaacacaaaaatcagagacgcaagaggtctaaaggaaactataaagtatttttgaaagaaataaagaaggcctgtattcatactttataagactcaataatgaaaatgtctattctcccaccayagatttatagatttaaaacaatccaaaatc

SEQ ID NO: 636588 - DNA, 553 bp, Homo sapiens
tcatggattcgtggtaattcagaaatctacttcatttgatattgtagtttcttgattaggacacagtactactccccacggccttatgagttatttttaattttactaataagtggtctatgtttacagcagctgagtattattctcagcctgtttacttcctgtagaaataataccaaggttacaaaggcctcttttcattttaaactatctctgcattttgcatctaatctgatacaatggctttaaaatgttgattggtttcctktgtatcaaattaattcaattagccgaaaccaaaccacttgttttgatagagtaacttctctagctttacttataagatatgatatcttggggccataaaatctttctttgtaaaagcatttcatattgacatggaagcatgatttgacaaatcttaacgcatttatgcccagttttccattattggaacactaagcttgtgggagttatttatatcctgctgctcaaggtaatttccaaggtctcatttttcaccaaaaaaatttgcaacctctggcataaatgg

SEQ ID NO: 636589 - DNA, 606 bp, Homo sapiens
ttcatgctcaactgtgagttttaaaaatattgtagaaatattggaggaatgttatacttgacaactaagacatatgtttctcatatatagttgctggagcagtgcatatgttggtatataaataagtatggatatataagtatagctacacacacacacacacacacacacacacacacacmcccttcattgctaaggtttaaatgatttcatatttaaaagctttatagatactaaaatttaccccatcaactaaaatttatcaattttaaacctttatttgtaaccttgggtaaatcatgaaactctaactgctttagtttatcatccgcagaatgaggactcattgtcttagataaggtttcacatccttccctggtttaattttccatggtttccaaacactgcatgttctcactcataagtggaagttgaacaatgagaactcatggacacagggaggggaaccacacatcagggcctttcagggggccggtgggggggtgcggggagggagagcatgcagggcttaatacctcggcgatgggttgataggtgcagcaaaccaccatggcacacatttacctatgtaacaaacctgcacgt

SEQ ID NO: 636590 - DNA, 409 bp, Homo sapiens
gcaaactaatgcaggagcagaaaaccaaataccacatgttctcacttataaattggagctaaatgatgagaacacatggacacagggaggggaacaccacacactggggcctttaggaggctgaggggtaagagaggaggtagaaggasggaaaggaaaaataactaatggatgctaggcttaatacctgggtgatgaaataatctgtacaacaaacccccatgacacaagtttacctatgtaacaaacctgaacatgcaccctcaaacataaaagttaagaaaaaaatatgtgtttattatcagatttagataattttaaagagaaaatatcccatatcttatttgctatgtagaatattccaaataaactgacatatggcttagaaatctgaggacagataaagtga

SEQ ID NO: 636591 - DNA, 539 bp, Homo sapiens
ctataagtcaagccagaaattcctgggaaaattatacagatttaacataatgaaaaattaagttgtttttaaaattaaactgtatatttgatsaagacctagtgacaaagaggaagaagaatagaagtcgagacgccaaaaacaattctggtatgtaaatttttccttgtgagattctgggcagcagagtttcagacaaatactaaatcagataactcaaatagggcactccagcattgagggaattattatagataggacaaaaaaagatggctgggcaaggtggctcatgcctgtaatcccagcactttggaaggccgaggcgggtagatcatttgaagtcaggagttcaagaccagcttggccaacatggtgaaaccccatctctactaaaaatataaaaattggctgagtgtggttgcacatgcctgtaatcccagctactcaggaggctgaggtaggagaattgcttgaatctgggagacggaggttgcagtgagctgagatcctgtcactgcactccagcctgggagacagag

SEQ ID NO: 636592 - DNA, 539 bp, Homo sapiens
ctataagtcaagccagaaattcctgggaaaattatacagatttaacataatgaaaaattaagttgtttttaaaattaaactgtatatttgatgaagacctagtgacaaagaggaagaagaatagaagtcgagacgccaaaaacaattctggtatgtaaatttttccttgtgagattctgggcagcagagtttcagacaaatactaaatcagataactcaaatagggcactccagcattgagggaattattatagataggacaaaaawagatggctgggcaaggtggctcatgcctgtaatcccagcactttggaaggccgaggcgggtagatcatttgaagtcaggagttcaagaccagcttggccaacatggtgaaaccccatctctactaaaaatataaaaattggctgagtgtggttgcacatgcctgtaatcccagctactcaggaggctgaggtaggagaattgcttgaatctgggagacggaggttgcagtgagctgagatcctgtcactgcactccagcctgggagacagag

SEQ ID NO: 636593 - DNA, 529 bp, Homo sapiens
tttttaatgaggtgtctaggaatagcaacattcaaaattggtttattaacatcttcctttaaatgttccacaataaaattcatggacagttatacatacttaaataactcctaagataaatgaactttcaatcattctttatatgtttactcataaaagtattttggtctactagcagttctatcaactgcatttatatgtagcatcagtgcatctggtttctaaaaattgcttttgtttcaataacattgtcttttccatcgcataaatagttgtattattttctgataaattttatatgattttctgatttcaatattgtaaactttttaagtctaaaatactcttgtgttcagatcatttatataggtcaataacaacaaaaatatgtattgactgcctagcaggcattattctaggtactgattttatatttatttaaaagtattttccagactrtagcaatgttgatatattacttttataatgtaaaatattcttacagtattctcatagttcctaggcatta

SEQ ID NO: 636594 - DNA, 631 bp, Homo sapiens
gtgatcctcataattagtaactagcccaggagaatttttggctttaccgaggaaataattcaagagcaaggtggcggcgttaaacagcaatcacttattsaaccagatctcctccttgcccagcagagccaactcatagccagtgtgcccagagccacacttgtgggctgttggctagttctatgtatacccatttttacccgctattacttacatgcaaattaagtgtaggttaatgccaattaaggggcagatttttcagaactttctaggaaagtggcagtaactttcaggtcattgacatggaaagaagaggtaacttccaggtcattggtgtgacacgcacattgtcatggcactggcggggcaggggggcggggggagtgtcttatgctaatgagcaattagggcagctagggattgctttcatcaccagctgctgtttgggtgacatttttcactacattttatcagaattaggaagtaagtcctgccagtttcctagcagcttaatggtaaaaaaccattaatctggtcagataaaattctctacttaatttgcatgttttgacagatttgtagagaattgttttgctttccaggaatttcttccaattgggccagaattgca

SEQ ID NO: 636595 - DNA, 568 bp, Homo sapiens
attctaagagcattagaaatatgtactcttaagaaaacctaattacattatttgaaaatattaaatagatattttctcatactacaatgttaaaagataagtatcatatttgacactgttagctaacaagtggtggaaactaacctttatgtagcgtttcagccttaatytcaatcacccactgatcgatacttacatttattaattctactctgcatccattattatgcacagtacttaactagattttcaaatctaaatggaaatctgttttcgtggagccaggtcatatattcatctaaatctacttgtaagcaaaaggctgtcattagcacatttacattgctatattatggcttcaactgttgatataatggaataaaacttatacagctaatctcagcaaatatctacttatgttacgggaaattaaaacactgagagataattgtcaccttctgaaaccaatgattatttgctttgaattgagaatggcagtctgaatgtagatatgagatagacatggaggcttttcagtaaataaagacatacacatgttgcaggcaca

SEQ ID NO: 636596 - DNA, 610 bp, Homo sapiens
ataaattaaatattatctatatttaatattatcaaatacacattatcaatattatcaatacacatacataaatgtacaaaatgctaactgttagaggtaatggatatggtaatttgattgtggggatcttttcatagcatatacagatattacaagatcacttaatacaccttgawtatatgaaattttctatgtcaaagataactcagtaaagctgttggaaaaaaaaaaagaacatctggaaagacaaaagagaagccctggtttcaaaatctagtaatctgtaatacaagttatattacataaaatgctacattatgtgcaatgctgctttattgaagttttaaaagctgggatggtatatcacaaatctgtatttgaagtacaattaatttctattaaaacctgatcagtaatttgataacagtttgctattacttgctttcttgtgatagtggcatagtcagaaatctgaaatgtgctgataatttaactcaacattctgaccatgtttgacattttttctgatcaccttgacggattttctcacttgaatgaaagaaagtgaaaagatggaaattataagggctgtgagaattgcagaagcaac

SEQ ID NO: 636597 - DNA, 610 bp, Homo sapiens
ataaattaaatattatctatatttaatattatcaaatacacattatcaatattatcaatacacatacataaatgtacaaaatgctaactgttagaggtaatggatatggtaatttgattgtggggatcttttcatagcatatacagatattacaagatcacttaatacaccttgattatatgaaattttctatgtcaaagataactcagtaaagctgttgraaaaaaaaaaagaacatctggaaagacaaaagagaagccctggtttcaaaatctagtaatctgtaatacaagttatattacataaaatgctacattatgtgcaatgctgctttattgaagttttaaaagctgggatggtatatcacaaatctgtatttgaagtacaattaatttctattaaaacctgatcagtaatttgataacagtttgctattacttgctttcttgtgatagtggcatagtcagaaatctgaaatgtgctgataatttaactcaacattctgaccatgtttgacattttttctgatcaccttgacggattttctcacttgaatgaaagaaagtgaaaagatggaaattataagggctgtgagaattgcagaagcaac

SEQ ID NO: 636598 - DNA, 394 bp, Homo sapiens
gtctcagttttccacatgaataggaggggacaatattccayagttgccaagatctccaaatactcaggagctggattcctcagataattcctgtgactgtgtggcaccccgagtcctgccattactactcattgaatgtcagcagtttcaggaaggtacgacattgagtggggttgccctctacaatttagataatccccatagcagctgtcagctgaaggctgataccactccctgcaaataggagaacaacttcttcttttaagaatgatccccagaatggtgcctcaccctgaccaccagagaattatagctttattgtccctggccacgtaagatttcctattaccccagcaaaacctattctttcaaaaatttcatgtgatattgtgga

SEQ ID NO: 636599 - DNA, 394 bp, Homo sapiens
gtctcagttttccacatgaataggaggggacaatattccatagttgccaagatctccaaatactcaggagctggattcctcagataattcctgtgactgtgtggcaccccgagtcytgccattactactcattgaatgtcagcagtttcaggaaggtacgacattgagtggggttgccctctacaatttagataatccccatagcagctgtcagctgaaggctgataccactccctgcaaataggagaacaacttcttcttttaagaatgatccccagaatggtgcctcaccctgaccaccagagaattatagctttattgtccctggccacgtaagatttcctattaccccagcaaaacctattctttcaaaaatttcatgtgatattgtgga

SEQ ID NO: 636600 - DNA, 604 bp, Homo sapiens
gtactaaagccctggatttatacttaaactgtttctgagatgactgacagctttagtgacagggatctccaatcttctggagcaatctcatgaccaaggatctttaatttttgtgtcttgaatcttgcagttctacacacattagtgtacatgcttcatcagagaagaatgggaaaatgagcaggaaatcctgtttttgtgatttctagawtcaacctatggtttgatgcagtagaaacatataagtggagatcctactctgaaaatgcctaaaaaatgcaggtttcatcgaacatattttccacttatggtgtagatttaaaaacctccatttttggcagtctctataattctttatgttaatacctcaagtgaaaatacattatggtctattagtcacacaatattcaccatcagagataatcatgatagccatgactctgtttcctttttctgaataagtaacccccaaaatgtgacccatcaaattttcaagttatgtaacaccttacaattcctatgtcgagacaatgttacccaacaagaaaatacaccaatattcagactacgtcatatgcagcacttaatatcaggccagagttaa

SEQ ID NO: 636601 - DNA, 513 bp, Homo sapiens
cctctacctttctgtattaataaggattaacaaaaacaaaacaaaattgtgctaatggagaaacattcgtgaaactggtgaaggaaatagctcaggaacacacacccactgaaagtctatttaaacataagtttatagaatgcttctcttccccaacaccttgccactgtaccaacaggccccagtataacaacactggattatatctgaaacacctgcatgatgcagatctatctgagaaatactcagrcaagcctaaagccaagagaggaaagagagagagagagaggaaagagagagagagaggagagagagagagagagagagaactcaaggaatttgaagactctatcacctacacgacagaaaatatttttgaaccaattaaaataaaaataaaacaaaaatttgtgaggaggagcagaatcagaattattggaaaatttatagcaataagtgcaaaaattagaaaaaaatattccaaaatccataatctaagattccacaataaca

SEQ ID NO: 636602 - DNA, 448 bp, Homo sapiens
ccacactttgaatttagttataatatttctttgtatcttaactccatattaacttagataaagctcattctctgtctctctccctctctttctatgcaattaacattttttaaaaaccaagtcaattatctgtagaatattctacatttaagcttagtcttccaagctcacgtagttgctggcagaactcagtttgttacattgcaaggctcacgaccccgtttcttcactggttgttgtctggaggttgtcctcggattctagaagcagccttcagtcccttgtcacctgggattctccaacatggccattatgtctgcaataccagcaaagtcgcactgcgatcttaggataaccatgtagacrtcatcacatgcatcctgacacctttgctgtatgctgttgatcaaaaggaagtcacaagtcctgcccacactaagaggtgaca

SEQ ID NO: 636603 - DNA, 509 bp, Homo sapiens
tctacaaacattatctaaaaaaaataaaataaatttttttaaaaaggctttgtgtgtactctatagaaagtggtctttttagtgtgcttacacagagacagcaagcatcattttcttttttcttttttgaacttattaatgagaaatatttaggtctttcataaatgtctatgttagttttgacgaagatttactctgtttcttgttaatattgtwcctttgggtgaacagctttctatagcatttgtaaatggattaaaaaaaaaaaactaatacaggaacagaaaaccaaatgcggcacgttctcacttataagtgggagctaaatgatgagaacacatggacacatagaggggaacaacaaactggggtctttcagaaggttgagggagggagaagggagaggatcaggaaaaataactaatgggtgctaggcttaatactcgagtgaggaaataatctgcacaacaaactgtataagacacaagtttacctatgtagcaaacctg

SEQ ID NO: 636604 - DNA, 509 bp, Homo sapiens
tctacaaacattatctaaaaaaaataaaataaatttttttaaaaaggctttgtgtgtactctatagaaagtggtctttttagtgtgcttacacagagacagcaagcatcattttcttttttcttttttgaacttattaatgagaaatatttaggtctttcataaatgtctatgttagttttgacgaagatttactctgtttcttgttaatattgttcctttgggtgaacagctttctatagcatttgtaaatggattaaaaaaaaaaaactaatacaggaacagaaaaccaaatgcggcacrttctcacttataagtgggagctaaatgatgagaacacatggacacatagaggggaacaacaaactggggtctttcagaaggttgagggagggagaagggagaggatcaggaaaaataactaatgggtgctaggcttaatactcgagtgaggaaataatctgcacaacaaactgtataagacacaagtttacctatgtagcaaacctg

SEQ ID NO: 636605 - DNA, 550 bp, Homo sapiens
tgtgttttagtatactcacaattttgtgtaatcatcactactttttaattccagaatatttctattactccaaaaaataaacaaacaaacaaacggcaaacatactttccaattctcccatcctcccatcactacacaatctactttatgttcctatagatttgcctatcttggatawtttaaatgaataaaatctcacaatatgtggcctttggtcaaaggtcctccacgtttttgtatatatacaaactttgttccttttcacagatgaataatatctcattgtatggataatgtgttttgttcatttgtccatagatggacatttgtctttttgatactgtttagttattatgaataatgctaatatgaacattcatgggcacagtttcgtgtgaatatatgtggattagataatattttaaaatttataaagcctaacagtacctaataaaacctaatagtactaatgaaatcacctaaggatgcagttgtgagaatgtagccctgccattacatgccacatacctacctgtatttagcatattca

SEQ ID NO: 636606 - DNA, 607 bp, Homo sapiens
tgaaacctactatacataactgtatataaagagacatatacatcatatatatacttcatatatatcctatatatacatatcaagtatttttattaatctttgtgcatgtgtgtatatatagacatatatgtagagatatgtctatagatatctgtatatatatacaccttaatttaaaaatactcacatatagcttaaaatactcatatatatgtctatatatatatacaacttaatttaaaaatactttattgttatatatatgatgtacataactctctatatacagggtatatatatagagagacagagacatcatgctattgcacacttaatatactacagtatattgtaaatgtartgataatttttatatgcactgggaaaccaaaaaagattctgtgactctctttattgcaatattttctttattgcagtagtctagaactattgcaatttctctgaggtatgccaatattctgttgacccgaagcatgtcactgactccatccaccctcaagcatggttataatacaatgacttgacttgttggagtacagttttgtgtatatctgccacaatacataaataagggaagtaaaagact

SEQ ID NO: 636607 - DNA, 607 bp, Homo sapiens
tgaaacctactatacataactgtatataaagagacatatacatcatatatatacttcatatatatcctatatatacatatcaagtatttttattaatctttgtgcatgtgtgtatatatagacatatatgtagagatatgtctatagatatctgtatatatatacaccttaatttaaaaatactcacatatagcttaaaatactcatatatatgtctatatatatatacaacttaatttaaaaatactttattgttatatatatgatgtacataactctctatatacagggtatatatatagagagacagagacatcatgctattgcacacttaatatactacagtatattgtaaatgtaatgataatttttatatgcactgggaaaccaaaaaagattctgtgactctctttattgcaatattttctttattgcagtagtctagaactattgcaatttctctgargtatgccaatattctgttgacccgaagcatgtcactgactccatccaccctcaagcatggttataatacaatgacttgacttgttggagtacagttttgtgtatatctgccacaatacataaataagggaagtaaaagact

SEQ ID NO: 636608 - DNA, 612 bp, Homo sapiens
tgaattcataattgagattatgctaggacccaaagagacacaattctctcaataattaatgtaaataaataaatagataaataaacaaatggacaaaccaataaatagctagggcttctcccaaaatagatgacagtgatatagtttaayagtaaggtcagacatgaagggttcacaatagaaagagtgggggtcctcccactgcatcaatgaaactgtcactgttaggcaggctggctcttctttttctgagaaccatgataggatttcagcaatagagttttatattgggtttaatatcatatcagtaaaactgtgcttgttatcatacagattctctagtacttatgggaaaagaacagaagcaaatttggtaatgtcatgcctttgggtcaaattaagatcaaatgatctcacagcatattatgtagaggcaccaaaaaagaaaggcagtggtagaagggtggtatacccttagcataggcatagttagcataggcagccagatttagaaaaattattgtcttgccatgctcttcactcctagaatcatattgtaaatgacagttggattgcagtgttaaaaaaaatctgtcagatttttaaaggatg

SEQ ID NO: 636609 - DNA, 626 bp, Homo sapiens
tcataatagttttatatatgaacatatttagaattttactttaaacttcactttatttaaagcaaaatcttccttaaaccttttactgrataaccatctttgagtgaagttagaacactaaacattcttttcctaaattgtgtgtttgctttttatattccatgtcaaagcaaaaaatataaataaataaaataaaaatccctgtataaagttaaacagctaagaaagattttattgaatgctatctcaacagaacagagaggtcagaactcagtctgagctcaattaaatggaacaaagcctggggagcttgtaagaccaagaggtggggaatcttaggctacctatgtttgccaattggccttaaccaaaggaaacaaacttgctcacattttcctaataagaagtagttttacagcttacagccaggtgcctgctggagttaggctgctggcctgggagccgactctgggagatagagccctatcttcctggataatggttacactttaaatggactgcttccaggtttttgagaatgatgtttctgggttgtaaatcttgtgggaagctttgacaagatttgtatctcaaaaacacagagaaagaatttacatgtgtaagtt

SEQ ID NO: 636610 - DNA, 527 bp, Homo sapiens
agtaatttagggaacagattgtctaaatccatgagcaattctcatggcttcagttatcatacagtatctaaagaacatgttttgtaggaacaccactgcgagattagcagctgcccttcctgcaagttagccaggatggtctacccttctcagaaatgtgttgtcaggctctacagagaaatatatgtttgcattatgaatctttcagacttcctgagcataccatcagaaaatctaatgagaaattgtttccagctttacacttgccttacttttatcagatttcaatattacgagagaaaaaatttgtgccttggagaactcaagatgctaatggtgtatctggctctggactgtcttcctgggtttatacaaatatcaagggataccagaagccmaaatacaaggcagaaaaaaaaaaggaatctaaggattatggcaaatcaatgttcctttgatatcaagaaacaacattaaatctcgtatcctccatgttgttttctgtaacagtctatttatgaaaaact

SEQ ID NO: 636611 - DNA, 620 bp, Homo sapiens
cattttcaactttaatttagcttcctatctttaatgtcctcttacgtattctctactcactggtcaggccaatctatttcctgtatttcttaaatccttcattttatcatgccaggtgttactttttaatgcaactgtaaggaagtaaaatttgttgttgtttacttatttcaaaaactaaawaccactattttatatacattatcccatttaatcttcacaaaaactctccacattaggcgttatataattgtaaacagaataaacatcgaagctatgctgcctcagttgggaactgagctctaccacttcctagcaatgtgactttggataaattacttaatctttcattctatataaatttagagggcatttactctcagggatacatttaaccaccataaggttttccagaatctaattccagtatacatatttaaaccaagctaggcaggcattttttttcactcactaatcgcaaatacttaagtctttagttgttaacactaacaataaaaatagaaaattaaataattgcatatcctaatgaatattaattttttctcaaacactttaaggaatacaccacacacgattttctacatatgcacacaaggaaa

SEQ ID NO: 636612 - DNA, 601 bp, Homo sapiens
tttgggaacttctgcctagatttcagaggatgcgtggaaatgcctggatgtccaggcagatgtttgctgcaggggcagggccctcatggaaagcctctgctagggcagtgtggaagggaaatgtggggtcagagcccccacacagagtcctaggcactgcctagtggatctatgagaagagggtcaccatactccagaccccmgaatggtagatcccctgacagcttgcaccatgtgcctgaaaaagtcacagatactcaatgccagcccaagaaagcagccaggagtggggctataccctgcaaagccacaggtgtggagctacccaaagccatgggaggctacctcttgtatcagcatgacctggatatgagacatgaagtcaaaggagatcattttggagttttaagatttgactgccctgctggatttccgacttgcatggggcctgtagcccctttgttttggccagtttttcccgtttggaatggctgtatatacccaatgcctatactcctgtcatatctaggaagtaactaactttttttgattttacaagtccatagaagaaagggacttgcctgggctcagttgagacttt

SEQ ID NO: 636613 - DNA, 601 bp, Homo sapiens
tttgggaacttctgcctagatttcagaggatgcgtggaaatgcctggatgtccaggcagatgtttgctgcaggggcagggccctcatggaaagcctctgctagggcagtgtggaagggaaatgtggggtcagagcccccacacagagtcctaggcactgcctagtggatctatgagaagagggtcaccatactccagacccccgaatggtagatcccctgacagcttgcaccatgtgcctgaaaaagtcacagatactcaatgccagcccaagaaagcagccaggagtggggctataccctgcaaagccacaggtgtggagctacccaaagccatgggaggctacctcttgtatcagcatgacctggatatgagacatgaagtcaaaggagrtcattttggagttttaagatttgactgccctgctggatttccgacttgcatggggcctgtagcccctttgttttggccagtttttcccgtttggaatggctgtatatacccaatgcctatactcctgtcatatctaggaagtaactaactttttttgattttacaagtccatagaagaaagggacttgcctgggctcagttgagacttt

SEQ ID NO: 636614 - DNA, 636 bp, Homo sapiens
atgcctatactcctgtcatatctaggaagtaactaactttttttgattttacaagtccatagaagaaagggacttgcctgggctcagttgagactttgagctatggatttttgagttaatactgaaatgaattaagactttaggggactgttgggaaggtatgattggttttgaaatgagaggacaagagatttgggaggggccagaggtggaatatgttttagctgtgtccccactcaaatctcatcttggattcccatgtgttatggkagggacctggtgagaggtaattgagttatggggtaggcctttcctgtgctgtttttgtgatagtgagtaagtctcatgaggtctgtctgttccagaagggggactttcccaatacaagctctttctttacttgctgccatccacttaagaggtgacttgctcctccttgccttctgccataattgtgaggtttccccagccatgtggaaccataagtccattaaaccttttttcttgtataaattacccagtctcgggtatgtctttatcagcagcatgaaaacggactaatacaatgatcatattcagataataatcttttcaaacacatgtcctcctccaaagttcccatgtaaggacattgtt

SEQ ID NO: 636615 - DNA, 601 bp, Homo sapiens
tagttacaaattaatgaaccaaccttgataacattattttaaagtagtgtccgtagtttgttcacatttccttggattttacctactgtcgtttttctgttccaggatcccacattatttttaatcctccagctttcattaggctcctcttggctgtgaccatttctcagcctttttcttcttatgaccrtgatagttttgaggagtactggtcaggtattttgtaagtgccccttatttttgtgttctcatcatgattagatggtggtgatgggttttgagatggagatgccagaagtaaagtgccatgctcatcatatcatgtcaaggttacaaatcaaggatactgtgaactgaagaatcacgaggtttataaatttggagaggagacttaatttcttatatatggttacagcctgcagattggccatcgtgacagaatgggaggcatgcataacctctggcagagactggaagatggcactttgtgggaagggagggcggaacaggaatttatgttgaaagggtcggccaagtatacatatttaacaggtataagggggttatgcatatttatgaaggggggacatgcatatgcatg

SEQ ID NO: 636616 - DNA, 550 bp, Homo sapiens
gaggcatgcataacctctggcagagactggaagatggcactttgtgggaagggagggcggaacaggaatttatgttgaaagggtcggccaagtatacatatttaacaggtatawgggggttatgcatatttatgaaggggggacatgcatatgcatgataagcaaataggcacattacatgcatcttacatttactttgggatggagatgtaacatttaaatgtattacaattagaccctatacatcaaaaggtgaagcaggggcatggagataattggtgtacagcctctgtaaaccagtcagaaccagttcattgtctctaattttttcagaaaaaaattattaaaatcagtctcttgttcaatcaaaactatagttatgattggcaaaacaggagagccagttagtgagtagctggcagttggagagctataattattttaatattgtttatattaaaggccagtttttgtctacctgctaaaaaagaaaaagaaaaaaatcccatgacagttaaaacagatttattctttaagtgtaggggagtgt

SEQ ID NO: 636617 - DNA, 550 bp, Homo sapiens
gaggcatgcataacctctggcagagactggaagatggcactttgtgggaagggagggcggaacaggaatttatgttgaaagggtcggccaagtatacatatttaacaggtataagggggttatgcatatttatgaaggggggacatgcatatgcatgataagcaaataggcacattacatgcatcttacatttactttgggatggagatgtaacatttaaatgtattacaattagaccctatacatcaaaaggtgaagcaggggcatggagataattggtgtrcagcctctgtaaaccagtcagaaccagttcattgtctctaattttttcagaaaaaaattattaaaatcagtctcttgttcaatcaaaactatagttatgattggcaaaacaggagagccagttagtgagtagctggcagttggagagctataattattttaatattgtttatattaaaggccagtttttgtctacctgctaaaaaagaaaaagaaaaaaatcccatgacagttaaaacagatttattctttaagtgtaggggagtgt

SEQ ID NO: 636618 - DNA, 550 bp, Homo sapiens
gaggcatgcataacctctggcagagactggaagatggcactttgtgggaagggagggcggaacaggaatttatgttgaaagggtcggccaagtatacatatttaacaggtataagggggttatgcatatttatgaaggggggacatgcatatgcatgataagcaaataggcacattacatgcatcttacatttactttgggatggagatgtaacatttaaatgtattacaattagaccctatacatcaaaaggtgaagcaggggcatggagataattggtgtacagcctctgtaaaccagtcagaaccagttcattgtctctaattttttcagaaaaaaattattaaaatcagtctcttgtycaatcaaaactatagttatgattggcaaaacaggagagccagttagtgagtagctggcagttggagagctataattattttaatattgtttatattaaaggccagtttttgtctacctgctaaaaaagaaaaagaaaaaaatcccatgacagttaaaacagatttattctttaagtgtaggggagtgt

SEQ ID NO: 636619 - DNA, 550 bp, Homo sapiens
gaggcatgcataacctctggcagagactggaagatggcactttgtgggaagggagggcggaacaggaatttatgttgaaagggtcggccaagtatacatatttaacaggtataagggggttatgcatatttatgaaggggggacatgcatatgcatgataagcaaataggcacattacatgcatcttacatttactttgggatggagatgtaacatttaaatgtattacaattagaccctatacatcaaaaggtgaagcaggggcatggagataattggtgtacagcctctgtaaaccagtcagaaccagttcattgtctctaattttttcagaaaaaaattattaaaatcagtctcttgttcaatcaaaactatagttatgattggcaaaacaggagagccagttagtgagtagctggcagttggaragctataattattttaatattgtttatattaaaggccagtttttgtctacctgctaaaaaagaaaaagaaaaaaatcccatgacagttaaaacagatttattctttaagtgtaggggagtgt

SEQ ID NO: 636620 - DNA, 515 bp, Homo sapiens
atttttataatatgacagatatagtgaggacacatcaatttactaggaagaataatgaatgcttagtcaaagttaattttttgaaaaatcagcgaacatataactaaacagtattttctttgtctcagggtaacgttcaatggaggtaataatgaaagtgccatttgttgatacaaaaacaaatttactatttttcttaaatggagtttggcaggaattaaatcaaagatgtacaacaaggttacaccatacttgaaagaaagagttctgataaaatacttattaatcaatctcatggtcacaaagtttatgagaattgaagagaatacacccatgaattatgagcattgtcaacacagcytatttcttgactaattagcaaattagttctaagtggaatttcggcaccttcaaatgagcttcttatagctaatttatcttggccttcctacataatttatcaaattcttaataataaaaaaccattaaaatgttaatctataatagattcaaat

SEQ ID NO: 636621 - DNA, 620 bp, Homo sapiens
gttacaggcactgagcaaaagacactttggcaaatatactcatgatatgagcatctggcatttcaacttatcgcatgtgtcaagcttatgttattggatatatgtggggagctacaaaaaagaattttgtttcttttcaagtctcattaaatatccaaatcacatgtcatcataggctactaagtgattataagttggtgatgaatacagtgttagttatctgatgaccagtaaacttatagcacacagaggaagtcagacacataataccttcccccsctccaccaaaaaaaaagtacataattttattttccctgttttttgttaactctccatgtccaaggctacattaacaaaatatatggcagaatactttatctatatatagagataggaaaaaagacagaaacaaagccttctgaggccaatcatttctttattcaaatcaaatcaagccatcttaatcaactctgtaagcacttcttgaaattttatacatagcaactggatattgcctacatgcattgttcttagagtcattaagactttagatggtattttaaaaatataactccatgtgagttagctaaacaatttgattgggcaaggaaagcaaaaac

SEQ ID NO: 636622 - DNA, 620 bp, Homo sapiens
gttacaggcactgagcaaaagacactttggcaaatatactcatgatatgagcatctggcatttcaacttatcgcatgtgtcaagcttatgttattggatatatgtggggagctacaaaaaagaattttgtttcttttcaagtctcattaaatatccaaatcacatgtcatcataggctactaagtgattataagttggtgatgaatacagtgttagttatctgatgaccagtaaacttatagcacacagaggaagtcagacacataataccttcccccgctccaccaaaaaaaaagtacataattttattttccctgttttttgttaactctccatgtccaaggctacattaacaaaatatatggcagaatactttatctatatatagagataggaaaaaagacagaaacaaarccttctgaggccaatcatttctttattcaaatcaaatcaagccatcttaatcaactctgtaagcacttcttgaaattttatacatagcaactggatattgcctacatgcattgttcttagagtcattaagactttagatggtattttaaaaatataactccatgtgagttagctaaacaatttgattgggcaaggaaagcaaaaac

SEQ ID NO: 636623 - DNA, 535 bp, Homo sapiens
aaaagacagaaacaaagccttctgaggccaatcatttctttattcaaatcaaatcaagccatcttaatcaactctgtaagcacttcttgaaattttatacatagcaactggatattgcctacatgcattgttcttagagtcattaagactttagatgrtattttaaaaatataactccatgtgagttagctaaacaatttgattgggcaaggaaagcaaaaacttactgtttctcttttttttttttttgttttaccagaacaatacttggtattaatacagtagtacatcttggagcatgctggattatgggaaaatggcaaaaaatctacaaatgtgttacggaactaattcatttgtatgcagcaaaaatgccagataaattttatgtaaaacccgaaggttatttattgactgtcaccactggaaagatgacaatgttgtcaagcatagcttgatccagaacccagacaccctcagaatccatgtcatcagttggttttcttgcgtgtggctcatctgaggatttaaatgt

SEQ ID NO: 636624 - DNA, 248 bp, Homo sapiens
tggtattttaaaaatataactccatgtgagttagctaaacaatttgattgggcaaggaaagcaaaaacttactgtttctcttttttttttttttgttttaccagaacaatacttggtattaatacagtagtacatcttggagcatgctggattatgggaaaatggcaaaaaatctacaaatgtgttayggaactaattcatttgtatgcagcaaaaatgccagataaattttatgtaaaacccgaagg

SEQ ID NO: 636625 - DNA, 630 bp, Homo sapiens
attgcctacatgcattgttcttagagtcattaagactttagatggtattttaaaaatataactccatgtgagttagctaaacaatttgattgggcaaggaaagcaaaaacttactgtttctcttttttttttttttgttttaccagaacaatacttggtattaatacagtagtacatcttggagcatgctggattatgggaaaatggcaaaaaatctacaaatgtgttacggaactaattcatttgtatgcagcaaaaatgccagataaattttatgtaaaacccgaaggttatttattgactgtcaccactggaaagatgacaatgttgtcaagcatagcttgatccagaacycagacaccctcagaatccatgtcatcagttggttttcttgcgtgtggctcatctgaggatttaaatgtcctttgccatcttggggtctccccacagggtgcctctttagagcctcacagtggccttacttggccaagactgatgtcttagtctgtatctgttgcgataacagaaaaccttagacttggtaatgtataaagaacagaaatttatttcttacaattctggaggctcagaagtccaaaatccaggcctcagatcaggtgtctgctgagg

SEQ ID NO: 636626 - DNA, 609 bp, Homo sapiens
gggtttggggtagcaataaaatgtatatttattatttacttatttaatttttttaacttttgtgggtacataccagatgtatatatttatggggtacatgaaatattttgagaaaggcatacaatgtgtaatagtcacatgatagaaaatggggtatccatccctcaagcattgatccttkgtgttacaaacaagccagttgtactcttttagttattttaaaatgtatgattatgttattattgactgtagtaaccctggtgtgctaccaaatagtaggtcttattcattcttcatattttttctacctattaaccatccccacatcccctctacagcaaccccactactcttattgcccatcttaataccttccattatctctccataacagtgtaccggtgaatatgtgttagaggaaggaagggcagctaatgaggaaaacaaacaaagctgcctctttttttttcctgcaatcttcgccttcccggtggtaattctgatatcacctcttctaatgaccttgtctcatcttttgatattccatcttggttattaccaagctccttggcacgtggtaacaaattccaaaagtcctacatgtacata

SEQ ID NO: 636627 - DNA, 609 bp, Homo sapiens
gggtttggggtagcaataaaatgtatatttattatttacttatttaatttttttaacttttgtgggtacataccagatgtatatatttatggggtacatgaaatattttgagaaaggcatacaatgtgtaatagtcacatgatagaaaatggggtatccatccctcaagcattgatcctttgtgttacaaacaagccagttgtactcttttagttattttaaaatgtatgattatgttattattgactgtagtaaccctggtgtgctaccaaatagtaggtcttattcattcttcatattttttctacctattaaccatccccacatcccctctacagcaaccccactactcttattgcccatcttaataccttccattatctctccataacagtgtacckgtgaatatgtgttagaggaaggaagggcagctaatgaggaaaacaaacaaagctgcctctttttttttcctgcaatcttcgccttcccggtggtaattctgatatcacctcttctaatgaccttgtctcatcttttgatattccatcttggttattaccaagctccttggcacgtggtaacaaattccaaaagtcctacatgtacata

SEQ ID NO: 636628 - DNA, 613 bp, Homo sapiens
tgacaaaatggcccagttaataattcaagagtggactttaaattttatattaaaaatcattcaggtcttagagtattgtgatttctagatatatatttcatttaagaatagttatgatccaaatgaaaccctgtgtgatcatttttccttcaagaaacattgtcaagttgctttgctaacaaagcactttctaaaaagaggsaacacaagtgctgaacatttactcatctggtcccaattctgagattcaatctgtgtgcattagttttattcatcgtcgccatccatttttgaaccaaaattgacctgacagtaggaaaaaagaaaacccttgagaagatgttttatctggatttctactgttatacactgctaataatttgtattttatttttcacttgtattgatttagcagagataattgaaaattatctaatatcctctcacttactatggctagcataatccccaataataaatagtagtatgcaataaatgtctatacactatataaaacggtttgaacgaaagaaaaatttgagttcataaacgaattatatttttattacagagatagaacaaaaaactcattagagtcattctcaatttttag

SEQ ID NO: 636629 - DNA, 657 bp, Homo sapiens
cacttactatggctagcataatccccaataataaatagtagtatgcaataaatgtctatacactatatamaacggtttgaacgaaagaaaaatttgagttcataaacgaattatatttttattacagagatagaacaaaaaactcattagagtcattctcaatttttagtttgtatctcagaagttctgcatatttaacaagaacttcagaaggtgcactctaaagacacactactctttaaacaaatgaatatggttttgaaaattgcagatcatttactaacctagaaatatggagaaaataaaacatgtgattcaaccagaatggactgtattttattaaaatcttagctttaaaattctggggataaacatcaatattagttatagagtggtggtcaccttgttaggtacctgccttttaatgactccttttttaataacaaagaaacctattaataaagaatgaccattacccaagcaagaatcatatgcagattattagagattgggtcaaaattacacatggataaatctaaaaggaagatttagtcttattctgactttaacatccattctcccttaactaagaaatcagtgagatcatttgccagacaaaaccaaatcagatttctttgggctcagctgttttattaa

SEQ ID NO: 636630 - DNA, 657 bp, Homo sapiens
cacttactatggctagcataatccccaataataaatagtagtatgcaataaatgtctatacactatataaaacggtttgaacgaaagaaaaatttgagttcataaaygaattatatttttattacagagatagaacaaaaaactcattagagtcattctcaatttttagtttgtatctcagaagttctgcatatttaacaagaacttcagaaggtgcactctaaagacacactactctttaaacaaatgaatatggttttgaaaattgcagatcatttactaacctagaaatatggagaaaataaaacatgtgattcaaccagaatggactgtattttattaaaatcttagctttaaaattctggggataaacatcaatattagttatagagtggtggtcaccttgttaggtacctgccttttaatgactccttttttaataacaaagaaacctattaataaagaatgaccattacccaagcaagaatcatatgcagattattagagattgggtcaaaattacacatggataaatctaaaaggaagatttagtcttattctgactttaacatccattctcccttaactaagaaatcagtgagatcatttgccagacaaaaccaaatcagatttctttgggctcagctgttttattaa

SEQ ID NO: 636631 - DNA, 619 bp, Homo sapiens
cactatataaaacggtttgaacgaaagaaaaatttgagttcataaacgaattatatttttattacagagatagaacaaaaaactcattagagtcattctcaatttttagtttgtatctcagaagttctgcatatttaacaagaacttcagaaggtgcactctaaagacacactactctttaaacaaatgaatatggttttgaaaattgcagatcatttactaacctagaaatatggagaaaataaaacatgtgattcaaccagaatggactgtattttattaaaatcttagmtttaaaattctggggataaacatcaatattagttatagagtggtggtcaccttgttaggtacctgccttttaatgactccttttttaataacaaagaaacctattaataaagaatgaccattacccaagcaagaatcatatgcagattattagagattgggtcaaaattacacatggataaatctaaaaggaagatttagtcttattctgactttaacatccattctcccttaactaagaaatcagtgagatcatttgccagacaaaaccaaatcagatttctttgggctcagctgttttattaacattctcctttttataacattc

SEQ ID NO: 636632 - DNA, 619 bp, Homo sapiens
cactatataaaacggtttgaacgaaagaaaaatttgagttcataaacgaattatatttttattacagagatagaacaaaaaactcattagagtcattctcaatttttagtttgtatctcagaagttctgcatatttaacaagaacttcagaaggtgcactctaaagacacactactctttaaacaaatgaatatggttttgaaaattgcagatcatttactaacctagaaatatggagaaaataaaacatgtgattcaaccagaatggactgtattttattaaaatcttagctttaaaattctggggataaacatcaatattagttatagagtggtggtcaccttgttaggtayctgccttttaatgactccttttttaataacaaagaaacctattaataaagaatgaccattacccaagcaagaatcatatgcagattattagagattgggtcaaaattacacatggataaatctaaaaggaagatttagtcttattctgactttaacatccattctcccttaactaagaaatcagtgagatcatttgccagacaaaaccaaatcagatttctttgggctcagctgttttattaacattctcctttttataacattc

SEQ ID NO: 636633 - DNA, 564 bp, Homo sapiens
ggtcaattttcttctgcaagtcagcttgctctcattataacgtgtactggcagcatgccgttctaattttgcatgcagtatctccaatttgtttgtccttgagttctataactatagaaatggttgtagagtacctggattttggtgagaaatctcaactgctaggctaagctttatctagttaaagttccctcttgtgtagaaaacaagaaatttagggcattttctgaatcaaacatgatcattcatacttcctgkttccagtagcttatagtttgatcattttaccatattatgccccagattgacaaaaaaaaaaaaaaacttttctgacttaaaagcgctctaatgaaaaaggcaggagccacagttgaatatatgttcaccacaaagacaaagtcaggagtgatggacaagcttattctcaataataatctgatgagaaaatgaaaaggatgatctgatgatgacctctttccacacatctctgtatgtgtatgcatgtgtgtgtgtaactgggttggtgccagtaggctgaagaaagattggggtcctaaggaaatt

SEQ ID NO: 636634 - DNA, 593 bp, Homo sapiens
ccagtaggctgaagaaagattggggtcctaaggaaatttgtaaacttaaaataagaaaaaaataaataaatgtcttatttcttcctaggcatctcaggatcttgaacattatgagaacaagaatatgtgcaatatcttaactagacatttgtacttataagttagatgatgaaggaccccagagtccctatttcctccaaaagttcgtatcaggtaaaatcaagcataaactttcaaagaggaagaaaacattcagagtcaactaaatccaatatcctctcattgttgggaaaataccaaggatccaaaaatacagttgacccttaaataacacaagtttgaacttcatgagtccacttatatagggtagatttcttctgcgtctgctacccctgagayagcaagaccaacccgtcctcttccttctcctcctcagcctactcaatgtgaagacaataaagatgaagacctttataatgattcgcttccacttaataaatagtaaatatatttctgttcatatgattttccctagtttactttattgtaagaatatactgtataatacttacatcatacaaaatatgtgttaa

SEQ ID NO: 636635 - DNA, 494 bp, Homo sapiens
atacaacaataacaccaacaccatttactcttaggaacacctgcaccttgctaagtggtttgcagtcctcatgcccactgggtctatctcagttaaatcaaaggttaattctgccattgaaaaattttccacttaacaatgatatttctgttatagacattttctatttttygttttcattatttttaatttttctaaaattctaagcatttcttgtatcttgaagcctaatgagatttttttcttgaaggtttctaaaagagagccctatttttataccaaatttcatatcccagatattaattaaacataattttacttgattactatataatttggctcttgagccaaagatttattgctttactgtcaaaatacaaactttattgaatacataagaatatatcagtaagataatttggggcatacaattttaacaaattgattaattaaattaacctcagttgcctcatttaatctgaagccttcaattg

SEQ ID NO: 636636 - DNA, 494 bp, Homo sapiens
atacaacaataacaccaacaccatttactcttaggaacacctgcaccttgctaagtggtttgcagtcctcatgcccactgggtctatctcagttaaatcaaaggttaattctgccattgaaaaattttccacttaacaatgatatttctgttatagacattttctatttttcgttttcattatttttaatttttctaaaattctaagcatttcttgtatcttgaagcctaatgagatttttttcttgaaggtttctaaaagagagccctatttttawaccaaatttcatatcccagatattaattaaacataattttacttgattactatataatttggctcttgagccaaagatttattgctttactgtcaaaatacaaactttattgaatacataagaatatatcagtaagataatttggggcatacaattttaacaaattgattaattaaattaacctcagttgcctcatttaatctgaagccttcaattg

SEQ ID NO: 636637 - DNA, 605 bp, Homo sapiens
attaagctaaagtcatattttaagggaaatgtatagctataaatgcctttaaaagaaaaaaagatctcaaatcaacaatttaatcttctaccttaagatagtggaaaacaaagagcaaattwaactcaaaatgaaagaaggaatagttaagatgcaaaatagagaaaatcaatggaactaaaggcatggtctttggaacaacaaaattgacagattaaaaaaagggggggcggaatctaattactaaaattaagaatgaattaattgaaaaaaataatttacattagtaatttttaaagtttccatacagaaaagacccactgtttcactgtctgcttctatgagtttaacttttttagattccacgtagaagtgagatcatacagcacagatggcttaacaggtgaattctgccaaacctttaaagatattaatatcaactcctttcaaactcctccaaaaaatatacaagaggaagaaacactttccaacagattatataaggcatctatttccctgacacaaaccccagaagacatcataagtaaacaactgaccaaaatcttttatgaagacacaaaaatcttcaacaaaatattagacaa

SEQ ID NO: 636638 - DNA, 605 bp, Homo sapiens
attaagctaaagtcatattttaagggaaatgtatagctataaatgcctttaaaagaaaaaaagatctcaaatcaacaatttaatcttctaccttaagatagtggaaaacaaagagcaaattaaactcaaaatgaaagaaggaayagttaagatgcaaaatagagaaaatcaatggaactaaaggcatggtctttggaacaacaaaattgacagattaaaaaaagggggggcggaatctaattactaaaattaagaatgaattaattgaaaaaaataatttacattagtaatttttaaagtttccatacagaaaagacccactgtttcactgtctgcttctatgagtttaacttttttagattccacgtagaagtgagatcatacagcacagatggcttaacaggtgaattctgccaaacctttaaagatattaatatcaactcctttcaaactcctccaaaaaatatacaagaggaagaaacactttccaacagattatataaggcatctatttccctgacacaaaccccagaagacatcataagtaaacaactgaccaaaatcttttatgaagacacaaaaatcttcaacaaaatattagacaa

SEQ ID NO: 636639 - DNA, 605 bp, Homo sapiens
attaagctaaagtcatattttaagggaaatgtatagctataaatgcctttaaaagaaaaaaagatctcaaatcaacaatttaatcttctaccttaagatagtggaaaacaaagagcaaattaaactcaaaatgaaagaaggaatagttaagatgcaaaatagagaaaatcaatggaactaaaggcatggtctttggaacaacaaaattgacagattaaaaaaagggggggcggaatctaattactaaaattaagaatgaattaattgaaaamaataatttacattagtaatttttaaagtttccatacagaaaagacccactgtttcactgtctgcttctatgagtttaacttttttagattccacgtagaagtgagatcatacagcacagatggcttaacaggtgaattctgccaaacctttaaagatattaatatcaactcctttcaaactcctccaaaaaatatacaagaggaagaaacactttccaacagattatataaggcatctatttccctgacacaaaccccagaagacatcataagtaaacaactgaccaaaatcttttatgaagacacaaaaatcttcaacaaaatattagacaa

SEQ ID NO: 636640 - DNA, 588 bp, Homo sapiens
caaaataaagaagacctaaataagtgttaagttaccccattttgatggatcagaagacttcatattgttaggataacaatatctgccaaattgatgcacagctacaattcaatccctatcaaaatccagctgatttacttgccaaaatcaacaagcaaatactaaaattcatatggaaattcaagctgaccaataacagtcaaaacaattttgaaaaagaagaacaaatttggaaaagaagaacaaatttggagggcacacagttcttggtcataaaacttagtataaaactgtgtaatcaagactgagataaagttatagggtaaatatatagaccaatggatggaaatgaaagtctctaaagaaatcctcacatttacagtcaattcatattgaacaatggtcacaaaacaattagggggggaagaatggtgctgggatatcagaatattcataaacaaaagaatgaagttgggcaccttcctcacaccaaatgccacwcacaaactttaactcaaaatgaacacagacttaaaatgtaagagcttaaattatacaaacttagaagaaaatatccgagtaaagatt

SEQ ID NO: 636641 - DNA, 573 bp, Homo sapiens
ttattttttagaaggggtctccctctttcgcccaggatagagtgcagtggcgtgatctcagcttactgcaacctctgcctcctgggttcaagagattctcttgcctcagcctctcaagtagctggaattacaggcacctgccacagcacctggctaattcttgtatttttagtagagacggggtttcaccatgttggccagctggtctcgaactcctggcctcatgtgatccatccrcctcggcctcccaaaatgctgggattacaggtgtgagcccctactcccggccttcacctttaatttttaaccctactaagttcagtgagcagtcaaaggtcttgtgtgcgaacgagatgtagagaggtgcaaattcaaacaataaaaacaaatgattttgtaaactcaaataaagcaaatcaaagaaagtaaaacattgttccgaactgaagcaaacctagggattgatacattgtatagcacgatgatgtgcagcaaacaatgtcagagtacatatttcaccttagttctcattgatgtgtctctgatgcataagaataaaacagagcaagaaat

SEQ ID NO: 636642 - DNA, 573 bp, Homo sapiens
ttattttttagaaggggtctccctctttcgcccaggatagagtgcagtggcgtgatctcagcttactgcaacctctgcctcctgggttcaagagattctcttgcctcagcctctcaagtagctggaattacaggcacctgccacagcacctggctaattcttgtatttttagtagagacggggtttcaccatgttggccagctggtctcgaactcctggcctcatgtgatccatccgcctcggcctcccaaaatgctgggattacaggtgtgagcccctactcccggccttcacctttaatttttaaccctactaagttcagtgagcagtcaaaggtcttgtgtgcgaacgagatgtagagaggtgcaaattcaaacaataaaaacaaatgattttgtaaactcaaataaagcaaatcaaagaaagtaaaacattgytccgaactgaagcaaacctagggattgatacattgtatagcacgatgatgtgcagcaaacaatgtcagagtacatatttcaccttagttctcattgatgtgtctctgatgcataagaataaaacagagcaagaaat

SEQ ID NO: 636643 - DNA, 541 bp, Homo sapiens
gaactgaagcaaacctagggattgatacattgtatagcacgatgatgtgcagcaaacaatgtcagagtacatatttcaccttagttctcattgatgtgtctctgatgcataagaataaaacagagcaagaaatagaggaaatgaatgcaaatgtagtgtggaaaggtgaggaagaatttattagccatatttcatgtaggcatcaagccacaatcactaacttagtgtcttcagtagaccgtaatgttttcatagaagttttgaatggaaagagtagcatatacagaaaaataaaaagaagwgatagttgagatgatttattaaatatacccaggaaacctcacctatcagcattttgttgatgaaactataattggtcctagacacaaaaattcaacctagaatttactccacaaaccaatagaaaatataaaatacaaataaactgaagtgataggattaatcttatttgaattttattcatttttttcattaggagtagaaatttcttttgaaccagacttgatcattggaatgacca

SEQ ID NO: 636644 - DNA, 589 bp, Homo sapiens
tcaactattataaatattcatcagttagaaatggggaatattcatcagttagaaatagataaatatacctgaaagtaagaaaacaacaygaatagtaggaaccaacgttttctagtaagggtatggagaaagtcgtctgcacacgtagaactggggacaaggatttgaagcatatgtgaagccctgggctagggtcctacactgtgcagagctaagactctagatatgctgtctggccacaccagggcccaggaatctctcatactatcctcacccccctggagagtgccagaacccagctgagatacaaccatcgtcatgtccaagaatggcagaagaatggcaccatggacatgaccatggacattcttggagatgacgtgggttgtaaccaggtcccagagtggggcatcacattaggaagcagcttgaaaccacattggtcacacatgagaaaagccctaaacaagatgaccatgaaagacttggaccagagctgggctaaaagaccagtgctgaggtcattactaaagcatccacaaaggataacctcatgctccatacctggacagaaactgtgattcaccca

SEQ ID NO: 636645 - DNA, 571 bp, Homo sapiens
tcgtctgcacacgtagaactggggacaaggatttgaagcatatgtgaagccctgggctagggtcctacactgtgcagagctaagactctagatatgctgtctggccacaccagggcccaggaatctctcatactatcctcacccccctggagagtgccagaacccagctgagatacaaccatcgtcatgtccaagaatggcagaagaatggcaccatggacatgaccatggacattcttggagatgacrtgggttgtaaccaggtcccagagtggggcatcacattaggaagcagcttgaaaccacattggtcacacatgagaaaagccctaaacaagatgaccatgaaagacttggaccagagctgggctaaaagaccagtgctgaggtcattactaaagcatccacaaaggataacctcatgctccatacctggacagaaactgtgattcacccatactatgacctcaaaccaagaatcactgagtataagaccagcccagcacagtgagaaacacagcagcatgttcaacaaatggaacacatgaaagtgaggaaaaacagggaactg

SEQ ID NO: 636646 - DNA, 571 bp, Homo sapiens
tcgtctgcacacgtagaactggggacaaggatttgaagcatatgtgaagccctgggctagggtcctacactgtgcagagctaagactctagatatgctgtctggccacaccagggcccaggaatctctcatactatcctcacccccctggagagtgccagaacccagctgagatacaaccatcgtcatgtccaagaatggcagaagaatggcaccatggacatgaccatggacattcttggagatgacgtgggttgtaaccaggtcccagagtggggcatcacattaggaagcagcttgaaaccacattggtcacacatgagaaaagccctaaacaagatgaccatgaaagacttggaccagagctgggctaraagaccagtgctgaggtcattactaaagcatccacaaaggataacctcatgctccatacctggacagaaactgtgattcacccatactatgacctcaaaccaagaatcactgagtataagaccagcccagcacagtgagaaacacagcagcatgttcaacaaatggaacacatgaaagtgaggaaaaacagggaactg

SEQ ID NO: 636647 - DNA, 571 bp, Homo sapiens
tcgtctgcacacgtagaactggggacaaggatttgaagcatatgtgaagccctgggctagggtcctacactgtgcagagctaagactctagatatgctgtctggccacaccagggcccaggaatctctcatactatcctcacccccctggagagtgccagaacccagctgagatacaaccatcgtcatgtccaagaatggcagaagaatggcaccatggacatgaccatggacattcttggagatgacgtgggttgtaaccaggtcccagagtggggcatcacattaggaagcagcttgaaaccacattggtcacacatgagaaaagccctaaacaagatgaccatgaaagacttggaccagagctgggctaaaagaccagtgctgaggtcattactaaagcatccacaaaggataacctcatgctccatacctggasagaaactgtgattcacccatactatgacctcaaaccaagaatcactgagtataagaccagcccagcacagtgagaaacacagcagcatgttcaacaaatggaacacatgaaagtgaggaaaaacagggaactg

SEQ ID NO: 636648 - DNA, 601 bp, Homo sapiens
cttggggatcattagaaagtcccttgtcatgggaagtatagatctttaagtcatttttaagtgtggtccagggacaaacaataacacagactgtgaaaagaacaaattcagagtgtgytgtttcttgtggtgccctgaagttagagagccctggctctccagatctgattgtgtgtatcacggatgtaagagtatttaccccaggcaaactggcaagtgctacatattggaggttttcttttgtaaaaaaacattctggcacactgtaagctcttgtttcattttcttggaaaatgtagatatcgcttagaaaatagaatattttacataattttatcaatttaattcaattatatataaattaattattacttattaaagtgctaacaatttatttttctttttaaattaaatctagagcttttaataatttaaatttaaattattaattataacaccaatggagagaaagaataaggaataattgcatttcagtcttttttttttaacagataaagccatcctttaaaggcataatgctatgaaggactgatccatacatttacacatcattacagtctatccttgtagatgtataatg

SEQ ID NO: 636649 - DNA, 601 bp, Homo sapiens
cttggggatcattagaaagtcccttgtcatgggaagtatagatctttaagtcatttttaagtgtggtccagggacaaacaataacacagactgtgaaaagaacaaattcagagtgtgctgtttcttgtggtgccctgaagttagagagccctggctctccagatctgattgtgtgtatcacggatgtaagagtatttaccccaggcaaactggcaagtgctacatattggaggttttcttttgtaaaaaaacattctggcacactgtaagctcttgtttcattttcttggaaaatgtagatatcgcttagaaaatagaatattttacataattttatcaatttaattcaattatatataaattaattattacttattaaagtgctaacaatttatttttctttttaaattaaatmtagagcttttaataatttaaatttaaattattaattataacaccaatggagagaaagaataaggaataattgcatttcagtcttttttttttaacagataaagccatcctttaaaggcataatgctatgaaggactgatccatacatttacacatcattacagtctatccttgtagatgtataatg

SEQ ID NO: 636650 - DNA, 601 bp, Homo sapiens
cttggggatcattagaaagtcccttgtcatgggaagtatagatctttaagtcatttttaagtgtggtccagggacaaacaataacacagactgtgaaaagaacaaattcagagtgtgctgtttcttgtggtgccctgaagttagagagccctggctctccagatctgattgtgtgtatcacggatgtaagagtatttaccccaggcaaactggcaagtgctacatattggaggttttcttttgtaaaaaaacattctggcacactgtaagctcttgtttcattttcttggaaaatgtagatatcgcttagaaaatagaatattttacataattttatcaatttaattcaattatatataaattaattattacttattaaagtgctaacaatttatttttctttttaaattaaatctagagcttttaataatttaaatttaaattattaattataacaccaayggagagaaagaataaggaataattgcatttcagtcttttttttttaacagataaagccatcctttaaaggcataatgctatgaaggactgatccatacatttacacatcattacagtctatccttgtagatgtataatg

SEQ ID NO: 636651 - DNA, 587 bp, Homo sapiens
taatatattttaaaacactttatgcaaacaacacacgttcattatagaaaaaacaaaatatgaatgttaaaatatagccagtaattatcatcttattgagctagctttcttcctattcagttcatgttgtgccagtaaaatatctggtcagattaaggtaaaataattgtcgtaaaagtgaaggagcagcattctacacacagagcacatcctgtgaagtggaaggatgcctgatacaactgagaacatgaaagaagacagatggagggagatctcagagaaaagtggcaggactggcaggcacaggtaggcaagagccaggtaaggcagggtctctgaatgattctcatgcagggtaacaccatgctcacatttgtgttttacaaagacttcactggttgcagtataaagaatgcgataaagaagggaatgggagaatatagtcataattccagcccctgatatactaaaataaagtaaaattcayagcacagattatcacaggtagagataagttagagcagataaaggtggagtgacaggtttggttgcagtccctgtctccaagtgactactaatgactatga

SEQ ID NO: 636652 - DNA, 607 bp, Homo sapiens
ttccattttagtgattattactgagattgagcatcttttcttaggtttttcagccttgtgttggtgagtcaattattcacgtctcttgtctatttcttttactgcattgttttttataaagagatataggatttaaacatattctgcatatgaattattgggtattgttaaaagaaaaacttcagctgaattaattttaaaggggtttaattgagcaatgaatgatttgcgtttcaggctgctcccagaatgacagcagattcagagaaactccaggggtgcmatgtggtcagaataaatttatagacaaaaaaagtaaagtgaggtacagaaatcagaagcgaggtacagaaacagctggattggttacagcttggcatttgctttatttgaacacagtttgaatgctcagcagtgtatgagtggttgaagtgtggctcctaggattggccaagactcagcaattgttacaggcgcatattcctagttaggttttcagtctcgtctacctattaagctaggttatggttcctccacaaagactcaaatacagaattacagactccttctcaggccatatttagtttgctttaacaatattaatatt

SEQ ID NO: 636653 - DNA, 607 bp, Homo sapiens
ttccattttagtgattattactgagattgagcatcttttcttaggtttttcagccttgtgttggtgagtcaattattcacgtctcttgtctatttcttttactgcattgttttttataaagagatataggatttaaacatattctgcatatgaattattgggtattgttaaaagaaaaacttcagctgaattaattttaaaggggtttaattgagcaatgaatgatttgcgtttcaggctgctcccagaatgacagcagattcagagaaactccaggggtgcaatgtggtcagaataaatttatagacaaaaaaagtaaagtgaggtacagaaatcagaagcgaggtacagaaacagctggattggttacagcttggcatttgctttatttgaacacagtttgaatgctcagcagtgtatgagtggttgaagtgtggctcctaggattggccaagactcagcaattgttacaggcgcatattcctagttaggttttcagtctcgtctacctrttaagctaggttatggttcctccacaaagactcaaatacagaattacagactccttctcaggccatatttagtttgctttaacaatattaatatt

SEQ ID NO: 636654 - DNA, 607 bp, Homo sapiens
ttccattttagtgattattactgagattgagcatcttttcttaggtttttcagccttgtgttggtgagtcaattattcacgtctcttgtctatttcttttactgcattgttttttataaagagatataggatttaaacatattctgcatatgaattattgggtattgttaaaagaaaaacttcagctgaattaattttaaaggggtttaattgagcaatgaatgatttgcgtttcaggctgctcccagaatgacagcagattcagagaaactccaggggtgcaatgtggtcagaataaatttatagacaaaaaaagtaaagtgaggtacagaaatcagaagcgaggtacagaaacagctggattggttacagcttggcatttgctttatttgaacacagtttgaatgctcagcagtgtatgagtggttgaagtgtggctcctaggattggccaagactcagcaattgttacaggcgcatattcctagttaggttttcagtctcgtctacctattaagctaggttatggttcctccacaaagactcaaatacagaattacagactccttctcaggccatayttagtttgctttaacaatattaatatt

SEQ ID NO: 636655 - DNA, 542 bp, Homo sapiens
tttaattaactaggtactaagtgtcaagttagcttttagctataggttattggaagatgagtgacattcagcttctgccattaaaaatcttcaagccttagtgtgagatgtagatacacaagaagatttttatcatcctgtggtaagggcagtgatggagactgggctggtttgaatgcacatggagggtyggctccctgaaattggtttatgtggtgaagggtaagagttcctgaaagaaatgttatgcattacattagtgagcttactttaaacaagggggaatgtaaaattagcaacactggagaagggagagggatgaggcaggaggacaatctaattctatgcatctttaaaattttaacgtatgagaacaacatattttctgagttttattgggagtgctcccaaataatgaacaagagttggtgagtcaggtaaccccaattccagaagctgttagctttgtgcatgaatcatgctccctggggatcagcattcaatccaggctgtgaggtgaagctgattaggtttagacatct

SEQ ID NO: 636656 - DNA, 426 bp, Homo sapiens
aggggacaggggaggtatagcattaggagatgatatacctaatgtaaacgatgagttaatgggtacagcacaccaacatgacacatgtatacatatgtaacaaaactgcacgttgtgcacatgtaccctagaacttaagatatayatatatataaagatcagattctgaaatactagaagtaaggacattaatgtttaaatttgtggagaacataatttaacttacaactgagagaaacagaaggctagatccaaagagggccagacaccattgatgggagaatagacttgggcaactccattctaaatggcacatctaaaaatatatgaaatgagactgacatgtagaattaatcaggaaatttatattgatgctccaccatatgccaatctctatgcaagtcattgtataaaataaacaaaata

SEQ ID NO: 636657 - DNA, 530 bp, Homo sapiens
ttctcatgttcatcctctccttcactcgtgcatattataaaagactctgtatgtgcaaaaaaaaaaacactgggagagagggtcaagtcaagtcattggtgtttattactgaagaatgagcttacctttctgactagtaaacttctcwaaataattttttaaaattaactcctttatgtatttcaagttgatgtataaaatgtttcatcctaattttaacttgttgcatgtgatgtaatttctagtgtgttgtaatatattgatgttataatttaaaattgattcatcaccctttgaaatttactctcgtgaacattttgaaatgtacaacattctattattacctatattcaccatgctgtgcaatagagctcaaaatataaaatattctttctgtctgagatttcgtaccctttggccatcatctccctcttcccctcatcccctagcctctgtaaccacccttctactctttgcttctatgagttttgttgtttcagattccatatatatgtaagaactttcagtta

SEQ ID NO: 636658 - DNA, 499 bp, Homo sapiens
gtgccatgtggaataacttactttgtataggcaactcgttaaatggagttgcttgagttccctacgtatcttagatatcaacaccttatcagatgtatatttcgcaaatattttctcacaacattggttatcttttcactctgttaattgtttcctttgttgtgcaggagctttttagtttgatacaacccgatttgtctatgttcacttttataggcagtgcttttggggtcttacccmaaaaaaatctttgcccagaccaatgtcacaaagccttccccttatgccccttatgttttaaattgagtttaagttggttcttcatggtttgtcattcttgccattgcttttacatgtccctgctagtattctgataggctgaaccgaactgagggccagaaagcaagagggtccttttgaagagtcagctcacgggacttacagcaggtggagagtagatctgatgaagtgggagttacccaggacttcctatgaattc

SEQ ID NO: 636659 - DNA, 504 bp, Homo sapiens
ctgttgtctccttccccccaaaataaaggcattcacrtaataagacttttcctaatgtgacctaagagatcatctcaatcgacctctctggcgtctcatttttttttcatgtgttccttatagttcatccatccaaaaaaattgcagttcctcaatgttacactctcttggtctgttctcttagtgtaatcttccccatacacattctttgaccaaaattaacctttaatacttagctcactttgggaggccaaggcaggtggatcacttgaggtcaggagttagagaccagcctggccaatatgatgaaaccccttctctactaaaaatacaaaaattagctgggtgtgggggtgcacacttgtaatctcagatacttgggaggctgaggcaggagaactgcttgaacctggaggtggaggttgcagtgagccaaaatcgcaccgctgcactccaggctaggtgacagagtgagaaacagtctaaaaaaaaagaaaaaattag

SEQ ID NO: 636660 - DNA, 504 bp, Homo sapiens
ctgttgtctccttccccccaaaataaaggcattcacataataagacttttcctaatgtgacctaagagatcatctcaatcgacctctctggcgtctcatttttttttcatgtgttccttatagttcatccatccaaaaaaattgcagttcctcaatgttacactctcttggtctgttctcttagtgtaatcttccccatacacattcyttgaccaaaattaacctttaatacttagctcactttgggaggccaaggcaggtggatcacttgaggtcaggagttagagaccagcctggccaatatgatgaaaccccttctctactaaaaatacaaaaattagctgggtgtgggggtgcacacttgtaatctcagatacttgggaggctgaggcaggagaactgcttgaacctggaggtggaggttgcagtgagccaaaatcgcaccgctgcactccaggctaggtgacagagtgagaaacagtctaaaaaaaaagaaaaaattag

SEQ ID NO: 636661 - DNA, 504 bp, Homo sapiens
ctgttgtctccttccccccaaaataaaggcattcacataataagacttttcctaatgtgacctaagagatcatctcaatcgacctctctggcgtctcatttttttttcatgtgttccttatagttcatccatccaaaaaaattgcagttcctcaatgttacactctcttggtctgttctcttagtgtaatcttccccatacacattctttgaccaaaattaacctttaatacttagctcactttgggaggccaaggcaggtggatcacttgaggtcaggagttagagaccagcctggccaatatgatgaaaccccttctctactaaaaatacaaaaattagctgggtgtgggggtgcacacttgtaatctcagatacttgggaggctgaggcaggagaactgcttgaacctggaggtggaggttgcagtgagccaaaatcgcaccgctgcacyccaggctaggtgacagagtgagaaacagtctaaaaaaaaagaaaaaattag

SEQ ID NO: 636662 - DNA, 550 bp, Homo sapiens
gacctacaagctaaaccttaagaaagttcaggaaaaaaaaagtttggcaaaataagtctaagttgtctgctagaatatatttaaatgggatcaaagtctcccaacatccaaaatgtctagaatatgatgaaaaagcagatatcataccacaaaccaggaaaagcacaacctgaatagtatagacaatccactgttgccaatgagaaaatgaacaccaaaatgaatcagatattagaattatctgacaagaaatttagagcagccatcattcaaatgctccaatgaacaatttgaattatcttgaaacaaatgaagaaatggagaatcccagcaaataaattaaagttactaaagaattmtaaaggccttgcctaatagcctctgtgtgcaagtccaaggattcatcaatcctgctctgtgacagagaggccaaggccattggtcctcagcaacacatcctcatggttacatgtcatgtcattaataattttataataagctacagcatcttagattgtgcctgcctcaagagaaggctgtctcattagct

SEQ ID NO: 636663 - DNA, 634 bp, Homo sapiens
atataaggtgctgagtattagaagacaatgtattttctgcgtagacatggacatagaatgtggaataacagtcatcggagactcagaagggtgggagggtgggaagggggtgagggatgagaaattatttaagcaacacaatgtacactatttgggtgatggttacacttaaaggccagacttcaccactacacaacatatctatgtaacaaaactgcatttgcaccccttacatttagacaaataaaaaagtgtacttttcaacttgtcatttatccagtacttctttggrggcataaacattgtttcttcctcctctgcttgagtagttactcattgtctcataaatagagttggagtaaacttcctggttcttctcaatgtgactcacccaaaaccagttggatgcctcttctggagtggctgtatgactaaggaaaaagtgcaggaaacaagatgttctaaatatcatttcctttcattgttctttggctttgtttattgttttcttcaattgacacatggcagtagatccaatataaacacagtactttagtgaaatgtgatatagggcattcagtgcctcttttttgaaatcactatttgatatgcataccctcccacaaacacatag

SEQ ID NO: 636664 - DNA, 634 bp, Homo sapiens
atataaggtgctgagtattagaagacaatgtattttctgcgtagacatggacatagaatgtggaataacagtcatcggagactcagaagggtgggagggtgggaagggggtgagggatgagaaattatttaagcaacacaatgtacactatttgggtgatggttacacttaaaggccagacttcaccactacacaacatatctatgtaacaaaactgcatttgcaccccttacatttagacaaataaaaaagtgtacttttcaacttgtcatttatccagtacttctttggaggcataaacattgtttcttcctcctctgcttgagtagttactcattgtctcatamatagagttggagtaaacttcctggttcttctcaatgtgactcacccaaaaccagttggatgcctcttctggagtggctgtatgactaaggaaaaagtgcaggaaacaagatgttctaaatatcatttcctttcattgttctttggctttgtttattgttttcttcaattgacacatggcagtagatccaatataaacacagtactttagtgaaatgtgatatagggcattcagtgcctcttttttgaaatcactatttgatatgcataccctcccacaaacacatag

SEQ ID NO: 636665 - DNA, 623 bp, Homo sapiens
atgtaaatggcatcacacgctataaactcttctgaatctggcttcctcagaggaatatattttagattgctccttaacgttgcatgaattgatatttttggctattttataaccaagtaatattcctggccagacagacattaatttgtttatacattcactgttaaagaacttttgacgttttcccarggtagagctattaccaatagagctgctctaaacatttctgcagaagtaagtgtgtgtgaaataatttttcatttctctcgggtaaatatgtaggaaagaaactgcagaattgtatgtaagtttaggcttatgaaaaagtgtcaaactgcatcccttagcagtcattgtaccattttacattcccccagcattgcatgagagatccagttgctccatatccttgccaatgactggtattctcaattatttctaactttagcaatttcaatttcattgttatttttacttgccttttcctgacaactaagatgttcagtatattttcacttgattattggctattgttggagatatatatgtgtgtatatataatatatatatgttgtatgtgtatgctcacattttttggctattttaatttttgtcttcttatt

SEQ ID NO: 636666 - DNA, 623 bp, Homo sapiens
atgtaaatggcatcacacgctataaactcttctgaatctggcttcctcagaggaatatattttagattgctccttaacgttgcatgaattgatatttttggctattttataaccaagtaatattcctggccagacagacattaatttgtttatacattcactgttaaagaacttttgacgttttcccaaggtagagctattaccaatagagctgctctaaacatttctgcagaagtaagtgtgtgtgaaataatttttcatttctctcgggtaaatatgtaggaaagaaactgcagaattgtatgtaagtttaggcttatgaaaaagtgtcaaactgcatcccttagcagtcattgtaccattttacattcccccagcattgcatgagagatccagttgctccatatccttgccaatgactggtattctcaattatttctaactttagcaatttcaatttcattgttatttttacttgmcttttcctgacaactaagatgttcagtatattttcacttgattattggctattgttggagatatatatgtgtgtatatataatatatatatgttgtatgtgtatgctcacattttttggctattttaatttttgtcttcttatt

SEQ ID NO: 636667 - DNA, 551 bp, Homo sapiens
cagacagacattaatttgtttatacattcactgttaaagaacttttgacgttttcccaaggtagagctattaccaatagagctgctctaaacatttctgcagaagtaagtgtgtgtgaaataatttttcatttctctcgggtaaatatgtaggaaagaaactgcagaattgtatgtaagtttaggcttatgaaaaagtgtcaaactgcatcccttagcagtcattgtaccattttacattcccccagcattgcatgagagatccagttgctccatatccttgccaatgactggtattctcaattatttctaactttagcaatttcaatttcattgttatttttacttgccttttcctgacaactaagatgttcagtatattttcacttgattattggctattrttggagatatatatgtgtgtatatataatatatatatgttgtatgtgtatgctcacattttttggctattttaatttttgtcttcttattgaatgtcaagagttctttatatattatatatttatatcacagagagatataggtatgg

SEQ ID NO: 636668 - DNA, 463 bp, Homo sapiens
acatatatgtgtgtgtatgtgtgtttgtatttgtatacacatatacatgtgtatttgcaatgtgtgtattgcaatacacatattgcaaatatcaccaccctctctacaggctgactttttcctcgcttgatggtgtcttttgatgaacagaaggtattaattttcatgtggtccagttggtcaaacatttcctctctggataatgcttttggtccgatttaaggaactttaagtactccaagctcataaagatgggttccaacaatctattttttacccaacagccagtgaatcttccttgaaatataaataagacaacagaatactattcccacactcaaaaccttctaatggcttcccctcatktgtaaaataaatctgaactctagcccctgactgggtttccttcactcttccttcacttgtttctcccaatcacattgatctcgctcttccttaaaca

SEQ ID NO: 636669 - DNA, 565 bp, Homo sapiens
tgtaaaataaatctgaactctagcccctgactgggtttccttcactcttccttcacttgtttctcccaatcacattgatctcgctcttccttaaacatgccaagttggttcccacctgctgttttttttctgatcgaaatattctttctctcacttctaattggcttattccctcactcctttcaagtttcttctcaaatatcacctccttagagtagttttccctcaaagtctataaagcaagcaaacaacaggtagcccagacataaaatatcctgtgtattattttagcctgctgtggtttctttttattcacaagacttatctctacctgacacatatttattcacccacttcatttcactacagtgtaaattgcatttacaaagagcctttgtatcttttgtttattgccttatctcagatacctggaacaattatttactcataagacagctcaataatatttaccgaatgttgaataatgttgccacatgcctttgcagaacaggtacttaatgaatgtgtattaacmtgcattgattttccccattttctcagtcat

SEQ ID NO: 636670 - DNA, 598 bp, Homo sapiens
gtttctttttattcacaagacttatctctacctgacacatatttattcacccacttcatttcactacagtgtaaattgcatttacaaagagcctttgtatcttttgtttattgccttatctcagatacctggaacaattatttactcataagacagctcaataatatttaccgaatgttgaataatgttgccacatgcctttgcagaacaggtacttaatgaatgtgtattaacctgcattgattttccccattttctcagtcatttcaagcttatctaacttaaagccacactggctcaagagaaatagagagctactgtctcaggcttagactctgtacttatgacataaaattgcttttttcaacaggcaacagagcattgagtggttaactacataggactmactttcatgtttctttcattgtatgaaaggtcattgtagaatttgtatttgaccaataatacaatgaaagacaagaaactttgtctgggatgggaaatcttttcaagccatatatctggtgagtttccatcttgtcacatagaaaaagcaacccgaggaacagaatatatttggtgttagtcaccaaacaag

SEQ ID NO: 636671 - DNA, 499 bp, Homo sapiens
gtgccatgtggaataacttactttgtataggcaactcgttaaatggagttgcttgagttccctacgtatcttagatatcaacaccttatcagatgtatatttcgcaaatattttctcacaacattggttatcttttcactctgttaattgtttcctttgttgtgcaggagctttttagtttgatacaacccgatttgtctatgttcacttttataggcagtgcttttggggtcttaccccaaaaaaatctttgcccagaccaatgtcacaaagccttccccttatgccccttatgttttaaattgagtttaagttggttcttcatggtttgtcattcttgccattgcttttacatgtccctgctagtattctgataggctgaaccgaactgagggccagaaagcaagrgggtccttttgaagagtcagctcacgggacttacagcaggtggagagtagatctgatgaagtgggagttacccaggacttcctatgaattc

SEQ ID NO: 636672 - DNA, 625 bp, Homo sapiens
agtcattttcatcaaacaatctatacataacctttttgtgtgtgtgattttcttgaaagacacctcctttgatgtatattatggatgcattaacattatgaactcattgatgatctgtaactcatgcccaactgaagctgatccctgacttcttgtatctaagaacactacccagcagtttggcactatgcttgggggccatagtaaatgcagaatcatcaacaaaaagcacacaaatagggccaggcaccgtggctcatgcctgtaaacccagcactttgggatgccgaggcgggcggatcatttgaggtcaggagttcgagatcagcctggccaagrtggcaaaacctcatctctactataaaaaatacaaataaaaaaaaattagccaggcatggtggcttccacctgtagtcccagctactcaggaggctgaggcaggagaatcgcttgaacccggaaggcagaggttgcagtgagctgagactgtgccactgcactccagcctgggcaacagagtgactctgaagaaaaaaaaaaaaagcacacaaatgtgaaaatcacggcagtacatagactgcaaaatgagcatgtgttcctactgtgagagctgaaacaaaaaggc

SEQ ID NO: 636673 - DNA, 606 bp, Homo sapiens
tgtcttctgtatcttttatatttctctattactgcatgtgttatactctgctgaatttattagtttatgagcttctcaaaagattataagttttttgaaagcatgggctctcttacattcaatgttcattgagtaaacaccaatgaattataaaatgaattgaataatttttaattgatcaaatttgaacatatttttcatgattcatgatatctactttaggatgtaacactgttgaaatactgctacttctataaaataagatatatacaagtaaaaagatattcagtacattattcattaccttctattgtggcattctgyttacttttggacaaaaatactaagtaaattatgttttctttgaaggagctcataattttatggtagaagttagataagacaggctgaaagcctcagctttatcatctttagtacggtttatttggtgagtctctcaatctttatcagctttataatattaatgttgatacttattttagagaattgttgtaagcattaatcttagtcttcatgtaatatgttggtgttattatatataatctatcattgtactttgaggtatcttctaagtaaaataatata

SEQ ID NO: 636674 - DNA, 606 bp, Homo sapiens
tgtcttctgtatcttttatatttctctattactgcatgtgttatactctgctgaatttattagtttatgagcttctcaaaagattataagttttttgaaagcatgggctctcttacattcaatgttcattgagtaaacaccaatgaattataaaatgaattgaataatttttaattgatcaaatttgaacatatttttcatgattcatgatatctactttaggatgtaacactgttgaaatactgctacttctataaaataagatatatacaagtaaaaagatattcagtacattattcattaccttctattgtggcattctgcttacttttggacaaaaatactaagtaaattatgttttctttgaaggagctcataattttatggtagaagttagataagacaggctgaaagcctcagctttatcatctttagtasggtttatttggtgagtctctcaatctttatcagctttataatattaatgttgatacttattttagagaattgttgtaagcattaatcttagtcttcatgtaatatgttggtgttattatatataatctatcattgtactttgaggtatcttctaagtaaaataatata

SEQ ID NO: 636675 - DNA, 553 bp, Homo sapiens
ttcttcctggtgtaatttctctcattttggcacaaagacrtcaaagaagaaacaacagttctgagaatttgctgagatcaggtagggaaataaatgttttctaaaattaaaaatgcttaaccatagtctagagattttctaggttaaaattctaaatatataaataagatgtcatgtgatatttaaaagcttacctaaggaaactaaataataacaaaaaaaaaattaagatgaatgttgcttaaaagctgcccttaggaaaccgaatggtgataatgatataacgacagttatagagagggattcctatatcctatagcataaatgtgactgctaaatgaaatcttctacacacattttctaaaagttattgagctaaataaagacaacatatactatcattcaaaactcatactaagaggataattcataaataaagaatgtgataaatcctaatttactgataatttggaaataaactcctgaggtcagcagaggtgtttctaaaactattatcagcaatataattaagggaaagttaagctgaagatga

SEQ ID NO: 636676 - DNA, 553 bp, Homo sapiens
ttcttcctggtgtaatttctctcattttggcacaaagacgtcaaagaagaaacaacagttctgagaatttgctgagatcaggtagggaaataaatgttttctaaaattaaaaatgcttaaccatagtctagagattttctaggttaaaattctaaatatataaataagatgtcatgygatatttaaaagcttacctaaggaaactaaataataacaaaaaaaaaattaagatgaatgttgcttaaaagctgcccttaggaaaccgaatggtgataatgatataacgacagttatagagagggattcctatatcctatagcataaatgtgactgctaaatgaaatcttctacacacattttctaaaagttattgagctaaataaagacaacatatactatcattcaaaactcatactaagaggataattcataaataaagaatgtgataaatcctaatttactgataatttggaaataaactcctgaggtcagcagaggtgtttctaaaactattatcagcaatataattaagggaaagttaagctgaagatga

SEQ ID NO: 636677 - DNA, 553 bp, Homo sapiens
ttcttcctggtgtaatttctctcattttggcacaaagacgtcaaagaagaaacaacagttctgagaatttgctgagatcaggtagggaaataaatgttttctaaaattaaaaatgcttaaccatagtctagagattttctaggttaaaattctaaatatataaataagatgtcatgtgatatttaaaagcttacctaaggaarctaaataataacaaaaaaaaaattaagatgaatgttgcttaaaagctgcccttaggaaaccgaatggtgataatgatataacgacagttatagagagggattcctatatcctatagcataaatgtgactgctaaatgaaatcttctacacacattttctaaaagttattgagctaaataaagacaacatatactatcattcaaaactcatactaagaggataattcataaataaagaatgtgataaatcctaatttactgataatttggaaataaactcctgaggtcagcagaggtgtttctaaaactattatcagcaatataattaagggaaagttaagctgaagatga

SEQ ID NO: 636678 - DNA, 476 bp, Homo sapiens
aggtattgtgtaaaaagttacaagaagatggactctctgtagatgtcattgatttaataatgyggtgcctcacaataccaacagaagagagtactttgaataaaaaatgaattaagctacttaaactttcccatcataaaattattaaaataatttatcattgtttaaaaaggaatatccttgtatgtaataatgagcaggaaatctaagtcttcatttaatcaaagctatgagaagaaaacagagtgaagatgagacatagtctgatgaaaatacttaaaggaaaaaatctgtaaagcagggaagaaacctagcgcgcaaagatgagaaaatttatagcttaatcatttaaataagcaaccatcatatagaaatacaaaccaataggcataaatttaaaataggaatgaatgaacagcaaaagatatacaattgaagtggaaaaaattcagaaagacattaaagaaaaaagttat

SEQ ID NO: 636679 - DNA, 476 bp, Homo sapiens
aggtattgtgtaaaaagttacaagaagatggactctctgtagatgtcattgatttaataatgcggtgcctcacaataccaacagaagagagtactttgaataaaaaatgaattaagctacttaaactttcccatcataaaattattaaaataatttatcattgtttaaaaaggaatatccttgtatgtaataatgagcaggaaatctaagtcttcatttaatcaaagctatgagaagaaaacagagtgaagatgagacatagtctgatgaaaatacttaaagraaaaaatctgtaaagcagggaagaaacctagcgcgcaaagatgagaaaatttatagcttaatcatttaaataagcaaccatcatatagaaatacaaaccaataggcataaatttaaaataggaatgaatgaacagcaaaagatatacaattgaagtggaaaaaattcagaaagacattaaagaaaaaagttat

SEQ ID NO: 636680 - DNA, 476 bp, Homo sapiens
aggtattgtgtaaaaagttacaagaagatggactctctgtagatgtcattgatttaataatgcggtgcctcacaataccaacagaagagagtactttgaataaaaaatgaattaagctacttaaactttcccatcataaaattattaaaataatttatcattgtttaaaaaggaatatccttgtatgtaataatgagcaggaaatctaagtcttcatttaatcaaagctatgagaagaaaacagagtgaagatgagacatagtctgatgaaaatacttaaaggaaaaaatctgtaaagcagggaagaaacctagygcgcaaagatgagaaaatttatagcttaatcatttaaataagcaaccatcatatagaaatacaaaccaataggcataaatttaaaataggaatgaatgaacagcaaaagatatacaattgaagtggaaaaaattcagaaagacattaaagaaaaaagttat

SEQ ID NO: 636681 - DNA, 616 bp, Homo sapiens
aaaatttatagcttaatcatttaaataagcaaccatcatatagaaatacaaaccaataggcataaatttaaaataggaatgaatgaacagcaaaagatatacaattgaagtggaaaaaattcagaaagacattaaagaaaaaagttatctcagaaatgaataacaaaatataacctgcaaataaggaaatcaacacatatataacataaacatgtattaagaattccttcttttggatatataggcagccatgggattgttgtatcatatgttggtactatttttagtttttgagaaaccaccatactgttttctgtggtcgctstactaatttacattcccactaccagtttacgaatgtttcccttcttccatatccttgctggcctctgttatttttttgttattttaataatagcaattttaactggagtgagattatagttcattgtggctttgatttgcattcctctgatgattagctatgctgagcattttttcgtatacctggttgccatttatatgtcttcttttgagaaatgtctattcaaatcctttgcttatttttaattattattattattatttttgctgttgatttgagttgcttacgtat

SEQ ID NO: 636682 - DNA, 514 bp, Homo sapiens
tttgaagaattttcccaatattttcttctggtagtttcatagtttaaggtcgtacatttaagtctttaattcattatgagttgatatttgtatacagtgagagatagggatctagttttgttctgctggctatggctatccaggttcccagcaccatttgttaaagatagcgtccttctcttgtgtatattcttggtgcctttgttgaaaatgagttggctrtgaatgaagggatttatttctgagttctttattctgttgccttggtctatgtctctgtttctatcccagtaccataccgttttgattactatagctttctagtataattggaagtcaggtaattgtaatgcctccagctttgttttttttttgtttgtttgttttgttttgtttttttcctcaagattattttggctattctgggtcttttgtggctccatataaatttcagaattatttattttatttctgtgaagaatgtcattggtatgttgatagagattgcattgaa

SEQ ID NO: 636683 - DNA, 514 bp, Homo sapiens
tttgaagaattttcccaatattttcttctggtagtttcatagtttaaggtcgtacatttaagtctttaattcattatgagttgatatttgtatacagtgagagatagggatctagttttgttctgctggctatggctatccaggttcccagcaccatttgttaaagatagcgtccttctcttgtgtatattcttggtgcctttgttgaaaatgagttggctatgaatgaagggatttatttctgagttctttattctgttgccttggtctatgwctctgtttctatcccagtaccataccgttttgattactatagctttctagtataattggaagtcaggtaattgtaatgcctccagctttgttttttttttgtttgtttgttttgttttgtttttttcctcaagattattttggctattctgggtcttttgtggctccatataaatttcagaattatttattttatttctgtgaagaatgtcattggtatgttgatagagattgcattgaa

SEQ ID NO: 636684 - DNA, 514 bp, Homo sapiens
tttgaagaattttcccaatattttcttctggtagtttcatagtttaaggtcgtacatttaagtctttaattcattatgagttgatatttgtatacagtgagagatagggatctagttttgttctgctggctatggctatccaggttcccagcaccatttgttaaagatagcgtccttctcttgtgtatattcttggtgcctttgttgaaaatgagttggctatgaatgaagggatttatttctgagttctttattctgttgccttggtctatgtctctktttctatcccagtaccataccgttttgattactatagctttctagtataattggaagtcaggtaattgtaatgcctccagctttgttttttttttgtttgtttgttttgttttgtttttttcctcaagattattttggctattctgggtcttttgtggctccatataaatttcagaattatttattttatttctgtgaagaatgtcattggtatgttgatagagattgcattgaa

SEQ ID NO: 636685 - DNA, 514 bp, Homo sapiens
tttgaagaattttcccaatattttcttctggtagtttcatagtttaaggtcgtacatttaagtctttaattcattatgagttgatatttgtatacagtgagagatagggatctagttttgttctgctggctatggctatccaggttcccagcaccatttgttaaagatagcgtccttctcttgtgtatattcttggtgcctttgttgaaaatgagttggctatgaatgaagggatttatttctgagttctttattctgttgccttggtctatgtctctgtttctatcccagtaccrtaccgttttgattactatagctttctagtataattggaagtcaggtaattgtaatgcctccagctttgttttttttttgtttgtttgttttgttttgtttttttcctcaagattattttggctattctgggtcttttgtggctccatataaatttcagaattatttattttatttctgtgaagaatgtcattggtatgttgatagagattgcattgaa

SEQ ID NO: 636686 - DNA, 506 bp, Homo sapiens
tctgagttctttattctgttgccttggtctatgtctctgtttctatcccagtaccataccgttttgattactatagctttctagtataattggaagtcaggtaattgtaatgcctccagctttgttttttttttgtttgtttgttttgttttgtttttttcctcaagattattttggctattctgggtcttttgtggctccatataaatttcagaattatttattttatttctgtgaagaatgtcattggtatgttgatagagattgcattgaatctatagatctttgggtagaagggacatttaaaaatattaattcttccaatatgtgacagcagaatacctattcattatttttgygtcctcttcattctttcatcagtgttttatagttttcattgcagagatcttttccttcttttgttaaatttattcctaagcattttattttggtgtagctattataaatgagattgcttgcttgatttcagatcgttcactgttggc

SEQ ID NO: 636687 - DNA, 598 bp, Homo sapiens
catttttttcaccaatatttattgagtatctgccacgtaccaagatcaacataggctgctgaggaaagaacagtgagcacaggagagcccgtcctgcatgtttctgtactcacatttctcatgcatggtgagcatcagtcaaacatccacacaatacagataaaacgacagagatgggtgccatgacggaaaagtgggtgtagacaagagcgtacgttataaagaaaytgacatggaattgagggcaggaagaactctgacaaaacgacctttgagaaatatattaggaaaccagaatgcaatccacaaagttcccgtggcaggaaaaatcatttgctatatctgtccttaatttttttatttgatattaattgccttaagaaagtcgaagactcagaaaagctaaatagaggagttagctaataaaataatatttgaaaaacatacaggaatatgttagtgttttgctatttattgactaaattgctatgttttgggttcaaatccatttagaaatattcaggtctgagaaagtcatgacccaagaatatgcctaaccttcataacaggaaaaaacaccaaaaggaggcaaaaccat

SEQ ID NO: 636688 - DNA, 624 bp, Homo sapiens
ctagtcaatggttagcttgcatcttaatgtagtcagtctcctgccctgagaagtttcgaacattcccattagtttcaaatatggactttcccttggaacttagagaaaatgtggataatatgaccttacaggcctttatgaatttgtgggttcaatattttaacattcacagatagttggcatgtgaactgagagtatggaggaatcaccaggtaaactggttaaagaagaagacggaataaccaggttagtaaaataaactggtcattatgcagagaaatgagaaagtcataaaaggtagggccagaaagaaaatatatttaactttatagaaaggatacagttttataaaatgaaaattaaacaattttaatatcactgactagcaagctaggatgtttacctgccccaaattatatagacaaccycaataaaggttcagaggggagacataataaaactatttatttcaatttagatctactgcgttacattctgctttatggtagattatgttttccaaaaaatgtttcaaagaaagttctaagcttattggaacttattttcaaatatagctaaagacatacgacatactatttttctaataagaagtctattgccttt

SEQ ID NO: 636689 - DNA, 624 bp, Homo sapiens
ctagtcaatggttagcttgcatcttaatgtagtcagtctcctgccctgagaagtttcgaacattcccattagtttcaaatatggactttcccttggaacttagagaaaatgtggataatatgaccttacaggcctttatgaatttgtgggttcaatattttaacattcacagatagttggcatgtgaactgagagtatggaggaatcaccaggtaaactggttaaagaagaagacggaataaccaggttagtaaaataaactggtcattatgcagagaaatgagaaagtcataaaaggtagggccagaaagaaaatatatttaactttatagaaaggatacagttttataaaatgaaaattaaacaattttaatatcactgactagcaagctaggatgtttacctgccccaaattatatagacaaccccaataaaggttcaraggggagacataataaaactatttatttcaatttagatctactgcgttacattctgctttatggtagattatgttttccaaaaaatgtttcaaagaaagttctaagcttattggaacttattttcaaatatagctaaagacatacgacatactatttttctaataagaagtctattgccttt

SEQ ID NO: 636690 - DNA, 592 bp, Homo sapiens
ttctcatctaaaaaatgagcattgggacttccagttctgcatgtatggagcatgaaagttgccactccatcctaaaaacgagtagaaagctgatcagactgaaargcacactactcttcttgggtctgtaagggagatgaagacacagggaaaactgctgtccccaagtccagagagacagatgggaatacatggaatcacggctgccagagcacagacaggagcagaaaccaccttgggaacaagtgacaggccaggcagacccgagctgtaagtgatgaattgctggaggctccatgtagatgagtctgagagttgaaaactccaccaggacccagtcatgtggggtgtggcgggaaggcacacacttttgtgaattttacctccaggagcttgatcagattctcacagtaaatagaaaggggaaatcctccaggagcttgatcagattctcactaggagggggaaatccctctgtgctcctgttagggagaggagaaaggaaccattttgaaatacacgagggcactttgttcttcttaaccaggcctgcctgcaagataacctggttaaccagaccctaacaggctgg

SEQ ID NO: 636691 - DNA, 592 bp, Homo sapiens
ttctcatctaaaaaatgagcattgggacttccagttctgcatgtatggagcatgaaagttgccactccatcctaaaaacgagtagaaagctgatcagactgaaaggcacactactcttcttgggtctgtaagggagatgaagacacagggaaaactgctgtccccaagtccagagagacagatgggaatacatggaatcacggctgccagagcacagacaggagcagaaaccaccttgggaacaagtgacaggccaggcagacycgagctgtaagtgatgaattgctggaggctccatgtagatgagtctgagagttgaaaactccaccaggacccagtcatgtggggtgtggcgggaaggcacacacttttgtgaattttacctccaggagcttgatcagattctcacagtaaatagaaaggggaaatcctccaggagcttgatcagattctcactaggagggggaaatccctctgtgctcctgttagggagaggagaaaggaaccattttgaaatacacgagggcactttgttcttcttaaccaggcctgcctgcaagataacctggttaaccagaccctaacaggctgg

SEQ ID NO: 636692 - DNA, 525 bp, Homo sapiens
atgttgaacaccagcatctacactgtggaaagaagataaggakgaaggaaaagagacagaagggagtatcagaaagctgcaaagagagctgggggagcccaaggtcatagaaatcaaggaggaaggattgctgcagaagacaagagggaggtgccaaattcagcaagaaaaatagttgcttgaagcctggcagagagttgtagagctctggaagcacctgactaccagagctgtagcattttcactactgctgtaggtatgcttaagactgatattctgtcttccttgtccagagcctgagttctgagcattcattaactcttatttgcttttctataccaagataagcactacaagaaggccatgtgtcatggatatataaactatattttgaatttaatttttttcatgtttttttttagcaatgagaggaaataaaaacctgttactaaatggttcaccgtcaagggttgtcaatgaagtctggcattagttgctatcttgaaacaggagcggggtactagc

SEQ ID NO: 636693 - DNA, 569 bp, Homo sapiens
acacacctatatgacccaagtaatgagtttccatgtgtgccctggaggttggaagaggagtcaagacagatgctggaggcagatgggccttaaggcacagactgcccttggggtatcatttcacaggtatttggtgcagcaactggaaagtcagatcattttccatttacacatatcccagcgggtagagwccataagtgctctgaatccatggtggctgcaggtgccaagtcctgtggtcatgaccataagtttatccctgctcctgctgttcatggtgttgctatttaataccatggaaaacattctgctttccagcatgatagcagcacgggagcaatgtgtgttctctctcaactgaagggatggtcttttacttctatagtaccagatggatccaaatttaatttcggctaaaaccctgtgaatgaacagtcctaaagtgagaattcagaagctcatgctcattcctcaaccattgaaaagggaaggatgcattgaaagggatgaaaaaagaaaaacgaatctttcaagtcgtgattctcttacattattttggtgaaagatat

SEQ ID NO: 636694 - DNA, 575 bp, Homo sapiens
agtcgtgattctcttacattattttggtgaaagataytcagatttctattcttctttatttaatgaaacatatccaacagcaggagagagaattacatatagtctgcaggcacgaacaatctcctataatactgttgtttccagcaacgtttacccagctatgaaaaatatttatccaataaccccaggaccttgaaaagaaatgagctgtctgtgaccctgacctgaagttgtttaattacctcttcaagagaagtttttgctttcatattttgttttcagcattttctgataatgttggtaaagttttcatttttttccttagtttacttagtttttaaccccttaatttttaaaatttacattcattttgtatttatgttttaattttgagtttatatagacattttgtttcttaaaactgagtattagtaaatcaagcaaacaaaacaaaaccaaactttgggaatcacttgtatttacagtcctttccatatagatgggattagacaatttaaacatcttaagtaatcttttaatttttatctttttgggaaaaaagcaggtgtatatat

SEQ ID NO: 636695 - DNA, 575 bp, Homo sapiens
agtcgtgattctcttacattattttggtgaaagatattcagatttctattcttctttatttaatgaaacatatccaacagcaggagagagaattacatatagtctgcaggcacgaacaatctcctataatactgttgtttccagcaacgtttacccagctatgaaaaatatttatccaataaccccaggaccttgaaaagaaatgagctgtctgtgaccctgacctgaagttgtttaattacctcttcaagagaagtttttgctttcatattttgttttcagcattttctgataatgttggtaaagttttcatttttttccttagtttacttagtttttaaccccttaatttttaaaatttacattcattttgtatttatgttttaattttgagtttatatagayattttgtttcttaaaactgagtattagtaaatcaagcaaacaaaacaaaaccaaactttgggaatcacttgtatttacagtcctttccatatagatgggattagacaatttaaacatcttaagtaatcttttaatttttatctttttgggaaaaaagcaggtgtatatat

SEQ ID NO: 636696 - DNA, 634 bp, Homo sapiens
gtatcctctggccatatcctatcgtactcttaaccctttttaaaagtcagagtctttacatagcttctctcttatttatagttgatcctcttaaaatttctattttactgatttgcacaattaatggaggagctgggatgctgaatccagagctcacgtacatgagcattaaattatattgctcaataaaggtactacttatggctgtgatggatagaaagggaaagatctatcctagaccttaaagcattattaagatataaagagtcaaaagagaaatatcacttacaaaataatgttttaaaatctctatctgcacatttagtctgtgagatccgatgtgcattttaggtgcatgtaattgtaaccatactttaaaataattttttcaaatttctcttacagattttggctcctataaatgatacttctgggaaattaagatatagatgatacacatcacaactccttcaaccacaagtaaatcaagcacattggtaatcctttacaaaayttaagaaaatttaattacgttatttcttcaatttgaattttcaggtgtatggcaaatatctcaccaaagaaaattattagtgaaacctcaaattgagcagttattactctttcacaaaat

SEQ ID NO: 636697 - DNA, 545 bp, Homo sapiens
acaattaatggaggagctgggatgctgaatccagagctcacgtacatgagcattaaattatattgctcaataaaggtactacttatggctgtgatggatagaaagggaaagatctatcctagaccttaaagcattattaagatataaagagtcaaaagagaaatatcacttacaaaataatgttttaaaatctctatctgcacatttagtctgtgagatccgatgtgcattttaggtgcatgtaattgtaaccatactttaaaataattttttcaaatttctcttacagattttggctcctataaatgatacttctgggaaattaagatatagatgatacacatcacaactccttcaaccacaagtaaatcaagcacattggtaatcctttacaaaacttaagaaaatttaattacgttatttcttcwatttgaattttcaggtgtatggcaaatatctcaccaaagaaaattattagtgaaacctcaaattgagcagttattactctttcacaaaattatatcttatagaatccttgagcgcat

SEQ ID NO: 636698 - DNA, 564 bp, Homo sapiens
agtatatacaaattactgtttgcacaagagtgtgaagagcaaagaagaatattcaataaccactgcagctcaaagccttggtgccagagcaaaggccagagagtgcaggcaagtgtgagaggcaggatgcacagggcttcaaagtgagagcccgtggagggttcctgaatctgcctggacggtggcccgggagctcctgcggaggtctgcacagcatctgggtgcgtggcagcctctaaatgtgtagaaacagcctgctccctaggcgccccrcatctgagcctcactgtgtacgacagtcatcaacttctgagaataaatgcttccactgccttcccaccatctcaatcttgtgtcagtttctctaattcacagatttttaaccaggagcttcagagaaaataggagttagaaaataattcccatccttgaaagggactggggtggggatgcctaggagagttattaaactggtctagcatccttctaggggtagaattttgtctccctctaaattcatacgttgaagccctgtccctcactatggctatgtttgcagtcagg

SEQ ID NO: 636699 - DNA, 643 bp, Homo sapiens
ctggccttgtaacttgccttgttcaatgcaatgtggtgctggaagtgatgatggggaacttcctagctctagtcttaggaggactagaacatttctttgtatttatttattcatttacttttattttttatttttttgaaatagagccctcactytgtcgcccaggctggagtgcagtggcacgatctcggctcactataacctccgcctcccaggttcaagtgattctcctgcttcagcctcccaagtaactgtgattacaggtgctcgccaccatgccttgctaatttttgtatttttagtagagaaggggtttcaccatgtcgaccagcctggtccggaactctctgcttaggtgatctgcccacctcagctatttatttatttatttacttttgatttttgtgggtacatagtatctgtatatctttatgggctacgagggatattttgatatagacatgcaatgtgtaataatcacatcatggaaaatacagtattcaccacctttgtgatgaggaaagcatttttcctttgtcttacaaacaatccagttacattctttaagctattttaaaatatacaattaagttatttttgactatagtcaccttgttgtgtaagcaaacactaggtctcattc

SEQ ID NO: 636700 - DNA, 586 bp, Homo sapiens
gcagtaagacaatcagactagagaactggctgagaaggcaagtgaagataaacacttgaaggctgagagtccatcttacttcttacagctccagagaagctcactgctcaaattcctggttaagagaattacaagaaattatacctttgatattttaaagccaaaaagtcttgaaasaacttgttacaaagctatagataactgaaatgctgtcttgtatcttgtttgaaatatttgataacattattgttttgtgtgttttacttaaaaatattttgttaaattttctaagttttttctaaacatattttgtatatatttaagatatttttatctattgatacattgaagtaaaagactttcagatactagaaataatcagcctactcctcagatagattctatatcttcaatgctactatactgttaaattctagtttctatatggcattttatgcatataagtttagaaactagcatttatgcatatatgaaactagcatgtatgcatatatatttataagtgagattattctgttaaaggtttcgtcaagttttgatatcatgattatattagttttagaaa

SEQ ID NO: 636701 - DNA, 598 bp, Homo sapiens
tatagataactgaaatgctgtcttgtatcttgtttgaaatatttgataacattattgttttgtgtgttttacttaaaaatattttgttaaattttctaagttttttctaaacatattttgtatatatttaagatatttttatctattgatacattgaagtaaaagactttcagatactagaaataatcagcctactcctcagatagattctatatcttcaatgctactatactgttaaattctagtttctatatggcattttatgcatataagtttagaaactagcatttatgcatatatgaaactagcatgtatgcatatatatttataagtgagattattctgttaaaggtttcgtcaagttttgatatcatgattatattagttttagaaattgtgtaatttctctcttttcctratcgctaaataattgcatattttatacatttgtttgatttttgaaaatttcagagggtttatcactgtgctattttaaccctactttttagacgtatttaatattttatgtcaattgatagacttaatagacttctatttgtagaattgattttgatgacatatttcttttagcttttag

SEQ ID NO: 636702 - DNA, 536 bp, Homo sapiens
taactttggaagtgagtgggatctttaatgactaaagcaaaatgacttgcgtataagcactgtcctccagatcctacaattgtttcctaggggttacacagatgaacaattctgacattgctataacagttctcacacatgtaaattagtgtcacacatttaagtaaatagatggcagcccatggtagccagatttgtcattgttgggataggagtttacagataagcaaagtgagcaggttagaatgatccatgtggtaatgcatgagagttggagataccagtataaattcacgtttcactcagatgtccttcatacagacacagatggttgcatatggaaatatttatagaaatacatgggttagtgtgtgcacatagatttcatttctatgtcagatggtatgacaccraagaaacaatagtctagtagcaagaagcacacccagtttccacatcttggtttctaataccattctctaataaaaggaaacggctccttgatgaaatggctgattctagcattgaaaaggaaa

SEQ ID NO: 636703 - DNA, 536 bp, Homo sapiens
taactttggaagtgagtgggatctttaatgactaaagcaaaatgacttgcgtataagcactgtcctccagatcctacaattgtttcctaggggttacacagatgaacaattctgacattgctataacagttctcacacatgtaaattagtgtcacacatttaagtaaatagatggcagcccatggtagccagatttgtcattgttgggataggagtttacagataagcaaagtgagcaggttagaatgatccatgtggtaatgcatgagagttggagataccagtataaattcacgtttcactcagatgtccttcatacagacacagatggttgcatatggaaatatttatagaaatacatgggttagtgtgtgcacatagatttcatttctatgtcagatggtatgacaccgaagaaacaatagtctagtagcaagaagcacacccagtttccacatcttggtttctaataccattctctaataaaaggaaayggctccttgatgaaatggctgattctagcattgaaaaggaaa

SEQ ID NO: 636704 - DNA, 574 bp, Homo sapiens
gaatgcctgggccaagaatccaaaacacttatatagatactccaccgtgaaagaagaagagcctcatcctctatgccttaagtgtgggctgcacatggtgacttccttccaaagattacagtgtagaaagagcagggaaaggaactgtacagcagagaagcctagcaaacctcagtcgattgattaggtcaatcttaacaggttgttagccatcttaacagaatgtaacctcgatatgttgtgataatgaaaatagcattttacctctgtggtgttctttccaatgaacaggactagcaatctactcacgagayaaacatcagatcaattccaatagagaggcatcctgctataacagggccaatattcctcaaaactgccaaggtcatcaaaaacaaaggaagtctgtcacagtcaggaagaaactgcagagacatgatagttaagtgtaaagttgtatttgggatgggatcctggaatagaaatacgacattatataaaaactaaagaaatctgagaaactaaaggctttagttaataattatgtttcaatattggttcattaattttaaga

SEQ ID NO: 636705 - DNA, 571 bp, Homo sapiens
catacatcctcctttgtgcaagcaaagggattgagactcataaagctgcaattactactgattgtcatttttgtatgacagccacaggccttgccagatatatgaccttaagcaatttttcaacatcctaattcctgtttcctcctttttaaaatggggctaaaaatagyacacatctaatgagattgttgtgaggaatgaatgagatgacgtgggtgaagtgcttagagcatcctctgaccaggaaagccctgttgctaccattgttaacatcatcatactttattgtcatgatttcttttttcttttctccgttctctatggcatagaaaactcccaaaacttacgtgtttgttttatggtttctggttttacttctatgactgccttctcattttccagagtataaaaaatgaaatggtatttgacttcagttcaagagcttctgttagtcacactaaagtgcttaaggaaaagtaagggtgtagttaaggctgtcaggaaaatatggggattgccacacggctctgagcaggtagtgatgggggcagtgcaggtgcatgcaaacttt

SEQ ID NO: 636706 - DNA, 571 bp, Homo sapiens
catacatcctcctttgtgcaagcaaagggattgagactcataaagctgcaattactactgattgtcatttttgtatgacagccacaggccttgccagatatatgaccttaagcaatttttcaacatcctaattcctgtttcctcctttttaaaatggggctaaaaatagcacacatctaatgagattgttgtgaggaatgaatgagatgacgtgggtgaagtgcttagagcatcctctgaccaggaaagccctgttgctaccattgttaacatcatcatactttattgtcatgatttcttttttcttttctcmgttctctatggcatagaaaactcccaaaacttacgtgtttgttttatggtttctggttttacttctatgactgccttctcattttccagagtataaaaaatgaaatggtatttgacttcagttcaagagcttctgttagtcacactaaagtgcttaaggaaaagtaagggtgtagttaaggctgtcaggaaaatatggggattgccacacggctctgagcaggtagtgatgggggcagtgcaggtgcatgcaaacttt

SEQ ID NO: 636707 - DNA, 571 bp, Homo sapiens
catacatcctcctttgtgcaagcaaagggattgagactcataaagctgcaattactactgattgtcatttttgtatgacagccacaggccttgccagatatatgaccttaagcaatttttcaacatcctaattcctgtttcctcctttttaaaatggggctaaaaatagcacacatctaatgagattgttgtgaggaatgaatgagatgacgtgggtgaagtgcttagagcatcctctgaccaggaaagccctgttgctaccattgttaacatcatcatactttattgtcatgatttcttttttcttttctccgttcyctatggcatagaaaactcccaaaacttacgtgtttgttttatggtttctggttttacttctatgactgccttctcattttccagagtataaaaaatgaaatggtatttgacttcagttcaagagcttctgttagtcacactaaagtgcttaaggaaaagtaagggtgtagttaaggctgtcaggaaaatatggggattgccacacggctctgagcaggtagtgatgggggcagtgcaggtgcatgcaaacttt

SEQ ID NO: 636708 - DNA, 480 bp, Homo sapiens
gtgttttgttctgttttgttttttgagaactttctggcactagaagagttacaggttcatcatgtatatttctggctcactcataaaataagcawtttctcattggagcccctggttccacaacaacagaacttcagcaaaatagcagtggattacagccagaaagctgcaaggtgtagactgtatgtcacagggagacagtaggaaaactaaagagaaaatgggagaaaaacaaagttagaggcagtgatggctctgacaatttagctacagtaaacagaaaacacacagcaactcctagcagataattataaaaccctacagtaaagttttgtttacctcacttcttattatcctgtactgtatgtctagactttaacaaaaaagtacacagcatgcacaaaggaatgaatttttttaaaaaaacctacaactacacacaatctgaaaagacaaaggaaagcatcagaataagactca

SEQ ID NO: 636709 - DNA, 480 bp, Homo sapiens
gtgttttgttctgttttgttttttgagaactttctggcactagaagagttacaggttcatcatgtatatttctggctcactcataaaataagcattttctcattggagcccctggttccacaacaacagaacttcagcaaaatagcagtggattacagccagaaagctgcaaggtgtagactgtatgtcacagggagayagtaggaaaactaaagagaaaatgggagaaaaacaaagttagaggcagtgatggctctgacaatttagctacagtaaacagaaaacacacagcaactcctagcagataattataaaaccctacagtaaagttttgtttacctcacttcttattatcctgtactgtatgtctagactttaacaaaaaagtacacagcatgcacaaaggaatgaatttttttaaaaaaacctacaactacacacaatctgaaaagacaaaggaaagcatcagaataagactca

SEQ ID NO: 636710 - DNA, 552 bp, Homo sapiens
tgaggtgatattgtcacaggatccttgcggtgtcactttgccacccagaaacctctgtggctggtggccctttgcccaagattttattcaggcctgctgggctcattctgcccactcaacctggcagtctgcattcatcttgtgctaccaacctgaatatcatgcctgccaagggtragccaggtgcagagctatgaggggtgtgtaagcaagcaagcatgcggttcagccactgcacacagccaggcacaccagctgtggagggggtggcagttacagacaccagcacaggtgctgctccctgtaaggctgcagctggaccaggtgtaccacaagcaggttctacagctggcaccagagaacacagtggctcttggaagcttggagacaacaggaactgcagagccccagagtgggtgtcacagccctggcttggggagttcctaggtctggtctccccaaagggccacagctcttctccccttttctcttctttccttgtttttacctgcaatgtggtgatcaagtggtgtatttcagccctgtttgcat

SEQ ID NO: 636711 - DNA, 552 bp, Homo sapiens
tgaggtgatattgtcacaggatccttgcggtgtcactttgccacccagaaacctctgtggctggtggccctttgcccaagattttattcaggcctgctgggctcattctgcccactcaacctggcagtctgcattcatcttgtgctaccaacctgaatatcatgcctgccaagggtgagccaggtgcagagctatgaggggtgtgtaagcaagcaagcatgcggttcagccactgcacacagccaggcacaccagctgtggagggggtggcagttacagacaccagcacaggtgctgctccctgtaaggctgcagctggaccaggtgtaccacaagcaggttctacagctggcaccagagaacacagtggctcttggaagcttggagacaacaggaactgcagagccccagagtgggtgtcayagccctggcttggggagttcctaggtctggtctccccaaagggccacagctcttctccccttttctcttctttccttgtttttacctgcaatgtggtgatcaagtggtgtatttcagccctgtttgcat

SEQ ID NO: 636712 - DNA, 544 bp, Homo sapiens
tattaattatctaaaactgccataagaaagtaccacagactgaatggcttaaacactggacatttgttttctcacagtcccagaggcagtaagtctgagatcaaggtgtcagcaggattggtttcttctgaggactttctccttggctggtggacaactgtcttctccctgtgtcttcacatggccatccctctctgcatgactgtgtctttctcctcttcttgtaagggcaycagtcatgttggagtagggtccaccctagtgaactgattttaacttaattacctctttaaaaatcctatctccaaacatagtagtgggtggaagttaggatgttgacatatggaatttaggggaacacaattcagtctataatgctagagtataagcattttcttgctccaattctccaaggcccatttgccacaagaagaaacgaggagaaacaaataatacctgttgacaaagtgggctgagttacagggaaataacccttagcttagggagagcagacttttatagagggcagtgagcacaattgccc

SEQ ID NO: 636713 - DNA, 611 bp, Homo sapiens
tgacagctttaacacacttcattgaatatttaataataagggcatttgattgtacatatttttcgtaaagcttaagatgtttttctctattgaagttgagggcaaacgaatatgctgagggtaattttcagcaagtggctaacgtccctaagggactaattttgttgaaaatctgtatagataaaaaaatcaaagtacatcctttgcctttcttttggtgtgaatagtgttatttaccagcttggaagtaatagttgttgccaataaattaacataatgctgtctattttttatcttcttgtagcttacaatgcatttttacttatgttttaatccataataacagcctagtgagttatataggtattaccccatatatacatgaattaattttaytccctaaaacaaggaatttatgtcctttcgaatgtgcacaaattgcatgatggtatttatctgaaaacaatgaccaatgctggacagataaagatatatatatataaaacacacacatacacatatactatgtatatactatactgtatatattatatacatacacatgtttgtgtatttatatatataaatgaagaaagtgtcttgcagtgtta

SEQ ID NO: 636714 - DNA, 510 bp, Homo sapiens
tacaggaagcccagttaaattggaatttcgataaataccaacattatttttcctgtaagtatgctccaaatatttcatgaacatacttataataaagagtatttaactaagtgtcctacaaatcctgtacattttgtttgctaagtcaggtaatcttaatcggaagtaatccacaatcactgtaaatcagcaataaaatattgcatttttgctttttacagttatatagtatttgccacctatcttgaaacagctcacattttccttgtaatactatgaagctgttataaatctactctagctagagaaatttgcaagacatatttttaatgacaaaagaaagatcaccaggcttggttttcaagaattaaccagraaaattaagcaggaggtggaatgagaagaataaaattatcacattgtaactccaacaactgccttaaattaatattgtgcagctttctaaaatcaataacagtttaaacctattataaataatatattaattct

SEQ ID NO: 636715 - DNA, 478 bp, Homo sapiens
agcaactgcattttgtggtctgtgtgttttagcagcttggtctcaagcctatctgttacaagcataatactacttcaggatataacatccataggttacagtggaagatattcattttaaagtaatatgtcctaggccgcttaaactaacacttgattgcattgttatggaatttcagacttcttaagcattattgcatcaaagaaccaatgatgtatattccatttgatttatttcaaaaacaactgaaatatataagataaagaaacagaagcagaatgtgcttacaaaacatatgtcttaaaatcagaaatgtccaattttcttatggaartaacagaaggtaaaagtgtttatgtgtcagatactatgttaaatattcatattatttaaggtttggggcaatagtcaaaccaagattgactcatagtaacaaagtgtcaacatgctgttaacaggcaaataaatttgaaatgtg

SEQ ID NO: 636716 - DNA, 628 bp, Homo sapiens
aacatcttctttttaattctcagcaaggcaagttacttctgtagatgggtgcacgcttacagacggagcaatggtgagtgcacacttggacaaaggagggaaaggggttcttatccctgatgtacatggcccctgctgctgtgtcattcccctattggctagggttagactgcacaggctaaactaattccaagtggctaatttaaagacagtgatggggtgagtgctttggtgggaaaaatggttatgacagagcaggtaatcggaatgagtcagggtggagcaggtaatggaaaaaggttgctttacraggaagttaagtttaaaagtagaaggcaaagaattaaacatactgacatactgattctttgaaaagaaatgtagaactcatatctaatggtaggactccaggtgtaaaagaatccatgagaatccatgaatatttgatgtttttatttctcactgtgttccagaaaggatttgtgggggcttaaattttttattgacataaaaacacccagtaaagtagtatatgcataaaaaatatcaacgaagtgctattatacattaaattaataataatggatactatgcatttgaatacccactttcctgtggcaggatggtt

SEQ ID NO: 636717 - DNA, 603 bp, Homo sapiens
ggcaaattgttatgggagaaaagagctaagaaaaaaaattaattacatttgaagcgttcagtaactcaccaagaattacttctttcctaaagaactagttagactttggtttacctaggatattttcttgttctatatgtcaaggggaaatgcatgaagaatccttttctttatttttaaggctatttkgaacagtatgaattaaaatgcaaaagaattgagacaggtaggaagactggcaactttgtggaagtcttgcttctgtgttagtgtttaatatggagtgggatagcagagcaattaggtaacatccaacgtcaatagtcttatctgggaaagctagccgagtctgtctgaggaaagaaaaataaagaaaacaataatcagtagcacagaccatcaccctgctaaaagctattaaggtttgcagctttaataaaagggcattgtgcacttacgacgtgagatattatgtaattaagggctgcaagaggtcattagaattgtgttaatcactttacagactcacaagtcttcttaagtctacttttattgatttaatagcacagagctttttcctttcttataaaaggataattgtaa

SEQ ID NO: 636718 - DNA, 466 bp, Homo sapiens
gactttaatgtaacccatgccatgttctgtaactcccttctttgatatgttctagctaatttgataaatctccagtcttgttgaatggaagagaaataatcttcaagagcaagaagagtacattaaacagctcttcttaaagtgaatgttgcattttataagcaagtcaaatgtttattttacattcctataacttccttaaatttctctgcccattatctttttttttttttcttttttyctttggagacagaatctcgctgtcacccaggctagagtgcagtggtgccgtctcggcttccctgaaacctccacctcccgagtttaagcgattctcctgcctcagccccccaagtagctgggattataggtgtgtggcaccatgcccggctaatttttttttttttttaatttttagtagagacagggtttcaccatgttagccaggatggtctcgatctcctga

SEQ ID NO: 636719 - DNA, 478 bp, Homo sapiens
gtcaaatgtttattttacattcctataacttccttaaatttctctgcccattatctttttttttttttctttttttytttggagacagaatctcgctgtcacccaggctagagtgcagtggtgccgtctcggcttccctgaaacctccacctcccgagtttaagcgattctcctgcctcagccccccaagtagctgggattataggtgtgtggcaccatgcccggctaatttttttttttttttaatttttagtagagacagggtttcaccatgttagccaggatggtctcgatctcctgaccttgtgattttcctgacttggcctcccgaagtgctgggattacaggcatgagccaccacacccggcccccattatcttttattattaacaatgtgtattttatcacagctttaaaagagctaacaaaatcaattttatataattgtcaaaaagtagaaaagtaagacctgaaaaaa

SEQ ID NO: 636720 - DNA, 539 bp, Homo sapiens
gcattagttatagtgtgttgtctgtgagtttaatgttaatgaatcaatagtatatattaaataatgtattaaattacacagaaacacacataaggcacagttaagagttgatcagttcatgaaaacgttgggaccatagtctcacaagaatctaatcttgtatttcccctaagagcaatggttccctatgcaccaattcagtgttcatggtgtctgcatagaaataactatcatagatgagagtcaactgtacatgaattatcacccatccaaaagaaaattttgctctattttaatatacttgtaaaccccacattccacttctatctacaaatagaaatccggctgagtgaggtgcctcatgcctgtaatcccagcactttgggaggccgaggcaggtggatcacttgaagttaggagttcaagagcagcttggcaaaaccccgtctctactaaaaatacaaaaatttgtcrggtgtggtgggcgcatgcctgtaatcccagctattcaggaggctgaagtggcagaattgcttgaa

SEQ ID NO: 636721 - DNA, 583 bp, Homo sapiens
cgttaccaaagtggaacaagactattcataaaaaatgaagagtagtgggttcttacagccagttggtttcagttgctgcttttggggtattattaaaatgatgtccagactaacattaatacttaggtgtccttccctgatacttgcagtgsaaaaactgcaaaatgaaactattgaccctaatgtttctaaattatgaacaatttaaacccacttttcttagcagtcttgttttgataggggggtgtgtgtgtgtgtgtgtgtgtgtgtgtgtgtgtgtgttaggttgctttaaacattttcctttggattaaaaatgatcatggacagaagtcagttagaaatgatattagacaagtgatgggcagttcatggtgcatttattgggtgaccaagtgttagctggatggacattttgtttttcacagtttcttctgtcttaatatttgagaaggagattttcactggagagcttcctgaaccaaaaggtgcttctagaaagcatagccttctctctgccatttggcatatcatgttctcggttcctagtctacttccggttcaatttttttaatatttgtaa

SEQ ID NO: 636722 - DNA, 583 bp, Homo sapiens
cgttaccaaagtggaacaagactattcataaaaaatgaagagtagtgggttcttacagccagttggtttcagttgctgcttttggggtattattaaaatgatgtccagactaacattaatacttaggtgtccttccctgatacttgcagtggaaaaactgcaaaatgaaactattgaccctaatgtttctaaattatgaacaatttaaacccacttttcttagcagtcttgttttgataggggkgtgtgtgtgtgtgtgtgtgtgtgtgtgtgtgtgtgtgttaggttgctttaaacattttcctttggattaaaaatgatcatggacagaagtcagttagaaatgatattagacaagtgatgggcagttcatggtgcatttattgggtgaccaagtgttagctggatggacattttgtttttcacagtttcttctgtcttaatatttgagaaggagattttcactggagagcttcctgaaccaaaaggtgcttctagaaagcatagccttctctctgccatttggcatatcatgttctcggttcctagtctacttccggttcaatttttttaatatttgtaa

SEQ ID NO: 636723 - DNA, 607 bp, Homo sapiens
tggagttttaccaggagtatacagaaagaagaaattgtacgaagtagatgcaaawagttcattaggactactaagtatgaaatctaaggggcagaaaagagggataggatagcctttgtaagttattggattcaacagacggaggttctatggttgctgagaaattgttgaaatttgggccctaaacatggcattttggagtttctgcttttgagcagtgttctagaatcatgctagaaatgccacccagggtctagcatcaactggatcacctgggagcttttataagtataaactctcagttgaatcagggtttgcatcttagaaagttctccaggtgattcaaatgcacattaagcttgagaaacactggtctagaatagtggttctcaacactaattgcatattaaaatcaactgcaaagcttttaaaatattcccagttccattgaaaatcaagtgggaaactcttggggtggggctgaggcattgatattttttaaagccccaatttgaccctaatagtggatggttactaaagagtcatctaggaacagagaggccatctacatggattctgaagtttccaagttaccacctctttctca

SEQ ID NO: 636724 - DNA, 566 bp, Homo sapiens
tttccacaaatcaataaaaatgacagaatgatcaagtttttaaaatgggcaaaaccctgagtgtctgtttacaaaagagagcatacatatggtcagtaaatttatgtgaaagctgcttgaccttattagtagttaggaaaatccaaaccaatatctcaacttgatactactaataagatgactactacaataaagaaaggaaaaagactgacaatgaagactgaacagtgttaaggacatggagcaaytggaatgctcaaacaatgcttgttactctcatccatagcactttcagaatctttgtcatatactcatacaacaaattccattgttaggcaaatacccatcagaatagtttaacaaatgatacgtacaaagatgtttatagcaatgttattcataataaacaaaaactcccaacaaatattcatcaacatttgaacagagaaatacattacaaaaaaaatcatgagaatgaatgaacaattgctgtactcacaagtttcaatcttacaaacacaatgttgaatggatgaagatagacacacatatatattgaacaactg

SEQ ID NO: 636725 - DNA, 566 bp, Homo sapiens
tttccacaaatcaataaaaatgacagaatgatcaagtttttaaaatgggcaaaaccctgagtgtctgtttacaaaagagagcatacatatggtcagtaaatttatgtgaaagctgcttgaccttattagtagttaggaaaatccaaaccaatatctcaacttgatactactaataagatgactactacaataaagaaaggaaaaagactgacaatgaagactgaacagtgttaaggacatggagcaactggaatgctcaaacaatgcttgttactctcatccatagcactttcrgaatctttgtcatatactcatacaacaaattccattgttaggcaaatacccatcagaatagtttaacaaatgatacgtacaaagatgtttatagcaatgttattcataataaacaaaaactcccaacaaatattcatcaacatttgaacagagaaatacattacaaaaaaaatcatgagaatgaatgaacaattgctgtactcacaagtttcaatcttacaaacacaatgttgaatggatgaagatagacacacatatatattgaacaactg

SEQ ID NO: 636726 - DNA, 468 bp, Homo sapiens
aattgcagtcttacaacttaccttgtgttgatctgacttcccagttagaggattgtttgaagtattgataaacttagcttgcatgtaccamctaaaaatgatagggtggagaagcaaagaaaaaacacaaacacaatctagtagtgaatttgtccaaaaatattcattggatccatgagtgatagtaatttttattcttgtaggttctcagaagaaatgaattatgtaatcaggaatgcaatatttcttagttgcttaataactcgggaccatttagaaagattcacgttccatacttttaggcaggttttgctcttcaaagagctgacagaaactattctgagtgaaattttaatttgtgtccaatttctcttcattcagcaaatcccagcattatcactcactatccagtacagaaagcaacttctttcaaagttatctgagagacaaaattgtaaaaaggaaagc

SEQ ID NO: 636727 - DNA, 617 bp, Homo sapiens
aataccacgaacatcactagaccactctacctgctaacattttgacatgttcgtaaaaatagtgaacttttagctactcagaaagtacagtagaacataataattaccattaaatatgttcttgaatctgcattgttattctaatacatgatggcataattttccttgattgaaataaagtgtttctaattacctaccaatttttaaaaaaacacatctggatgtatgcaacatttaagctaatgaaagtcatcatcaaaaaagaagttgatccatgcttaattaatataattatcaataagctcaaggaagatgtgaataacacacccaacacattttttccagaaacagaaaattatgaatttacacraaatctcttatattaaagacattcttttttaacttgtattttaagttcagaggtacatgtgcaggtttgttacataggtaaatttgtgtcatgggggtttgttgtacagattatttcattacccagatattaagcctaataacttaaagcaatttcttttgactattataaatttggaaaaatggaggaaaacaagaaatggaagtaagaaattccatgagaaagaaaaataggaaataaagaaata

SEQ ID NO: 636728 - DNA, 633 bp, Homo sapiens
aagtacaagtgattaggtatttttcaaattctcgaacactttactaactttttcaaccttctgtatgctctgtaccttccagttcagtacttatcacaagactttgtgctrtcatgcccacaacctcactcttgctatgtctacagcaatgtgtgattatatcaccatttgaacctgtgaaaattctaggccaggtgtggcggtgcactcccgtaatcccagcactttggaatgcaaaggcaggcagattgcttgggcccaggagttcaagatcatctggagcaacatggagaaagcccctctctacaaaaaaccagacaaataaaaaatacaaaatttagtggaatgtggtcatgtatgcctgtagtcacagctacttgagaggctgaggagggaggaccgtctgggcctagggaggtcaaggctgcagtaagccttgcttgcaccactgcactccagcctggttgacaaagcaagacgctgtcttaaaaaatatatatatatatatattttttaaattcaatttcatcatctcttatttcttaataaaatgaggtcacttatgtcctcattttatttttgaccacctctcttggccatgtctttccttcaatgttctctttgatcatttgc

SEQ ID NO: 636729 - DNA, 612 bp, Homo sapiens
aattgcatttataaagacttgaattagaacagtgtttgtttctatctgatttatggcacaagctattttcctttttaattacaaaactagcaaggacaaatttgttaatcttcttggaaagaaaagtttgttttgttttagtttggttttctttgatctagtgtgaattaacaaatttagttgcatatcaggcagaaagaaacagagagaattgttctaaaaatataagagattatcaagattagtattgttaaactactatcacgcgctgacacagcttttatttaagttcatagaagaaatgaatagatctcttctgtaactgagattcagctagacttttatgtgatcatcctgttgccagtaataaaccaggacttattcaaagacagtaagctagctcttctctttttaaagctgaattacgcagcattttaacagtgagtgaaatcacagagatttcatttaggatgcgctgcctccattggtaaaaaaactgatgccgattgaggacatatacaagaatgagctggctgacttgggartattagcaatgcttttttcttttcctttaaaaataagattagcatttgcattataaaaatagccatg

SEQ ID NO: 636730 - DNA, 613 bp, Homo sapiens
agaggaatggcttagaaactgttayagtcagctcaccaaataatttcatgtctgttgaacccaaatacaataatgaaaataatgggaactgattttttcatctaagaaatttatttttattgcattttacaaaactagcatccagtgacaatagtatagtgtgttcttaaaaaacaaatgtgtgcacaaaaacacaaccaacaacaaaaaaccccttagcctttcatcacaggtccattgagaagcactgggcccatgaataaaaaccctacatgaaaactcttttgaatgcttctaggcaaaagtccatctaacacttcttccctgtcataacattagagatgactggaagaaactcaccacaatgaaggcagagagcaatctgagagctcatccttaagacttgcacaaatgttttgtacctggcattttggagaaggtatgcatgtacgtgtcgcagacaccaatagcataaggtgtttgcaaactatttcttggagttgtctgcactacactgctttgtccattagaaaataccaacaataacagctaaagcaatggaaataaaattttagagtctgcatttggttaaggggagaaaatgtcaacactt

SEQ ID NO: 636731 - DNA, 538 bp, Homo sapiens
tctttggcctttacttctgtgtctccttcctctgaccaccttcccttctgtttctccttatttccctgactccttcacagtgagcatattcagggctctctatttttacacactttatttctctctctctctctttttttttgtttacttttaagttcrggggtacatgtacaggtttgttatataggtaaactcattcacagagggttgttgtacaggttatttcatcacctaggtactaatcttagtacccattagttatttttcctgatcctcttccacctctcattctccactctccagtagttcctctctttgtgtccatgtgttctcatcttttagcgctcacttataagttataatatgcagtatttggttttctgtttctgcattagtttgctaaggaaaatagcctccagctccacttatcttcctgcaaatgaggtgatttcattttttatggctgtgtagtattccatattgtgtatgtaccacattttctttatcaagtctagcattgatgtgcatttaggctgat

SEQ ID NO: 636732 - DNA, 601 bp, Homo sapiens
ctggcaatagttccccttttggacagtctatgcccctccctctacatgtcagtaaaactattagaattgtaaaatacttggtttctactcatttatctttccaaaggtataaaaatgcctgtttatagaagtatgtaaattatatcaagatattcagcaccttttccctgcaaactgtcagaatttcaccattctaaaaatgcaatctrttaattttgaatacttaagctgctgatatttaaatgctaccacttgtggaactgaaatgaatttgtcaacctcacattctgaatttagaactttatgaagtataggattggtaaacctcggcgatatgataggttggagccaaacttcaatgaattcgatgattcaatgaagttctgacctaaggcatggtcaagaaaaagagagagaaagaaggagagagagtgagagaaaattaactgagagattaacaagcaatctcatttatctagttccattaagcatcacttttcttcagtagaatcctaatgacactagaatctcttgcctcctgggaaactctcaaggatttcattagctttcaggatttgaaaagtatttgagaatagaacaa

SEQ ID NO: 636733 - DNA, 601 bp, Homo sapiens
ctggcaatagttccccttttggacagtctatgcccctccctctacatgtcagtaaaactattagaattgtaaaatacttggtttctactcatttatctttccaaaggtataaaaatgcctgtttatagaagtatgtaaattatatcaagatattcagcaccttttccctgcaaactgtcagaatttcaccattctaaaaatgcaatctattaattttgaatacttaagctgctgatatttaaatgctaccacttgtggaactgaaatgaatttgtcaacctcasattctgaatttagaactttatgaagtataggattggtaaacctcggcgatatgataggttggagccaaacttcaatgaattcgatgattcaatgaagttctgacctaaggcatggtcaagaaaaagagagagaaagaaggagagagagtgagagaaaattaactgagagattaacaagcaatctcatttatctagttccattaagcatcacttttcttcagtagaatcctaatgacactagaatctcttgcctcctgggaaactctcaaggatttcattagctttcaggatttgaaaagtatttgagaatagaacaa

SEQ ID NO: 636734 - DNA, 601 bp, Homo sapiens
ctggcaatagttccccttttggacagtctatgcccctccctctacatgtcagtaaaactattagaattgtaaaatacttggtttctactcatttatctttccaaaggtataaaaatgcctgtttatagaagtatgtaaattatatcaagatattcagcaccttttccctgcaaactgtcagaatttcaccattctaaaaatgcaatctattaattttgaatacttaagctgctgatatttaaatgctaccacttgtggaactgaaatgaatttgtcaacctcacattctgaatttagaactttatgaagtataggattggtaaacctcggcgatatgwtaggttggagccaaacttcaatgaattcgatgattcaatgaagttctgacctaaggcatggtcaagaaaaagagagagaaagaaggagagagagtgagagaaaattaactgagagattaacaagcaatctcatttatctagttccattaagcatcacttttcttcagtagaatcctaatgacactagaatctcttgcctcctgggaaactctcaaggatttcattagctttcaggatttgaaaagtatttgagaatagaacaa

SEQ ID NO: 636735 - DNA, 601 bp, Homo sapiens
ctggcaatagttccccttttggacagtctatgcccctccctctacatgtcagtaaaactattagaattgtaaaatacttggtttctactcatttatctttccaaaggtataaaaatgcctgtttatagaagtatgtaaattatatcaagatattcagcaccttttccctgcaaactgtcagaatttcaccattctaaaaatgcaatctattaattttgaatacttaagctgctgatatttaaatgctaccacttgtggaactgaaatgaatttgtcaacctcacattctgaatttagaactttatgaagtataggattggtaaacctcggcgatatgataggttggagccaaacttcaatgaattcgatgattcaatgaagttctgacctaaggcatggtcaagaaaaagagmgagaaagaaggagagagagtgagagaaaattaactgagagattaacaagcaatctcatttatctagttccattaagcatcacttttcttcagtagaatcctaatgacactagaatctcttgcctcctgggaaactctcaaggatttcattagctttcaggatttgaaaagtatttgagaatagaacaa

SEQ ID NO: 636736 - DNA, 607 bp, Homo sapiens
gggatcctgtgaaaatacaggcctggtcatcctcttctataaattcttcaatgcttccaatgtcttctcttctcctttcaggtgaacatcaaagttttacaatagccttatatatgtaacactgcagtcctccccattacttatctagcctcatcttctacttttttctctatagctcattctgccctatccacactggcctcatgctttatcttgcggaaaaagaaaaaaaaagaagaagaaaaaagcagttttagctcagggaatttttatttscccttcttattgcttgaaatcctcttcccacacatacttgcctagcaagtgccctcagtcctttcaggtcttctctcaaaatgctgccatctcaaatctctcttctatattatctaccttttcatatgagattcaatctggatttttaattttttatatcttccagttcactaattctctctttagttgtgttcaatcttctgttaaagtcatacattgtaatcatggttacagttattatattgctcagatttttatatgtttcttttttgttgcatttcttatctgctacatttctcaattttgacatttatttcttgaagtatattaa

SEQ ID NO: 636737 - DNA, 613 bp, Homo sapiens
gataagcgcttgcatgcaccatgcatcatagcagttctcctaacacatatctgtccagaaaaaccaggatttagaaacaataacaaatttgttcaatggatgttgtatgttttcatggctcttttttacaaatgaggtcagtgtatgtgtaattagattaactcacttcagtatgcttatctcatggtaacacaaaatatagattcaggaaaatcaactactcttattcattaaaacattaagttcagttgtgtaatatttacagttatgcctcamaattatgggaaaacaaggggaaacgttgttccttaatgtaccaaatagcagacaacataaacccctcagttcactgtgacacagtttcctaattaccctacttgatatatttttgcactccattttaacttacaaatagtatgatacatattcttctcaagatataaatcaattgaaatatgtgataactctatacagtttaattttttttaaagcaaatggtagcagtattaaactgtatttatttaaataatttaagaattgagagctttaatgtgagagtgtattcttaaacagaattatgccttcctacctataagaggaaaatttgaaagtt

SEQ ID NO: 636738 - DNA, 632 bp, Homo sapiens
catctcagtacatttttaccattgaaagtccccacttcagttcctggcaaactagtttggttggtttgtgtgactctgggcctgtatacccacaattaagaataaatccaatcttgtgtggttgacttaaggattatatataaaatacataaaacacttgtcacattggaggcagtaaatatatggtatttgttatytgattgatggggtcaagggaagacttcatggaagtggtagggtttgacttagattttgaaagaataatgaaatcttatttgatatagggcaagataatgcttaactggcaaagatggatagagatagaaaatagggcaaagggaacaggatgacccaaaacacaggaaaagaaaaattgtggggcatcttctagggattggctaactgtggggcatcttctagggattgggttaagtgtgggatatgataagtacaagaaaggattaaggtttaaaaaggtgatgtaagacttcttcctatatatgttaaatgcaaagaagaggagtttttaaattcaaatcgcaaatattgttttgatttcccaaagttttgtcttggtaaatatgtttaattaatgcttacttgtgttgctattaagccagataagccaagct

SEQ ID NO: 636739 - DNA, 435 bp, Homo sapiens
ttgttctaggttttagaagaaaagcttgaagctcttggtagctgtgggtttgtaatacatggcctttataatgttgatatactttccttctataccaaatttattaagacttcttatcaaaaaagatgttgaatatttttataagcttcttttttgtgtctgttgagatgatcrtatggtttctcttcttcattctgttagtgtgatatatgacatttatttatttgtgtatgttgaaccaccttccaatcctgggataaatcccactcaacgacagtgtattatctttttgctatgtagccagattcagtttgttagtattttgttgaggattcttgcatctattttcatcagagatattggactgtagttttttgttttgtctttatctagttttgatatcagggttatgctgtcctcatagaatgagttagg

SEQ ID NO: 636740 - DNA, 651 bp, Homo sapiens
acacacacaccacacacccttcccagcctgtagtgcaaactgcgttcatgactttcctccccacgaccacttctgtccccagtctcagcaaatggtgctagcagtaatccaattgtccaaactagaaaccttgggattacagttaacatcctgcacggtcactagtagcccatatggcatctttgtgcaacttagaaaagatcttcttttctcctgatggacataggccatgccagagcacacaatcaggtaagctgggctcacagaaaaatcagcacctactcatttcctgagcagccatcctttgttcaaggcaacatctgcaggactaagtgcagcattcctgttcttccttggcctcagtaccacatcccaaaacattccctaataactattaytactgttttctaaacatgctttgaacgtctaaatgtcttgctaatcccaaagttctccttatccaaactactaacctctaacacagagacgatctgaatagccaccttgctgcctctggtcttgcttacctctgtaacctatgatgcagccagaatgaaacttttcaactgcaaatacaaaaagtcatctgtctccttaccaaaatcctggtaatggcttcccattgccctaggaaaaagtagagggtacatt

SEQ ID NO: 636741 - DNA, 590 bp, Homo sapiens
cttttctttccataatgtagcattttttatattgtaggtttgtcttcccaacaaggcaatcagtgctgcaaggacaggcaatgtgcctgatgcatagaccatcgtgctagtgttcactatgtgcctggtacacagaggctgtttcataaatatttattaagtttgcttaaatattaataaaactattagcatgatgtctgccacacagtaagtgcttcacagatggcagttattatattattattaaattaaaagactccttttttagttgactcctcaatgaccacattagtaggaattaccaggaaattagaaaacataaaaataggtatctaaaaatttctaaagagtaagattttggggatcacttattcatatccctcatttctagattgggaccaggaaygtaatgggtgtcaaaaggaacgtaatgggtgttaaaattattagctgaattggtggaacaaagttatttttcttttagagttaaaaaaaagctaacactgtattgttgtttaatatttatactgtttgcagcgctgacacttcaagagtgaaaactctgtcacagaacctctgttaagtgtcta

SEQ ID NO: 636742 - DNA, 583 bp, Homo sapiens
tttctttgtcatgtgaattctacctcatcctaactattataaaagaataagaaaaataccactttaaaggattctgaatgcaaagaaaatactsagatagctttactagtttatagtggcaggtacctaggcctgatgagtatttttgacatgtaaacaggcacactaagcacctttatcaaaatctaggcatttcattgggtatattgcagtaaacatacatcgtcataaaggttaaagtaatggtcataggagtggtagtggtgctaatggtataatattgattttcctgtgatatcaggactcttattttctgacctatagttctattactctccaaataggtgaaatactttttaattgatttttatgccatgcaatcctagttgtgactggattcttgatgccttccattttcttggttaaagtaacagacagtaaccgtggtaaccatagttacacacctggctctagatttgattctacagtttctggatctcttttctttctctgacattcggtaaacaattaccctgactctttgcctatgtttggcctctgatgcctacctgagaatatgtat

SEQ ID NO: 636743 - DNA, 622 bp, Homo sapiens
gggcctaattacagtcactgcactggccaccactgctggartggcattacaccaatctattcaaatggctcattttgttaatgattggcaagccaattccacccaaatatggaattctcaacaggacattgatcaaaaattagctaatcaaattaatgatttaagacagtctggtatttggcttggagattggttaatgagtcttgaacatcacatgcaaatgcagtgcaattggaatacttctgatttctgtatcacaccatattcctacaatgagactgatcattcatgggaaatggtcaaaggacaccttctgggtagggaagataatttatctttggacataactaaatcaaagaaacacatttttgaagcctctcaagctcatttatccattgtgcctggagctgaggtgttagatcaggcggcagaaagtctttctggactaaaccccacgacttggattaagtcttttgggggctccactgtagtacattttggaatcatgtttctctgtttaatcggtttgtttttagtgtgccagaccagtcaaagaatcctgcatcaaaactgagagaatgaacaagccttcatcgccatggcacatttatataaaaagaaa

SEQ ID NO: 636744 - DNA, 574 bp, Homo sapiens
aagaatcctgcatcaaaactgagagaatgaacaagccttcatcgccatggcacatttatataaaaagaaagggagacatgttatgggaagtcagggaccccgagtggagggactggttggagccatggcagaggaacayaaattgtgaagatttcatcttaatatggacatttatcagttctcaaataatacttttataatttcttatgcctggtttaacctcttaatcctgttatcttcataagctgaggatgcacgtcacctcaggaccactgtgataattgtgtcacctgtagaaattgattgtaaaacatgtgtgtttgaacaatatgaaatcagtgcatcttgaaaaagaacagaatatatagtgatttttatggaataagagaagacaaccataaggtctgactgcctgcagggtcgggcaaaaagagccatatttttcttcttgcagagagcctataaatggacatgcaagtaggaaacatattgctaaattcttttcctagcaaggaatgtgaatattaataccctggaaaaagaatgcgttcctggggggaggtctataaatggc

SEQ ID NO: 636745 - DNA, 568 bp, Homo sapiens
cagtggttctgcttttgccctttgccctgtgatctttgttgtacctttaacagttgttctgcttttgccctttgccctgtgatctttgttcgacccttatcagtggttctgcttttgccctttgctctgttccctcagaagcatgtgatctttgttagacccttatcagtggttctgctttttgttctttgaagcatgtaatctttgtacctactctctgttcttacacccccyccccttttgaaacacttaataaaaacttgctggtctgagactcaggtaggcatcactgtcctactgatatgtgatgtcacccttggcagcccagctgtaaaattcctctctttgtactgtctctctttatttctcagccggctgacacttatggaaaatagaaagaacctacattgaaatattggggacaggttcccccaatactttgttcctattaacagaccaacctggctcctgcattaatatggagtggggagaacagcaaaacaatccattgtatgcacaaaagccaattcagtgcaaacctagaaactcctcttagtcaacagtttca

SEQ ID NO: 636746 - DNA, 575 bp, Homo sapiens
gtaaaagaatgcgaggaactcggctcaggagttgctgcagaaaaccacaatcacaagtgctccaaagcctcagcaggtgagtagaaaaaggcgaagcaatttgatccaaacaccaacagacttcagaggaagggaagctcctcaggcaaagaaagagatccccccagcataaccaacaggtttagcagtgagacactgggactacccacatggagtcagggagtgyagatggacagtgggaagtggtgtggagcaggtggaggaagacctggggctggcaacacagaaaagagggtggtggctggctagcccccacccacaggcaaagtgacacagtccatgaaggagggagggcggtctgaaacttaaggatggatgacaccagtgaaattttgtagctgttttacaggcaagggggcgtagaaaggaaaaatgtgactgtttaagtaaatgccacacatcttaatacctctacctgaatcttcaacttaccatacaaatgtgtaaagctgaacttgcctttataattgagataggttacacagacgtttactattcccaatgactggataaat

SEQ ID NO: 636747 - DNA, 567 bp, Homo sapiens
ttttttctttgtttttgcattctgggactagaaatccaggcttacttttattttatgacaacattaaaggcaaatcttattacaataactttaaatttataaaattaccaatatttatagcagaaactatatttctgtttgtttgacagaatggaatagaactcagaaaataacctttatttactccaccttttacagtgcttatctgtgataaatgtacaatgttaaattgacttgaacatgcctagtatagaaatgctatttttttccttattaactgtaatatcattcattactttatgctgaaacaaagatgggaacacagagattaaattcccartgatgataatgatcaggtaaacttagtacatttgagatgaccaaaatgaaaaaccttcacatggagaagtgatggattatcactaattgtgtttaacaaatgttaaaaaaaaaaacacttttccttttaagtgacttgacctgataatttctgacaaaagccctgttacagctgtccaaatttagcttaaagaattaacagaaagtatatagtgaagagatggcctg

SEQ ID NO: 636748 - DNA, 567 bp, Homo sapiens
ttttttctttgtttttgcattctgggactagaaatccaggcttacttttattttatgacaacattaaaggcaaatcttattacaataactttaaatttataaaattaccaatatttatagcagaaactatatttctgtttgtttgacagaatggaatagaactcagaaaataacctttatttactccaccttttacagtgcttatctgtgataaatgtacaatgttaaattgacttgaacatgcctagtatagaaatgctatttttttccttattaactgtaatatcattcattactttatgctgaaacaaagatgggaacacagagattaaattcccagtgatgataatgatcaggtaaacttagtacatttgagatgaccaaaatgaaaaaccttcacatrgagaagtgatggattatcactaattgtgtttaacaaatgttaaaaaaaaaaacacttttccttttaagtgacttgacctgataatttctgacaaaagccctgttacagctgtccaaatttagcttaaagaattaacagaaagtatatagtgaagagatggcctg

SEQ ID NO: 636749 - DNA, 532 bp, Homo sapiens
atcctcagatcattatgaaggtgctaaataaagaacatgttgctagggcaagataagaggcaatccagaaagatagtgctcarctagcaccatcagaagaaatcaagtatggatggttaaggagactgagtgtagttttgccaacaaaaagccataatcactagccaaatgtttgaactagagccagcatttggacctagaacccaatgatggaagaagatcctgggtcctaagggagctggcaatatctcagtaagcagtggcagtaatgattccccatccttccccaatgaaagcaacaaccatgttccagggcaactgaagatagggaaagaggaatatacaaacgtttggaagattgctagacacaaggcctgagttgacattgataccttgaaacctgaagcatcacatgtcctcctacactccctcttttcctcttctaatcagtgtacatgggatccactcaataaatggagttctagccaaagtatacctcaaagagggacttttgggatccttaagctcacct

SEQ ID NO: 636750 - DNA, 564 bp, Homo sapiens
aagaaatcaagtatggatggttaaggagactgagtgtagttttgccaacaaaaagccataatcactagccaaatgtttgaactagagccagcatttggacctagaacccaatgatggaagaagatcctgggtcctaagggagctggcaatatctcagtaagcagtggcagtaatgattccccatccttccccaatgaaagcaacaaccatgttccagggcaactgaagatagggaaagaggaatayacaaacgtttggaagattgctagacacaaggcctgagttgacattgataccttgaaacctgaagcatcacatgtcctcctacactccctcttttcctcttctaatcagtgtacatgggatccactcaataaatggagttctagccaaagtatacctcaaagagggacttttgggatccttaagctcacctgttggtcagttctttggtcactgaaggcacaatttgaatgggcatatttgatattcagtacaactatcacattggacctttaacctgtgggataagagctatcgtagtgagggaagaccaggtggaga

SEQ ID NO: 636751 - DNA, 596 bp, Homo sapiens
cacgtggtatgcagacattgatctggcaaatttattctctttttcctgtcagaaaagaaaaacagaaacagttttagttgtgaaaaggacaagagtatacatttaacagttttgcctcagtggtataactgccattctgtcatgatatggtttgaagagatatgaactgttatatcaataatatcaaccatttaatatgtacatcaaatattcactgggtagtgagcattctaagatgttgtcatagactgctgaagtcccagctgaagcascggtttggagatctatattatgaggatgggatgctgtcctccaggatttagtgtatatcttgagtcatatctttatacagcactgtgttctcaataggaagaatacttgagtccaggaactaaggggtggaaagaggagtggctctgcttgtaatctctcccacaaatccccttgggaaacttgtgcttcttgtccctacaacttttgtatgtgcagtatgatcttcacatcaactttgggatttgcagttctcatggcccaaagaggggacactttcaccaggggtacataaaaatgatcattgaactatatgctgtggttaa

SEQ ID NO: 636752 - DNA, 485 bp, Homo sapiens
tgtagtctgaaaaaaaaaagccttcctttaaaaaatgtcaacactttcttaatggtgcagaagaaaatctaaatgatttataaggtatctacatggattctggtcagcttttttggagcaagagcaaataaagccatgttgacattagctgtgttgttaatacgcaaacaaggcaaaagtgaaacagttctgctggccttagcccagatggattctgtgttggcaaaatttataaagtgcataacagacagcaagataaaaaatgttttgtatattttctaaaacaataatatgatcatacaaaatgtgttttaccaagaagtagaaaaaatacctgtttcatgtgtaygtttatataaattttacttaatatacaaagtgtgacatgcaactctcttaaaatgaaaggactgtaagtaactaagtaaattaagatgtgagacataggagaatactctgtggacaagctgtggacaagcatgtat

SEQ ID NO: 636753 - DNA, 586 bp, Homo sapiens
ttaaaaagtttagacatatataattatctcaaaattccttaatgatgatataacaaattgattacctaaaccaccatataaaatataacaactgtaagcacacattggtagaagagttttatcagactgtgctgggggctaaagcagtggttcctaaatgggtggtcggactgtatagtcatgtgggaaacattttctaagtccagataacttggccctggctcagattcagtaggtctggagtgaagcctgtaaatctatgtttttaaaaaaattcctagttcatttttatgtccacttatgtctgggagtcacaggactaggtgatagaatgggtaaatcaatgaaggcttattagaagaggtgtgccttgagaagtggttcactcacacagtattctatcaaacactctttactgaacagtaactatgtgccaggtactaggaatataraactaaaagtaaaccaacattagggtaatgtcataattcaagtgaaagtatacacaagatgcccaggaagctcatgagaggaatatttacatcatgtaggatgtttggaatcttttcttggaggaagtaaggct

SEQ ID NO: 636754 - DNA, 598 bp, Homo sapiens
acactatcctgttctcaagagatcacagtctagttgaagagattatggtgtagagtggagcaaaggagcgaggtcttgatgacttctagkttcctagctcaagccactgaattgatgaaagtgccaataactaggaaagaaaatacatgaggagcaagtaggaaaacaagatatgacacattaagaaatcagctttaaagtgtcttagttcatttggcctggtataacaaaatattgtaaacaaagtagtttataaacaacaggaacttatttctcacagttctggaggctgagaagtccaagatcaaggcaccagcagggatttggtgtctggtgagggcctactttctcacaacacctttttactgtgtcctcacatggtggaagaggcaaggccactctctggggcttcttttctaagagaactaatctcattcataaggctctgtcctcatgatctaatcacttcccaaagggactacctcctaatgtcatcgcattagtgattaggtttcaatatatgtattttgggggcatgcaaacattgagaccacagcacaaggcaacatataagcaacatgtaatataacacaaacta

SEQ ID NO: 636755 - DNA, 598 bp, Homo sapiens
acactatcctgttctcaagagatcacagtctagttgaagagattatggtgtagagtggagcaaaggagcgaggtcttgatgacttctagtttcctagctcaagccactgaattgatgaaagtgccaataactaggaaagaaaatacatgaggagcaagtaggaaaacaagatatgacacattaagaaatcagctttaaagtgtcttagttcatttggcctggtataacaaaatattgtaaacaaagtagtttataaacaacaggaacttatttctcacagttctggaggctgagaagtccaagatcaaggcaccagcagggatttggtgtctggtgagggcctactttctcacaacacctttttactgtgtcctcacatggtggaagaggcaaggccactcyctggggcttcttttctaagagaactaatctcattcataaggctctgtcctcatgatctaatcacttcccaaagggactacctcctaatgtcatcgcattagtgattaggtttcaatatatgtattttgggggcatgcaaacattgagaccacagcacaaggcaacatataagcaacatgtaatataacacaaacta

SEQ ID NO: 636756 - DNA, 556 bp, Homo sapiens
catgagtatcatgtttacctggacgttctccatgcaggcacatttcatggtcaagcccagcagagcagagtaatctctctgagctgagaagtcagtgactgtagctcataataactacagtggaaatatacaacatatattactttgctcacagatatgcaatctgggcaggactcagaagggacacctaatttctgtcccgttcagtcatctggggcagcttgaaaactgggctgaaatcatctgaagtttctgttcccttgtgtctggcggttgacactgggaagactcaaactgttgggggctgggacagctggagttccttgggtctttgcatctctgtgtggcctctatatgtggtctctccagtgcaaagctttaggatagacagatttctcatgtgtcaamtgagggctcccaagacatgtgtctcaagaaagggtaacaggcagaagctgaattgcctttcctaacctaacctttatagccatgctgcttctcatccaacagactagaagtgagtcactaaggctggcccaagattcaaggggaggga

SEQ ID NO: 636757 - DNA, 569 bp, Homo sapiens
aagaaccaaatagaaatcctagagctgaagaactcaatgaatgaaataaaaaaaaaaattaagagcttcaacaaagactagaccaagcagaagaacttctgaacttgaagacagtcttttaaaatagcaaaggcaaacaagaaaagaaagagaaaaagcctacaggatttatgagacaaaattaagcaaacacatttttgtattatgggcattccagaaggagaagagaaaacaaaaagtgaggaaaatatatttaataaaataatagcagaaaatttcccaaatattgggaaagagatcgacatccagctctgggaarctcaaataaccctaaatacattcaactcaaacaggttatctccaaggtacattataatcaaattgtcaaaaggcaaacacaaaagaataattataaaagcagtaagaggaaaatagtaagtcaatataagtgaatccccattagtaaaacagcagatttctcattcaaaacctcataggtgaggaaataagatgatatattcaaagtaccagaaaaaaaaaccctggctgccaagaatattatactcagc

SEQ ID NO: 636758 - DNA, 541 bp, Homo sapiens
tagaaagaacctacgttgaaatattgggatttgcttctcccaatatctggcatgccaatgtggttttctttttcctaagtgcatgtgggaacccaattccctctggtaggtttgtagaaacgttcatcagtccggttcacagaaatgcttgtccagctccctgacgattggtgagttgtctatgtattgtccggggtaactataggtcatgcagagtctaaaygttatgcttatctctgctatattaaaatcctgttaaagcagggggagtttgggtacccatggaaaatatggtcaccctattcagggtggtggaagaacactgttcttggttccctgaaaagggaacattagatgtgaaactacgggatcacgttggtgcaaaattctgggaactggtcctgaaaggaaattatgttcctgtcactgttcagggtgattgggccttggtatgtgccatcctaatgacatgccaatactgtggccccctgcacttaccacagttttctgaatctggcaactctctacctcttcctcagct

SEQ ID NO: 636759 - DNA, 562 bp, Homo sapiens
tgagactcaggcaggcatcacagtcctaccgatatgtgatgtcacctcctggtggcccagctgtaaaatttctctctttgtactgtctctatttctcagccagcagacacttacagaaaatagaaagaacctacgttgaaatattgggatttgcttctcccaatatctggcatgccaatgtggttttctttttcctaagtgcatgtgggaacccaattccctctggtaggtttgtagaaacgttcatcagtccggttcacagaaatgcttgtccagctccctgacgattggtgagttgtctatgtattgtccggggtaactataggtcatgcagagtctaaacgttatgcttatctctgctatattaaaatcctgttaaagcagggggagtttgggtacccatggaaaatatggtcaccctattcagggtggtggaagaacactgttcttggttccctgaaaagggaacattagatgtgraactacgggatcacgttggtgcaaaattctgggaactggtcctgaaaggaaattatgttcctgtcactgttcagggtgattg

SEQ ID NO: 636760 - DNA, 643 bp, Homo sapiens
tataatggaaaacatggggtttgttcctggacttggtcttagtccaaaacatgaaggaattactaaacctcttcaaatcactgtaaaagaagacagggctggtttaggttatcctttttaatgatggccactgctacacctcctgatcctgttcctctacaatggaaatctgaaactcctgtttggattgagcagtggctgctctctaaagaaaaactggaggttttaactcaattagtttctgaacagttacaacttggaaatgtggaaccttcttttcccctggaattctcctgtgtttctagtaaaaaagaaatcaggcaagtggaggatggtaactgatttaagggacattaatgctgtaattaaacctatgggagccatccaaccyggcatgcctgcccctgctttaatacctaagaattggcctctcatagttattgatcttaaagactgtttctttcatattgctttacataaattggattgtgaaaaaatttgcttctactgtaccatctatcaataatcaggagcctgaaacttgttaacaatggaaagtactccctcagggaatgctgaatagccctaccatctgccagctttgtgttggacaggtgctttcaccagtttgagctcaatttcc

SEQ ID NO: 636761 - DNA, 643 bp, Homo sapiens
tataatggaaaacatggggtttgttcctggacttggtcttagtccaaaacatgaaggaattactaaacctcttcaaatcactgtaaaagaagacagggctggtttaggttatcctttttaatgatggccactgctacacctcctgatcctgttcctctacaatggaaatctgaaactcctgtttggattgagcagtggctgctctctaaagaaaaactggaggttttaactcaattagtttctgaacagttacaacttggaaatgtggaaccttcttttcccctggaattctcctgtgtttctagtaaaaaagaaatcaggcaagtggaggatggtaactgatttaagggacattaatgctgtaattaaacctatgggagccatccaacccggcatgcctgcccctgctttaatacctaagaattggcctctcatagttattgatcttraagactgtttctttcatattgctttacataaattggattgtgaaaaaatttgcttctactgtaccatctatcaataatcaggagcctgaaacttgttaacaatggaaagtactccctcagggaatgctgaatagccctaccatctgccagctttgtgttggacaggtgctttcaccagtttgagctcaatttcc

SEQ ID NO: 636762 - DNA, 584 bp, Homo sapiens
cactattgcaagtcgctgaaggactctacttctctagatctgatttttcctctctttctctgccacaaacctcccaaacaattgtaaaaggaagtgtgcttctctgggcaaaacaagggcatgtcaagcccaagagatcatttacttttttctttcttttttggtaactagttggttttttagaatcataacttgctttggttatgtgttggaagcaacgaagcatattcctctcatcttaatcatttttgtgtaaatgtcatgtaaaaaagtggggctttccttgacttctccaatcccaggcttgtatctatccggccttaacgtctttctcagagcactctagtttttcttcatartacctaccacatgtataattagatattcacctatgcaaaagtgtgatttgtgtcgctctcccattggactacactcaatggaggcagggtcttcctctgttttgttcacctgtgtccccaaggacttagcacaatgcctggcagagtatgcactccaaaactatttgtcacatgaaagactttcaaagtttttatttagcagcccatatagaacatgagagtcaa

SEQ ID NO: 636763 - DNA, 348 bp, Homo sapiens
aaagtccctttgggaaagcgcagagcctggggaatgagggatggaggccagtgtgcagaaaagccgtgcggaaacacctcgtgcagtcattctcctatcgagctctgggaaccgcggggtgggggagaatccaaacaatcgggaggaaaaatatccctgttctagctgttcaggctgctgtaatggagtcccataactgggtggctcatyaacagtgaatgcttatctctcacagttctggaggccaggagtctgagatcagagtgccagcatgatcgggttctagtgagggctgtcttcctcactgtgtatctgcgtggtagaaagagggcaagctagctctcttgg

SEQ ID NO: 636764 - DNA, 519 bp, Homo sapiens
cggggtcagtccccccctttgcctggggccaccagttctggagttcaattaaaagaaatcaggctgaaccctttcctccccgcggcaggctgcctgccctctcactcctcccttcagcgtttccacrtgctttccagagaggaaagaggttaacgggaaaggaagaatgaattacatcctttcaaaccccaaattgtttccttttcagcccaggctctaccgaccttcaaactacaacagagctttcaggagaatgcggagagacggcttcccacccggacctcaccagaaacccgcacaccccagccacattgctcctcattcagccagaaaggactccaactccaccaccaggaggccccccttcctggtgctggccagttgcagaggctgttcatggcatcccacaggtggcgactgccccccaccctcctcctagcactttagagggtccctctgtggcagacaccatggctaggtttctctttccaactcctgttggtctggcaagtgacagat

SEQ ID NO: 636765 - DNA, 569 bp, Homo sapiens
gcatgtaaaaaacaccttcagtaaatgccaggttttcccgaataataaagacttccaacaataaagacttcttttaagtctgtttcttacataactgttgtatggagagattaacatggtatcttgtttcttcctggtgtgatcttacttttgtcttgtaaatatgtacttatgtctgtatgttcacctgcatctttgtgaacccttggaaaactcagtatttcagtgggtttcagagaataggccgggagattgatgataagtaagtgtttccggccagttgttattaggcacaacttttaggagaaacaagtgagcgatagagcgtggccaaggagaggaaggcaatgctggaacccaatccaygcctgctgcccagagaccttagctgatggcttgtcatgtcttagcatgttggtattcaagccatgtgatgttggaaagaaaaaatacctattcagcttggggcttggtctgagaacaaccaattgccttggtttaaatcacacgactccactatcaaattaagtgtttccaagtttacacaaattagcgtcagtccactgact

SEQ ID NO: 636766 - DNA, 635 bp, Homo sapiens
gaaagaaatcagcttcacctccacttcccgctctagcactgagctacctgtgcttcccattcagctactgagctacctgtgtttctccagctagacttggttttatctaaggatcaaatgacttccagaaatactgctgaagatgtagaaagatgcaagtgtaactagatattccaatggatggtaaaagatatttaagcaagttatttttatctggtatttactttctttcattggttcacttcattttagaaacactgtattgcattgcattgcactgtattgcattgtatcatatggtaactttatttccatgtgttgcctcctccagtaaactgtgagttccttaaaggcaaggaggggccttgagtttttacctaccacagtgcttggcacatagtagttactcaatatttgcagaataaataagtgagaatcatttaagggtctaagwtatacctatcacttatatttcactttgtcttcttttgacatggatgatgttgctttttattatttttaatgatgaacatggtaatttaaacatagaggaaaaccataaaccttaaatgccttgtgtgggttttttgtgtatatttgttttggagttttgctttcttttttaagcttgtaca

SEQ ID NO: 636767 - DNA, 635 bp, Homo sapiens
gaaagaaatcagcttcacctccacttcccgctctagcactgagctacctgtgcttcccattcagctactgagctacctgtgtttctccagctagacttggttttatctaaggatcaaatgacttccagaaatactgctgaagatgtagaaagatgcaagtgtaactagatattccaatggatggtaaaagatatttaagcaagttatttttatctggtatttactttctttcattggttcacttcattttagaaacactgtattgcattgcattgcactgtattgcattgtatcatatggtaactttatttccatgtgttgcctcctccagtaaactgtgagttccttaaaggcaaggaggggccttgagtttttacctaccacagtgcttggcacatagtagttactcaatatttgcagaataaataagtgagaatcatttaagggtctaagatatacctatcacttatatttcactttgtcttcttttgacatggatgatgytgctttttattatttttaatgatgaacatggtaatttaaacatagaggaaaaccataaaccttaaatgccttgtgtgggttttttgtgtatatttgttttggagttttgctttcttttttaagcttgtaca

SEQ ID NO: 636768 - DNA, 639 bp, Homo sapiens
aacgtggaggggcacaactgtcccagttgagaacaattatctagacagttaggagaccttcccatattacactgaatctgtacctaccttcagtaccccagggcaagttgtttgatcccttggcagctgcctttatgaccagcaagacactgtttcagacgttatctcagtaagtgcctctgttttaacagtttcaaaatatctgraacactcactactttcttcaatgctatgtcacacacacacacacacacatttagagttgtgtgtaaaccaacagcagcacaaggtatttcttttcctagtacggtaataaatatagtagttaattttaaaggggaaatttgtattagcttaaggagttaaggagccataagaggaagctagataatgaagaaatgagtagtaaaaacctaaaaatgggagaaagcctaaaacagaattagagactggcggcaatttttgtggaattgacaatttcttgagcatatgcttaggcaagtattaggttggtgcaaaagtaattgcagtttctgccattactttactttgaatgaaaaaaaaccgcaattgcttttgcaccaaactaatatcatcatcgtcaaatatttattaaatatttattagtaagctctaccc

SEQ ID NO: 636769 - DNA, 624 bp, Homo sapiens
caggtatgaaatggttgaacaaataagtaaatatattgttgataggaagtgccagatttctcactcttggggaaatagattacaaataatcaaagaggaaattctagaatgaacwctgtgttattgggttggctttggaggcgtcagcattaatccatttttaacatatatacaaattggtatgttctcaattgtgtcctcccaaaatttataggttgaaagcctaatcccccgtgtgactgtgtatttggagttagggcctataaggaggtaattcaagttaaatgagatcttcagggtggaccttaatccagtatgactggtctccttataaggagaggaagtaatcaagaaggcaagtgcacagaacaaaggccaagtgaggacccaaggggaaggcagccttttgaaagccaagcagaaggcttgaagagaaaccaaaccaaccgatgccttgatcttggacattgggcctccagaactgtgagaaataaatttctcttgtttaagatgcccaatctggcattttgttatggcaatcatagccaaccaagatacaaacaaacacaaagatatagaaaaatctatgtatatatttaggttagtatacacacatacatttcc

SEQ ID NO: 636770 - DNA, 624 bp, Homo sapiens
caggtatgaaatggttgaacaaataagtaaatatattgttgataggaagtgccagatttctcactcttggggaaatagattacaaataatcaaagaggaaattctagaatgaactctgtgttattgggttggctttggaggcrtcagcattaatccatttttaacatatatacaaattggtatgttctcaattgtgtcctcccaaaatttataggttgaaagcctaatcccccgtgtgactgtgtatttggagttagggcctataaggaggtaattcaagttaaatgagatcttcagggtggaccttaatccagtatgactggtctccttataaggagaggaagtaatcaagaaggcaagtgcacagaacaaaggccaagtgaggacccaaggggaaggcagccttttgaaagccaagcagaaggcttgaagagaaaccaaaccaaccgatgccttgatcttggacattgggcctccagaactgtgagaaataaatttctcttgtttaagatgcccaatctggcattttgttatggcaatcatagccaaccaagatacaaacaaacacaaagatatagaaaaatctatgtatatatttaggttagtatacacacatacatttcc

SEQ ID NO: 636771 - DNA, 577 bp, Homo sapiens
gaatgaactctgtgttattgggttggctttggaggcgtcagcattaatccatttttaacatatatacaaattggtatgttctcaattgtgtcctcccaaaatttataggttgaaagcctaatcccccgtgtgactgtgtatttggagttagggcctataaggaggtaattcaagttaaatgagatcttcagggtggaccttaatccagtatgactggtctccttataaggagaggaagtaatcaagaaggcaagtgcacagaacaaaggccaagtgaggacccaaggggaaggcagccttttgaaagccaagcagaaggcttgaagagaaaccaaaccaaccgatgccttgatcttggacatygggcctccagaactgtgagaaataaatttctcttgtttaagatgcccaatctggcattttgttatggcaatcatagccaaccaagatacaaacaaacacaaagatatagaaaaatctatgtatatatttaggttagtatacacacatacatttccttgtgggtctgctgagggaccttagaagcagtggcaccaatttagcaatgagcacacct

SEQ ID NO: 636772 - DNA, 624 bp, Homo sapiens
acatacatttccttgtgggtctgctgagggaccttagaagcagtggcaccaattyagcaatgagcacacctaactcccaagtcttggttcctaagtaccattctccaatgaaagaaaccagagattttggggaaagcaattgattccagggctggggcagggaaaatacaagaggatcctagagtatcttaaggcaccagaaagtaaggaagtgctaaagaaaaaaattgaaaaagataggacacatcaaatggaagaagaagtcaacctggaagagctctcaaagagcaaagtcagaacatatgagcaacaaaatatattatgagaggaatggatttcaatccagaaaataaaacaaatatccatgagtgagtccatactgatgttgatagattattaaataaataaataaatagagagaaggaacaactcttccttagaaaggaattccattactgaatgtaaaaggaattagtgcaagcactcctagaccaccacagtaattattgcttaaggtaaaatccaccactgaatgttaaaaccaatgagcaaaagagtaagaagaaagaggatatttgtgtagcttccaagtatctcccctcaaaatgctttttaattgcaaaa

SEQ ID NO: 636773 - DNA, 355 bp, Homo sapiens
agcaacatgaaaatgggctaatacataccccccagcatgagtgctgcacatcacctctgtgctgttctgcaaaatatgtaactttaatcatgagaaaacaccaaacaaacccaaataccctataaggtattatctggccgatgcgtttcaaaaatatcaaggtcttgaaagagaagaaacgactgaggaactakcatagactaaggagactaaggacacctgacaattaaatgcagggattggaccttggaccagaatgaaaaccaatgtagaaaaactaatgaaatctgagtactatccagttaaatgcattgtatgaatactaaattttgatcatggcaccatggttataaaa

SEQ ID NO: 636774 - DNA, 441 bp, Homo sapiens
gatctgctggggatccatggaaggaattggtttagcagcactttctagaccacccagacttggagatggctctcatacttgggatcatgccctttggagggatcttttactttggcttctccagatggaagwtgttctttaagggatggcgcatctttggaatatgaaattgaataaccagctcagaaggtgaaggtggagtcatttagtcaggtagacaggtagtgaaggtggagtcaggtggtatgagtcagagtagcaaagtgatgggccctctgtcactactggatgcaagccctggaatagtacctccaagacgtgttccacaacatgtcaacgcattcccttcccaccaggagaccaacgactcactcgaccacagcctacagcagtcaccctcagccagtgctgagatgcataagatggtgctaggtgatgact

SEQ ID NO: 636775 - DNA, 523 bp, Homo sapiens
ggggaagctacatttttagcaagctccccgagtgattcttacgcaaactaaaatagggccacagtgtccagaaccaggcagttctttgaagaccgttgttgttgggggatataatataaacctgtctcccttcattgttactctctccagaccccaatttaggyacggtattttcttcccagtttggaaggaggtagccccaaacaaggcagggtatgtttccagaatgtcagactggggtcctgctgtgtgaatgatctaattgaactcatgatgttgctggtttgaaatggacgttcttgctaatgatgattcagacaaaagcagacacctttgggaatgtctgcaaggctcacaagcaccaccacccgtccctgctgcccacagaagtcctttattggtagctgaatttatatacatggccctgccctctggctatattgggttagaccaagctccgtaaatgaaatctctttgaaaatttgggaatggtactaagaatgacagacacttgcagtgtggc

SEQ ID NO: 636776 - DNA, 546 bp, Homo sapiens
gactgttttttaaaaaccaactttaagttactgcagaaccaagcataatgtattctaggtagtctataagccatgatttctttcagaaaaatacaatagacaaggtttccactaaacgtagtctttgtactttctttgtttcctccaggtcattaaccttttcacctataatcatcttagcgataggatttaggcaactattatgtaattgatcattagcaaaagagtcctggtggcaaaaaagaaatacttttcttttgaaacatatgataaacatttaacctctagattgatgtttcatttcttaactgattattaaaagaatcttaattmtaccttaaacatttaaaaattacacagagattacatttatttcagaatcagtcttcaagtggtgaaaagttgttggtgatattcacattctataatacccaattaaatgttgcttatattttatattttatttttgttatattttatatagccaagaaaatgcctttattttttggaggaaggtggctgaagtatttgggggtgaagtacatg

SEQ ID NO: 636777 - DNA, 643 bp, Homo sapiens
gtaataccctgtttgaaagccttcctttcacttaaaaatagggaccacagctctctgcagaccatccagcaattagcaagaagtctcctccttgggaatttccattgtttcccaattatgatatttttggaaacagcatcacttaaaactgccctcccacttagtgtcctgttatttcaggggatcgtayattgaagatttagaaaacgaactttgatgattatctgttctgttctcttatttctagcccccattttaacattttagatgtgaaaaatgtgtgggcccagagaaattaagcagttagcccaaggtgagacagaatgtttgtactagggcttggactggaggccgggtcccagactcccagggtgtccactgggcactctggcattagcaccgccatgctgagctctcaggctgttacactcagatgccccacgcttatagttagagaaagtcagtgcatgaattgtggaggaatatatttgttgtacaaacacaatgaagttactcttcacacaactcccccgtcacttaccaacccaattatcttggttctgagcttgcttttacaactgatgcaagttcaagtagcctctcggtaagaggaaaaattcccttggcaatagatttgcaggga

SEQ ID NO: 636778 - DNA, 390 bp, Homo sapiens
agatctgtatgctgaaaactataagacattaatgaaaaaaattaaacaaaacacaaatacatagatatcctgtgttcatgaattggaagaattaatattattaacatttccacacaactcaaagtgttctacagattcartgcaattcctatcaaaattccaatggtatttttcacaaaaatagaaaaaaaatcctctggtaatcatttcccaaagtgtgtgtacacatcaagtcatcacactgtacacttcaaatatatacagtttttatttgtcaattatacctcaatagagctggaaaaaataaataatacttttaataaaacaatgttggaataatttaactgaggctttacagggtattcacaagtttcatcaaaatttaataaa

SEQ ID NO: 636779 - DNA, 390 bp, Homo sapiens
agatctgtatgctgaaaactataagacattaatgaaaaaaattaaacaaaacacaaatacatagatatcctgtgttcatgaattggaagaattaatattattaacatttccacacaactcaaagtgttctacagattcagtgcaattcctatcaaaattccaatggtatttttcacaraaatagaaaaaaaatcctctggtaatcatttcccaaagtgtgtgtacacatcaagtcatcacactgtacacttcaaatatatacagtttttatttgtcaattatacctcaatagagctggaaaaaataaataatacttttaataaaacaatgttggaataatttaactgaggctttacagggtattcacaagtttcatcaaaatttaataaa

SEQ ID NO: 636780 - DNA, 390 bp, Homo sapiens
agatctgtatgctgaaaactataagacattaatgaaaaaaattaaacaaaacacaaatacatagatatcctgtgttcatgaattggaagaattaatattattaacatttccacacaactcaaagtgttctacagattcagtgcaattcctatcaaaattccaatggtatttttcacaaaaatagaaaaaaaatcctctggtaatcatttcccaaagtgtgtgtacacatcaartcatcacactgtacacttcaaatatatacagtttttatttgtcaattatacctcaatagagctggaaaaaataaataatacttttaataaaacaatgttggaataatttaactgaggctttacagggtattcacaagtttcatcaaaatttaataaa

SEQ ID NO: 636781 - DNA, 390 bp, Homo sapiens
agatctgtatgctgaaaactataagacattaatgaaaaaaattaaacaaaacacaaatacatagatatcctgtgttcatgaattggaagaattaatattattaacatttccacacaactcaaagtgttctacagattcagtgcaattcctatcaaaattccaatggtatttttcacaaaaatagaaaaaaaatcctctggtaatcatttcccaaagtgtgtgtacacatcaagtcatcacactgtacacttcaaatatatacartttttatttgtcaattatacctcaatagagctggaaaaaataaataatacttttaataaaacaatgttggaataatttaactgaggctttacagggtattcacaagtttcatcaaaatttaataaa

SEQ ID NO: 636782 - DNA, 572 bp, Homo sapiens
aatctcacgctacatgaactcctccatgtgaaagaaatccattcttctagcttttggtatcctgtggacaacaataagtgaataaaccaaaaacaaaatcaaatctacctaatatcaatcacactggtatttgcttatacaacatgcttagctaactagactctgacaagaggagaatgctcagctttttgaagacataaccatctaagataatttatcatggtatctcaagtttggtaaaagagaagtccagtttatccargtccaagaagtagtaagtcttgaaatccagggtcatgtttatcctttggtgaaaggtcaggcatcagtcacaggaaatgacaatggtaggatatggagctatttaaataatggggtactcagcactggccataaagataataagtctggttaaaaacaagagattaaaacggattctcatcagctggcataaaaataattagctcttaactgcattaaacaatatcccaaattgataagatttctagaaatgagacgatctctgaaacagagcctctaagaacaaagtatagcctataagtcccctaatt

SEQ ID NO: 636783 - DNA, 568 bp, Homo sapiens
agaaaaaccaagcctttgggtgaaggtaggagtcattgctaggtcagaggtaaggtgccaggacatcacagcctcctgacagagctaaccccatgtgcaagactgcccacagcaaattcccctgcccacctctgaaggttattatttttatgaatagctactactgggtgagtgcttaacagattctaaataattcagttaccatctaattaaccttccacagctctaaggcaaataatgcaattctccatatacagacaaggaaataaagctcaaagaggccatctatacgaagtgccccakgtcacccatcctataagtggtagaactaatgtgctcactcaggcaatttaggctgcgatgccccaatgggattataaagataaaccgatagctatgaaaacagagctctttacagcaaagaggacctacaaatttgagtattactaaggctgttatcctctctgacaataggttcattgaatcattcagtaaacatttattttaatttttaaaaatatttatttatttgttaagacagagtctctctcttttgcccgggctggag

SEQ ID NO: 636784 - DNA, 568 bp, Homo sapiens
agaaaaaccaagcctttgggtgaaggtaggagtcattgctaggtcagaggtaaggtgccaggacatcacagcctcctgacagagctaaccccatgtgcaagactgcccacagcaaattcccctgcccacctctgaaggttattatttttatgaatagctactactgggtgagtgcttaacagattctaaataattcagttaccatctaattaaccttccacagctctaaggcaaataatgcaattctccatatacagacaaggaaataaagctcaaagaggccatctatacgaagtgccccatgtcacccatcctataagtggtagaactaatgtgctcactcaggcaatttaggctgcgatgccccaatggrattataaagataaaccgatagctatgaaaacagagctctttacagcaaagaggacctacaaatttgagtattactaaggctgttatcctctctgacaataggttcattgaatcattcagtaaacatttattttaatttttaaaaatatttatttatttgttaagacagagtctctctcttttgcccgggctggag

SEQ ID NO: 636785 - DNA, 568 bp, Homo sapiens
agaaaaaccaagcctttgggtgaaggtaggagtcattgctaggtcagaggtaaggtgccaggacatcacagcctcctgacagagctaaccccatgtgcaagactgcccacagcaaattcccctgcccacctctgaaggttattatttttatgaatagctactactgggtgagtgcttaacagattctaaataattcagttaccatctaattaaccttccacagctctaaggcaaataatgcaattctccatatacagacaaggaaataaagctcaaagaggccatctatacgaagtgccccatgtcacccatcctataagtggtagaactaatgtgctcactcaggcaatttaggctgcgatgccccaatgggattataaagataaaccgatagctaygaaaacagagctctttacagcaaagaggacctacaaatttgagtattactaaggctgttatcctctctgacaataggttcattgaatcattcagtaaacatttattttaatttttaaaaatatttatttatttgttaagacagagtctctctcttttgcccgggctggag

SEQ ID NO: 636786 - DNA, 518 bp, Homo sapiens
tccaaaaaatctgacagcagccatctggggatgtaagctactgttaacctttcccagagaatatttttctttagactcctctctcattacagaacaagagactctatagcctaagtggtaaaagaatctcagctgagtatgggggtgcatacctgtagtcccagctacttggaaggctgaggtggaaggattgcttgagcccaggaggccaaggctgcaatgagcccagattgcaccactgcactccagcctcggtgaaagagagagaccctgtctaaaaaaaaaaawaaataaaggaatctcaaagaccaggcagcatgcattaagaaattctagaacagacactcctaaaatcacaaaatgaaatgtgcaaggcgcttgtgacagcgtcagcaacaccgaaggctagactgccagtatgctgagtggcggccatgcccttgatggttcacttaatacatgtgtactgtgtgctagactccagtccaggtgctaacggtggaaagttgaatctgaca

SEQ ID NO: 636787 - DNA, 537 bp, Homo sapiens
gaaatagaaaaggacacaaaaaaataggaagatattccatgttcatagattggaaggattactatgctaaaatgatgatactacccaaagcaatttacagattcaatgcaatccatatcaaaataccaatgacattcctcacagaaatagaaaaaaaattataaaatttatatggaaccacaaaagaccccaaatagccaaagcaaccctgagcaaaaagaacaaaactggaaacattacactacctgaattcaaaatttactacaaagctatagcaaccaaatcagcatggtactgacataaaaacagacacatagaccaatagaacaaagtagagaactcagatrtaagtctatgtatttacatccaacttatcttcaacaaatgcaccaggaacatacattagggaaaggacagtctcttcaataaatggtactgggaagtaagtatatgcagaagaattaaactagatgtctactgcacaccatacacaaaaatcaaatcaaaatagattaaagtcttaaatctaagatctga

SEQ ID NO: 636788 - DNA, 479 bp, Homo sapiens
gcttgtgagcactaccaatagttacttggcctaggcagggagtgctgtgacttttctattttaaatttatacaatttattcagcaaagtaatgagatattgtggttgcaagtttcagtatttgcctagcttcccttttcattttgcagaattagaacaacctcaaatacttcaaactgcrttccaaaccaacgcatatagcagctaaagttctgagggcatttaagtggagttattctatgaaagatcattttagattttttggagtggtgaaagtttaggatggaaatgaaaaggtaaaaatattgtatctgctctgccttttcaggatttcaggttttttaacagaggaagggtgagagatgcctgtttccaggtcattgtgccatggtcacacctgttgaatagcttccaaagggggttggtcaactgaccatctgcagtgaaatgccctgatattcctgggttggctttacagca

SEQ ID NO: 636789 - DNA, 479 bp, Homo sapiens
gcttgtgagcactaccaatagttacttggcctaggcagggagtgctgtgacttttctattttaaatttatacaatttattcagcaaagtaatgagatattgtggttgcaagtttcagtatttgcctagcttcccttttcattttgcagaattagaacaacctcaaatacttcaaactgcattccaaaccaasgcatatagcagctaaagttctgagggcatttaagtggagttattctatgaaagatcattttagattttttggagtggtgaaagtttaggatggaaatgaaaaggtaaaaatattgtatctgctctgccttttcaggatttcaggttttttaacagaggaagggtgagagatgcctgtttccaggtcattgtgccatggtcacacctgttgaatagcttccaaagggggttggtcaactgaccatctgcagtgaaatgccctgatattcctgggttggctttacagca

SEQ ID NO: 636790 - DNA, 530 bp, Homo sapiens
tgcatttctctgcctggcctgctggaattccctggtgctctttctgaacgctggcactgaggtgtcactctgttttctaaatcctgctgagtaggtccgctggcaggcaggtcaaaaagcacatggttgtttaaagactctgcctctgtttgacccagagaaaccatgatgacatctgtttgctgtgccacctttttctttaatgggactggaagcaatttcaggcacgttattctgtgtccttggtgcattttctcaggctgggttcttccrctgcaggttcattgcagaagaggccgcggcttctggggccaagtgtgtgctcacccacagcccgacgtggatcatcgaccccatcgacggcacctgcaattttgtgcacaggtgagctgagcagggatcgcctccattgcagggcttaacatgtcctcttctgtgaggttttgtcttttcaaaagcagcattttttaaggcaggaatatataaacaaacctatagtacactcatagtctcatcagaaagatgatcag

SEQ ID NO: 636791 - DNA, 527 bp, Homo sapiens
gggattacaggcgtgagccactgcacccaacctgaaaaaggggtattgttttctataaatgctttggtcattgttggaaatattggctacataatttaaaatggatttctatgttaatctgaaatgagacataagcttaatatagagaaacagggcttgtgatgtcttcgttaatagcaaaggttgttctgcttcatacaagrtggaaaattttacccacctcagggcaattgtgccagcaattatatcagcaaatcagagggactgctttcctattttaagtcattttaattatcagtaaactaaacttgcatctaaacagccattacttgagatactgcaagtgcttaggttgttaataacgtaaagttacctgtgaagaaaaaaaacagaggttaatatttttatctttttattttattttaattttatattttattattttcctttgatgaatccattgctgcctacactgtactgaactaagtagttgggagtgaaaatatatgaactagcccttgtccctt

SEQ ID NO: 636792 - DNA, 642 bp, Homo sapiens
caaaggtccaagcctgttgcctacagaattaaggcatccaattcagatctcaattattttgtgttaagaaaatctaaacaaagcaaacactgcttagggtttaccaatgaataaagaagcaagttggaagggatatcaaaaagatcaaaatgtttgcgcatttataactttaacaatgtctaagtttttttaaacttaggttctacatctggagcatacttttttaaaaatcataagcagtgttaaaaaatacttgacagttttgtcttgattcttaatgtgggtgttaagggatgccgtccattagtgagtacaccccagatcatgtgtttattgcatcctccttcttccctgcctgtcccctaatgatctggtgcacagagggctacttgagctgagttatatggatctcagttgctgtcatttgcacatacttaattcagasaggtgatcacattgatttccaagacccaatttttaagacactgtactcacgtagatatcttagctgctctgactatgttgtctgaaaaggaaaacattttaagcctttggaagcaattttgatggacatttcattgtgttctatattactcacataattaaatttccttcaagtcaaagtctgtttaaaattaaatt

SEQ ID NO: 636793 - DNA, 501 bp, Homo sapiens
taaatttccgaggaactgccatactatttccatagtggctacatcatcttacagtcccaccaacagcacacaaggttccaatttttccacatcctygccaacatttgttattttttgttttcattttgttttgacagcagccatcctaatgggaatgaggtcaaataaactttcaactggaagaactggatgtcagagctctgagggggaaccaggtttccaaactccagctcagtgcctggccacaagtctgctgaaactgaagagaaaccaccttccctactctatgtgcaagttctcaaggcagattttactctatcctgcccttaccccaggttctagaagatgttaaagtgatgttcaaattcctgaactccctcccctgcccctacttccttttctctaagacgtccctcccctctgcttccctagacccctccggaggaccagtgctcactgcaggcttccctttctctctgcatccaaaggtcagttgtgttt

SEQ ID NO: 636794 - DNA, 501 bp, Homo sapiens
taaatttccgaggaactgccatactatttccatagtggctacatcatcttacagtcccaccaacagcacacaaggttccaatttttccacatccttrccaacatttgttattttttgttttcattttgttttgacagcagccatcctaatgggaatgaggtcaaataaactttcaactggaagaactggatgtcagagctctgagggggaaccaggtttccaaactccagctcagtgcctggccacaagtctgctgaaactgaagagaaaccaccttccctactctatgtgcaagttctcaaggcagattttactctatcctgcccttaccccaggttctagaagatgttaaagtgatgttcaaattcctgaactccctcccctgcccctacttccttttctctaagacgtccctcccctctgcttccctagacccctccggaggaccagtgctcactgcaggcttccctttctctctgcatccaaaggtcagttgtgttt

SEQ ID NO: 636795 - DNA, 518 bp, Homo sapiens
tgcaagtgatttccccccttctagccccacttaaggagggaagaatccagggagaagacaaaagtgagagaatagatttgcaagggcagttaccaataacttaaagcattttgactaaaggatacttcayaccatcaaatgcccttaaccagaggctaaaaaaatgggctcatgccaatgagctcccaaagtgtggaagtattttccttcaatgagcctaatctctcattcaaaggccccacctagacttttacatttctcttagtttggctatcctgatgtggctaaactgagaccagagattcttagcattgaaatttgccaggtttagctactgtttccttctctgagtaagagtgatggatcattagaaacaggaaatagcagaggtggaagaggttttggtgattatctagtttagcattggcataagctgagactatttatgcaactgttctcttaagatgctcctttctgtccaaaggtctgcgaataaataaggacacgacattcgagga

SEQ ID NO: 636796 - DNA, 481 bp, Homo sapiens
acaggaaatagcagaggtggaagaggttttggtgattatctagtttagcattggcataagctgagactatttatgcaactgttctcttaagatgctcctttctgtccaaaggtctgcgaataaataaggacacgacattcgaggaagaatggtgcaaaagcacattatgataacagggatttcatcctagaaccagaggccatgctgctttgtagtcaagatctccatgayggaccccaaggcggtgcctaggcccagtaatattctcagcatgtgcctgagacagcccaagattcctccaacagaaagaactccatgtgtggctcctgccttcccagggcttcccaccagccctggacatgggatggcttagtgagtggttgcagccaccagcagctgaggctgcgagttcacctgccaataaaaccagtgtctaaatccctctggtttgtggaagactttttcatctgtataaattcag

SEQ ID NO: 636797 - DNA, 549 bp, Homo sapiens
tctggaaaactcagcttacacttgattcaacataccactttccacaatgttaaaagaaaaggacataaaatggcataacaaaatataccttgggtttcataagacaagtcttcttggcaaagtgtaaccagccagacccatgcattgcctgtgattaaaaaaagggctgggtacactcatgtctcaaatactcctctactttctttggatcaaaaatggatttgaactttgtagattctacaatatctgcattaagaggaacagtttgtgggtttgtgagtgtcaggaaaactttgctgaaacaaatatcaattttattgtggaacaacatataaagctttctggaagattaaacactattacaatcatcaaytgtcttacaaaagccaatttgaaaaattcttgtatctgttcccatctttggcagattaataagagaaaaataaaaagactatatatcaaagtttacattaccacaacctaatttataaggccaaataaaaatatgttgctttttattattcacgagagcacgttcccaatataccc

SEQ ID NO: 636798 - DNA, 573 bp, Homo sapiens
atactcatcctttgtctcatgttgatcttctctggcaagtgtggaaagttccctactgtgacaaagcctttcctacccccccatycttgtgctcaggaagcctgagcaaagtaagtttagggttctgtgatgaggcaatcatccagctcatatagcaaaaggcaagaatcaatcggaaaattgcctgtcatgaactggggcttagtcaccttgactctagaaagaatcatctttacccgactctcaactttccttgctgcttttgttgtctcatatggaggtcctgggaagcatcattcagcaaaagtaattttagatgataacttcagtgctcttgaggggctgtttgtacctgatggcaagagctgcaaatagcgtgacatcatcagtaaccaataatgcagtcattggtgcagtctcttaccagggagagaaggtggtcctgggaattcttctcttggaattgccttttgaaagcttgcagcccactatgacttgggacaggctacttaaactctttgtgagccatctatgaaatggaggataacaatagttcctctctcagagtttcct

SEQ ID NO: 636799 - DNA, 573 bp, Homo sapiens
atactcatcctttgtctcatgttgatcttctctggcaagtgtggaaagttccctactgtgacaaagcctttcctacccccccattcttgtgctcaggaagcctgagcaaagtaagtttagggttctgtgatgaggcaatcatccagctcatatagcaaaaggcaagaatcaatyggaaaattgcctgtcatgaactggggcttagtcaccttgactctagaaagaatcatctttacccgactctcaactttccttgctgcttttgttgtctcatatggaggtcctgggaagcatcattcagcaaaagtaattttagatgataacttcagtgctcttgaggggctgtttgtacctgatggcaagagctgcaaatagcgtgacatcatcagtaaccaataatgcagtcattggtgcagtctcttaccagggagagaaggtggtcctgggaattcttctcttggaattgccttttgaaagcttgcagcccactatgacttgggacaggctacttaaactctttgtgagccatctatgaaatggaggataacaatagttcctctctcagagtttcct

SEQ ID NO: 636800 - DNA, 621 bp, Homo sapiens
acaaatcttgttctttgcagggttgcattgcaaagcaccacagtacaataagcccaccaactgactgtatggaggcccagttgaagctgaggtattcacaggaagaattaaaaaaagcacagagaggtccagactggctaaatcgttgctttggttcaagcaaggcactcgtcccgtggttatgtcacactttgcaagtgaagcatgaggctggggggattgctgaggagaggtctgccaagtggggatgttttctgtgttcaggctgccatcgctctttctagatcctctctcgtatgggtgtggcagtaggaaagatggggaaggtgatgttcrcttatagggagctctgctgctcaatgaattaagtcatctttgctctgtctcccagggattctgagagttctaattccaataggaatttaggaagaaaaccaaagcaatgtactctttggaaggaaggccttacaggtttgccttgtatagggagaagatgggccttgagcttgtttggacaggagggaactttcacataggatggtgcttgaaaacttcagaaagagagtaacagtgtttcctacagtttgtcaatctgtcatttatattcctctactagctatg

SEQ ID NO: 636801 - DNA, 573 bp, Homo sapiens
atactcatcctttgtctcatgttgatcttctctggcaagtgtggaaagttccctactgtgacaaagcctttcctacccccccattcttgtgctcaggaagcctgagcaaagtaagtttagggttctgtgatgaggcaatcatccagctcatatagcaaaaggcaagaatcaatcggaaaattgcctgtcatgaactggggcttagtcaccttgactctagaaagaatcatctttacccgactctcaactttccttgctgcttttgttgtctcawatggaggtcctgggaagcatcattcagcaaaagtaattttagatgataacttcagtgctcttgaggggctgtttgtacctgatggcaagagctgcaaatagcgtgacatcatcagtaaccaataatgcagtcattggtgcagtctcttaccagggagagaaggtggtcctgggaattcttctcttggaattgccttttgaaagcttgcagcccactatgacttgggacaggctacttaaactctttgtgagccatctatgaaatggaggataacaatagttcctctctcagagtttcct

SEQ ID NO: 636802 - DNA, 452 bp, Homo sapiens
actaatatatcaagtttggcagacaaatatcagaaagttatagatacaccagctctaccccttcttcatctaccatttccacttactcttcctggttaggctgagaagtctgaatcacacagcatcagcaacaacaaaaacaaaaagtcagctctaacctgttacgaatctagaagattatcgccaaggtagttgtgcctgggccttgtggtcaaccttgaccacatgtattatctttttctccactttttaatagagtycattattcttcaacaacattggaaacaggccttttcttcttagattttaaaatatccaactattcaaactcctgaaaatccgagttcactacaaaggcatactgtcatgacactttggtaatgataatcaaacagacattcctataattctaccaacattttcaaaagtggggaagtttcccccatacccag

SEQ ID NO: 636803 - DNA, 501 bp, Homo sapiens
cccaaatgccctaaataatgaggcagtatgtccatatgttgcccagggtttttatagctagcaattgccagctgttgattttgacaaaagcagttggtcaggagctaaaggaaaataaaaacaggagggagaacacctgccttgaaagyctaagaaaaaggagacagatccaatgacgtctgggagctggtgtgaggctgtgacctcagcatcctcagacccgggctgtggagccaggtgtgcctgcaggcacaagcagagtgcaaacggctttggtgctgttcaattactacactctatagtccacatgtgcccatttttgaacagccaggaaagtgtcaatagctccctccaacccaaggatgcgatagaaacccaacgaaacagcaggtgttccagtggcattgatggattcagtcttgacacagtcacatgctggtcagggtctcctgaactccaactgctcaaagccagttctgccacggaaggtgcaaggttagc

SEQ ID NO: 636804 - DNA, 639 bp, Homo sapiens
tatgcctgatccagccctgggtgatagatgcctaggcctgtcctcccatgcttcctcctctgtcttagcaaccacaggcaattacagtgggataactgaatggagaggccaggtgattccctgaaaaatagcaatcagaccargacctgcagaagaaagggtgtgggttcagtgtcccggctcttgtgggcactgtgtttgtaggtagaaatgatgaatggatgtgcactgacatttatgtcactgtgctgagagttgctctctcttcccctcacagtctctctctataggataaaagattctgagcaccaaagaattgtcccatctagtcaaactggggcaaactgacaaactccatcttggttcattagacccatggatgaattatgggatgtagagggaaactgtgcctggcacacgcttaatgaacccagggtctccagtgatggatggatggatggaagtgaacattcgtctactctcacttgctccaatgatgtcattttaaaccaacagtgaatttcacccagaaaccaacccggacacagagcagagataaggagggtaagagtgcctcaggaggaatgttaatcagattccagaagcctgccaatcagtcctgctgcgagttcatttaaa

SEQ ID NO: 636805 - DNA, 640 bp, Homo sapiens
gtaattccagcactttgggatgctaagtaaatgggtagattgcttgagtccaggagttcaagaccagtctggacaacatggtgagaccctgtctctacaaaaaatacaaaaaacaattagccgggcgtgatgttctgcgcctgtagtcccagctacttgggaggctgaggtgggaggattgcttgagcccaggaggcagaggatgcagtgagccaagattctgccactgcactccaggtgggcaacagagtgagaccctgtctgaaaaaataaataaaataaaataaaataaatgaataaataaataaataaatgaaagtgtttttcagaagttgacaygttccaaatgtttaatcagatctggggtggtatactcttgcctaacgcaatctgaggtttttctggaattttggtctgactttggtttggacagtgcctcataaatggaagatcctttacactccactttcctatggatttgaccacatctataggctgtaaaataaaccccagagttccactgctcacagccttctgttttcttagctttcctttttccatttgaaaacaaaactaagtcatattgctcagtattcaaaaagctatgagtctaggcaggggattattaagtgtttttttt

SEQ ID NO: 636806 - DNA, 566 bp, Homo sapiens
tttaagaatgatgcacaatgtgtgaatatggcccacagttggggcctaattatgattctccagcaagtgcgctgcattttggaggaagtcttaaacgagcacttaagcagtaatgcctctgaatacaccactgtggatctggaagagggctttgattcctgcacccggagccgccgacgcccacgctgctcccacaagcacttttatcaccaagttattggaccattatggtctacgattgtcttttaccgcctttgatttttttctgttgtcagatgtgaggaaagtgatgtgtaataygatccaaaatgctcttgtttgttttaatctgctgttttaatatattatggcttcctgccattaccctcctctaccagggccctagggtcccttggagacagtgggagcctggaatgtgctgggcactttggggatttggtgcaaagctgtggcatgtgtgctcctgccaggggggacctcagagccaggagtggagctggcagctgggtccagaggctttggaggtcactgtaaaaaagagtggcctggggactgggcaagtggaa

SEQ ID NO: 636807 - DNA, 614 bp, Homo sapiens
cctgtctaaataacatccatttgtgatttttttcaacacggtacatgacctgtttctaattggctatctcttgggttgtttttgtacattcatgtttgttttatstgattgaaaaatattaatgatttcgtaggtgagctaatgtatttatctgctgagcgagttcaaagggcagagttcagctatggttcaggttaattgaacaggaagcagtgagctctccaggctgtgttgaacaagggatcagtcccttaaaatatcacactcagcaaacacaatttcactgtcttcatcctagagtctgatgtaaaaggctcagatcaacttggatcacttgtttaaaaaaccaaagcaaagcacagtaactgcagcaataccctggagtccccctcggggaagaagagttttctcattggctaattgctttattggtagcactgacctgcagagcagctgcaggagcctggatgaaggcttaggcctcagaataatgtgctccattagaacagggcaaggcattttttgtttactcaattggagctccctgcaaagtgccattaaccccggcccaactgcttgtgtgctgcaaaagccaaaggtcacgccagtcagtc

SEQ ID NO: 636808 - DNA, 636 bp, Homo sapiens
gcctgtgggtgggttgctgcctccacgccccggcgcaggcttcagcaccacgaacagcgccatggaggaacgctgtttgagcgaattggagatggaccctctactgcggttaaatccaggcaagagcctgaccagtakctccagctctgtaggtctcagcgccccagtgcagggcctcatattttcctctggagccctgtggcttttcagctctctgtgtgagatcagcgataataaagggaagaggaggcggcatctgggtgagaagacaaaagatgctgaaagactttccctctgaagaggaagagcattaccaccgctggggggcgggggattgaactatttttctccatgttgctgccttctgcaggcatgattgccaccctcaacgggatgttttagatttaggatttcctttcaagtgttactgtctgcctgcccccacgccccaccccccaggtatacacaaacggatgcttttgtttccccagatgcatgctcctgatttttgaaagcatgacttttattatattaaacaatattctcacattatagcagcagtaatgtcacaaggagaaccaactgtggagcatcaccaccttcgataaatctagaaactggatttgatttcttgag

SEQ ID NO: 636809 - DNA, 636 bp, Homo sapiens
gcctgtgggtgggttgctgcctccacgccccggcgcaggcttcagcaccacgaacagcgccatggaggaacgctgtttgagcgaattggagatggaccctctactgcggttaaatccaggcaagagcctgaccagtatctcyagctctgtaggtctcagcgccccagtgcagggcctcatattttcctctggagccctgtggcttttcagctctctgtgtgagatcagcgataataaagggaagaggaggcggcatctgggtgagaagacaaaagatgctgaaagactttccctctgaagaggaagagcattaccaccgctggggggcgggggattgaactatttttctccatgttgctgccttctgcaggcatgattgccaccctcaacgggatgttttagatttaggatttcctttcaagtgttactgtctgcctgcccccacgccccaccccccaggtatacacaaacggatgcttttgtttccccagatgcatgctcctgatttttgaaagcatgacttttattatattaaacaatattctcacattatagcagcagtaatgtcacaaggagaaccaactgtggagcatcaccaccttcgataaatctagaaactggatttgatttcttgag

SEQ ID NO: 636810 - DNA, 607 bp, Homo sapiens
tttccctctgaagaggaagagcattaccaccgctggggggcgggggattgaactatttttctccatgttgctgccttctgcaggcatgattgccaccctcaacgggatgttttagatttaggatttcctttcaagtgttactgtctgcctgcccccacgccccaccccccaggtatacacaaacggatgcttttgtttccccagatgcatgctcctgatttttgaaagcatgacttttattatattaaacaatattctcacattatagcagcagtaatgtcacaaggagaaccaactgtggagcatcaccaccttcgataaatctagaaactggatttgatttcttgagagtctagtgatgaggctctttttaatraaaaccttgccactgcttctgtccctgaccccctacgaagggccagagatgttgagtgacttcctccaggccacacagtggagtcatatggcactggccagggtgagaactgacagtaggcactgacccctgactctggcctttttcaatcagttgctttgctttatttctggttttattccagagaaaagagataggagagtccttttggtcaatgattgagcacaactc

SEQ ID NO: 636811 - DNA, 542 bp, Homo sapiens
tgaattcctggaggccacacagcacttggcatagccaggaggaaaagcagattctcttcccaacttgcccagggaactttccaggagaaatatttcatttggtgcccccattagcatcgtcttcagcaaggtcaccgcagcttgtaaacagacacatcaaatgtgcattcattccacaaacctctgcttagcacctgcggaggaagggctgggtggacaaaggtgatcaggatctaacyctcccttaagcagctgacagtcttgggagaagacacagtcttagggtgggaggaacacagtcttgcggcgagagggctgggatgggaaagaattggaatgtgctctagtggagaggagccccaggtgcttggagagtactgaagcgcaacaccagtggagttagggactggggaagaagcagagatgtcagaggagatttcactctgaaaacagcaattgaaattgaaattaatcttaggggaaaagaatgaaattgccatacatgaaaaagtcaaggaaaaaataaaaaataaagtgtgaca

SEQ ID NO: 636812 - DNA, 476 bp, Homo sapiens
catctatagtcccagctacttaggagattgaggcaggaggatcattgagcccaggaagctgaggctgcagcaagctgtgatcatgccactgtgctccagcctgggcagcagagcaagaccctgtctctaaaattaaaaataatgataataataataataataaataaatgatgtcagtcaatgagaattaaataaaactttaaaaagatcacttccttggttgcactagccaagtttcaattactgagttttcatatatgatcagtggctactgtattagcacagatacagaatatttgtatcattgtagaaagtyccatggggaggtgctggcctgggaaatggaagcattgagggattaaaacttgctgaagatcatgtgggtcatgacagaatagagtcattgctgctatatattccaataggatatttttacatttttcttagctttattgtcaaatatctgatgtaagaat

SEQ ID NO: 636813 - DNA, 395 bp, Homo sapiens
gacgtataagtcctcataataaagttttcttggctgtaaattacatctaaagactgtaaagaactagcaaattacaagaaagagtgacttttatatattttgccaacctcaaatgtgctgaaaacagttctccctctcaccctttcatccccgaaactgattcaggcttcagttcacccttttactgaactgtgaatgagcctcttaggacataaacttgtgaggtgaacagagttcagcatatgctctcccaacagatgttccagcaccaccgcaaagagttacaatgtgattcttatctttctgcatactcctactacatagctgtagtagracttctaaatttaaagtcttaagattttttttaacccaccttttaattaaccctcaaaaga

SEQ ID NO: 636814 - DNA, 576 bp, Homo sapiens
ttttccttcaagaaagaattgtttcaaaagttttgctcagggacctagaatttccctgaaagatcataggatattcctggcataggtttgacattacagcacatgctagcccagctaactaatagttattacacatcatcttacacaggaaggtgctagcatgttttatgaatttgaatgaatatttggaaatctgactggtgtggtaatgaaaagattttggcagaagcaattgaggagcccttgacaattacagttgagaaattatcctgagacagctggaacatcaattatgaaataaccttccagcttgacattttagatatctcatattttccagcgttctaaaagagaagacagatggctctagcagttaagcttatttctcagtatattgaaatccaaaatcagggcaaaaatgtggtatgaactagacacaggagaggggctacagatggggttgctggtccagctctgcagtaaaggcagtcttcattgccaaagtctcctgtcttttacaaggtatgagataataggaagscaaagatgttggatgcatttcatgcatgcatttac

SEQ ID NO: 636815 - DNA, 576 bp, Homo sapiens
ttttccttcaagaaagaattgtttcaaaagttttgctcagggacctagaatttccctgaaagatcataggatattcctggcataggtttgacattacagcacatgctagcccagctaactaatagttattacacatcatcttacacaggaaggtgctagcatgttttatgaatttgaatgaatatttggaaatctgactggtgtggtaatgaaaagattttggcagaagcaattgaggagcccttgacaattacagttgagaaattatcctgagacagctggaacatcaattatgaaataaccttccagcttgacattttagatatctcatattttccagcgttctaaaagagaagacagatggctctagcagttaagcttatttctcagtatattgaaatccaaaatcagggcaaaaatgtggtatgaactagacacaggagaggggctacagatggggttgctggtccagctctgcagtaaaggcagtcttcattgccaaagtctcctgtcttttacaaggtatgagataataggaaggcaaagaygttggatgcatttcatgcatgcatttac

SEQ ID NO: 636816 - DNA, 492 bp, Homo sapiens
tcttggcacctctgtcaaaaatgagttcactgtaagtgtgtggacttgtttctaggttctctattctgttccatggtctgtgtgtctgtttttatgccaggaccatgctgttttggttaccatagctatgtagtacaatttgaagtcagataatgtgattcctccagttttgttctttttgctcaggatagctttggctgttatgggtcgtttgtgtttccatacaaattttatggaaatgttatggatagcttgtatgtggttccatacaaattttatggawtttttttctgtttctgtgaagaatgtcactggtattttaacagggattgcattgaatctgtagatttctttggctagtatgaacattttaaccatattaattcttccgatcaataacatggaatatttttgtatgtcctcttctgtagaatttttgtgactttcctttttctgtgtcctcttcgatttcttttatcagtgttttatagt

SEQ ID NO: 636817 - DNA, 573 bp, Homo sapiens
cttctttgggttaaatctgtttggtgttctataaccttcttgtacttgcatgttgatatttttctttaggtttgggaagttctctgttattatccctttgaataaactttttaccrttatctttttctctacctcctctgtaaggccaataattctgtgatttgaccttttgaggatattttctagctcttgtaggcatgtgtcattcttttttattctcttcttttgtctcctctgactgtgtattttcaaatagcctatcttcaagctcactaattctttcttttagatcaattctgctattaacagactcatgcattctttatgatgtcaattgcatttttcaactctggaatttctgcttgattctttttaattatttcaatctgtttgttaaatttatctgatagaactctgaatttcttctctgtgttatcttaaatttctttgagtttcctcagaacagctattttgaattctctgtctgaagggtcacatatctctatttctccaggattggtccctggtgccctatttagttcatttggtaaggtcatgtttttctggatggtc

SEQ ID NO: 636818 - DNA, 584 bp, Homo sapiens
tgatgggggtgcctagttccagagggagcagagcagacctagttcctaaagaattgtgtttgtctggggattccttgaaggactgacacagggtgtttgctttggttttatctaacttagaactctttcagtgcagaaaagttgctaagcagaggggttccttgaaaacaccaataggcaaatgaatgagctgttgctgccttgggtaaaagactacagttgggtcaaacaataaacatgctacaacctaggagaaaaagccagggaargagttactttgcggaatagggatttggtaatctcctgcatataacaggaaatctagaaagtcatgtgcatgcccagggcagggtgcatacccagaaaagacctgaaaagccccttagctctcacctctggctgactattaggctcagtgtgagcaggaagtgaaggctaaggcagagctgtaaatggcctggctaagtgtggaaggagtatccctaacacagacccaatctgcaaagaccaggagactattatttttttttcttttaagaaaatctctgtgaaaccactagctgaccaaaagctaaagaaacaac

SEQ ID NO: 636819 - DNA, 584 bp, Homo sapiens
tgatgggggtgcctagttccagagggagcagagcagacctagttcctaaagaattgtgtttgtctggggattccttgaaggactgacacagggtgtttgctttggttttatctaacttagaactctttcagtgcagaaaagttgctaagcagaggggttccttgaaaacaccaataggcaaatgaatgagctgttgctgccttgggtaaaagactacagttgggtcaaacaataaacatgctacaacctaggagaaaaagccagggaaggagttactttgsggaatagggatttggtaatctcctgcatataacaggaaatctagaaagtcatgtgcatgcccagggcagggtgcatacccagaaaagacctgaaaagccccttagctctcacctctggctgactattaggctcagtgtgagcaggaagtgaaggctaaggcagagctgtaaatggcctggctaagtgtggaaggagtatccctaacacagacccaatctgcaaagaccaggagactattatttttttttcttttaagaaaatctctgtgaaaccactagctgaccaaaagctaaagaaacaac

SEQ ID NO: 636820 - DNA, 584 bp, Homo sapiens
tgatgggggtgcctagttccagagggagcagagcagacctagttcctaaagaattgtgtttgtctggggattccttgaaggactgacacagggtgtttgctttggttttatctaacttagaactctttcagtgcagaaaagttgctaagcagaggggttccttgaaaacaccaataggcaaatgaatgagctgttgctgccttgggtaaaagactacagttgggtcaaacaataaacatgctacaacctaggagaaaaagccagggaaggagttactttgcggaatagggatttggtaatctcctgcatataacaggaaatctagaaagtcatgtgcatgcccagggcagggtgcatacccagaaaagacctgaaaagccccttagctctcacctctggctgactwttaggctcagtgtgagcaggaagtgaaggctaaggcagagctgtaaatggcctggctaagtgtggaaggagtatccctaacacagacccaatctgcaaagaccaggagactattatttttttttcttttaagaaaatctctgtgaaaccactagctgaccaaaagctaaagaaacaac

SEQ ID NO: 636821 - DNA, 594 bp, Homo sapiens
taatgaaatcaccatcatgacatggctgagagatctttaaacctgaacaaacaattacaaatacaaacccacacacaccatgtctgagcatccatggatggtgtggacaatgagcaggcatccrtggactagaggacattcaccaagagggacagatggtgaccactgttcttcaagaacactacagtcagtcataggccctgtcacccaagccacttctgtttcctgctcagagaaaagcagctacagtgtagcacctgggctagttatttgaaaagcaaaggagtcactccccctttgctccacttgcccgccttccccatgcttatttcccttaagagttttaatgaaaggttattcaacatcagcatacgcagagagtcacaaaatgactcattttaaaatacatcactttattgagtcagtatcatgtacatgagggaaggttcacctttttacatctacagttctatgaattctgacaaatgcatgtagtcatgcaaccaccaccacaatcacgacatagaccatctccatcactgtaaaatgttccttcctgctcctttgtagtcaattgtcttccccacctgagcc

SEQ ID NO: 636822 - DNA, 604 bp, Homo sapiens
catttttagaattccagctctgcacaatgttgggtacataatactcaaacattttttgaaaaaataagtgaatgaatgaatgaatgactattgccatttcactcttgacttaggagatagaccccaaatatttgttgacaggcagtagcattggttgctgacagagaatgttcttttctctatttgcttttttctctatttgcttcacwaatagttcagagacactccaaaaatccttttggggatgtaaatgctacatttttattctttgatattaatggcatagatactctcttcagcaaacacctctgaaggaattctttagattaattgacactccccatcacctgtccagaatgtgctagctccattacatgcattgtctcatttaatcctcattcaccccatctttttaaaaaattgatgtgtagtagatgtacctcgttttaggatacatgtgataatttaatacattcaacttctgggcacccctttaataggcctgcaaacctctgcttttctcacttgacttgtatgcttgctgacagtcaggttctgtttgttccaaaacctgttagtgccagctgtagttaatatgaaaatt

SEQ ID NO: 636823 - DNA, 608 bp, Homo sapiens
gcacttcaggattatttaatcatctatgaaagtgtgtcattgttggattccttatctgctattgatcagaggcccagattgtgaagttatgtttttaaataattttttgtccattagaaatgcaaatgatttctgtccaatagaacagataaccccaaatattacattgcctacaagacagcaaccagtttagtatctaactgagtaaacttattttaaattttaaatcaaatgcctattaacagtcagtcctttataatgttccttatcatttttaccaacattatcatcctgctgattctctttttaataaatgaaataaatgtttgacatgcgctcattctctatatctaggaragtaatgattttttatttaactttgtgaaaattatatttgacagttctgttaccactttgctttgagataaattcactagcctaattatgttaccaatgtcatagatttagtatattcattcattcatccatgtgacaaatatttattgagagcttactgtgtcattgccataagcaatgaaccaaacggaagtccctgcactcatgtaatttgcagtccaaagaaagaaagaaaatatacaaaattttaa

SEQ ID NO: 636824 - DNA, 683 bp, Homo sapiens
tgggcatccttgttttgctccagttcttagaggaaagtctttcagcttttccccattcagtatgatgttagctgttggtttgtcataaatggactttattatcttgaggtttgttcctactatgccaaatttgttcaaagttcttataaggaagggatgttaaatgttatcaagcgttttttctacaactattgagatgatcacctgtgttttgttctttattctgtcgatatggtgattaacatttattgttttgcatattgaaccatccttgtatccctgggaaaatcccacttgatcatggtgtattatctttttgatatgctgttggattcagtttgctagcatyttgttgagaatttttgcattgatgttcatcagatactggcctgtagatgtttttgttgttgttgcatgcttgtctagttttggtatcagggtaaggctggcctcatagcatgagttaggaataatttcctcctaatcaatattttggaaaagtttgaggagaattgtggtgttagctcttctttgtaagtttggtagaatatgtcagtgaagccatacagtcctgaacttttctttgttgagagatttatcactgattcaatctcattgctcattactgatccgttcatgttttctatttcttccagattcaatcttggtaggttgtatgtgag

SEQ ID NO: 636825 - DNA, 683 bp, Homo sapiens
tgggcatccttgttttgctccagttcttagaggaaagtctttcagcttttccccattcagtatgatgttagctgttggtttgtcataaatggactttattatcttgaggtttgttcctactatgccaaatttgttcaaagttcttataaggaagggatgttaaatgttatcaagcgttttttctacaactattgagatgatcacctgtgttttgttctttattctgtcgatatggtgattaacatttattgttttgcatattgaaccatccttgtatccctgggaaaatcccacttgatcatggtgtattatctttttgatatgctgttggattcagtttgctagcattttgttgagaatttttgcattgaygttcatcagatactggcctgtagatgtttttgttgttgttgcatgcttgtctagttttggtatcagggtaaggctggcctcatagcatgagttaggaataatttcctcctaatcaatattttggaaaagtttgaggagaattgtggtgttagctcttctttgtaagtttggtagaatatgtcagtgaagccatacagtcctgaacttttctttgttgagagatttatcactgattcaatctcattgctcattactgatccgttcatgttttctatttcttccagattcaatcttggtaggttgtatgtgag

SEQ ID NO: 636826 - DNA, 543 bp, Homo sapiens
aatctcattgctcattactgatccgttcatgttttctatttcttccagattcaatcttggtaggttgtatgtgagcgggactgtatctacttcttcttaattttccagattgttagcatgtagttgttcataatagtctctgatgatcttttgtatttttgtgatatcagttgtaatatgttcttttttatttctgattttatttatttaggtcttccttcttttttcttggttgatctagttagtgatttatcaatttcatttatcttttaagaaaaacaacttttcattttgttgctcctttgtactttgtagcctgaatttcatttagttctgttctratgcttacaatttctttccttctataatttggagttttgtttgttcttcatattttagttcctttagttgtattgttagattctctatttgaaatctttccactttttcgaggtaggcatttattgctgtaaacttccctcttagcactgcttttcctgtatcccacaggttttagtatatgtgttttgattttcatttgtt

SEQ ID NO: 636827 - DNA, 598 bp, Homo sapiens
tcagttctgtttggttcttttttaggatatctatcatttttgctaaatttatcattcatatcctcactccatgtctgatttctttgtattgtttatttgtgctctcttatatctcactgagcttctttactattggtgtttttatttctggcatttataaatttctttttcactggagtcagttgctggagaattattatatttctttgaaggtatcatattttcttgtttttcatgtttsttgtgttcttacgttgacataagcagatctggtataccagttgcttcttccatttttttgaatttgtttcacatgggacatcatttttctgaagatacagctatagtgttgtttggatggggcacttctattctgtttttgggtgcacacagtagtgtagtctctgtataatttatttggttgtaagcaacatcagtaatgtctgtgatttctttggtggcttaggatgtagttgttagtggaagctgtgatgaagtttggctggggatgaggatgccatgtgggccagtcttctcagtattggcagcagtaggccaagcttgcctttccttgggccccacagtggcacatgctggc

SEQ ID NO: 636828 - DNA, 602 bp, Homo sapiens
tcagttctgtttggttcttttttaggatatctatcatttttgctaaatttatcattcatatcctcactccatgtctgatttctttgtattgtttatttgtgctctcttatatctcactgagcttctttactattggtgtttttatttctggcatttataaatttctttttcactggagtcagttgctggagaattattatatttctttgaaggtatcatattttcttgtttttcatgtttcttgtgttcttacgttgacataagcagatctggtataccagttgcttcttccayttttttgaatttgtttcacatgggacatcatttttctgaagatacagctatagtgttgtttggatggggcacttctattctgtttttgggtgcacacagtagtgtagtctctgtataatttatttggttgtaagcaacatcagtaatgtctgtgatttctttggtggcttaggatgtagttgttagtggaagctgtgatgaagtttggctggggatgaggatgccatgtgggccagtcttctcagtattggcagcagtaggccaagcttgcctttccttgggccccacagtggcacatgctggcacca

SEQ ID NO: 636829 - DNA, 620 bp, Homo sapiens
agtgctattttacttgctattttggttcttgtttgtggaggaggcgaataccagatccctctattcgcctatcttgaagccccctatattgttatatattttattgttttttaaaaatatgtttgaactgcagtaggttgaatccattaatgtggatcctgtggatatggagggccaaatgtgtatatagagagaaacagatttattatgagaaattgactcaaacaaccatgaaggctgagaagtaccaagatctgcagttggtaagctggagatggaggaaaactgatgtgggttctagtccaagtctgaaggsctgggaatcaggagagctgatggtgaaggttccagtctgaaagccagcaggctagataccccaagagagccaatgtttccatttgagtttgaaggcagaaaaagaccagtgtcccagctcaaggctgtcaggcaagaggcatttcctctcactcactctttttgatctattcaggacttcaatttattgaatgaggtccactcactttaggaagcacaatctactttactcaatctaccagatccaaaggtttatctcctccagaaacatcctcccagacacacccagaataatgtttaaccaa

SEQ ID NO: 636830 - DNA, 550 bp, Homo sapiens
ccagcattccttcacttgtagcttcatccctccaatctgcctccatctgcatacggccttctcccctgtgtgactctgtctcttcatatgatgttttcctctctgcatatctttgtgtccaaagttccccatttctcttttccttgtaaggaaagagtcattggatttagggcccaccctaatccattgtgacctcatcttaacttgatcacattttcaaagactttatttctgtaagatcacattcactagtacagggggttagggcttcaayatattcagacaaaagggggaagcataatttaacccacaatacatgtgaaccttaaaataagggagcattctagtcatcaacaaggcatcggatcctgtagctgagcagcagcaaaaaagacctgggagtcttgcagcaggtaaaagttcagaaatggcccattcagagtggctcagaaactgggttaaagctgagtccgtaggaggcaagatcagtgggctggaatgtggggaagtgggaacagggcaactagggctgggctgacccaactaccct

SEQ ID NO: 636831 - DNA, 578 bp, Homo sapiens
cccgtgcacttcagctgtatcttccaagagtgccaacacggctgccccatgaagccaaccttcccctgtgaatgaataggcaacctgagatgcaatgagtttccaaagccagacctgaatacagcccggattgctagcagaaacctgccyagactaattcacagtcaccatttgactgcattctcctgcctctcagctaacaaaggcattatctcccagcacttctaagagctaaattgctcttttaacagcaattataagagtgctaacaaaaagctaaagatttggagaatcaatgtgcttcttttacttctaaatcattgtatcagatttcctccttgaattataattttatgctgttaatgaagaaaatgcctcctttcagagcactgaataagaaaggtacatttttgtacattctaagcctccttttaagaaaaatcacttttatctctccattttatgggcataaagagggaaatcatattttgaataattacaggaaacagtctgctacaaatggtatatgtgataaaatacctgttagctacaattaagttaaaattttagggaaaatc

SEQ ID NO: 636832 - DNA, 578 bp, Homo sapiens
cccgtgcacttcagctgtatcttccaagagtgccaacacggctgccccatgaagccaaccttcccctgtgaatgaataggcaacctgagatgcaatgagtttccaaagccagacctgaatacagcccggattgctagcagaaacctgcctagactaattcacagtcaccatttgactgcattctcctgcctctcagctaacaaaggcattatctcccagcacttctaagagctaaattgctcttttaacagcaattataagagtgctaacaaaaagctaaagatttggagaatcaatgtgcttcttttacttctaaatcattgtatcagatttcctccttgaattataattttatgctgttaatgaagaaaatgcctcytttcagagcactgaataagaaaggtacatttttgtacattctaagcctccttttaagaaaaatcacttttatctctccattttatgggcataaagagggaaatcatattttgaataattacaggaaacagtctgctacaaatggtatatgtgataaaatacctgttagctacaattaagttaaaattttagggaaaatc

SEQ ID NO: 636833 - DNA, 638 bp, Homo sapiens
tcaatattattattcctcttcgatctctgtctcccagtagtacaatgcttcttgaggtctggctgttacaaatgctagtggagtattaaaatgttgaatattttaggttgtgagctcattacagctgtcctctcagaaggttgattgctctaaagtaacaacaacaaaaatggtaatggctaattttctagaaatctgagaaggtacagccaggacaggtgatgttcctgtcatcagctgctccaggcagtcccatttctccaagcaatggcataagtgattttaaagagggaatacggcagttctataatacaggatgcattattycactaatgctgaggctcagggccacaaaagagaaatccttttttttttttttaacaattctagctgctgaaagcactggaaagaatcaattcaagtctataggaaattcttatgtgaccctgaggcggtgtgataaagggctccctttgtcataaatgtccccattttaattgcaaaattgcttcattaaaaacatgttgtatttcatttgctttcttccagtcaatatatgtgacaaaaatcatatcatcgtatcacttatgatattcctgagttaatgttttcaaagttgttgtgaaagaaaatgacag

SEQ ID NO: 636834 - DNA, 573 bp, Homo sapiens
tgatttctttttctttggagatatacccagcagtgggatattggatcatatggtagttctattttttttttttttttgagaaattgccatactgtttyccatagtggctgtactaatttacattcctattagcactatacaagagttcccttttctctgcatccttgctaccatctgttattttttgtctttttaataatagcgttctaactggggtgagatgacattagtggttttgatctgtatttccataatgttagtgattttgagcatttttcatatacctattagccatttgtatttcttcttttcagaagtgtacatttgtgttgtttgcccactttttaatggaatacttttgcttttgagttgtttgagttccttatatattctggatataagtcccttgttgaatgactagtttgtacatattttctttcattccataggttgtccctccactttgttaattgtttcctttgaagaagctttttagtttagtatagtctcatttgtctatttttggttttgctgcctgtgtttttgtggtcttagccaaaaatgttttgccta

SEQ ID NO: 636835 - DNA, 515 bp, Homo sapiens
ttttaaattgtttccttttctttcttgatccaattctggagcatgttgtttcatttccaaatattgtaatctatttgtacagttttcaatgttctacttgttattaattactagtttttttcctttgtggtctgaaaagatagttgatattatttcaattttaaaaaatgttttgtgagttggttttatgtcctagcatatggcctatcatagagagtgtttcatgtgctgataagaagatgcatattctatagctgttggattaagtsttctataaatatttgttaggtccatttgatctaaaatgcagtttaaatccaatttttttggttaattttatgtgtagattatatgtctaatattgagtacatgttgaagtccccagccattattgtatcggagtctatttctgtctttagatctattaatgattgcttatatatctgggtgctccagtgttgggtgcaagtatgtttagaattattatatgctgaattcctttatgattttataat

SEQ ID NO: 636836 - DNA, 613 bp, Homo sapiens
tcaatggggctacagggtcgcaagagattcagggcctgttatgccgcagtgcaggatactatctggtagaggcagggctgtcaaaatggtaccttgctgtagctgcttagaacttagcgggatatgtgggacctggcctgagctctctttttagggcaatgccatcatgtggtctccagtcagcctccaatgttagtctcagagcccatgaagttcgaggggctctctttgcctagaattgcaagagtccatgataggcatgtggatgatcrggtgtctctccattaccctttccttgcactggggaacctctctgggttcccagcttatccaagctgagaaggctgtcttatttccctctcctttcttgctttaggtatttcctgtcacttctctgttgaattccagtgttctctctgaactgatatattcaaaatgtgatgatctatgcttttgcttcttctttgtggagggggcaagtatcagatacctctagtcagccatcttgaagctgctcccccattagtcagcaatatagctttaaattggtcacctgtataaacaggcaatgctcagtgatatttgttccattttcatctctctcccaaatgtg

SEQ ID NO: 636837 - DNA, 601 bp, Homo sapiens
gttatagtgtgttaaaatagtagtatgaaagacaatagtattcttccattaaaaatattcattggggtttcactatttgtcagccattgtacagggtgatattaaaaccaagcttgatctctgctttccttgtgttaacagcttcatgagtgaagcagcattaatttaaaatgccgtgtgacacctgttaccatgaaaagttcatgccactattcatgcccatactgtgggtactggacacagacaggtgttcccagaaagatttttctgcaaaagtgaccctggagctgagttctgaaaaaggagaaggaattgactaagctaagtggaaagcaaaaagctttcagggcatcaggaacagcatggagcagagccctgaaagtaggccagcagactaaggcagagataatagaaggaatcatagtgtcatckgaggctgataattcatagtagagtattagtgtttgggagtgaaaagtctctatgtgaagtgatgtaatttgctgcaaattctgtggattacaatagcaacactaagtgcttaaaggagtgatatattagatgcactggtttttaaaaggactctgtctctgccagatgt

SEQ ID NO: 636838 - DNA, 591 bp, Homo sapiens
cacttgtactccttacatttatacagacaaaaaagaggaaaaaacaaaataaaccatatgttaaaaagtataccttcatatatttttcaatgatgcaaagggaggtagagaatgaacctttggtgaacatttgctatgtattgggctctcgcaagtaacttcaaataacttatttaatcctcacaatgaggtatgtaggagggatacatattcctatgttacagaaatggcaaacaaggctcaggtaggattaatagatactccacaccgtattgacgttcaaaatgtaacagtttgactttgctgtgtactgaargcttgcaggtttttcagtcctgcccattcatttgtaaagtgaaaaattgcgaagttatagtgtgttatgtacttaactcagatgttccatacttaagtttaatttgttgatttataatcctagaatgagactgaatttcccattcatacctggcagtaaagatcataaatattagttgtggtagttcctaaaaatagatatttggggaagacctactgaatcagaccctccaggtgattcttaggattgtcatcagcagactagtttgcctgtgc

SEQ ID NO: 636839 - DNA, 541 bp, Homo sapiens
tttgggtttcctttagttcattgatctaacaccacctctaccccaagagaatcacctgcttctcattagcaggtgttccaagtgggaactctttcctctcttttaagatcaagaacaacagggtggggcttccaaaatggctattctcataaaaaggaatgagttaatggcatttgcagcgacctggatgacattggagactattattctaagtgaagtaatcagggatggaaaaccagacatcatatgttctcactcgtaagtgggagctaagctgtgaggatgcaaaggcataagaatgacacatggactttggggactyggaaagggtcgaaagggggtgagggacagaagactacaaaaagggtgtagtgtacactgcttgagtgatgggtgcaccaaaatctcactaatcaccactaaagaacttacataatcaaaaacctctgttccccataacctatggaagttaaaaaattaaagtgatagtaaggaataaaaatgctttttcatgaaaacaaaatggcatttctaaaatcta

SEQ ID NO: 636840 - DNA, 618 bp, Homo sapiens
tttaatttctcattgtagtatgtattagtctgttctcatgctgctaatgaagacatacctgagactgggtaacttataaaggaaaaatgtttaattgactcacagttccacatggctggggaggcctcacaatcatggcagaaggagaaggaasaacaaagccatgcctcacgtagctgcaggtccaagagagcttgtaaaagggaagccccatttatataaccatcagatctcgtgagacttattcactgccacaagaacagtatgaaggaagctgcctcgtgattcaattatctccacctggccccacccatcacacctggagactattacaattaaaggtgagatttgagtaaggaaacagccaaaccatatcataatgattgcatactgggattagaggttaaggaaaaacaaaacctgatttttattcaacatttttattcagaggaggattgagaacagtaggaaaaatattcaggccatcatctgaaaggggatgtttgtaccaataattgcaaccaccccagtttgtgaccagggctcaccccttttagaaagccatgctccctaacccctcttccccacttcccaccgcaatccctcaccatcctgtgg

SEQ ID NO: 636841 - DNA, 404 bp, Homo sapiens
gaattctcctgccttctcctgcaactaggtgtagccatatgacaaagcttttgctaataagatgtgagcaaaaggaacctgtgcaacttccaggttgtgttaacccttcccatcccgctttctgcaggttggaatgtggaggttgtagccaatagctctaacttgggatgcaggggtggcctcttttcctgacaaaaccactgttcattatctaatatattctgctggtgtttgaaacagcaactccatcaattacttcccctctgtacttttgacaggttgggcgtttggggttttttgttttgttttgttttgttttttktgtgtgagaactcttacaatctactctcttagcaatttccaagcatacaatacattgttattaactatagccacaatagtgg

SEQ ID NO: 636842 - DNA, 575 bp, Homo sapiens
ggtttggctgtgtccccacccaaatcacatcttgaattatagttcccataatacccacatgtcataggagggacctggtgggaggtaatttaatcatgggggcagttacccttatgctgttctcatgatagtgagttctcatgagatctgaccgtcttataaggggcttttccccctttgctcagcacttctccttgctgctgccctatgaagaaggacatgtttgcttccccttcccccgtaattgtaagttttctgaggcctccccagccctacagaacggtgagtaaattaaacctctttcctttataaattactcagtcttgggtatgtctttattagcagcatgagaatggactaatccactaatcaaagaatgaatgaggtaaaataaatattagaattatatttaagacaacatagtcacttccrtaatttaaacaacatgggaagtagcatcattcttccagtaatgatctgaaaattctatggtaaagttaaatttcaggtgccttacatagacctaggaaaattcttctaaaaaattataataaaatacacagaccaccaccacc

SEQ ID NO: 636843 - DNA, 576 bp, Homo sapiens
gcttctaaatcttgcctattgtgaacagtgctgcaataaccttggaagtgctgatatctcttcaatatactgatttccttttttcttggtatatacctagcagtgagattgctggatcatattaccatgtaatctatttttagttttttgggaaacctccaaacttctccacagcgattgtcctatttggttggyacaaaagtaatcgtggttttttccattaaaagtaatgtgtcagcctctgcgatgtgttggtgagcattcagaggcataagtgagagaagaggagtaagcgttgcattttctgttagttctagtacccaacatttaaggaattctggggagtggttgtccagccccatccactgcttagtatatattggcaagaaggaaggaggaggtttttgccattaaaagtcatggcaaaaattgcagtaacatttgcatcaacctaataatttagtcagcagtgtgtgccggttcccttttctccacatccttaccagcatttgttattgcctgtcttttgggtaaaagccattttaactggggtgagatgacagctcattgcagtaa

SEQ ID NO: 636844 - DNA, 576 bp, Homo sapiens
gcttctaaatcttgcctattgtgaacagtgctgcaataaccttggaagtgctgatatctcttcaatatactgatttccttttttcttggtatatacctagcagtgagattgctggatcatattaccatgtaatctatttttagttttttgggaaacctccaaacttctccacagcgattgtcctatttggttggtacaaaagtaatcgtggtttttkccattaaaagtaatgtgtcagcctctgcgatgtgttggtgagcattcagaggcataagtgagagaagaggagtaagcgttgcattttctgttagttctagtacccaacatttaaggaattctggggagtggttgtccagccccatccactgcttagtatatattggcaagaaggaaggaggaggtttttgccattaaaagtcatggcaaaaattgcagtaacatttgcatcaacctaataatttagtcagcagtgtgtgccggttcccttttctccacatccttaccagcatttgttattgcctgtcttttgggtaaaagccattttaactggggtgagatgacagctcattgcagtaa

SEQ ID NO: 636845 - DNA, 576 bp, Homo sapiens
gcttctaaatcttgcctattgtgaacagtgctgcaataaccttggaagtgctgatatctcttcaatatactgatttccttttttcttggtatatacctagcagtgagattgctggatcatattaccatgtaatctatttttagttttttgggaaacctccaaacttctccacagcgattgtcctatttggttggtacaaaagtaatcgtggttttttccattaaaagtaatgtgtcagcctctgcgatgtgttggtgagcattcagaggcataagtgagagaagaggagtaagcgttgcattttctrttagttctagtacccaacatttaaggaattctggggagtggttgtccagccccatccactgcttagtatatattggcaagaaggaaggaggaggtttttgccattaaaagtcatggcaaaaattgcagtaacatttgcatcaacctaataatttagtcagcagtgtgtgccggttcccttttctccacatccttaccagcatttgttattgcctgtcttttgggtaaaagccattttaactggggtgagatgacagctcattgcagtaa

SEQ ID NO: 636846 - DNA, 576 bp, Homo sapiens
gcttctaaatcttgcctattgtgaacagtgctgcaataaccttggaagtgctgatatctcttcaatatactgatttccttttttcttggtatatacctagcagtgagattgctggatcatattaccatgtaatctatttttagttttttgggaaacctccaaacttctccacagcgattgtcctatttggttggtacaaaagtaatcgtggttttttccattaaaagtaatgtgtcagcctctgcgatgtgttggtgagcattcagaggcataagtgagagaagaggagtaagcgttgcattttctgttagttctagtacccaacatttaaggaattctggggagtggttgtccagccccatccactgcttagtatatattggcaagaaggaaggaggaggtttttgccattaaaagtcatggcaaaaattgcagtaacatttgcatcaacctaataatttagtcagcagtgtgtgccggttcccttttctccacatccttaccagyatttgttattgcctgtcttttgggtaaaagccattttaactggggtgagatgacagctcattgcagtaa

SEQ ID NO: 636847 - DNA, 579 bp, Homo sapiens
tgccgtggtccagaggtgctatgctgaacgggtggtctccttgttgtactactggattccttcgggttccttatgactgtattacttgtttcattcttcttatctgggggatgttttaatcagtaactagagaagaaagatactactaagacaaggaggagattgcaaggttgagagataagaagaataagattggagaggacaaggatgctacttttcacccagtcactgggtccttgggtgtttatttgctggagtattgatgtgaaagccatgtgcaggtgaaccatggaaaaacatacctttgtataatttaggaaagataattgaagcaactatatttacctgcatttcttggaagtaccagaattaatttatgaagctattactacagactgaagcttaactttcttgatagtttgatttagagkcaatggtttagtgcttctgcatggcaaattaaataaagtcagcctagctctgatccattatttctcaagctacattattttcttaccagagaaaatcatttattaaactaatgggaaataattgtccaagtatattagaagagacata

SEQ ID NO: 636848 - DNA, 569 bp, Homo sapiens
caaatcaaactaattagtatatccakcacctcacacatttatcatttctttgtgttgggaactttcaaaattgaggtgaaatattatactttaaacaagcaatacagagtgtggaccagatggagctggaatttaaatattgggttagttttgtttctatcaccccacactgtctatgttgtttatttctgttttctggagtgtaggattgccagatttagaaaataaaaatgcatgcaacatttgggacctacccatgctaagaaattatttgttgtttttctgaaattcagattttactgggtgtcctatattttaacaggcagacttatctgggagtagagagaaaaaaattctaatatttaatgagcactgagctagttgcttttactaatatttccctgagttctaaccatacctctgcaatttttaagattatttttatattttaatataaatatcgatgtgtttttgtgtttttataaaagtggacaaagaaattaagcttggagaggtcacactctctgtaccaagaatagagcagagaaattaaactctggagccaggaa

SEQ ID NO: 636849 - DNA, 570 bp, Homo sapiens
aatctcaaattaaaagtgaagctgagtcattcctgggtctggagatgcctactatcagattgaagaaatcaagagtactgcagaccactgggacctgcctaggtggaactcagcatgactctggtgcagctggaaagaaacatttgggaacattcagattcatagtttttgggtgtaacttggaggatatttgaaagtacttcaacggaattgaacactcaggaggtaggggacagatgtttacaggccaatgttagatggaggggaagtaaaaaccagggttagactctctggccagaacttgaaatattttcctggttattggcttgtccagtactttctgttcaaatgttcaagggtcaaacttgatgtgtcctcatgtcttttcctgactttggacttatgtggatgcaggagccttgtccttatttcttctcttctgtcccagtggttgaaatcaggctttgtaattttaaaaattggttatatyaaagagatgggccagcaacttttggtcaagtaagtactccatttgactttcaaacaacttctttgaaacagattatctca

SEQ ID NO: 636850 - DNA, 467 bp, Homo sapiens
ggactcaaatggacagagcagtatgcagaggcttgcactgtgaaactttagctccagattgactacaagaacaaaccagcaatcctgagaggatccacaaaccctctgaaggacgcagacagctcctgcaggacctgggagataccccaaatactgtgagtgccccaactgcagaagggggaaagggagagcctcctctcctgaacacatacccccactggagaaactgaagttctgtttgtggkagaagtttctgaccttacctggaactaagccaatttagagagctgagcaaaatacaggggtagaggaagcagcagaaaggccctgggagcttgctgggagcccaagcaggccattcctgcctggcaccagagggatccattgggagggtggccagaggtggcggggtgggttgggggaactccacagggagaaggaaatctccagctgaactctgtaacaat

SEQ ID NO: 636851 - DNA, 463 bp, Homo sapiens
cctcctctctctcttttctcctcttccccatccccatcctcacttctcttctgctygctccccttctcctttattcttcccttccttcttctttgcttttctcctccattgactcctctcctcactcctccattctcccttccttctcccctcatctctcctctccttccctccttcttcctctcctcctctcttttcccttttcctcacctccatcatctcctctctactaggacttcactgaaactctctactctagggttcataagctggggtctatgaatcctgcagagtctgtgagtgagtttccaactgtgcattaacccttgaaattgaagtcagcattctggattcatggccatgaatgtgttttgccagggagaagttttatagcttttaccagatcctcagatttctagacttggatctcccacttctcttctcaattcctagtcttcggttt

SEQ ID NO: 636852 - DNA, 604 bp, Homo sapiens
tacataaatacagtcaactgattttkgacaacagagcaaaggcaatttaatggcacaaacataatattttcaacaaatggtgtagggacaactggacatccaaatatcaaaaaatttatctagacttagacctcattcccttcacaagaattaactcgaaatgtaaaatgcaaaactacaaaacaccaagtaaataacataggaaaaaatctaggtgatcttggatacggtgataatttttagatgaaatgccaaaagcacaattcttgaaagaaataattgataagctagatattaaaattaaaaacttatgctctctggaaaatgatatgatgagaatgagaagacaagccatagactgagagaaaaatatttgcaaaagactatctagtgaaggactgttagccaaaatatccaaaaaactcttaaagttcaacaataagaaaacaacctgatttaaaattgggcaaaaggtctgaacagatgtcacatcaaaggagatattcagatggcaactaaacatataaaatgatgttcagcatcatatgccagtagagaactgcaaattaaaacaatactaatactaacctattagaatggcaaa

SEQ ID NO: 636853 - DNA, 550 bp, Homo sapiens
cttacctgacatgcacgtttctatggacctggctggtctatgggctctgcttcaacttayagatccaggaactccagagacttctttccctcctaggccagcactgtcacctgtcaaaaatgttggcagggagaggaggcagctggtgagaaaatcctcatgacccatctttccttcaccagcatgcattcctctccacctccggggctatggactctaggtaccaggctgcagctgtccacctgcagtgcccagggcgctgtgagtccccagggtgctgtgagtgccattacaggggagcacagctctcaaccccttctgcttcagggtggctagggagggggctgcagtgtgagacaaacagcaccagattctctgtgtgctgtgagctgttaagggttgggctgtatagtaggcttatggcaatggataaaacctggtcctaccctaaaggggatgcaggagcaagggtccccttataatcaggtgggcggcagtctgtgttatgatgatgatggagttgcacaaagtttcctggcaacagagaggg

SEQ ID NO: 636854 - DNA, 608 bp, Homo sapiens
aggggtcagcctggcttcatttacttcccacaccctgtgttcccatggcagcacctggcctctaacagcaggccaggccgggagaayccattgagggtctctcatgtgccatccgattgctatctctttgttcctctgcccagacggtgtctgacttccaggcaacaatgcacacagaagttacaagtgtggatactagagtcagagcctggattccaatgctgcttcttaacagctgtgtgactttccacaagtaatgcaacatctctgggtctctgtttcctgttctgcaaaatgggggtactgtctacttgccccagggacctgctgtgctgaggatcattcccaggaagcacctagcaccatgctgggtcctggcaagccactgacaaatgttcactgtcacaatggccctgcttcctctggtgctcggcaccaggctgacatcgagtacacagtcaatgaagaaacaaggagactctgcaaggagatacattaggatgatgtactgacaaagccttgggaaaactgctggtgcctttgctggggggaagatttccagatggagctcctcaggatggcctgccaatccaataaactcaggttcc

SEQ ID NO: 636855 - DNA, 621 bp, Homo sapiens
tctgaccttcactttccccatctataaagtagggatagaaaggtctccctcaaagggtgactgtctagattgaataagatgacacatgtaaaaatggctttgcaaacygtttaattggaataaatatacgcatttttttctgctgagctaaaacctgacttacggtaactcacctgggaactttggtacacagagatgttcctgccacaaggacctctgagccttccctcctcctgttggaggagctccgttccttagtcattcctgggggtctctggtttgccttgggcaccacctggattcccctcctgccaggggtgcatctgagggagtgctgctgggatttccttctgtggggatctagccccagtgcctttgctccagaccctctctcctttgcaggccccccatatagtcttctgtggaacatcccatcccattgttcatgtccttttccctgtcgttctcatggtgtgaatttaaggtcccatggggagaggtcagagtcatggtgtcctctttgcctctgtggtcctgaactagtcatttcccctcccaaagcacttgctcccctgggtctatatcaaagaggtggatgatatcatcatcaggtctactaat

SEQ ID NO: 636856 - DNA, 635 bp, Homo sapiens
atgctctgcgcctcactttcctctcagggctggtgtgagatttaatgagaccatgcaactgagggtgctatataaaccagaaaacatgctgtaaacttgtgggacgaactattaccataaaggcactgatggcagaaaagtactctgaaacatgacatcaagttgccaccaaatgtaggcattatgttataactgggcataactttcagccaagggtttcctggaacagaatcaagttttcataccactccagccaaaacaggtggaaagtgcacttggcagctgtcttctagctccagaagatttatgatgagagactggatagtgccagggctaggaaccaggctccagggccagatcgtgtgagtttgagtcctagcaacactttctaytggcttgggcaaagtatgaccttgggaaatttcttaacttctccatgccccagtctcctgatgtataacatgggcaaaacaatggtagctagagcatagagctcttctgagaattaaatgagttggtatgtacagtgatcaggacagtgtctgacaaggaggaagcgtccgtcaagtacagcagttatcaatgttagtacaatataggctccattttctgagggaaaaataaacagaaggaat

SEQ ID NO: 636857 - DNA, 604 bp, Homo sapiens
gagaatcttcagtctgctgggaaacgttgggaaagggaactcagaccctgggaggtaaacactggaataagacaatagatgaggactgtctcatgtatcttatgcttacatagtgcttactatgggccaggaccaaacctatattaacacatttaatcctgggcgttattgagctggacactaaatagttatagcactatttttaggcccattttacagctgaaaatactgagatattgaaaagttacgacaactttcccaaggaactagctaggaagtgatggagctgggrttcaacccaggtagtctggccccaaggtatatgccctaaaccactttgctttggctgccccttgttgccagtagtcaagagagggggtcaagtcagaggaaaaaggccctacattaaactgccaaaagtacacttggacgacaccctgctatatgcatcctctctgtctccagcctctgttgagaactctggactcttctctccagacaaacgcagtagccccttttttttttttttttattaagaatttactgagcactcacctgggggacagagactgtgctaggcttggactgggccttgtgcaatgca

SEQ ID NO: 636858 - DNA, 552 bp, Homo sapiens
atttattctattcaggagaccttataaaacatgatggtttttatcaagctgccagctggctgatcagagaaattagaaaagagcaagagttttctagaacaggtgggggccaactcagctttgaacaaaagcgggtgggtgggagtgcgcaggctgaatggacgctttgccagacacttgtctatttgctcccagatccactccccacactggcctgctctgctgtgctctgcagggagctacatttctcaggttcccttgctgactggcttccgggyaggttgggctaaagaaagtccctgacagaagattggagatgagcagacagcagccagggtatcttcacctcttactttgtcttcgacaacatccctggcagtggccacataacccccgtggcttcaggtcctgacagtcaccctacaaaatgattctagctcctgctggattatcccagcttctgggatctggaactatcacctcctcttattgtccctccagccttggttgctgtcattggttgctgtcattggtgatttctgggctgaaata

SEQ ID NO: 636859 - DNA, 583 bp, Homo sapiens
ttccctggtgcaggacaagggctatgaatctgcaggagcaatcaggctgatgttatttaaatacttggctatttgmaaaatataacaacaggcagttgagaataaatgccaaacctctaattggttacaaacaccacctgagggcacagatatttgtcagcgtgactgatgcttcctgcttaaatgcaacatgcagacacccgtgcagaagaaaggcaggtggcgagctgcctatggcagcaagtgaagagggctgcactgttgagaaggcatggcttgcatctggcaactcattcgttctgcattgcattccactgaagggagagttgttacactcctgttactgatgagaagccaaggcacagagacgctcaggacttagccaaagttgtatagtcagtaagtgcctgggctgggatttgaaccccgaactccatcccctgtgcgcctctgcctcccatactacttttggcacttaagaggtaagaggtaacatgtttggggttttgggaactcaagccctggccttgggacttggtggctcaccactccatctctgcccatcatcctttcctaagttccc

SEQ ID NO: 636860 - DNA, 632 bp, Homo sapiens
gctggcagccagcatggtgggagggcaaggtgggcaaggatggggcatctagcaggtatgtgatgggggtgctggcagcaaggaggtcacatgtcggtctaggaccagagaggcagcaatgccaatcaaggtcattcttgggtacaggagaccagggtgcagggcccagagtctggtggctatgtgttgagctgaactggagtgagatcagaggcacagtggggaataggatacggggaggtgagtggaaggctgtccagaaggcaggtggtctggaggccaggtctagtgcctaagatggctctctagaagcgtttcctcatattgctgtgcagaaaagcaatgaaaaaaacagcaggaaactcctggattctatgggaaaagtggaagatgtttcaagctagaggaggaacatggtacagagaggagtgaaattstaagtgaaaactggttacattgagggaggctgaggacacaggaaggatccagggaagagggagtatggcctttattgaaagcccactgtgaacctactaggtaccaagcactttttcttatccttccagcaatctttcaagatagaaatatgagtctttttaggcttagttatgctgcagtaataaattaactcc

SEQ ID NO: 636861 - DNA, 583 bp, Homo sapiens
ctttggaaaaataaaaggctcttcagtaaaaatagctgctactccatttgtgcctctagtcctacagactctgctcccttgctacaatggtgaatgtctaactggagcataattttaacagcacaatttgcattgcctcggcagctgtctgccacaccaactctatgaaatccacccacggtgtttgactcaattacctcctgcagctgcgaattccacaggttgaccacactctgcatggaaaagtatttctttgtattcgttccaaatttattagccatttgaaccattcctttgagtgacttgtatatttttaagtgttcatgtatcaccattttaggccccagtcccattggcctgtatttcatattcagctcagaatattagagtatggtcttcaaaggatccatgtaaaagcagacctggtgtgctgacccctgctttatttaaaggtctcatgccatagacttcctcccagcytcccagccccacaaatgcatgatcacaagcatacaacagaaaagtatttgaaggacctagaatggagcagttcaaaacttcttccatgttagaaacatgagtt

SEQ ID NO: 636862 - DNA, 583 bp, Homo sapiens
ctttggaaaaataaaaggctcttcagtaaaaatagctgctactccatttgtgcctctagtcctacagactctgctcccttgctacaatggtgaatgtctaactggagcataattttaacagcacaatttgcattgcctcggcagctgtctgccacaccaactctatgaaatccacccacggtgtttgactcaattacctcctgcagctgcgaattccacaggttgaccacactctgcatggaaaagtatttctttgtattcgttccaaatttattagccatttgaaccattcctttgagtgacttgtatatttttaagtgttcatgtatcaccattttaggccccagtcccattggcctgtatttcatattcagctcagaatattagagtatggtcttcaaaggatccatgtaaaagcagacctggtgtgctgacccctgctttatttaaaggtctcatgccatagacttcctcccagcctcccagccccacaaatgcatgatcacaagcatacaacagaaaagtatttgaaggacctasaatggagcagttcaaaacttcttccatgttagaaacatgagtt

SEQ ID NO: 636863 - DNA, 466 bp, Homo sapiens
acatggatgtctcaccctcaccctcgaccttaggtaatctcatgttstgtagttccttaacttccctcactaaagtttctcctgtaaactgagcggatgcataggataggctgcaagctttcacatgtagtggagagtgctccagatttgtagtcacagctttgcaattccagctgtcccacttcccaactatgactacaggcaagttcctgaatctctcagagctgcacttcctctatttcagcacggcggaaagatgcctaacttgcattgctcttccatcagtgatagtgtagccaggcatgcttagccttgcggtctacccgtgacagatagataaacagatgatagttagatagatagatagatagatagatagatagatagatagatagatagagagatagatagatagatgatagatagatagatagatagatagatagatagatagatactgaccttt

SEQ ID NO: 636864 - DNA, 604 bp, Homo sapiens
gtgagtcaattaaatatttttcctttataaatgacccaatctcaggcagttctttgtagcagtgtgagaatgractaatacgtagttcaatatattttatcaaagcattcttaacttagttttatatctgtttacctctatggaattgagtttatgacattctactagtaacaatagaaacaagtctatgtagttgtagatttgaatttaaatttggataccaactttggccaagtatgcattgaaagtaggccaaaggaaaatgcctacccaatctgtctcaaaaatgatgcaatttgaggcagacctggaatttttttttttttttgagtgtctatgtgctcagctttggacaagtctagaccccttcactggttgcatcagcttgaataagctgcttaggctttctgcagatccatttttttctgaaaaagaaaacaaaaaaggttattaagatataattggtataacacacaattcatccacttaagtgttaaagtcaatgttttttggtatatttacaggattgtgcaaacatcaccacaatcgattttaaaacatttttatcccctctgaaagaaatcctgtacacatgagctacttg

SEQ ID NO: 636865 - DNA, 414 bp, Homo sapiens
ataacacacaattcatccacttaagtgttaaagtcaatgttttttggtatatttacaggattgtgcaaacatcaccacaatcrattttaaaacatttttatcccctctgaaagaaatcctgtacacatgagctacttgcatttccacaaatcctcctccctaggccctggaaaccactaatctactttctgtctctttagatttctctatcctgggaatttcatataagtggaatcatatgatatatgacgttttatgactggcttatttcacttaatgtaatgtttttaaggtgcatctatgtcctagcatgcatcagtacttcattccattttatggctgaactgatggacatttgagttgtttccacttttttggcttttatgaatagtgctactatgaacattcatgcac

SEQ ID NO: 636866 - DNA, 559 bp, Homo sapiens
ctcccacctgggagacagaatgagatcctgtatttaaatggataaatgaaccaagcatcatttttttytaactggatattgagtcactccaatccccaagttcccttttctttttttttttttttttttaccacaaatctttagtcctgattatcaagtatgttaaatcttaatgactcctttgcccaaactgaaaggttcactatactaaatcttttaccaagtgcaaaatttgcaagccacaaacttaggtacataaaagctataaatttgatgatttttctatgaatgaacttaaattatcttttaagccgccatttagtctactgacaaaatctagctataactaggtaaattcagacacactggtaatgtctcagtcctttcggctttgaaatcagtgtcttaaggtttggcctctcctcacctttcctcttggctggcagagacttacatggcattgagtgaggagggggccacatctagcccacagataacctctatgtccacaaccctactaagatgtctcctgtaccatttgctctcagccacttccaca

SEQ ID NO: 636867 - DNA, 575 bp, Homo sapiens
tattgtccagcccccacctcctccccaggttggtgggaaggagtagcaccccttcacaaggaagaggccacattttagctgcctttgctgtctccttagctcctcctctaccagctctgtcaacctctgttggggctatgcagacaggccattggactttttaccaattttcttttctgtaagtttttcttctattatcaattgaaggctcctattctttcaggtgtttcgtttttcaaaacacccatctcttgggaattcagagctgtggatctcaagtcttttctatgagtctcaaaagccctctttggactcccatccaagcactaaycaggccccaacctgcttacctttgagattgggtgcattcaggctggtaggtcggtagacaccaggagcccttttggaatggctagttctcaggcccacttcattccaaacactgtgctcctaacaattatggtaagctgtctcctgcattctggagggtgtcaagagctgaaacccaacagccaacactgtaggactctccagagcctgttggggtacaggagaagcaggagggaactcctggt

SEQ ID NO: 636868 - DNA, 380 bp, Homo sapiens
tttggaggagacttggctgtttgaaatgagcaagaggaatgaaaatcctaaaaaartagactagaacgacctaattctttcctacccactccaacctacagcattagtctaggtggggtgaggtgggagcctgcaaaataacacagctcctacttcgggtctcagcatgtgctcccagcccaaaatcctccaaaaagaatctgattccatgctgatgggtgaaagatgagaaacacagtagctttctggtggatttccttatgtgtctgttcccaagccaattgtttgaagatttttcttttttctttaatgtttagtacatcttctttaggcttcttgccttccatggaggggaatatacccaaagatggtccaagtgg

SEQ ID NO: 636869 - DNA, 608 bp, Homo sapiens
ccatctgccaacaactggggagaatagggctcctgacagccacagccacaggaaaattcagatccttttgcagacgcctctccacagacctcactaggtgatcacaggaaagactgggggcacggggagatgctggagaaagctcctgatgaagacatacccgagactgggaagaaaaataggtttaatggactcacagttccacgtggctggggaggcctcaccatcatgcgaaaggctaaaggcacttcttacatggcagcgggaagagagaatgagaaagaagccaaagcagaaagcccttataaaatcatcagatcttgtgagacktattcactaccatgagagcagtatgggggaaaccacccccatgattcaattatctcccaccgggtgcctcccacaacatgtaggaattatgggagaacaattcaagatgagatttgggtggggacacagagccaaaccatatcagtcccctttctgatgggggtgtctgtgtgcgattctcaggagttctgtactctcttgctatcccacagcaggactacagtaatttattaagaattttagctgaattcttcctactagttcgaccagtttccaac

SEQ ID NO: 636870 - DNA, 608 bp, Homo sapiens
ccatctgccaacaactggggagaatagggctcctgacagccacagccacaggaaaattcagatccttttgcagacgcctctccacagacctcactaggtgatcacaggaaagactgggggcacggggagatgctggagaaagctcctgatgaagacatacccgagactgggaagaaaaataggtttaatggactcacagttccacgtggctggggaggcctcaccatcatgcgaaaggctaaaggcacttcttacatggcagcgggaagagagaatgagaaagaagccaaagcagaaagcccttataaaatcatcagatcttgtgagacgtattcactaccatgagagcagtatgggggaaaccacccccatgattcaattatctcccaccgggtscctcccacaacatgtaggaattatgggagaacaattcaagatgagatttgggtggggacacagagccaaaccatatcagtcccctttctgatgggggtgtctgtgtgcgattctcaggagttctgtactctcttgctatcccacagcaggactacagtaatttattaagaattttagctgaattcttcctactagttcgaccagtttccaac

SEQ ID NO: 636871 - DNA, 601 bp, Homo sapiens
aataatataattccttcagtttctttagcaataatgcttgtgtgaggtttttgatgtgactatgtcttgaacaaggtagtctatgaaattacaaaagttgaagctgggtaatgtgtaggacatggtgctgtattatagtatttttctacttttgtatatatttaaaattttccataaagtaaggtttaaaatataatactaacgtttaaaatataatactaatatagtgacaaccgatgtccacaactccaagtttaaggagaaacattagggatgtagccaaatttctctttgtgctgttccccaattacatttcagtctcttttcttcaggcatactgtttcccagaatttatcattttttaccctcattgatacctttacaattttactgcatatacttatatctgtaaactttacaaagaatttcttgcacattaaaaagctctgtctgtggtggtgtatcatatatacaaatatattcaacattatatttgtggggttcattaatgttgatacatgacataaagcttcagttcatttttttactgtygtttaggatttcattgtaggaatatgaatttgtctatctattacctgtt

SEQ ID NO: 636872 - DNA, 500 bp, Homo sapiens
catatttccttggcatcctgagcaagaattattctagggcttgttgcttagaagtagaaatgttamatttcatggcatgcacaccttaaacactgctaactattgccagtggctttccaagtgtttataccaatttgcattttttctaccagcaatggctaaaagttcccatttctcaaactttgacaagtatttgccaatattttaatttttgtcaaattgatgggtatgaaatagtatccttttttgtgttagtttgcatttctctgctgacatctagtgaatttgactaccttttctcatgctgttggtcatttgatttccttttctgtaaactgcctgttcatatctattgctcctttctctattgtgtttgctttttattatgctgatttgtggtagttcatatatatgtactgtactttttgttatttttatatatttcaaataccttctcccagtatacagtttttcacactcttttaatcatatttttgatc

SEQ ID NO: 636873 - DNA, 500 bp, Homo sapiens
catatttccttggcatcctgagcaagaattattctagggcttgttgcttagaagtagaaatgttacatttcatggcatgcacaccttaaacactrctaactattgccagtggctttccaagtgtttataccaatttgcattttttctaccagcaatggctaaaagttcccatttctcaaactttgacaagtatttgccaatattttaatttttgtcaaattgatgggtatgaaatagtatccttttttgtgttagtttgcatttctctgctgacatctagtgaatttgactaccttttctcatgctgttggtcatttgatttccttttctgtaaactgcctgttcatatctattgctcctttctctattgtgtttgctttttattatgctgatttgtggtagttcatatatatgtactgtactttttgttatttttatatatttcaaataccttctcccagtatacagtttttcacactcttttaatcatatttttgatc

SEQ ID NO: 636874 - DNA, 500 bp, Homo sapiens
catatttccttggcatcctgagcaagaattattctagggcttgttgcttagaagtagaaatgttacatttcatggcatgcacaccttaaacactgctaactattgccagtggctttccaagtgtttataccaatttgcattttttctaccagcaatggctaaaagttcccatttctcaaactttgacaagtatttgccaatattttaatttttgtcaaattgatgggtakgaaatagtatccttttttgtgttagtttgcatttctctgctgacatctagtgaatttgactaccttttctcatgctgttggtcatttgatttccttttctgtaaactgcctgttcatatctattgctcctttctctattgtgtttgctttttattatgctgatttgtggtagttcatatatatgtactgtactttttgttatttttatatatttcaaataccttctcccagtatacagtttttcacactcttttaatcatatttttgatc

SEQ ID NO: 636875 - DNA, 603 bp, Homo sapiens
accgcgaacttttgtcagttactggacgacatgcagctttctttcctcaaacttttacatgtattcacaccctcctgtcgaggttagcacctttgcatcctccagatcccagctgaaatgccctgaggcctcttctgccacctaatctgaaatcattctccttcttgatctctatgtcttgttttctttcttcataacctagcagaggtcagagttgcttcatttactggggagtggtccttgatcctgtattcacttaccagtctcccagctggactataagctccatgaggtgacagccacatctattgtgtytccagctcttactcctgcacttggcatgctagggatgctcagcagatgactattttaaacgtcagtcatggccaggcgcggtggctcacgcctgtaatcccagctactcaggaggctgaggcatgagaatcgcttgaacttgggaggcagagggtgcagtgagctgagatcgcgccactgcactccagcttgggtgacagagtgagactcggtctcaaataaataaataaataaataaataaataaataaataaatgtcataatgagtgccaggagaatgtgagtcgg

SEQ ID NO: 636876 - DNA, 581 bp, Homo sapiens
aatattgttttcttggaacaaaaatactcttgaaaatattctcagaggaaaagagtatacagatatagagaataaaaacagtagtctgaatagtgwcagaaattacagtaacaattaaattatgattacagatttaaagataatcccaaaagtcttcttctcactgctggtactgcaaatgaggttaacatccattcacagttgtactaccactgaaggttcctggtgattctccatatctgtgctatatatgtatgcctttccagactagaaacaatttcaaaataaatttgtttttggtgttgatattttgcaaatgttttaattttcctattatactgcaaaactctcatttttcatgatataagagaattaatgaagcaaagtaaatatttggattttatttttggctatgaatttccctaactataaatagcaagtagtatatgcagtatttgttcagcaccagatgactcacaagagatagaatatacagttctgcttttgataacagtccagataatgtacagttctatttttgataacatttcaatacaattgaagggaagactaagactatt

SEQ ID NO: 636877 - DNA, 570 bp, Homo sapiens
gaaacttccatttgtacataagattcatatccataaagggtttggaaataaatccagctggtttcaacaggtgttgacattaggttaagcgttccacctagtggccaaatccagcctagcctgttctctcggggttctcatacgtctaaaagatgataaagcaaggattgatttgtcctaaagcatccccattacctgtacagcaacgaaacattttgaatagtgaaaaatcttaggaagttcaggacatttttacttacagaaagaaaatattcccaatcatatcccaagtcataggacaagctttccccaatatagtcaaagctcagacataycatctttcactgttcagtgatttatccaaaattcattaagctcctattacataacaaacagtgtaatcatcactaggaacactaacattaacaaccaaaaatgccactaaggaactcatagactagtggggaagacatgaaaataggtaataaaaatccatattaagtacaatgacataggaagctagtagagcccagaaacagtgaggggactcaaaagtttaaagaaaataaa

SEQ ID NO: 636878 - DNA, 619 bp, Homo sapiens
gacatgaaaataggtaataaaaatccatattaagtacaatgacataggaagctagtagagcccagaaacagtgaggggactcaaaagtttaaagaaaataaaacttccccaagacacccatctagtaagttgttgagttggatttgaacccaagtgtacctaattccaaagctattggcagccctgcaggcccccagaatgggttatctatccctgcttcaggtgactgaaattgtagtgaggaggtccaygatgttaccacgtcgctatcatggacatttcttgcaaaaggctaattaggcatagctctaatagtccaatttatcagaggcaatctaatgggatgctggatttaggacaatggcttctgtcacttgcatgctggaatatgacctagaacttcttcctaagccaaagctggcagcagctacttcctttcctcttgtgtactatagtaggtaagtagaccacagtttgaattctggctccactatttactagctctctgaccttggccaagttcattaatgcctggaaaccaggagacctgatttctagttgtggctctgacactatagatacacataatcccatgaaagtcctgcagggccataccaag

SEQ ID NO: 636879 - DNA, 619 bp, Homo sapiens
gacatgaaaataggtaataaaaatccatattaagtacaatgacataggaagctagtagagcccagaaacagtgaggggactcaaaagtttaaagaaaataaaacttccccaagacacccatctagtaagttgttgagttggatttgaacccaagtgtacctaattccaaagctattggcagccctgcaggcccccagaatgggttatctatccctgcttcaggtgactgaaattgtagtgaggaggtccatgatgttaccacgtcgctatcatggacatttcttgcaaaaggctaattaggcatagctctaatagtccaatttatcagaggcaatctaatgggatgctggatttaggacaatggcttctgtcacttgcatgctggaatatgacctagaacttcttcctaagccaaagctggcagcagctacttcctttcctcttgtgtactatartaggtaagtagaccacagtttgaattctggctccactatttactagctctctgaccttggccaagttcattaatgcctggaaaccaggagacctgatttctagttgtggctctgacactatagatacacataatcccatgaaagtcctgcagggccataccaag

SEQ ID NO: 636880 - DNA, 619 bp, Homo sapiens
gacatgaaaataggtaataaaaatccatattaagtacaatgacataggaagctagtagagcccagaaacagtgaggggactcaaaagtttaaagaaaataaaacttccccaagacacccatctagtaagttgttgagttggatttgaacccaagtgtacctaattccaaagctattggcagccctgcaggcccccagaatgggttatctatccctgcttcaggtgactgaaattgtagtgaggaggtccatgatgttaccacgtcgctatcatggacatttcttgcaaaaggctaattaggcatagctctaatagtccaatttatcagaggcaatctaatgggatgctggatttaggacaatggcttctgtcacttgcatgctggaatatgacctagaacttcttcctaagccaaagctggcagcagctacttcctttcctcttgtgtactatagtaggtaagtagaccacagtttgaattctggctccrctatttactagctctctgaccttggccaagttcattaatgcctggaaaccaggagacctgatttctagttgtggctctgacactatagatacacataatcccatgaaagtcctgcagggccataccaag

SEQ ID NO: 636881 - DNA, 581 bp, Homo sapiens
aatattgttttcttggaacaaaaatactcttgaaaatattctcagaggaaaagagtatacagatatagagaataaaaacagtagtctgaatagtgacagaaattacagtaacaattaaattatgattacagatttaaagataatcccaaaagtcttcttctcactgctggtactgcaaatgaggttaacatccattcacagttgtactaccactgaaggttcctggtgattctccatatctgtgctatatatgtatgcctttccagactagaaacaatttcaaaataaatttgtttttggtgttgatattttgcaaatgttttaattttcctattatactgcaaaactctcatttttcatgatataagagaattaatgaagcaaagtaaatatttggattttatttttggctatgaatttccctaactataaatagcaagtagtatatgcagtatttgttcagcaccagatgactcacaagagatagaatatacagttctgcttttgataacagtccarataatgtacagttctatttttgataacatttcaatacaattgaagggaagactaagactatt

SEQ ID NO: 636882 - DNA, 300 bp, Homo sapiens
acttctttaatttctcttagcatttctttttagttttcagtgtataagtcttgtataacttttgtgagatttattcttaagcatttcatatatttagatactattrcaaatgattgattttccagaagatatatagcttattgaattatatttttgggaataatattttaaaatttaaatttctaatcatttattgttagtatatagaaatagaatggtttttgtatattgatcttgcttcctggaactttgctatactcatttagtttaagatttttaaaatctaagattacatttatt

SEQ ID NO: 636883 - DNA, 300 bp, Homo sapiens
acttctttaatttctcttagcatttctttttagttttcagtgtataagtcttgtataacttttgtgagatttattcttaagcatttcatatatttagatactattacaaatgattgattttccagaagatatatagcttattgaattatatttttgggaataatattttaaaatttaaatttctaatcatttattgttagtatatagaaatagaatgrtttttgtatattgatcttgcttcctggaactttgctatactcatttagtttaagatttttaaaatctaagattacatttatt

SEQ ID NO: 636884 - DNA, 622 bp, Homo sapiens
tgcaaattaggctaacattcgttcacagctgtattaccatggaaggtccctggtgattctccatatctgtgctgtatgctcttcttgggttaaccagtgctggcaaaacttcactattgcttgacaatatacgaaggttccatattgcctttaaggtacattttaatcttcatactttaaaagcctatactgtctgttttttattttccactagttttccatatctccctgcagaccttttttcttcagtaattatgtgtaccctggttgtycccagttcacaccaaagtttgttctagactaagttaatttattcattgtaatttctcagtccagaaggccattctcttctttcaaacttacctcacttattaatttttttcacctgttgctccttgagttttaaaaaatggtttcagaatgcctttaacccatttccctaactaccagacctaattaatacacatattgaagaaatgttaagactatagttcctttccatgtctttgtgcaaatcatatacataaataaataagtagtgagtgggtgaacagagctgggttcattgcaggaatttaatacactgtatgttgatttatggctaagtagagaggcagaaagc

SEQ ID NO: 636885 - DNA, 622 bp, Homo sapiens
tgcaaattaggctaacattcgttcacagctgtattaccatggaaggtccctggtgattctccatatctgtgctgtatgctcttcttgggttaaccagtgctggcaaaacttcactattgcttgacaatatacgaaggttccatattgcctttaaggtacattttaatcttcatactttaaaagcctatactgtctgttttttattttccactagttttccatatctccctgcagaccttttttcttcagtaattatgtgtaccctggttgtccccagttcacaccaaagtttgttctagactaagttaatttattcattgtaatttctcagtccagaaggccattctcttctttcaaacttacctcacttattaatttttttcacctgttgctccttgagttttaaaaaatggtttcagaatgcctttawcccatttccctaactaccagacctaattaatacacatattgaagaaatgttaagactatagttcctttccatgtctttgtgcaaatcatatacataaataaataagtagtgagtgggtgaacagagctgggttcattgcaggaatttaatacactgtatgttgatttatggctaagtagagaggcagaaagc

SEQ ID NO: 636886 - DNA, 622 bp, Homo sapiens
tgcaaattaggctaacattcgttcacagctgtattaccatggaaggtccctggtgattctccatatctgtgctgtatgctcttcttgggttaaccagtgctggcaaaacttcactattgcttgacaatatacgaaggttccatattgcctttaaggtacattttaatcttcatactttaaaagcctatactgtctgttttttattttccactagttttccatatctccctgcagaccttttttcttcagtaattatgtgtaccctggttgtccccagttcacaccaaagtttgttctagactaagttaatttattcattgtaatttctcagtccagaaggccattctcttctttcaaacttacctcacttattaatttttttcacctgttgctccttgagttttaaaaaatggtttcagaatgcctttaacccatttccctaactaccagacctaattaatacacatattgaagaaatgttaagactatarttcctttccatgtctttgtgcaaatcatatacataaataaataagtagtgagtgggtgaacagagctgggttcattgcaggaatttaatacactgtatgttgatttatggctaagtagagaggcagaaagc

SEQ ID NO: 636887 - DNA, 599 bp, Homo sapiens
ctcataaatgtctatttacaaaccctgggtttgaaaaatacactcagtgaaaacatgttgaattttgtaaaggaaatcagccaatcataaaggattttggcacaaagctggcttttaccttttttctttcttttctttttttttttttttggttttgttttgtttttgagacgagttttgttcttgttgcccaggctggagtgcagtggtgcaatcttggctcactgtaacctccatctcccaggttcacgtgattgtcctgcctcagccaccagagtagctggaattacaggtgcgtgccaccatgcctggctaatttttgtatttttggtagagacggggtttcaccatgttggccagactggtctcaaattcctgaactcaggtgatccgcccgcctcagcctcccaaagtgctggaattacaggtgtgagccactgcacctggcctggcttttagcttttaaagctggatatttgmatttctaaaattcttaataatttgccttatttgaataattaattatgctacttcttgctattttgttcaatgccactgttagtattaaaacagagttcaagccacttgaactgacaact

SEQ ID NO: 636888 - DNA, 355 bp, Homo sapiens
aagcttcacatatgattctgatcatcagttttggaaaccactgctttatgcaygtgactttattaaatttctaactgaagtgcgctgccttactcatttaggctgctgtaacaaaataccacaaactgggtgggtcataaacaatagaaatttatttctaagagttctggagactggaggatgggaagtccaagatcaaggcaccaactgatttgttgtctgatgagggcccacttctgggctcatagacataaatattcacaccatagcaggggcaagtcctgagttcatggaaatgctcaaaaggatggtggggccgggtgcagcagctcacacctgtaatcgcagcactttg

SEQ ID NO: 636889 - DNA, 529 bp, Homo sapiens
ggtgtatatatttattgcatataatggatgttagttcattattaaatctttcttatgtaacaacaagataaaatatttaagatgtgaatttttctctggttactggttgttcggaattggtatgttgtgatatggttatctctgtttctaatttctaaataataattaaagttttcacttaaactttaaaagtgtttgtattatagttaaacattataactaatttttagttatatttcatttcatatggtaagataattatgtctctaacttcagtttttagatttattgagatttctttgggtttcayatacaaatgcttttataaatattacctttgcaatggaaataaagtacagttacttaaaagggtaaaaagttcaatattaaatctgcatttgatttatccttattttcccccaaacgtcttttgtttgcaaacctatagtaagattaaaggaatactccaggcactcttacagttcacttagattcaccaactgtcagcattttgctacatttgtagata

SEQ ID NO: 636890 - DNA, 563 bp, Homo sapiens
agttctctatttagagaagcgaacrtatactataagaaacaaaatcattaggatttaatgtagagaagacaaagttttaaagaaaactttacagctttggtgtgattcacatgtacaattgactcttgaacaacttggggattaggagtaccaaacatctgaaaatccacatataagttttgattccccagaaatctaactactaatagcctaagttgacaggaagccttaccaataatataaactatcaattaacacagattttgtaggttgtatgtattatatttcttcaagtcttcaaagacttgaagaaagcaagggagtgcagcagatatttgatggagaaatattctaggcattgaagatgaccagtgcaaaacctaaggcatgcttggtgtgtttgaggaatagcaagaatgccagtgtggctggcatagagcaaaagggagagtattaggggatgagctcaggactctgagaaagcaagggaaccccactggaaggatctggggagagaaagtgacatggtcaatgatatgatttcactgtgtgccccaccccca

SEQ ID NO: 636891 - DNA, 563 bp, Homo sapiens
agttctctatttagagaagcgaacatatactataagaaacaaaatcattaggatttaatgtagagaagacaaagttttaaagaaaactttacagctttggtgtgattcacatgtacaattgactcttgaacaacttggggattaggagtaccaaacatctgaaaatccacrtataagttttgattccccagaaatctaactactaatagcctaagttgacaggaagccttaccaataatataaactatcaattaacacagattttgtaggttgtatgtattatatttcttcaagtcttcaaagacttgaagaaagcaagggagtgcagcagatatttgatggagaaatattctaggcattgaagatgaccagtgcaaaacctaaggcatgcttggtgtgtttgaggaatagcaagaatgccagtgtggctggcatagagcaaaagggagagtattaggggatgagctcaggactctgagaaagcaagggaaccccactggaaggatctggggagagaaagtgacatggtcaatgatatgatttcactgtgtgccccaccccca

SEQ ID NO: 636892 - DNA, 577 bp, Homo sapiens
ttggtgtgattcacatgtacaattgactcttgaacaacttggggattaggagtaccaaacatctgaaaatccacatataagttttgattccccagaaatctaactactaatagcctaagttgacaggaagccttaccaataatataaactatcaattaacacakattttgtaggttgtatgtattatatttcttcaagtcttcaaagacttgaagaaagcaagggagtgcagcagatatttgatggagaaatattctaggcattgaagatgaccagtgcaaaacctaaggcatgcttggtgtgtttgaggaatagcaagaatgccagtgtggctggcatagagcaaaagggagagtattaggggatgagctcaggactctgagaaagcaagggaaccccactggaaggatctggggagagaaagtgacatggtcaatgatatgatttcactgtgtgccccacccccatatttcaccttgaattgtaacgatacccacatattaaaggtgggggcagatggagataattgaatcatgggggtggtttcccccatactgttctcatggtagtgaatcaa

SEQ ID NO: 636893 - DNA, 563 bp, Homo sapiens
agttctctatttagagaagcgaacatatactataagaaacaaaatcattaggatttaatgtagagaagacaaagttttaaagaaaactttacagctttggtgtgattcacatgtacaattgactcttgaacaacttggggattaggagtaccaaacatctgaaaatccacatataagttttgattccccagaaatctaactactaatagcctaagttgacaggaagccttaccaataatataaactatcaattaacacagattttgtaggttgtatgtattatatttcttcaagtcttcaaagacttgaagaaagcaagggrgtgcagcagatatttgatggagaaatattctaggcattgaagatgaccagtgcaaaacctaaggcatgcttggtgtgtttgaggaatagcaagaatgccagtgtggctggcatagagcaaaagggagagtattaggggatgagctcaggactctgagaaagcaagggaaccccactggaaggatctggggagagaaagtgacatggtcaatgatatgatttcactgtgtgccccaccccca

SEQ ID NO: 636894 - DNA, 556 bp, Homo sapiens
acaggttttaagtactggaaatgattcaaagtggcattttaagttctaatttacatgttcttcagcagtcagtcttattaacagatgaaatgacttttcatttatgtaagacaaaaaatcaaattatttacttttgtagcaacatatgaactttgcaacttagatgtcctacaggtaacgaaatgtatatggattgcatcctaatcaatagcactgaaagatgaaaagccagtctttagactcagtttctgttacccgtttctgcaaaacaaacataactgatggcttagtagcttaaaacagcaactatttaatcatatcttcaaggtgtgcatgttaactacgctccactgggagcttctctacatgatgttgactggcactggagtcatctgagggctcccctgggctggaatctccaaagtggaacactcacatgattgctagtgggckctgactgttgactcaggaatcttgctcttctccatgtggcttctctttttggcttggtcttgccatgacatggtggctagattccaagaggaggtaagtggaa

SEQ ID NO: 636895 - DNA, 563 bp, Homo sapiens
gaattccttgtcagctaagtctaacttacrgttctgatatggtttggctgtgtccccacccaagtctcatcttgaattgtagttcccataatccccacgtgtggtgggagggactcggtgggaggtaacttaatcctgggggtggtttcccccatgctattcttgtgatagtgagtaagttctcacaagatctgatgatttcataaggggcttccctcttcacttggctctcattcttctcttccttgctgccatgtgaaaaaggatgtgtttgctccttctttcaccataattgtaagtttcctgaggtctccccagcccagtggaactgtaagccaattaaacctctttcctttataaattacccagtctcaggtatgtctttattagcagtgtgagaactgactaatacagatcctatagggaaagagttctgggaagtttggtttcagcccagccaagttgatgtagtgcaaagtactacactatttgactcttattttttctcatctctaattttaatgcacccagagctctaggtaatagatgctcctgtccccagg

SEQ ID NO: 636896 - DNA, 610 bp, Homo sapiens
gggtgaataatatttatagcaggcttttagtatcataaaaacttactacaatcatcatagtctagtacaggggtgctaaggactgcaaaatcataccgatggcttctatcttccttgtcagtatttcctattgtctttagtgcaaaattgttcttcctaaatcctctttgagctgtttcactgacatcacctcaaagccatactgaatgtcatatggtaaggcaggatcttgttcactagcaagatatgaagaccttggaaggctgccaggctcccagctctgaggccctgcttgctgcaaattatctctgctgggctgagcagggcaggtgcagaggaaaagggcaactgtagatcaacagcagctgctgcttgctgactggaaatagggccggcacaagcaaagggtcaagaagaaacatcttaggtaatggtttccatagtttccctccttgggaggaaataaatgacagagtcacaaaaagagagaccatgaattacaggtattgtactttscatagctttgcattccgcagcttaaaaacatgactttttgaagtttgcatgacttagatttggcgatcctaaaggttaaaggcatttggtcatt

SEQ ID NO: 636897 - DNA, 625 bp, Homo sapiens
gctccatccccaataacaaagtagctttcaagaaaagctgataaaaccttgagcaaataaacacacagcacttaaggtagctcctgagaatacctctatactcactgccgagggaaacaactagcatttttgaatttgaagaaaaggttaaattggatcttgcaccataaaagagagtaaaccacaaaacgaatcttagaaagcattttattcraagtgttaaaataaatacaaagttacggtatgtatgtatgtaataactttatatggaagcttcatatagtcattcccatttacctttcatgagatgtttgataaatgtattgtttctttttcttttttgagacagcatctcactctgttgcccatggtagattgcagtggcacaatcacagctcactgcagcttccaactcctgggctcaagtgatcctcctacctcagcctcctgagtagctgggaccacaggtgcatgccactgaacccagctaattaaaaaaatttttttgtagatatgggggtctcaccatgttgcccaggctagtcttgaactcctgggctccaagaatcctcccacctttgcctctcaaagcgttgggattgcaggtgtgagctaccacacctag

SEQ ID NO: 636898 - DNA, 582 bp, Homo sapiens
gtaatatcatcaatgttcatgtccatgttttgctttccttctcagagctggaagtcgagtgtgctactcaactcaggagatttggagacaaactgaacttccggcagaaacttctgaatctgatatccaaactcttctgctcaggaacctgactgcatcaaaaacttgcatgaggggactccttcaaaagagttttctcaggaggtgcacgtttcatcaatttgaagaaagactgcattgtaattgagaggaatgtgaaggtgcattcatgggtgcccttggaaacggaagatggaatacatcaaagtgaatttctgttcaagttttcccagattatcattctttgggatgagagaacattataaaaccactttgtttattttaaagcaagaatggaagacccttgaaaataaagaagtaattattgacacatttcttttttacttagagaatcgttctagtgtttttgccgaagattaccgctggcctactgtgaagggagatgaccygtgattagactgggcggctggggagaaacagttcagtgcattgttgttgttgctgtttttggtgttttgcttt

SEQ ID NO: 636899 - DNA, 436 bp, Homo sapiens
ttttctctgggaaagtggggtggaggtgggagcttggcttcagaaagggtggggacaaactacatgatttgatttgagaatcactggaagagtaactcctgtctctgagcctgctcgcatagccagaattgttttgctaaaagtgcaccttattagttctcgccaccactagaaaacaaggaaaaaaagtgtacctcaggctcttcttttatataaagagtagcacatgaaggcttaggcacagattcacaatcttcagatattagagctatatattttttgagaaccatattttaatgttaaaaaatgtccaakatgttcaggcaattctaattatatctgttgactgacaaaaactgctagcttttaaatttgcatttatattataaaagaaaatgtatctatccgtgaataagttgttcttcactttaaagaa

SEQ ID NO: 636900 - DNA, 385 bp, Homo sapiens
aactagaaagtcaagactagaactttaactttcaaaatgtcattatagaggaatagaaggaagtcaggctaataacttttcaatgactcctgagctaccctgctattcagagacctttcccggagtcttggaaagcacctagtctggatgataaatctagactttttttctgaactttaaattaaygtaaacaaggacaaagggcagtaacaaggcgtcagtgtgttacttaccaaccatactatttttagaataagttggctaacttaaaaagtatgtatacttacttaaaacacactttcctgtaagtttcaacccacgttatcttacacttaccctgaaattttttctttaaaaatattgtgggaggccacagatattggcc

SEQ ID NO: 636901 - DNA, 211 bp, Homo sapiens
tgttgactgagtttgtggtggaattttgagaaaagtatccttgcatatkaaattattggttttaaagtctttttcttctctttttttatgacagcaatacatgtctactgagaaaaattatgaagaaaaagataaaagtagaaagatgtgtcaatgcaaatataacaaaggatgctacaaggatgattaggtattgtgcatatgccaggaa

SEQ ID NO: 636902 - DNA, 613 bp, Homo sapiens
caaagaataggttaacatgaaaacccaataagactttccatcttggcagccatcctttttaagagtaagtcggttacttcaaaaagagcaaatactggggatcaaattattttaagaggtatttcagttttacatgcaaaatagccttattttcatttagtttgttagcactatagtgagcttttcaaacactattttaatctttatatttaacttataaattttgctttctatggaaataaattttgtttttgtattaaaaattaacttttcccttttatacagaaacctcaaccaaatttaccttactttccttccaaaatatccactttcaggaatataggtgaataacaaatagggcagcatagcaaattgctcagactccagccaaattgaggtcaacatagcatgcccaaataaggcaaatccaccccgctaccccaatagttaacacacagaatactatgtgatacagaatgcattgaagacctacagtcactggtagtttaagccacaggtcttcctcstgtaaccagagacagaatgggctccttgcataaatataactcattgtgtgtatattaaatccataaaatctctggcagtaaagcca

SEQ ID NO: 636903 - DNA, 608 bp, Homo sapiens
ccatctgccaacaactggggagaatagggctcctgacagccacagccacaggaaaattcagatccttttgcagacgcctctccacagacctcactaggtgatcacaggaaagactgggggcacggggagatgctggagaaagctcctgatgaagacatacccgagactgggaagaaaaataggtttaatggactcacagttccaygtggctggggaggcctcaccatcatgcgaaaggctaaaggcacttcttacatggcagcgggaagagagaatgagaaagaagccaaagcagaaagcccttataaaatcatcagatcttgtgagacgtattcactaccatgagagcagtatgggggaaaccacccccatgattcaattatctcccaccgggtgcctcccacaacatgtaggaattatgggagaacaattcaagatgagatttgggtggggacacagagccaaaccatatcagtcccctttctgatgggggtgtctgtgtgcgattctcaggagttctgtactctcttgctatcccacagcaggactacagtaatttattaagaattttagctgaattcttcctactagttcgaccagtttccaac

SEQ ID NO: 636904 - DNA, 608 bp, Homo sapiens
ccatctgccaacaactggggagaatagggctcctgacagccacagccacaggaaaattcagatccttttgcagacgcctctccacagacctcactaggtgatcacaggaaagactgggggcacggggagatgctggagaaagctcctgatgaagacatacccgagactgggaagaaaaataggtttaatggactcacagttccacgtggctggggaggcctcaccatcawgcgaaaggctaaaggcacttcttacatggcagcgggaagagagaatgagaaagaagccaaagcagaaagcccttataaaatcatcagatcttgtgagacgtattcactaccatgagagcagtatgggggaaaccacccccatgattcaattatctcccaccgggtgcctcccacaacatgtaggaattatgggagaacaattcaagatgagatttgggtggggacacagagccaaaccatatcagtcccctttctgatgggggtgtctgtgtgcgattctcaggagttctgtactctcttgctatcccacagcaggactacagtaatttattaagaattttagctgaattcttcctactagttcgaccagtttccaac

SEQ ID NO: 636905 - DNA, 644 bp, Homo sapiens
tcccaggacgtcccagcctgcatcttttctctaggtcagtggtaaactggacygcacgcctctaagttgaaaaggctaagagcacaagacctactgcgtgtaaagtgatctgctagtctctctggaacatgcagaggagagccgagttcagtcatctgcgagtttctcgacatcacttcaaagtttgcaaagctcaacgacatgcagctccatattcgagtctccttataaccctgtaggagatggaagctcagagaggtgagtgaccaacccaaggtcacacagctggtggataaaagaggccttctgcttccaggctttttcctgtagagcagaggggtcgagcttgtagcctctcgggccaaatgcctgggctcatataatggattcactactacttgaaggatgtgtgactttgggcaagtgactcaacctctctaagcctcagtttcctcatatacaatgtgggagaaatacagtacacatttttataagtgagcagtgtccttaaaactcctggctcataggcagtatggaataaatgttagctgtcataattttatcacacagctggctgtctcctgtcatcacccccacccagggtcccaataccttctttcaaggacacagaagggtggtacaca

SEQ ID NO: 636906 - DNA, 644 bp, Homo sapiens
tcccaggacgtcccagcctgcatcttttctctaggtcagtggtaaactggactgcacgcctctaagttgaaaaggctaagagcacaagacctactgcgtgtaaagtgatctgctagtctctctggaacatgcagaggagagccgagttcagtcatctgcgagtttctcgacatcacttcaaagtttgcaaagctcaacgacatgcagctccatattcgagtctccttataaccctgtaggagatggaagctcagagaggtgagtgaccaacccaaggtcacacagctggtggataaaagaggccttctgcttccaggctttttcctgtakagcagaggggtcgagcttgtagcctctcgggccaaatgcctgggctcatataatggattcactactacttgaaggatgtgtgactttgggcaagtgactcaacctctctaagcctcagtttcctcatatacaatgtgggagaaatacagtacacatttttataagtgagcagtgtccttaaaactcctggctcataggcagtatggaataaatgttagctgtcataattttatcacacagctggctgtctcctgtcatcacccccacccagggtcccaataccttctttcaaggacacagaagggtggtacaca

SEQ ID NO: 636907 - DNA, 571 bp, Homo sapiens
atgtaatgatgaaagagtggatacatcctccctaaaatcaggaacaaaacgaggatgtccatcctcaccacaccacttctgtcaacattgtactggaggttctcaccggggcaattaggcaagacaaagaaataaaaggtatccagattgaaaaggaagaagtaaaactatcttttctctatttgtagatgatrtaatcctgtatataaaaaacccttaggaattcattaataattattataacaaataagtgagttcagcaaggtttcagaatacaatattgatactcaaaaatctattgcatttctatatactagcaatgaacaatccaaaagtgaaattaagaaataattctatttacaatagcatccaaaaagaatacattacttaggaataattttaagaaaaatgtgtccaaagaatgctctgaaaaccataaaacattattgaaagtaattaaagaagacataaataaatggaaggatatcccatgttcataggcaaaaagtcttaatactgtaagatggcagtactccccaaattggcctacacagtccctagcagaattcca

SEQ ID NO: 636908 - DNA, 571 bp, Homo sapiens
atgtaatgatgaaagagtggatacatcctccctaaaatcaggaacaaaacgaggatgtccatcctcaccacaccacttctgtcaacattgtactggaggttctcaccggggcaattaggcaagacaaagaaataaaaggtatccagattgaaaaggaagaagtaaaactatcttttctctatttgtagatgatgtaatcctgtatataaaaaacccttaggaattcattaataattattataacaaataagtgagttcagcaaggtttcagaatacaatattgatactcaamaatctattgcatttctatatactagcaatgaacaatccaaaagtgaaattaagaaataattctatttacaatagcatccaaaaagaatacattacttaggaataattttaagaaaaatgtgtccaaagaatgctctgaaaaccataaaacattattgaaagtaattaaagaagacataaataaatggaaggatatcccatgttcataggcaaaaagtcttaatactgtaagatggcagtactccccaaattggcctacacagtccctagcagaattcca

SEQ ID NO: 636909 - DNA, 602 bp, Homo sapiens
aacattattgaaagtaattaaagaagacataaataaatggaaggatatcccatgttcataggcaaaaagtcttaatactgtaagatggcagtactccccaaattggcctacacagtccctagcagaattccagctggtttccataagctgatctttaaaaaagtgtrtaaagaattgcaatgggctcagaatagccaaaacaatcttgaaaaagaagaaaaaactggaggatttacatttcccaattttaaaactcactacaaagctacggtaatcaagatagtgtggtactggtgtaagaacagacatttagattaatggaatagaaatgagagtccataaaccctcacaaatagggtcaactgatttttgacaatggtgccaagaccactcaggagaggggaaaggacaatgttttcaacaagtggtgctatagcaactggatatccacatgcaaaagaacggagctggacccactacctcataccatgtacaaaaattaactcaatatgtatcaaagacttaaatgtaaaagctaaaaatataaaactgttagaagaaaacatagggataaatcttcatgccctcagattagataatgg

SEQ ID NO: 636910 - DNA, 466 bp, Homo sapiens
taagcatgcatcttgtcttttgggggactgtccggggaagtcacctctttggtcactcctcttttctcacctctccaagttactgcccagtgacctcactgctgggacacttccaaaggcatggcctttcaccctgatttacctggccctagggagatctttctctaggaagcaagagcacttacggggtgggggaacccagtgatggaaaargtggggagagatgggtccaatagagccatcttcagtctccggaaaaccttgctgggagactagaaaatccctgctggcccctcgggtccccacattctcaacttccccaacactggcttccccattcctagaaagcaccaactctcagtagacttgggccacctcgggctctcccccagctctgctgggtcagtgcctgctcttattttaaaccttgaattgttacctcctctgaaaacccttctcagagccc

SEQ ID NO: 636911 - DNA, 466 bp, Homo sapiens
taagcatgcatcttgtcttttgggggactgtccggggaagtcacctctttggtcactcctcttttctcacctctccaagttactgcccagtgacctcactgctgggacacttccaaaggcatggcctttcaccctgatttacctggccctagggagatctttctctaggaagcaagagcacttacggggtgggggaacccagtgatggaaaaggtggggagagatgggtccaatagagccatcttcagtctccggaaaaccttgytgggagactagaaaatccctgctggcccctcgggtccccacattctcaacttccccaacactggcttccccattcctagaaagcaccaactctcagtagacttgggccacctcgggctctcccccagctctgctgggtcagtgcctgctcttattttaaaccttgaattgttacctcctctgaaaacccttctcagagccc

SEQ ID NO: 636912 - DNA, 520 bp, Homo sapiens
cccaagatggaagccatagtcctttayaaccaaatctcagaaatgacatcatcacctccatcacatgctactggtcacacaaaccaaccctggtgcaaaatgagagagaactacaagaggtgtggacccaagagggaggatggttagggtcatgctgaaggctggctgccatgggggtacaatttgggtgggaaaattcttctctgtgtttggcatccttggtcttgccctctgaatgccagtagctcccaccagtcattctacagctaacagctcctccctgatcccctttccctgacacacacacatttccaaaagcttcttagggttgcttcttatcacagaaccattggccccatctcctcattttattgacaagcaaatggttttggcaataacacggaagacatcgttcacacagtggaacagaacaactgtgaattgtaggtccctccgtgtgggattcacagcccatttctcactagctgttgcaatgtgggcaagttctttctcatccttc

SEQ ID NO: 636913 - DNA, 584 bp, Homo sapiens
tcagctgcagcccctttgacataaaatatctccacctctgctcagatccatctgctcagacacttgggcacatgaccaacattttttagcattcaggggctgtgacgtgtgcaagtccagaagaggaaccaatgggtagagattcccaaaagggatgtttccaacaaccagatgtaggcaagagaatgggcaccttcaagagagaggggctccttggttacagggaagagccaggcaggggctrgacaactacccacaggaagggaggaccagggcccttacatatattattttacctaatcatggcaatggttctgtgggaaaaaaagtactctattaagcccattttactgatgagaaaacaggcttagagaggatgcagcacttgccacaggttatgcagctggtaatttggaccttggtctgactctgacttcaaagttcatactctttccccattagtgttctatctacatctaacattaaggtgaccaatgatcccagtatgcccaggactgaggtggagaggaggttcttaggagatgggactttcagtgctaaaacctgagtcctgggagaaccag

SEQ ID NO: 636914 - DNA, 489 bp, Homo sapiens
agtataatgttccccaattaactaggcttttaaaaaaatgtctggtcaaaatacttctctataacataaaatatctcggtggaaccccgtctctactaaatatacaaaaaattagccgcgcgtggtggcgggcgcctgtattcccagctacttgggaggctgaggcaggagaatggcgtgtacccagggggcggagcttgcagtgagcctagatcgtgccactgcactccagcctgggcaacacagcaagactccgtctcaaaaaaataaaaataaaaataaaataaataaaataaaatatctcaaaaaacataacttgtatcttgaaatcctactatacatcaaaggataatccagtttctgaatgtagggygatatttgcaagtcacgtgaatgcaagacaattctatcattgcccccaccaaataaatgccagtaataaataaatcatcgtgaggtgctgaccaaacaccaaactgcagactataa

SEQ ID NO: 636915 - DNA, 546 bp, Homo sapiens
tccccactcaaggccttcttcctaaaaaaccatgaggtccgtttcttagagaagatctgtataaatgggtcaccttacagagataccattttatgattacttgtattaagcatcctaggttgcaaacttaaacaataagttgaaaattatggacatttggacatcagtctttgcagggrgcaaggtggggaacaaagttgggggcacacaatataattggatatacattccgttggtaacacaaaaactatctggaatggtgagcgaggaggtgagaacatctaggactgaaggcagaagcaggaagccaactctgaaaagaaatacatggcaaacttcaaggggccatcatatggattatgtgggtcatgaaggggcaggaccccgggctggtggtttgaatccagcacagaggtaacttctgaccacagaaactggttagaataggatggtggcacatcggaattacctcttgtatcatatcactgatgattttttcccattatttttgtgttgcttttccccctcagttatttttttggcagg

SEQ ID NO: 636916 - DNA, 588 bp, Homo sapiens
gtcttatgaagatgtgcttttttttttttcttttcttgagacccagtctacctctgtcacccaggctggagtgcagcctgatttctgctcactgcaacctctgcctcctgggttcaagtgattctcctgcttcagcctcctgagtagctgggatgacaggtgcccaccaccatgcctggctaatttttgtatttttagtagagatgggttttgaccatgttggtcaggctgatcttgaactcctgacctccagaaattcacctgccacaacctcccaaartgctgggattataagcgtgagccaccgtgtgccactgcactggggtgagaggtgcttttgatacctcttccctatttctgccaggtttaaatgtattccagagttcagtcctgcctcctaccctgcttccacgtttattgcagcactattcacaatagcaaagatatggtgtcaacctagtgtccatcagtgggtgaatagataaagaaaatatggtatatatacacaatggaatattattcctacataaaaaagaatgaagtccttccatttgcaacaaatgcttggaactggaggtcattatgtta

SEQ ID NO: 636917 - DNA, 613 bp, Homo sapiens
atatttttaaaacaaacatgctcctactttcatttgaattaatttgcaaagaaatctccagcatactacatcagtttagcctcagtattggactagatcacatttaattccaaaactgtgatatatatsagtcatatacttagtattgagattctgttgtaaaaagatacactctcatggcttactcaagaaaatcttcacctgaacagatttggaattaaagtgagcatttgctaacaattagaccaaaccaagatctatttattcatttttttctaactcatgttctttgttttccacaaatactgctaagcacttgttatacttgagtcgccacactgtgttctggaattaaaaacgataaatgatgagaacagcatgaaggtatttctacagtaagtgacagaagtttagaaaaagaactaggaacatgagaaattaaatgaaaaaatgtatatataaactggcttttgaagaaaccaaagagaaataaaagcaaaaggaaaaggcaagtctttccgagcaagacaatcttcagatttaggggtgcaaatgatgaggacaaacaatctaattttatgagaatagagaggaagacagaattattccccaa

SEQ ID NO: 636918 - DNA, 613 bp, Homo sapiens
atatttttaaaacaaacatgctcctactttcatttgaattaatttgcaaagaaatctccagcatactacatcagtttagcctcagtattggactagatcacatttaattccaaaactgtgatatatatgagtcatatacttagtattgagattctgttgtaaaaagatacactctcatggcttactcaagaaaatcttcacctgaacagatttggaattaaagtgagcatttgctaacaattagaccaaaccaagatctatttattcatttttttctaactcatrttctttgttttccacaaatactgctaagcacttgttatacttgagtcgccacactgtgttctggaattaaaaacgataaatgatgagaacagcatgaaggtatttctacagtaagtgacagaagtttagaaaaagaactaggaacatgagaaattaaatgaaaaaatgtatatataaactggcttttgaagaaaccaaagagaaataaaagcaaaaggaaaaggcaagtctttccgagcaagacaatcttcagatttaggggtgcaaatgatgaggacaaacaatctaattttatgagaatagagaggaagacagaattattccccaa

SEQ ID NO: 636919 - DNA, 374 bp, Homo sapiens
tttctcactttaaaaaaaagaggaaggatgccacagccaaagaatgtgagtggtctctaaatgctagtaagctcatggaaacagacttcctccagagcttccagcaaggaaaggcacctggctgacacctacattttaactcagtgagattgttgtcagacttctgaccaacagacttgtaaggtaaatatgtgtggttttaagtcacaaartttgtagcaatttgtagaaatttgtagcagcaatacaaaattgatgattactagaggaggggatgtggatggggaacagagagagattgatctaagagtacaaagttttggttagacaaaagatagaagattcagtaatgtattggtgagtggtaactataa

SEQ ID NO: 636920 - DNA, 564 bp, Homo sapiens
aaacatccaaacttgacattatagaacatatctccacttatgagagataagctctacagacacaagttatgatttataatgtattttgaagtacctagtcctgacattatttttgtttttttttttttgttttgaaacagggtcttgttcattacccaggctggagagcagtggaatgatcatagcccactataatctagaattcctgggatcaagcagtcctccctcctcggcctcctcggtagctggtactataygtgtgcatcacaatgcctggctaaattttttatttttattttttagtagagacaaggccttgctatattgcctaggctggtcttggactcctgggctcatgatcctctctgcccagcttcccaaactgttgggattataggcatgaaccaccctacccagcccctggacatgattcaaaagaacaaatattaaatatcaaattctccattcacatgtcacacaataaggctccaaaaagaattatatctaaaagcttgagggaaagatgatagaacaatgctactttatctacacaatcaatcaaat

SEQ ID NO: 636921 - DNA, 579 bp, Homo sapiens
acctcactaaatgtttcttcttcatctgttttccttgctccttctcttctttctgattttaaagatagrcagaaccagggaccagtcattgcaacttctctatacatattttctaaatacattcaatttcacagctttgaatatagcctctttgctgatgattcccaagtagatatccaaggccctaccttgtccgtgaatttcagaccaatgtgttcaattctatctaatatccctattagggtgcttttagaaacttctatattaagaaattgctaacgttctgaatatttgtgttgtcttaaaattcatatgttgaaattcttattccaaaggtgacagtattaagtcttatggccttttgggaggtgagtaggtcaagaggaaagacccctcaggagtggggttagtgcctttataaactaggcccagggggcttgttcaccccttccaatatgtgaggacacagccaaaaaatgccatctatgagccagaaagatggccttcaatggactccaattttgctggcataccgatcttggacttcccagctccccatctgtggtgttttattataac

SEQ ID NO: 636922 - DNA, 526 bp, Homo sapiens
gtgcttttagaaacttctatattaagaaattgctaacgttctgaatatttgtgttgtcttaaaattcatatgttgaaattcttattccaaaggtgacagtattaagtcttatggccttttgggaggtgagtaggtcaagaggaaagacccctcaggagtggggttagtgcctttataaactaggcccagggggcttgttcamcccttccaatatgtgaggacacagccaaaaaatgccatctatgagccagaaagatggccttcaatggactccaattttgctggcataccgatcttggacttcccagctccccatctgtggtgttttattataacagcctgaatggactaagtccaatatggaactccttgttctccccttgtctgaatcctgctccttaccatggttcccgttttaggaagtagcactatcctttatcaaacttctgagatcaaaaaccttggcatccttagctgctttgttttcttaccactaaacatacacacatatgttctgtgtgtcctg

SEQ ID NO: 636923 - DNA, 652 bp, Homo sapiens
tataacagcctgaatggactaagtccaatatggaactccttgttctccccttgtctgaatcctgctccttaccatggttcccgttttaggaagtagcactatcctttatcaaacttctgagatcaaaaaccttggcatccttagctgctttgttttcttaccactaaacatacacacatatgttctgtgtgtcctgtgagttttgctttcaaaatatatcctcattcacactgcttccaaatactatcatacttctgctaccaccctaatccaaactgccamgctgatgtgtcttgactttgtagtagcctcctacatactgtccaggctatgctcttgcatttctgtggttaactctatactgaccagccagtaagtgcttcttgtattgctgatacaagaactatgagggaagccgcctctccagcatagtttatgtttacatctttgatcatgttacttgtctatggaaactttcctaaaattaagcatttcctcttgtttctgtcgtgacaggggagggttaaaatgaacattttcaaggatttctacttggcccttcccaccataatggcattaaaggtcaagaaaccaatgtggaagttcttctatctgctaatagattcgtagtgattatgtatttggagatgga

SEQ ID NO: 636924 - DNA, 652 bp, Homo sapiens
tataacagcctgaatggactaagtccaatatggaactccttgttctccccttgtctgaatcctgctccttaccatggttcccgttttaggaagtagcactatcctttatcaaacttctgagatcaaaaaccttggcatccttagctgctttgttttcttaccactaaacatacacacatatgttctgtgtgtcctgtgagttttgctttcaaaatatatcctcattcacactgcttccaaatactatcatacttctgctaccaccctaatccaaactgccacgctgatgtgtcttgactttgtagtagcctcctacatactgtccaggctatgctcttgcatttctgtggttaactctatactgaccagccagtaagtgcttcttgtattgctgatacaagaactatgagggaagccgcctctccagcatrgtttatgtttacatctttgatcatgttacttgtctatggaaactttcctaaaattaagcatttcctcttgtttctgtcgtgacaggggagggttaaaatgaacattttcaaggatttctacttggcccttcccaccataatggcattaaaggtcaagaaaccaatgtggaagttcttctatctgctaatagattcgtagtgattatgtatttggagatgga

SEQ ID NO: 636925 - DNA, 425 bp, Homo sapiens
tgcaaacgacgttgagacaaacacagagtttacacttcaacattttggattgctcgtccaggctctatattgtgtaatttactcatttagctgggactttctagtaaggatttttttaagagaattgaagattctaaattcaaaatgttattttaactttaaaaagtaattatatcgttggcatgaacattaaaaaaaacacaagttaatgactaaatacaggctaattaagtctgtttggctatagcaacaactgtcaaaataaatatgaactctgcacacattttgataaagatccacgagatgctctagtttctagagtttcattccacaaacataagatgcaaaaaatttgtcaggaataaattatyatggagagaaaaggtggagaaagatggctgaatagaagccttcagttgtcccct

SEQ ID NO: 636926 - DNA, 535 bp, Homo sapiens
tattgcccattctgaaacaaggtcttatttttcataagtactaagtagacagaacaatatacagtgttatgggttatgtcttgcaaaaagataagctgaagctctaatctctgatacatgtaaatgtgatcccatttagaaatagggtctttgtagatgtactcaggattagatgaggtcatactgaattagacaggctctaatccaataygactgctgtccttataagaaaagaagaaaagacacagacacagagggaagacagccatgtgaaaacacaatttgcagttaacacctgaagttaccagaagattaaagagggaggcaaagaccttcctcctaagaggtttcagaaggagcataatcttgacatcttgattttggacttttaggatccagaattttgaaagaataaatgtccattgttataagccactgagtttattgaactttgttataggaaacctaagaaaagaatatacacagaaaatatcaaaatatagtactgatggcttagatgcataaggggatgacc

SEQ ID NO: 636927 - DNA, 635 bp, Homo sapiens
gtgaatatcaacatagagccaggaattatataaaaaagtgaaaatgtgttgtttatgataaaaggtataaatggaaacacaataaagacagacaaattctgagtccctcaaaagagataaaagcagcaaagagagttaaaaaagactcagaaatttgctttgaaacatgaggcaatgtggaatttttttaaaaacataccattttaaacacaaacatagcacctgatctacaaatattcacactcctcactcaatttacctttaattataaatccattataaggagggagcaggactggctgcaacartttttaggaaacagtacagaattcaggacccttgttcaaaaaccatgaaggatttgaagatggcaacatagcattaaactcaagtgggaccctaagtgcaggcccctctgtgactgactgaacaggctgcacacccatgaagctggaacagtgggaggaagtgagggtaaatataacaactgttcctatttcacataaggatcagaagtgatgaaagtttgaagacttgagtctgatttatatgtagtgtaattcactgccatatcacaagctccttaagctatttcaatggttgactaaacattactttttgaataaatgacttat

SEQ ID NO: 636928 - DNA, 635 bp, Homo sapiens
gtgaatatcaacatagagccaggaattatataaaaaagtgaaaatgtgttgtttatgataaaaggtataaatggaaacacaataaagacagacaaattctgagtccctcaaaagagataaaagcagcaaagagagttaaaaaagactcagaaatttgctttgaaacatgaggcaatgtggaatttttttaaaaacataccattttaaacacaaacatagcacctgatctacaaatattcacactcctcactcaatttacctttaattataaatccattataaggagggagcaggactggctgcaacagtttttaggaaacagtacagaattcaggacccttgttcaaaaaccatgaaggatttsaagatggcaacatagcattaaactcaagtgggaccctaagtgcaggcccctctgtgactgactgaacaggctgcacacccatgaagctggaacagtgggaggaagtgagggtaaatataacaactgttcctatttcacataaggatcagaagtgatgaaagtttgaagacttgagtctgatttatatgtagtgtaattcactgccatatcacaagctccttaagctatttcaatggttgactaaacattactttttgaataaatgacttat

SEQ ID NO: 636929 - DNA, 563 bp, Homo sapiens
atcaaatatgaatgtgaaattataaagatataaaaatgcrttatgcaagcatagctcatgagaccctaccctgtcttggggctagggtgaggcagtcataacacttaaaagactcattcttggtaattgaataaaacatgagcaaagacagagacacaggaactagcggtactataagcactttttatttctattagtgaggaactgggggtaatatgtgagagagtttggtgaatagagagaagggcgatcacacagcaacttacaaggtggctggatttgtttctactggccagtcagtgaggtgtttttgttagatgatcagcttgataatatttcagagagttgacttgccctaggtaggaatttggtgtctggtggcttaggcagcaaccaggaggcatttcaatgatgtaaagattatgagaaccagaagaactgtagaggtattaagggtgaagaagaaaagacagagctgaatagctcttcatatctcataaaaatcattacatagtatttgactctaacagaagcactggggtatatataaaacatagtatcac

SEQ ID NO: 636930 - DNA, 638 bp, Homo sapiens
cactttttaatggggttatatgtttttttgcttgttaagttccttatagattctgaatgttagacatttgtcagatgcagagtttgcaaatattttcccccattctgtgcctgtgcattgtctatttactctgtgatggtttttttttttttgtttgtttgttttttttkgttttttgctgtgcaaaagctctttagtttaattaggccccacttgttaatttttgtttttgttatacttgctttggaggacttcgtcataaactctttgccagggttgatctccagaatagtatttcctaggttatattctaaggttcttacagtttgaggtcttagatttaaatagttaatctatcatttgtaaatttttgtatatggtgtgaggtaggggtccagtttcattcttctgcgtatggctagccagttatcacagcatcatttagtgactgcagagtctttccccattgctttcttttgtcagcttcattgaagatgagatggttgtagatgtgtggctttctttccaggttttctattatgttctattggcctatttttgtatgtgtctgtttctgtaacagtgccatgttgtttgtgtgcacacacacaaatatatatgcagagagagagggacag

SEQ ID NO: 636931 - DNA, 563 bp, Homo sapiens
atcaaatatgaatgtgaaattataaagatataaaaatgcattatgcaagcatagctcatgagaccctaccctgtcttggggctagggtgaggcagtcataacacttaaaagactcattcttggtaattgaataaaacatgagcaaagacagagacacaggaactagcggtactataagcactttttatttctattagtgaggaactgggggtaatatgtgagagagtttggtgaatagagagaagggcgatcacacagcaacttacaaggtggctggatttgtttctactggccartcagtgaggtgtttttgttagatgatcagcttgataatatttcagagagttgacttgccctaggtaggaatttggtgtctggtggcttaggcagcaaccaggaggcatttcaatgatgtaaagattatgagaaccagaagaactgtagaggtattaagggtgaagaagaaaagacagagctgaatagctcttcatatctcataaaaatcattacatagtatttgactctaacagaagcactggggtatatataaaacatagtatcac

SEQ ID NO: 636932 - DNA, 563 bp, Homo sapiens
atcaaatatgaatgtgaaattataaagatataaaaatgcattatgcaagcatagctcatgagaccctaccctgtcttggggctagggtgaggcagtcataacacttaaaagactcattcttggtaattgaataaaacatgagcaaagacagagacacaggaactagcggtactataagcactttttatttctattagtgaggaactgggggtaatatgtgagagagtttggtgaatagagagaagggcgatcacacagcaacttacaaggtggctggatttgtttctactggccagtcagtgaggtgtttttgttagatgatcagcttgataatatttcagagagttgacttgccctaggtaggaatttggtgtctggtggcttaggcagcaaccaggaggcatttcaatgatgtaaagattatgagaaccagaagaactgtagaggtattaagggtgaagaagaaaagacagagctgaatagctcttcatatctcataaaaatcattacatartatttgactctaacagaagcactggggtatatataaaacatagtatcac

SEQ ID NO: 636933 - DNA, 605 bp, Homo sapiens
tgtgagtgagaacacgcaatgtttggttttctgagaatgatggcttccagcttcatccatgtccctgcaaaagacatgaactcattctttttaatggctgcatagtattccatggtgtatatgtgccrcatttattttatccaatctatcattggtggacactctttctttcgtttaaaaagtggaatgtaattctccttcccttcaatatggaacagatttagtgaatcacttctaagcagtagaatgcagccagtattgccgagctggtgaaaggttttgctacagctcccttgctcacttgcagtgcttcctctggggaaagcgagccaccatgtcatgaggacaggaaggaaacccatggagaggactatcttgggagaagctgaagccagacaacaactagcactgtctgttactcatgtgagcgagcctccttggaagcagaatcttcagccacagttaagcgttcagatgactgatgtccccgacaacatcttaaccgcaacctcatggaaaaccttgggccagaatggcacagtggaactgatccaggatttcaaacgtacagaaactgtgaggacaacgtatctttatgttttaag

SEQ ID NO: 636934 - DNA, 629 bp, Homo sapiens
acacagttaataagtgaaagtgaccaatccaaagcctcagccttgtgaatgctggttgattaaattacactgtcttttttttttattgttcacattttgatcctgtttgaacacatatttttaaaagttttataactaccactgaatattatatatggaattagatcatgtgaaattgacaaatgtagatgattattttttctttctatatttagcaaaattcacataacgaagatgccgtttgtaaaagtaagcaaaatttctaatgcattttaagaaattaagacatccagtttcaagaaatcatttgtgttcttgtgttgtactctttactagcacactttttaaatttataaccatggcactagaatcagtcgcagatgttactgggtagaatattaagataacttttgctaaagtgtcacagataaggtgatcactatttacttcttctgacttctctctatttattcaggttaccttactaaagtgcatttgctaggttctgtttttgatatatgtccgtactcagagttggtctcacarcttgctggaaaacatgaggcaattactcaaacattgtcgggaagccaacgagcaatgcattttccatgaaaactgcagatgtg

SEQ ID NO: 636935 - DNA, 539 bp, Homo sapiens
atggtacatttaccacaattaaagagccaacattggtacattagtgttaaccatatttgttactgtattcagatatcctcaagtttgtmcctaaagtctattttctgttcagaatcccttccaaggaccacacttcatttagttgtcatgtctccttgctctcctctagtctgtgagtgtttctcagatttttcttgcttttgttagccttagcaattttgacaagtagtggccaggaattgtgtacaatgactctcagtttggctttgtttagtgtttttctcatggtcaaatagaggttatgtgtttttgggaaaaaaaaaaagagcacaaggggtaaagggccattctcttcacataataacatgggttcatattataaataagattcatcattaaccttgatcacctggctgaggcagtgtgtagcggtcttcattgtaaagttacttttttccctctgtttccttctctactatttggaagcagagaaatctttttttttttttaacgttcttttttatgaattgatgaaaggt

SEQ ID NO: 636936 - DNA, 539 bp, Homo sapiens
atggtacatttaccacaattaaagagccaacattggtacattagtgttaaccatatttgttactgtattcagatatcctcaagtttgtacctaaagtctattttctgttcagaatcccttccaaggaccacacttcatttagttgtcatgtctccttgctctcctctagtctgtgagtgtttctcagatttttcttgcttttgttagccttagcaattttgacaagtagtggccaggaattktgtacaatgactctcagtttggctttgtttagtgtttttctcatggtcaaatagaggttatgtgtttttgggaaaaaaaaaaagagcacaaggggtaaagggccattctcttcacataataacatgggttcatattataaataagattcatcattaaccttgatcacctggctgaggcagtgtgtagcggtcttcattgtaaagttacttttttccctctgtttccttctctactatttggaagcagagaaatctttttttttttttaacgttcttttttatgaattgatgaaaggt

SEQ ID NO: 636937 - DNA, 539 bp, Homo sapiens
atggtacatttaccacaattaaagagccaacattggtacattagtgttaaccatatttgttactgtattcagatatcctcaagtttgtacctaaagtctattttctgttcagaatcccttccaaggaccacacttcatttagttgtcatgtctccttgctctcctctagtctgtgagtgtttctcagatttttcttgcttttgttagccttagcaattttgacaagtagtggccaggaattgtgtacaatgactctcartttggctttgtttagtgtttttctcatggtcaaatagaggttatgtgtttttgggaaaaaaaaaaagagcacaaggggtaaagggccattctcttcacataataacatgggttcatattataaataagattcatcattaaccttgatcacctggctgaggcagtgtgtagcggtcttcattgtaaagttacttttttccctctgtttccttctctactatttggaagcagagaaatctttttttttttttaacgttcttttttatgaattgatgaaaggt

SEQ ID NO: 636938 - DNA, 470 bp, Homo sapiens
ttgacaactgaccatggactatctctggctggtttacagaggctgcacacaagatgcctctgtgttctccatttcattttttgacatgtagggtctaattttaatgcatttaactgttaagtttctaccttatcatgaacatgggacatatgtaacatgcatgtttgcaaatttacagttgactcttttcctcccctttcctgtctccccttttgctcctctttccatctctactccaccytcttctacagcccctggggcaccctcccttctcctcccaaatacccagatccctctcaactgcccctttaacctctgactccgcaggtgtgtcccctcaacccccttcaggattatgcaaggcaatggtaatggtactaggttatagtttgttctctgggaaaaacctgagctcctggctctcccaaaggattctcccaatccctgattaaacttcttagaatttgcta

SEQ ID NO: 636939 - DNA, 544 bp, Homo sapiens
ttatttaatgtgtgtttcttgtaaacaatgtataattgacactgaaacctcggtataaaaatatttgcattgtagttggagattttagcacatttacatctaatgtaattattgatagagttgggttatatcttgctatttgctttcttttaagatttgttctatgtgcttcctttttgcctttatttcaactttcctacctgattttgtatttatcatcttttttattattccattttgtcacccttagtagcctttcgttttacttatatactgttaaatgattttctcaataatttagcakaaggattcaaataaacattgctgtggtttgctttgttctggacaaaacttgtgttaaaatttcatctccaacatggcagtgctgggaggggcagcctcatgggaagtatttgggtcacaggggtggatccatcattaataaattaatgccctctatagggttgactgagctctccctctcataggaatggattagttcctgcaagagtgcgttgttaaaaagaatccagcttccctggtt

SEQ ID NO: 636940 - DNA, 544 bp, Homo sapiens
ttatttaatgtgtgtttcttgtaaacaatgtataattgacactgaaacctcggtataaaaatatttgcattgtagttggagattttagcacatttacatctaatgtaattattgatagagttgggttatatcttgctatttgctttcttttaagatttgttctatgtgcttcctttttgcctttatttcaactttcctacctgattttgtatttatcatcttttttattattccattttgtcacccttagtagcctttcgttttacttatatactgttaaatgattttctcaataatttagcataaggattcaaataaacattgctgtggtttgctttgttctggacaaaacttgtgttaaaatttcatctccaacatggcagtgctgggaggggcagcctcrtgggaagtatttgggtcacaggggtggatccatcattaataaattaatgccctctatagggttgactgagctctccctctcataggaatggattagttcctgcaagagtgcgttgttaaaaagaatccagcttccctggtt

SEQ ID NO: 636941 - DNA, 619 bp, Homo sapiens
atgctgcactcgttcctcttatctattaggatatattatatttcatagtagttttgacataattgaatcttatataaataaagattataaaatccttataaccagtgttttgtgttgtttgtcttcatttccataacatctaatatgaactttacacatacataatagctgcataataggaaagttttaattcctaaatattgaaatgataatctatgatgtctgagtagtttattcaggtaaaaatcagaataaaamttatacatgaatattacaaaatattttcaatgttatgtgagtggggtgctgcactcaaacaaaagttaagatacaggaagttattattgccccccaaagcataagctgtgggcagtatatgtccagtgccttaaaaactataaagggaaaatgagttctcaccttttgctcaggtgataaaaaatatcatcatcccaggtgctctttcttaaatcaataaatataaattttcaaggtgaggctgtcacaatgcatggatgtcaacttaacaagagccaagcctatgaattactaatgtaagatacagcccctggtattatgggagcagatccctgcaccaaatggattgcctttcactggg

SEQ ID NO: 636942 - DNA, 251 bp, Homo sapiens
aataattctcagtaaggagaaaaataaagtttaatttgataaacttagagaagaaagattcaagaaagcttcagcagtagaaggctttstattcaaaatacactggtgaagtttttttttttttgtcacagcacagagagaaacattatgagaattgagggaaaaaaatctaataatatttctataccagcaggataaaagcaaaaggaaacaaaatgatagagtctatactgaaattttcccgttgtaaa

SEQ ID NO: 636943 - DNA, 626 bp, Homo sapiens
ctgagcaacatagtaagactctgtctctacaaaaacaaaaataaaaataaacaaaataatcctaaagaatgaaagcttgaattaaatgtggttggcaatagagcaaaggaagatactgcctggttgtaaatttctatttatatgtacagttttaaacacatctatatacacaaacatttttgtgtagaatactggtagataaaacttaaattaggatatttctcttcctcaattaaaacccacattcacctaatcatagtaacaaaaaagcataaagtaactatctgtttttcacaaaattgtatgctgtaagctctacatctggctacagaatttagttcacaaatactttagattatttcaatacttatcagtagcctttctgaagtacatagatattggtcttttatttcctttataacatttacattaaaatcttacacacaatcttatttagcttttcagtttgattcagacttacctggatatgaaatatgtttaatacaattatggggctgaggagccttgggcaaaatggyggatactagagcctctttaggccgtctctgggcatctgaggtgatgctgttgcagcagggtccacatagtagaggcagagttaggtg

SEQ ID NO: 636944 - DNA, 316 bp, Homo sapiens
aagcattcctaattgaaagtaatggggtaaactaaatgtcctatttgatttgctctctaacttattcaacrtaaaaatttatactgctgagctagccttaaatttcatggaaatactttcttttaattaatcttttaattaatcttatcacctgttggatttgggccttgactcaggctgtaaaaataccaagatttttgcccacttgatgtacattttcgtatttccagtggctttttcctccaactcatttccgttgctctggttgacctttgcagaggggcaggcagcaagtacatatgtgccatttcataaa

SEQ ID NO: 636945 - DNA, 572 bp, Homo sapiens
agctttgtatcacatcattactgataatttaattaaaatatgttaaataatattatccccttctaataaaagttatttgaacagttggagtgataaaataaaatattattagcttataccatgaaatacaacatatgtatccatgagccatattaatataaakaaattgttgaatacataaattaaaaaaggaggaggttattaatttcccatttagaagaatttcaaatactttatgtagatactctaatcccttaagaaggagcatgacttctcatttcttaagtatgcactgggaatagtgacttccttccaaagagttcagcaaggcagggccagaggaagagtaactttgcagtgcagaaatctgacaaacgttgccttaaccatgtggtcaaggtcaacatcaacaatggtaaatcatgtgaatagtatgtacccttgatatgatgtgataaaaatggcattttatccatgtggtcttcctcccaaaataggtaaccctagtctaatcctgagcaaaatctcagacaagttccaataaaagggcatcctgcaaaacacctgaccag

SEQ ID NO: 636946 - DNA, 626 bp, Homo sapiens
ggatatagaaattgatatgttattactcacataggtgaccctgaagaaatattctatcaatgccattgtttgggaagtgcatttttctatgactttaaaatagtacatttgtaattataaataatatgattataactaaagatgggcttatacctccagaatatctaatctaatttatctaattaaaataattttatataacatctgactctcacagatgtagctttgtatcacatcattactgataatttaattaaaatatgttaaataatattatccccttctaataaaagttatttgaacagttggagtgataaaataaaatattattagcttataccatgaaatacaacatatgtatccatgagccatattaatataaagamattgttgaatacataaattaaaaaaggaggaggttattaatttcccatttagaagaatttcaaatactttatgtagatactctaatcccttaagaaggagcatgacttctcatttcttaagtatgcactgggaatagtgacttccttccaaagagttcagcaaggcagggccagaggaagagtaactttgcagtgcagaaatctgacaaacgttgccttaaccatgtggtcaaggtcaac

SEQ ID NO: 636947 - DNA, 572 bp, Homo sapiens
agctttgtatcacatcattactgataatttaattaaaatatgttaaataatattatccccttctaataaaagttatttgaacagttggagtgataaaataaaatattattagcttataccatgaaatacaacatatgtatccatgagccatattaatataaagaaattgttgaatacataaattaaaaaaggaggaggttattaatttcccatttagaagaatttcaaatactttatgtagatactctaatcccttaagaaggagcatgacttctcatttcttaagtatgcrctgggaatagtgacttccttccaaagagttcagcaaggcagggccagaggaagagtaactttgcagtgcagaaatctgacaaacgttgccttaaccatgtggtcaaggtcaacatcaacaatggtaaatcatgtgaatagtatgtacccttgatatgatgtgataaaaatggcattttatccatgtggtcttcctcccaaaataggtaaccctagtctaatcctgagcaaaatctcagacaagttccaataaaagggcatcctgcaaaacacctgaccag

SEQ ID NO: 636948 - DNA, 571 bp, Homo sapiens
cccaaaataggtaaccctagtctaatcctgagcaaaatctcagacaagttccaataaaagggcatcctgcaaaacacctgaccagtactcctcatagctttcaaaatgaccacaaccaagaaaacctgagaaactgtcacagccaagaggagcctaaggagccaagaggactaaatgtcatgcatactggatgaaatactggaacagaagaagatcattggttaaaaatgaaagacatctgaataaaacatggactttagttaataaaaatgcatcagtattacttggttaattgtagcagatgtaccatactaaccaagaagatgttaataataggaaactgaatgcactatccatttgatttttctgtaaatctcaaactgatatacaattaaagacaatttaaaatatatatatattttttaaaatttcttacatattaaatttttwaaagtcatttgaacacttgacttggttcaaattaagatattaatgaactaagtaaacattttcaaaactctgttgaagaaactaatgaattcatgaaactgctaatcaaatcaagtaaaac

SEQ ID NO: 636949 - DNA, 649 bp, Homo sapiens
cacatccagggacttttcaactgcaaaccaggacaagacgttcagaacttcatgctgtgggcaacgttctccgagatgttggaacaagactgcatatcatgaataagccaatcataacaaagtggataaagaaaatgtggtgtatatacaccatggaatactatgcagccatagaaaagaatgagatcatgtcttttgcgggaacatggatggagctggaggctattattcttaacaaactaatgcagaaacagaaaaccaaataccacatagtcttacttataagtgggagctaaatgataagaacatatgaacacaaagaaggaaacaacagacactgggtctagttgagggcggagggtgggaggagggagagaagcagaaaagagaactcttaggtactgagcttaatacccaggtgatgaagaaatttgtaaatgaacacccttgacacatgtttatctatgtaacaaaccttcatatgtacccttgaacctaaaatgagttaaaaaagaaaaacataaaaacagactccatattataataaaacgattacctttcttaatgcctacatkttcacctgaagaaaggtagtagtaaaatttcacaggtgtagatgtaggtatagtaaaatttcacagtcagcagc

SEQ ID NO: 636950 - DNA, 599 bp, Homo sapiens
aggttaagaagggagggctctcacacacatgcctatggtagactctctgaagagctcttatgcctatgtgcctgtgacaacaacttttgccaagcacttttcaaactgtagcttgctgcaggagtcacaaggacagctagctggatgcttaagagccattgcttgacattgtctctactratgaactggcatcacctcctgtgataagcccttgtaacccatgttctttttgtcacaaaacaacttatgtgcacttctcctttggccttttttatttttattttattttatttttagaggcagtcttgctgggtcacccaggctgcagtggaggggcgagatcatcttttccctttctgcaaactttttgaatatgtgtgtggtccctatagcctacataccccagatttgctaaccctcgtgactcccaaataaattcaatatctttggaaaattcatctctgttattgaggttgatgccactaaaatatctaaagaaaaatcatgtaattcatgaaatcaaactttcagtgtcatgtatttgttttttgttttcaactgataataattttgagcttcctgatttctcagggatgaaa

SEQ ID NO: 636951 - DNA, 539 bp, Homo sapiens
aaactagaaaaatataccttttgatatttgaagggaaaactacatggggaggggaggaatgctaagtgctttatgatagaataatgcaaatawtcaaaattaattcatgaaagcaagcagttttacaatgcaagtcataaaaactgtacttgatgaacagtacttgttcagaattaatgttcacatttttgcaaagttgtgtctgtcatttagattgaggtgatttcactttagatttgccagttcacttaacctcatgattctcttctacaatgttttgccatttttcaaattttcaatttctatagtgctcgttggcagcaatgattcactgcctagaaaaagtgccggaatacatgatattatatccctaaatccttatattacttaatatttctctttgttattttccattgcctacaaactttaaactttgattactgtagatttgcagtatatttagatgtcagatagtctgatacatccagcttagttctttttgcttaagattgttttggatattcagggtcttttctggt

SEQ ID NO: 636952 - DNA, 609 bp, Homo sapiens
tttattgctataaacttcccttttataattgcttttgctgcatcccaaaggttttttgtatgttgtgtgtccattttcatttgtctcaatatatttttaaatttccctttgaatttcttsttttgaaccattggttgcttaggagaattcagtcaaatttccatgtatttttgaattctccaaaattctagtttattgatttctaatttcataccactgtggtcagaaaaggtacttaagctaaaggccaatgcctgtcctagacatccatcaatttactatccaggtattattgcttctaggcatttcagtagagtaagcaaggaaatatgtgagtgtgggctaatttacatatgtgtgtattatatatctatcaatctatccattctattaatatctatctatcatctatctatcgctatgaattcatattgatgcttcttatttcaatgtaatatcacagatatctttttggttttcctctttgcttatttgtaacttctttctcccaccaataaattatattttgaatccttatatacacataaaatatatttactaattagctttcagcatttatgcaaagctcttgttgtctttagccttacc

SEQ ID NO: 636953 - DNA, 609 bp, Homo sapiens
tttattgctataaacttcccttttataattgcttttgctgcatcccaaaggttttttgtatgttgtgtgtccattttcatttgtctcaatatatttttaaatttccctttgaatttcttcttttgaaccattggttgcttaggagaattcagtcaaatttccatgtatttttgaattctccaaaattctagtttattgatttctaatttcataccactgtggtcagaaaaggtacttaagctaaaggccaatgcctgtcctagacatccatcaatttactatccaggtattattgcttctaggcatttcagtagagtaagcaaggaaatatgtgagtgtgggctaatttacatatgtgtgtattatatatctatcaatctatccattctattaatatctatctatcatctatctatcgctatgaattcatattgatgcttsttatttcaatgtaatatcacagatatctttttggttttcctctttgcttatttgtaacttctttctcccaccaataaattatattttgaatccttatatacacataaaatatatttactaattagctttcagcatttatgcaaagctcttgttgtctttagccttacc

SEQ ID NO: 636954 - DNA, 562 bp, Homo sapiens
aagcaaggaaatatgtgagtgtgggctaatttacatatgtgtgtattatatatctatcaatctatccattctattaatatctatctatcatctatctatcgctatgaattcatattgatgcttcttatttcaatgtaatatcacagatatctttttggttttcctctttgcttatttgtaacttctttctcccaccaataaattatattttgaatccttatatacacataaaatatatttactaattagctttcagcatttatgcaaagctcttgttgtctttagccttaccctatctagtcaaggtcctgtttcaaaacgttacataggtcatttctttcctcatttatccctttcagcatttttatttaatacattttcaatagagttgtttacttcttagagattgtattattttttgggggcggtctstggcaaatcctgcttggtttgtgtgtgtgtgtacatatataattttattatatattattatatataaatataatttttaaaaattatgtggtctttcttgctcaggctcatattgtatcacacacaatgt

SEQ ID NO: 636955 - DNA, 579 bp, Homo sapiens
acccatctcaccagaatagtgacttctattccgagtagatacatttgggggtgtgtwcattcatgggtgattcttttctttttctttaaatatctttggaaatttatcttttcagaaaactctagttccatgtaatttttttttttttcttgagatgaagtcttgccctcgttacccaggctggagtgcaattgcacaatcttagctcactgcagcctctgcctcctgggatcaaaggattctcctgcctcagtgtctggagtagctgggactacaggtgcccaccatcattcctggctaattttttttttcagtagatatgaaatttctaatacattccaggctggccttgaacttctgacctcaggtgatccaccccgcttagcctcccaaagtgctgggattacaggcatgagccactgcaccgggcctcctgtaattttaagagaggaaaaacaaacaaacgaacaaccactccaaccaaaaaaatcatctggcactcaagctaacttactaaggaaactctttcttaaattcacctctgtaaacacacaatgaaagatgtgcaaatatggtaat

SEQ ID NO: 636956 - DNA, 579 bp, Homo sapiens
acccatctcaccagaatagtgacttctattccgagtagatacatttgggggtgtgttcattcatgggtgattcttttctttttctttaaatatctttgraaatttatcttttcagaaaactctagttccatgtaatttttttttttttcttgagatgaagtcttgccctcgttacccaggctggagtgcaattgcacaatcttagctcactgcagcctctgcctcctgggatcaaaggattctcctgcctcagtgtctggagtagctgggactacaggtgcccaccatcattcctggctaattttttttttcagtagatatgaaatttctaatacattccaggctggccttgaacttctgacctcaggtgatccaccccgcttagcctcccaaagtgctgggattacaggcatgagccactgcaccgggcctcctgtaattttaagagaggaaaaacaaacaaacgaacaaccactccaaccaaaaaaatcatctggcactcaagctaacttactaaggaaactctttcttaaattcacctctgtaaacacacaatgaaagatgtgcaaatatggtaat

SEQ ID NO: 636957 - DNA, 602 bp, Homo sapiens
tttttcacataaacaaccaaactgtttcatttttacccaaaatagcagcaatgcagtttaggattctgccctaaggttatataaaattcctagtcttgtactccaaagttgtccactgtcaacttgatggattttctctctcctaggacattatccttctctgctaaatttataatgtcaggtaggaagtgacaagtcctttatgcatggaagaagacggaaactaaaccttacgaagacctattacatttctaaaatttctgggcctccagtggtgtaaggcacacagggacatatcgtcattaatgtgaagaacatagtcctgttacttacccatcataccccttggaaggtggtagaaggatcagtgtaactttttggattttaacaacttataaacgccatatgaatgaccttctgcaactcatttatcatatagccagaaaagttgcttactccaataaagagagatctttatagtttcaayagtgcttgaagtgtctgaagcagaggtgggtacaatttgaggcctgtaacaaaactagcaggagaatttcaagaaagatctcttggaggatttagagcaaagccatgttttcttt

SEQ ID NO: 636958 - DNA, 526 bp, Homo sapiens
tatcttcatccatttattcatgtggtaacagtaattaaacacctaatattttcacggtgtcagtattaggggtactggggtctaggccttgggttgacatcaagaaatagaaagaatagtagagtaggcaactataacagactacattaaattaaaataaattgraagcaacagagataccaagagtcataaaggcgttctagaggaaaaaaaaatagttctaatatggcatatggaaattatagaagggggaatttcattttaatgctgtaagctttggataattgaagacaaggcaatatgtattctagacatttacatgtgagggaatagtttaaactgagttattaaaaaaggaaaagtatatggtgcattcagaatataatgtagttggacaagtctagaatataaagtatattgataggatgaagaatgaggtgaaacgtcttcagacatagtttgggaaccatgtgcagaattggaattttattgtatttgtacaatggtgaatcaatattttcttaac

SEQ ID NO: 636959 - DNA, 643 bp, Homo sapiens
ctgttttctgaattatgattgtggcaaaccatttatctggtaacttcgcagaacacagtagccttattgaactgcaggcatgaggccaaatggatcctttgaataagaacgtgtaatctaggagtgtaaaattttccaatgataagactcattggttttgaagaagcctttgggactagataagaattcagggaaaggttagcatagttcctctcaacaccgtttatatggtggattgttaaatatgtatgtttcctgtagtggtacattagaaatatttaattatatgataaatatgtgagtaggaaagaagctaggttcacagtgagccacatctaggccagctaaagaggatggcaatgaaaaatatctgtagtcaatgggtgtctaaaaatcgaatttaagagggaattgtttctgagcaaagaatgatacctgcaattagaacagatttcttcttccccgcaccttgctccccttcatacaactttggcataaccaygttcctcaaggttgtgatttttatggaagaataaaagagactgtatgacagagatatcttcaatctcaatctgaacctgtcataaccacaatccatttcactacaaaatctagaatgtttacaatactcttcaggaaacta

SEQ ID NO: 636960 - DNA, 584 bp, Homo sapiens
tgagtgttatttttggactctgtattatgattcatcagcctatttgtctactggcatgttggtgtaacgtttcttttacaatattaatatttcaataggttctgatatctaggttggcaaaaaatgtccccacaacatctttgaattcattcttctcctggatattccttgattttcacacctttcagtacaacrtacgatgatggagttgctcagtttataaaaaccaaacaacacaaaacatagtcatccctgacttctcccttttgcttacaatcaacataccttccataaactgcacctgttggctttaccctgaaaacattttcttaaactactctcactcttctattacgaaaactctaagccacaatcatctcttgcttgaattgctcaaggaccttctcattgcttctctcctttcactgttgcccctcagccattcattccccatcctaaaacataatatgccttaatatgtataacacaccaagccagtctcttgcccctgccctcaccatcaaattccttcctatcacatgtggaatgaaagtcaaagtcctcatcagtttacacaggccttg

SEQ ID NO: 636961 - DNA, 604 bp, Homo sapiens
atatctctcccacaacatgaagatgctaggctcaggacaagggtgagacacagacacagatggttgagaagctatctgtcactgtggttcttctgcccttggcagggtatatcctgagaaaatgaggaaagaaacaagacaggaggcctcacaaagtttggggtctttaggggttggaaagaactgatctctttccaggagctcacagacaccctggcttcctgaaatcctgcaatggcaaggaatggatcctgtatattttacacaggtaccatggaaagtgtagaaatcaactgggtagctgagctgacagcccacatggctatcttttggaactcctaccagacctgagagatcagcagccatgggatcacacgctccatgttgttgaattcgaagcaagtgtgctagcagcttccasccagaagccaacaactatgaagacaggagtagctgaggcaaggggaagaataaggggaaaagtacacttagaaagtgtacgtcaaacctggggtccatttccaaatgagcttgtgtaaacttcttctggaaatagaacctgtgtgtggaagttgggcagtgtgaccaggagcacaaagaagga

SEQ ID NO: 636962 - DNA, 584 bp, Homo sapiens
tgagtgttatttttggactctgtattatgattcatcagcctatttgtctactggcatgttggtgtaacgtttcttttacaatattaatatttcaataggttctgatatctaggttggcaaaaaatgtccccacaacatctttgaattcattcttctcctggatattccttgattttcacacctttcagtacaacatacgatgatggagttgctcagtttataaaaaccaaacaacacaaaacatagtcatccctgacttctcccttttgcttacaatcaacataccttccataaactgcacctgttggctttaccctgaaaayattttcttaaactactctcactcttctattacgaaaactctaagccacaatcatctcttgcttgaattgctcaaggaccttctcattgcttctctcctttcactgttgcccctcagccattcattccccatcctaaaacataatatgccttaatatgtataacacaccaagccagtctcttgcccctgccctcaccatcaaattccttcctatcacatgtggaatgaaagtcaaagtcctcatcagtttacacaggccttg

SEQ ID NO: 636963 - DNA, 517 bp, Homo sapiens
acaaaacatagtcatccctgacttctcccttttgcttacaatcaacataccttccataaactgcacctgttggctttaccctgaaaacattttcttaaactactctcactcttctattacsaaaactctaagccacaatcatctcttgcttgaattgctcaaggaccttctcattgcttctctcctttcactgttgcccctcagccattcattccccatcctaaaacataatatgccttaatatgtataacacaccaagccagtctcttgcccctgccctcaccatcaaattccttcctatcacatgtggaatgaaagtcaaagtcctcatcagtttacacaggccttgcaaagtgtggcatctggctgtattttgcacctctgttcctgacattcttctcctcattttgctttgctgtttttcaaacgcactacatttttacctcgggcattggtactcactgggtataattcttttcctccatgtatttacagagattaatagcttaacacactg

SEQ ID NO: 636964 - DNA, 502 bp, Homo sapiens
tcctagttgttttgttttactgaactttctttgaaactttcacttgtaccttaccatatgaccttcacttactgcaaatatattattttgcctgtttttgtgcctcttttattttctctatagtttgtggcaattaaagtaatactacttggggatttttgtcattttaatcatgatcccaactgcagttgctgaaattatatgtcagtagttgggtataaggtggtcatcaggatgattccaatgtacaatcaaaatgaaaactacaaattacatatttgaaactcccaacaatccctgataacatatatcctcaggtcctgtcttgataaatgcttgcataggttattataactgcctcccactcagcaacatctgaaattcatgctctgcactaagcctgccctcctccccagacttcttactactcacaactttgattttcatggtttgagtaaatgcggwtttacttaaaatacttcacttacagttgattgtgtga

SEQ ID NO: 636965 - DNA, 612 bp, Homo sapiens
agagagggcgttccttggctgtagagaacagccactcaccttgatgaaagtcatgtcaagagagtgatagagttgaatgctgaagaaaggagacacagaaaactgagtatgtgagacagtggaaggctttagagaccaacttgaaccttctcctcttctgaggtcagarcaggacagcttttcgtcagacttctctctcacctgaaagctctagattcatctcaggcttagttcttgtgtcacttggaattatcatttggaattagattttgggggagataaaatatcaaaaaattaaagggatatttgtacaccagattaagataagatcatgggctgctgagaaacaaactgacaactcatttagacaagtggaaataaaatattttaaaaataaatgtaggagttatgatttcaaagaacataagttctacaatatgtgagaaactttgttctcttcaataatcgaagacatgataaattcaacataaaccaaagaaaatggttccaagatacacaatatttgccctctagtcagattactcaaaatatgataaaaatttgatgaaaaacaaattctaattgtcattagtatatcatttcatgcaaaag

SEQ ID NO: 636966 - DNA, 612 bp, Homo sapiens
agagagggcgttccttggctgtagagaacagccactcaccttgatgaaagtcatgtcaagagagtgatagagttgaatgctgaagaaaggagacacagaaaactgagtatgtgagacagtggaaggctttagagaccaacttgaaccttctcctcttctgaggtcagaacaggacagcttttcgtcagacttctctctcacctgaaagctctagattcatctcaggcttagttcttgtgtcacttggaattatcatttggaattagattttgggggagataaaatatcaaaaaattaaagggatatttgtacaccagattaagataagatcatgggctgctgagaaacaaactgacaactcatttagrcaagtggaaataaaatattttaaaaataaatgtaggagttatgatttcaaagaacataagttctacaatatgtgagaaactttgttctcttcaataatcgaagacatgataaattcaacataaaccaaagaaaatggttccaagatacacaatatttgccctctagtcagattactcaaaatatgataaaaatttgatgaaaaacaaattctaattgtcattagtatatcatttcatgcaaaag

SEQ ID NO: 636967 - DNA, 613 bp, Homo sapiens
taagatcatgggctgctgagaaacaaactgacaactcatttagacaagtggaaataaaatattttaaaaataaatgtaggagttatgatttcaaagaacataagttctacaatatgtgagaaactttgttctcttcaataatcgaagacatgataaattcaacataaaccaaagaaaatggttccaagatacacaatatttgcyctctagtcagattactcaaaatatgataaaaatttgatgaaaaacaaattctaattgtcattagtatatcatttcatgcaaaagctatttttgaaagtcttcgaaataagtccatcacattcaactttaagcatgacaaaattcccttttctgagttctgaaatgaactttctatattcatttagtgtttgttgtatggtttcttctttctaattctggaataaccagtcaatttacttcaggataaaattaccctctgtttttaacagaaactcatgcagcataccttgcattcaaagttgcacctctgcaactagtagctcctagtaggactcactaattgattattttaatttgtactacaacaacttctatttcatggagaaaactagaaagttgataattgtga

SEQ ID NO: 636968 - DNA, 619 bp, Homo sapiens
tattttacttattagcgtaggattattttgacagtacagtgagactggatttggttggttcacaggacagaaggacgagctataacatgcctgttttaggatttaattatcatatcaatttttttaaagggaataatgcaacacttttactttgggaattaggcttaagatgaaagacagaagtaaaattactttmgttcttgtaatttagcagtatttcatgctacttattttacatttaagtttctggctttctgcatatttagagacataaggcagcattatcataactacaaagggccatcaaaaggcataaaatcaattgtggggcagtcaggatgacagcaaagaagtagagcattggactcaactttatcccccgagtgacagaatcttatgaaataagcttggagcttaccagcaagtgagatctgctaatcctttaggaactcttatacctgggcaactccaagagcattagcaatcaggaaggggtgcactaaaaatgctagacaaagtcagatagcatatgcacagatctgccaaagctacggaacctttaaaagacatatagttagaaaatagatgaaaacaaaagcttaggaaggagatgattcca

SEQ ID NO: 636969 - DNA, 627 bp, Homo sapiens
gagacttctcatctcactattagctgggcatggtggtacatgcctgcagtcctagctactcctagataggctgaggtggaaggatagcttgagcctaggagtttgaggctatagtaaaccatgattgtgccactgcactccagcctgggcaacagaacaagacactgtctcttaaaaaagaaagaaaggtagtctttctttcctctattgttattttaaggcatgttagactgtataaaatttttaagcttgtatgaaactaaaaataagacatttagatttaagtttatttacaattacattacttgatagaagatgatactatagtattccaaatgcccttatttgcacactttagatgcatgatttccttatgtttaacctaatagtgatttaataaatgttatgtgcagtactaatagtagtacttgatattaagagaaacagccaaattattatttttatacaagaacaactaatttgtactttttttgaaagattaaaaagactatattttttatttccaaatgttgaattatcaaaayactgtaaaaaatttcaaaaataagccaatctccaataagttttaagatgcagctgtaaccaagctaccagatggcacgatta

SEQ ID NO: 636970 - DNA, 634 bp, Homo sapiens
tttaagaattggcaagaacctggttagacacttcttaaaataagatatacaaatggtcaacaggtatataaaaatgctcaacatcactaaccatcaggaaaatacaaatcatagccataatgagatactacctcactccagttagaatagcgatctcaaaaagttaaaagataacaagtgttggtaaggatgtggagaaaagggaacccttacacacttctggtggggatatagattagtacagtcattatagaawgcattacagagtttcctcaaaaaattaaaatgttaacaaaactaccatatgatccagcaattccactactgggtatgtattcaaatgcgatgaagtcactatgtcaaagagatatctgcacttctgttacaggacagatgagcccccaaattgggacttagcccaggaaaaattttggctttactcaggaaagaattcaagagccagcagtgggagaagaaagcaggtttattgaggtgacagtgttacagccccatgactgctcctgcagagcagggctaccccataggcagtgtgcccagagtagcagctcaggggtacttctgtagtgcttttaattacatgcaaatagccgcttttaattacatgcaaattaat

SEQ ID NO: 636971 - DNA, 622 bp, Homo sapiens
actgtgtaaagcgttatattggaaaaaaaaaggaagatagaagacaatattaaatatgagtcctcagttcatggatgtgtattcagacaaataagatacagttcagatgataaaaaatagagtaaaacaaattcaaaagtgagttgtatagacaaaagagctggattcagagaaatgagagattattggaggtgaaatgaataacatagaaaatgctttatgaaaaagaaatattttgaattaggtataaatggatgtgcagccttttggaataatgacaagagagtatcccaggyctaaaaataagtgtagatgtgaaagtgcaaggaatgtgacaagaatggtgaatggcccatttgggtcgtacctaggaattgggaaagttgagtaactgaagacatgtttaagaggcagcttaagccagtttctgagctatgtgtctatcttcattggctgaccataaaacagtgcttttggtaatctagaatatattttggttttgagtatcaggagataaaacaaaataaaagtagaagaaggactttaggaaaaaaatgttctaaaaaggcagagtgggcacttttctctaattctgaaaatgtgaaaacttctcccataaatt

SEQ ID NO: 636972 - DNA, 615 bp, Homo sapiens
ctacagcacattttcatttatccattcatctgttgatagacatttgagttatttccactttttggctattgtgaatagtgctgctaagagcattcgtgtacaagtgtttgtttaaatagctgttttggccaggtgtggtggctcaagcctgtaatcccagcactttgagagatcgaggtgggtggatcacttgagatcaagaattcaagaccagcctagccaacatggcgaaacaccgtctgcactaaaaatacaaaaattagctgggtgtggtggcatgcgcctatagtccctatagctacttgggaggctgaggcaggagaagcgcttgaacctgggaggtggaagttgcagtgagccgagttgcaccactgcactccagcctgggtgacagagtgagactctgtctcaaaaacaaaaaaaaaaaacaaaaaacaaataawtaaaagtataaataattaaatgttttaaaattcttttgggtatatacctagaagcagaattgctcagtcacatgaagatttgatgtttaattttttgagggaataccaaactattttgcacagaagtggcaccatttcatattccaccctcaatgcacaaaacttccagtgt

SEQ ID NO: 636973 - DNA, 615 bp, Homo sapiens
ctacagcacattttcatttatccattcatctgttgatagacatttgagttatttccactttttggctattgtgaatagtgctgctaagagcattcgtgtacaagtgtttgtttaaatagctgttttggccaggtgtggtggctcaagcctgtaatcccagcactttgagagatcgaggtgggtggatcacttgagatcaagaattcaagaccagcctagccaacatggcgaaacaccgtctgcactaaaaatacaaaaattagctgggtgtggtggcatgcgcctatagtccctatagctacttgggaggctgaggcaggagaagcgcttgaacctgggaggtggaagttgcagtgagccgagttgcaccactgcactccagcctgggtgacagagtgagactctgtctcaaaaacaaaaaaaaaaaacaaaaaacaaataattaaaagtataaataattaaatgttttaaaattcttttgggtatatacctagaagcagaattgctcagtcacatgaagatttgatgtttaattttttgaggraataccaaactattttgcacagaagtggcaccatttcatattccaccctcaatgcacaaaacttccagtgt

SEQ ID NO: 636974 - DNA, 654 bp, Homo sapiens
cagctgcttcatcttagtggctgttctggaatctctgtctgagaaaatgagacagtttcctggggagttcagatttcttgggaacaagctgtctcttttgcgtcattgaagaaagttggaaaaaaattctactgtcttactaacctgcatcactgtgtttcttgcatgccttcctgaagcaggacagtgtttaarttttttttttttttttttttttatctcatgcaggtcataggttttggatctgttgaaattgcagcattcatagctatggtagaaattgtttgttatggctcagatggtctttcttaccatcttgatgagatcattagggaataagaatattgtcttccttgcatgggcttttagagactccagttagctcagtatgcttttggatctgaagcctggatgatgtggttcagtggggactgtggccaccatgttcaccattacatttccagtaatcaatgcctttgtctctcagaatgcagagtcagattggcaaggagttgcctaagagatcgtaactggaataagaggactatgcaatggtctggggccagcactgtatggcttcatattctacatgttccatgtggaactgaccagatcgggcccgaaattgaatactaacgatgttaccctgcaggg

SEQ ID NO: 636975 - DNA, 598 bp, Homo sapiens
agggacgcaagcgagggaggacatgggtgacaccggactcgcgcgggagaagagaaggcttccccacaaaggctatagctggggcarggcagggagggcatgaggaggaagttgaggctctctggccacttgcgtattgggaagtgaaatcggaaattccctatgtggggaagaggggaagtgtgggggcaacaatgaaatcttgtgggaatttagggggaagtttaaaaacccaaatacttccactttcctctcggggtcaccaccatttaccatcatttactgggatctgtgccctacctccccttaccagttcctggctgttccatggggctcactcccccgccatcctccccggccacacacagacccctttggctgtccaggctggtgagaatcttcagtgggtgatgtcagagctttggggactgattgttatgtaaccagtatcaagacaccaacctgtggtagcaggaccctgggggctcttaaagagatctgaattgaacctgcgactttgaaagcctcaggtccaacttcctcgcttctgggagatgtggaagcctggagggctaggggcctgtatcaggggataact

SEQ ID NO: 636976 - DNA, 375 bp, Homo sapiens
ctccctgtgagtggagccagctttgagagaggaacccatacaaaaacccaggtgactgaccctggcctcaaaggacaaaggacgtcctgagctgaggggtgtgggtgtggccctagctgagkttctctccttgcagggcagagagagctcccttgctcagccacctttgaggacagacaggacaaggggcaggcatgagcccctgcctggtcgtctgtgagaccatgtgtgactgccaggccccaggcacactgagtcaccgcgcctggaaaaccctgtggcctccagtgttgcctcacacctgccacttccttttcctggagtgagtggtgctctctgtgatgactcccaccggcctgggatctgcctgccaca

SEQ ID NO: 636977 - DNA, 375 bp, Homo sapiens
ctccctgtgagtggagccagctttgagagaggaacccatacaaaaacccaggtgactgaccctggcctcaaaggacaaaggacgtcctgagctgaggggtgtgggtgtggccctagctgagtytctctccttgcagggcagagagagctcccttgctcagccacctttgaggacagacaggacaaggggcaggcatgagcccctgcctggtcgtctgtgagaccatgtgtgactgccaggccccaggcacactgagtcaccgcgcctggaaaaccctgtggcctccagtgttgcctcacacctgccacttccttttcctggagtgagtggtgctctctgtgatgactcccaccggcctgggatctgcctgccaca

SEQ ID NO: 636978 - DNA, 452 bp, Homo sapiens
cctggcgggggaggcaggggtgagaggatggaattgtgtgcacaagaactgtggctattttaatatataacgttagaggctgcgttctttgtcgccgcctcccctgtgtgccakccctgtgtgcacggcctctgccccccggcctttgctgtggctggagctggacagtgcagcgactgcgaccgtgggggagccaggtcgcccttttggcagctgctaggctgaggctgcatggacaggaacaccaggcaccctccgtgtgcttctgagctgaggttgcttcacgggaccgtggcttccttcctcacctggctctgcctcccccgtgctctcgggcgaagtgggttcttgtgccttcccctcccgggcccaggctccccgtgcgcgggccctgccctttcctcccgcgccccaccggctccgacgcgcaaccccgctcagcagtcacagaa

SEQ ID NO: 636979 - DNA, 525 bp, Homo sapiens
agagagttattaccctcctttatagactaatgcatggaagctggggagggaggtggtgccagccttgagctccttccttgagtgcagactcgccctgcagagggcaggtgtgtkggggcagggagaggacctgagaacccagcatgaggaagtggcagggaaccctgtgtctgcccccaagggcatagccctctgtggctgggagcccagacacaaggcaggttgcccaggtctgtggcatcctggccacattggagggctgctgagcccagggttggagcgcccccttcctcaaagtcctgagaatcagccttcaggggaaggcctaggatgagagtctccagccgtggcctcgggaagcagctcccaccagatggttcttcagggctggcaggaatggcggccgccccctgcccttagccactctggaaacgtgcacatggcatagtggcccgctcctacccaggaggtcaggacatgagaggctggccttgggtcctgcagccctgcccgctgctgaccagg

SEQ ID NO: 636980 - DNA, 525 bp, Homo sapiens
agagagttattaccctcctttatagactaatgcatggaagctggggagggaggtggtgccagccttgagctccttccttgagtgcagactcgccctgcagagggcaggtgtgttggggcagggagaggacctgagaacccagcatgaggaagtggcagggaaccctgtgtctgcccccaagggcatagccctctgtggctgggagcccagacacaaggcaggttgcccaggtctgyggcatcctggccacattggagggctgctgagcccagggttggagcgcccccttcctcaaagtcctgagaatcagccttcaggggaaggcctaggatgagagtctccagccgtggcctcgggaagcagctcccaccagatggttcttcagggctggcaggaatggcggccgccccctgcccttagccactctggaaacgtgcacatggcatagtggcccgctcctacccaggaggtcaggacatgagaggctggccttgggtcctgcagccctgcccgctgctgaccagg

SEQ ID NO: 636981 - DNA, 484 bp, Homo sapiens
gtatcatccccaacagaggtggagtaaagtggatttcacagaacatttctccgtgattgcaattctcaggctgagatggacaagaaatgctgatacatctctgcccactgatttgacaacttgagagactaatgggttttaggagttcttattttttttaattccaaatgtttcgttttgattaaaaactgaaatatcaaagaattctctaaaaattctctattaggaccamaaagatgaaatatacaaaacagtctggcatttgcttttgtgctgttacccagagtgtttctcattttgccatggctgagaaaaagtgttggtgatatagtttggcagtgtccccacccaaatctcaccttgacttgtaataatccccacatgtcaagggcggggccaggtggagataattgaatcgtggtggtttcccccatactgttcttgtggtagtgaataagtctcatgagatctgatgattttgtaa

SEQ ID NO: 636982 - DNA, 601 bp, Homo sapiens
ttaataatactatatggctgtcctccagacccatccatactcctggacctccaactcaaagctaagcatcaccacctccccacacttgctcagggagtgttccccgcaacatctgcccaccatgtactcttgcaacaaggtattaataagcgagaaggtgtctagaacttcaagtgaccactagaccaaataaaggttttttcttaatttgaaagatttgattcttccctgagaattcaacttcagaaagaatgaacgaaactaagactttttaagttatttatcatatctataacccattagaattaatagctgtagatcctcatgaaaatttttagttaattttcaacacggtaagaatcatgagcattttaaattaaatggaacactagatggcaaatgaatgctttaccttattaagatgattcaatgtattccatagtttttaggccacttctaagcagtatttcaaggaaacatacttggtagtaataaaaaaawtttttgtggcaaataaacaattaaaaatgaaagatatgcacatcaaactgtgattcatttttataagtttaatgaagaattagctatatgataattctta

SEQ ID NO: 636983 - DNA, 540 bp, Homo sapiens
atacgtatatcaagtagaaagtgtatctttttatcatgaaacttacataaacataaacctcgtagatttgtgtatttttgtggcagttttccaacagatgaaaataagtgtcttgaggaaggaaggggcgggctctcttttctaattgcacagaggtacaatgtgggttagctgtggccttggatggtaacctgcctgactgctctcttcctcctgatgtgacagccctgagttccatttcatatctagcrctaagtttccaagaatgagattcagaagtttgggtgaggggagggggagcaacaactgtacccaagtgtcagagccaggctgcactcaggcctgaggctcagcttttaggaaccaaggtctagtttcagggataagaatattactggtaggaagcctattactgtgtgttttgaaagagggggctttgtaattcttttcaagtcacaggactccatcccgtgggggtatctgtggaactgctgaatctttaatgacgtatgatcttgcttcctgtaagttaagtttgcc

SEQ ID NO: 636984 - DNA, 538 bp, Homo sapiens
aagtgccatgcttgtacggtctgcagaagcataagccagttaaacctcttttctttataagttaccaagcctctggcatttctttatagccaaacaagagcggcctaatacaaacatcaacaatattccatctgtgctttcttctttccttcaaaaattatcctgtgtgctgcctyccttaaagaaacacctgtgtcattggttactaaacttttttccaaccatggcaatttatctcaccctctgatttttaccagtattcaaatgtgactccatgacagaaaacaatgttgccatggtccctgcttcttttggggcaagtgtttgatttccttagcgtgattttgtctcagaagtctgtgattctccagagaggtactgaatctgggtcaacatgtatcttcagctccgggaggaagctgtatgtgcctgttgtaaactctggcataggctgggtgaatcgtagctcacaggtgcatttcagctcaagaagagctcctcctgagactccacctaagacctacctcgagggagctgg

SEQ ID NO: 636985 - DNA, 538 bp, Homo sapiens
aagtgccatgcttgtacggtctgcagaagcataagccagttaaacctcttttctttataagttaccaagcctctggcatttctttatagccaaacaagagcggcctaatacaaacatcaacaatattccatctgtgctttcttctttccttcaaaaattatcctgtgtgctgcctcccttaaagaaacacctgtgtcattggttactaaacttttttccaaccatggcaatttatctcaccctctgatttttaccagtattcaaatgtgactccatgacagaaaacaatgttgccatggtccctgcttcttttggggcaagtgtttgatttccttagcrtgattttgtctcagaagtctgtgattctccagagaggtactgaatctgggtcaacatgtatcttcagctccgggaggaagctgtatgtgcctgttgtaaactctggcataggctgggtgaatcgtagctcacaggtgcatttcagctcaagaagagctcctcctgagactccacctaagacctacctcgagggagctgg

SEQ ID NO: 636986 - DNA, 546 bp, Homo sapiens
tcctgtgtgctgcctcccttaaagaaacacctgtgtcattggttactaaacttttttccaaccatggcaatttatctcaccctctgatttttaccagtattcaaatgtgactccatgacagaaaacaatgttgccatggtccctgcttcttttggggcaagtgtttgatttccttagcgtgattttgtctcagaagtctgtgattctccagagaggtactgaatctggktcaacatgtatcttcagctccgggaggaagctgtatgtgcctgttgtaaactctggcataggctgggtgaatcgtagctcacaggtgcatttcagctcaagaagagctcctcctgagactccacctaagacctacctcgagggagctggggactcccttccttcctacttgtagaaaacatgggaaagggagaaagacttgttggccagaaagcttgtatttaatcactttggcctggatcacatatttcccctttggtccctacaaaactgaaccaatctgttctacttacacatatctgatttttaaaaccctga

SEQ ID NO: 636987 - DNA, 589 bp, Homo sapiens
tagcctgttttatcttggtgatacatgaggagatcagatcctaacttattagccctaccaagcaacaaggtgcctgtctatggtggtacctggccctctttcttagtagtatgcctagtatgtgccgcagattctagtccctgcctgggagcttcttagtcactggtagaatttcttaatgttaacctgaagcygcagttttagtctgctgcccagacaggctgtgtgatcccctgacattatatcttcatcaatatggtccactctgcctggattgtttctgccctctttcaattatttggtcctatggtagtatctttattatatgcttgctattctaagtttacattagaaatgagacttgagtgtactgatgctgtttttttgaggtatgctagttaggtattttttttttcacttctttttcacgttgttctccatgttgggaggaatgtttatcctacaatcctgatgcttccatggagaagtcagggccacctccccaaccctcttccctctcctgcttcctatcaaacataaacaaagctggacactagttaaagtgataattattgaagtggggaaaaga

SEQ ID NO: 636988 - DNA, 589 bp, Homo sapiens
tagcctgttttatcttggtgatacatgaggagatcagatcctaacttattagccctaccaagcaacaaggtgcctgtctatggtggtacctggccctctttcttagtagtatgcctagtatgtgccgcagattctagtccctgcctgggagcttcttagtcactggtagaatttcttaatgttaacctgaagccgcagttttagtctgctgcccagacaggctgtgtgatcccctgacattatatcttcatcaatatggtccactctgccyggattgtttctgccctctttcaattatttggtcctatggtagtatctttattatatgcttgctattctaagtttacattagaaatgagacttgagtgtactgatgctgtttttttgaggtatgctagttaggtattttttttttcacttctttttcacgttgttctccatgttgggaggaatgtttatcctacaatcctgatgcttccatggagaagtcagggccacctccccaaccctcttccctctcctgcttcctatcaaacataaacaaagctggacactagttaaagtgataattattgaagtggggaaaaga

SEQ ID NO: 636989 - DNA, 582 bp, Homo sapiens
gctcttcagtctgtgttattcacatccctctgaccttaattgtacttcataagatccttaactctctgaccctcaatttcctgatctgagaagtgagaataataacaattcttagatacattagggatagaagaaatttatgtggagagctggttgtaggctgtcagaaaggggcctttcttagtattgtaatgattcatagccactcatgattcttctttgctccctcattatgttatttgtatgtatttttttctttttattgtaaactacttgacaagaagtactgtctgtttttcttctatagcaataggcgtgatattgagtaagtaataaacaccccaaaataccttaggtctttaaatgaaataataaagtattgttgataagcatttarttcatgttttaataaacaataatggttacatcaatgagagaaataaaatgcagtcacttccagatatatattgctaaagcatgaacctattgaacactatgggtttcaaattgagaactgtcatgagctaggaattctgttaaattccatcaaaacatgaggacagaattactttgtttgtttaa

SEQ ID NO: 636990 - DNA, 563 bp, Homo sapiens
tgaggacagaattactttgtttgtttaaattatcttgctagtccctgaagctggagcatgcattacttccaaataaaaatctattgttttyctagcacactagcgtttcattaattagaaaaaactttaatttcaaattatattttgtaacccctccaaaaaaaatacttcagaaaaggcagagagaagaaagaaatagaataattgtcaaacagtatccagtttgaagagaaaagaattggggagtcactttgtttatccatcaacaaaagttataattcattgaacattgtgagttttattatagtataatacttttattgaaatacagtttttttcatcagaaattgtgtgggaaaaaatttacctttcattaatgttagtagaatcctatacagcccagggataagttgtacaaacttaggtattatggctttatatcccagatcctgaattcccagagcttctaaaaataggtactagacctaagttactatgaggtactatcttccgtaacttaattagtagtatattaattatttattcatattgttttaatttac

SEQ ID NO: 636991 - DNA, 563 bp, Homo sapiens
tgaggacagaattactttgtttgtttaaattatcttgctagtccctgaagctggagcatgcattacttccaaataaaaatctattgttttcctagcacactagcgtttcattaattagaaaaaactttaatttcaaattatattttgtaacccytccaaaaaaaatacttcagaaaaggcagagagaagaaagaaatagaataattgtcaaacagtatccagtttgaagagaaaagaattggggagtcactttgtttatccatcaacaaaagttataattcattgaacattgtgagttttattatagtataatacttttattgaaatacagtttttttcatcagaaattgtgtgggaaaaaatttacctttcattaatgttagtagaatcctatacagcccagggataagttgtacaaacttaggtattatggctttatatcccagatcctgaattcccagagcttctaaaaataggtactagacctaagttactatgaggtactatcttccgtaacttaattagtagtatattaattatttattcatattgttttaatttac

SEQ ID NO: 636992 - DNA, 603 bp, Homo sapiens
gtatccagtttgaagagaaaagaattggggagtcactttgtttatccatcaacaaaagttataattcattgaacattgtgagttttattatagtataatacttttattgaaatacagtttttttcatcagaaattgtgtgggaaaaaatttacctttcattaatgttagtagaatcctatacagcccagggataagttgtacamacttaggtattatggctttatatcccagatcctgaattcccagagcttctaaaaataggtactagacctaagttactatgaggtactatcttccgtaacttaattagtagtatattaattatttattcatattgttttaatttacattgtctttctctgaccttaaagtgattatctgaatccccattagggtttcctgtcaactattctactgccatttaccacagggtcaccaccagtacattctaataagtccatccttctgagatatcctcttcctaacatgattttgaatacctcctgtgtcatattactgttagtattttcttttatacgaattgaatgaaacaaatatttgttttgtctaactcttcaccttctttacatctgcacatggat

SEQ ID NO: 636993 - DNA, 603 bp, Homo sapiens
tgctcacttaacagactacagtataatataaacataacttttctatgcactaggaaacaaaaaatgtgtgtgacttgctttattgtgatattcactttattgcagtgatctggaactgagcctgcaataactccaagatatgcctgtactagaaaagacaataaataaaggatattaatttgcagaatagtccacgtctgcaaagggaggtgtaaccatcttggttctgaagggtcaggaggaaagatgtcttctgatcaagcamagtgggggacaagagaatgagcacagctcccaggaggaggcaaggtcctgacagctcacgtgccctgtggctctgagcacaagattaagtgttacacggaaagctcatggctttggggttagagtagacaagtctgttaacctccctgaacctcagtgctttcaactgtaatggggaaatgctggcatctagcgaggaagcctgctctgaatcatgataaattatttcatttgggaccaagcatgggcttggcacatcacagctcctcaatccaagtaaccatgattattcattttctattgctgtaattattatttatctatcacaagctgctaaga

SEQ ID NO: 636994 - DNA, 579 bp, Homo sapiens
acaattcgtaaagtaatatattgttcagtgcaggcatttgcaatctttyagtgctctgagtttataattgaaactatttctaatttattccactattaacatttaaagacggtctatctagatgagggaaaagaaacagcatgtaactttctctacggtcaatggaaaatgaagtagactttaatgtctccctccttcctgccgaatggcttctgtgcagctggtcaataagaggggaacgcataacacaacctggctctcgcctccacgaatgtgcaaggtgtggcctccactgtgaaggacattcgagagctttcatggagtctgtagttccaactcaaatatttgccttttcagggacaggcatgggttcttttggggatagcaaagcagtatgataaaaaacttaggtcttccccggccctagccaagaatgagccacaatcacccactaagtgtgctgctggcatgccttctgaagccgagagaagcatttcacactctagcttttagtaaccagaggtgccacccacatccactgagtaggcatcatggtaacacctcaacacgtacagtcat

SEQ ID NO: 636995 - DNA, 577 bp, Homo sapiens
ggccccagggttacctcctctctgaagtcttagctgactcttccctgtactgaccactccctggtcaggccactggttcccatcctcatccctacttactacaggacactagattccatgttgctctctttccaatctacattgccagcccctggagaagagagcccttagcagcctcctccatatccccaatgcttagcaccaccttgtgcttgaacctcatgagtatttaacaaatccaatcctagcacagctgtaagatataaggggtattatccttgctgtggaaagacaggcaagcccaggctcagagaccttaagatggaatttttaacagtggcgtaactacaagtggagagagcctggatttgaaactatgcttatctaatttcaaaatgtgtccttctctatgtcatgcactcgttttaaaaattaggcccataatttatgtgatatataaagtgagtgattatttgaatattagaagtytcctccttaacatttgccaaaggaagaatgaaaaattctgtctaaaaggctatgtgcgacacttgatatgatcttgtatcttaggggc

SEQ ID NO: 636996 - DNA, 660 bp, Homo sapiens
atatatacaatctagagatggcttaaaggctatgggagggtgtgcacatggcacaccactttatatcagggacttgagtagctgcagattttggtgtcctggtggggaggaggggggcagtcttggaactaatcccccctggatactgagggatgattataytttttctgcatgatttgcaggttatttttcttcacagatagaataaatctaagaattaaactttttattcaatttagctgaaatttccaagccaaattttgaagatgcagcctggtttctcattgctgcttataataaaatggaagtggaaaagagacgaattgagaaactattaagccaaagacatcagcatttgatagtttggaagattctcggctatccagattgcaaaggatattaaaattaggctgtccactgtggggaaaggtgctctggagagagggtcaagggaatggctggacagccctttgctaaggggattatgtgtgtgactcatggatccaatcagccatgtcagcagaagccaggaataagaatggggttatccttgaaaattccatggaggcctctcttgtctaatgacctggatcctctaacatacacaggagacccactaggcttatgaaaatgttgtatcagcacaaacactaccagctt

SEQ ID NO: 636997 - DNA, 552 bp, Homo sapiens
cttgggttcagtgacttccaaattaaatcacagcactctattacagcaaccgtcatatctccacacatctgctggacacttggcagagtccctttgagtggggtggtgtggctacctcttactgctctgcctactgttttctcctgtcagactctayagtgctgcaaacgtgccttcattttaactctacctcaatgtctttctgtaattcattcacttaaggtgcacgagtaagatacatttttgccctgagtttttttgcagaactagctttctgtccagactgctttgtttctggcatttttattaattccacacatactgcatctgacggaattattgccgtgtttgttgacaggcccctctggcctccaaatatcaaacgcatgatgtccctatcaaacttgacacctgtttttcattcccagacattgattttccacccactagccaacatatttcatagaaaaagctgttagcactatctgcaaagtattgattgcagcaacactgaaatctctacccgaaaatttacagccttaatttccagta

SEQ ID NO: 636998 - DNA, 593 bp, Homo sapiens
agggccaaaacaaaaagagaaatttaggtagaattttctgattgtgaatgaattaatttacctcatttaattcttatgagtccaagtaatgtatgttatcagtacttacagataaaacaaattcatcaaattaggtaacttgcccaaagtcattcaaataatgagtgacaaagtcactcccaaagccaccccttcctccttcagtgacctacgggactgacactgcacaacagaatctcaacgtggtccttctgtgcagagtgcagygaactgatgacactatctatctagaaggttttgctgctgctctttttattcagtgcttttctaagaagcccaaagcctgtcacagatattaccttattaatctttaccatttatctgggtatactggttttggatgttattactgtcgttattacggatgggaaaattaacgtgagcacaaatgtcagcaagtgtgtggcagcttggactggaagtcttgccacctaatacataatccagggccctagtcactaaatcttgctttttgtgatacggcaaaacacacaaggccatgctactattaatctttaatgaaactgaatgtc

SEQ ID NO: 636999 - DNA, 525 bp, Homo sapiens
caaggccatgctactattaatctttaatgaaactgaatgtcacctatactattctgaatcatcattcagtttctagtataatattcagtatatagttaggttgaccacatattcatatataaaggttgaaagaaaatccaatttactttctaaaattacataaattattaacatgtcacaacaattttacataaaaaaagggaaattaatttgcccatcaatttacactcagatacttttcctctctttaaggagttgattctctattattgtggattgattatttttcctttccttaaagaattcttaaaaataataacagcaatgtgataaatgtttcatttccygtccatcagcagcagaagctccttctgcccagaggataaatcgaatgctctgtgacaatgaggggtgcgtaacaagcaacttgcagctctgctcaaactgggttcaccatgctgcttcttcgttttacaaatgcacagcaaatacagctgcatttaaaaaggttcctaaggttccccc

SEQ ID NO: 637000 - DNA, 651 bp, Homo sapiens
agtgttttttaaactgaaagtactttctttttcacagtatttcgtatcttttaccaaactcttggctaattttgagctcaaaactttcttttcagtattctttttggatatgcgyaatacaccaaattaacgtcaaaattaaaagttaggtttcctaaaatatgaaatttcaatatatgccattcaagccagaaagctctatgccttaagcaaacaaaagacagtataaaatattgttttggtttccttcatcacactgctgatagaaaagaaaaccacaaaatggtatcaaaaaattaaattgtttttatacattgaaaatcttttacatagaaattcttaagtttacataatacaaatggaaaataatactatttcagtgcaatatagagattttaaaatatattgtttctgaaatcaaatacttgacatttgactcagtattccattccaaataatgacaagaaaaaagcaacagcatccctcatggcatgcctgtatcctctcaccattttcttgtaactatactgttttatagatgaaactgccacagcaaaatgacaaatataacacataaaagaacaaaaagggcaataaatcaacagtgacactatagcccattaaaatgcagtcagctggtattgcagaaag

SEQ ID NO: 637001 - DNA, 651 bp, Homo sapiens
agtgttttttaaactgaaagtactttctttttcacagtatttcgtatcttttaccaaactcttggctaattttgagctcaaaactttcttttcagtattctttttggatatgcgcaatacaccaaattaacgtcaaaattaaaagttaggtttcctaaaatatgaaatttcaatatatgccattcaagccagaaagctctatgccttaagcaaacaaaagacagtataaaatattgttttggtttccttcatcacactgctgatagaaaagaaaaccacaaaatggtatcaaaaaattaaattgtttttatacattgaaaatcttttacatagaaattcttaagtttacataatacaaatggaaaataatactatttcagtgcaatatagagattttaaaatatattgtttctgaaatcaaatacttgacatttgactcagtattccattccaaawaatgacaagaaaaaagcaacagcatccctcatggcatgcctgtatcctctcaccattttcttgtaactatactgttttatagatgaaactgccacagcaaaatgacaaatataacacataaaagaacaaaaagggcaataaatcaacagtgacactatagcccattaaaatgcagtcagctggtattgcagaaag

SEQ ID NO: 637002 - DNA, 584 bp, Homo sapiens
aatgagtgaatgaatgaatgaatgaatgatagcttctctagtagtagaggatagtgctcacaggacagctccctaaagctacatatttcagggacagaaagctgcaactttggtttctgtcagagctaaactgtatgcaccgtctgaaggaaggctaactggagggggtctgtgtagctcttggtccagttgcccctcctgaaaccacattcacyctgactgcagtcacaggtggaagtgccactgtggcaaggatgttattttttttaaaaagcagtgtgaaaattagttcacccttcaagggaattttatcttttacaaataacttcatcccatcaaaaaaaaaaaaaaaaaaaacaatacagctggactctgagtgccgttcatgtgccaagcactgagtggcaggctgaggaaagtttaaagatatataaaatatggcccctggaagggattctaagcattcctttgatatggctgaccctgtcccttaagttccctagcatgtgctcctccatgctggctgcagctgatccattccccatgaccagtacttactgtattaattcctggcttttacctct

SEQ ID NO: 637003 - DNA, 620 bp, Homo sapiens
acatactttggcatgcttggaacaggccatatgtgcacacaaacatgtatggatgttttatctcagtctatcaattagctgccgtccttcaggtttccagataattgaatagggttgaggtacaagggtaagttgaacaaattgacttttgtaaaggcctcttctgagctggactttatatgattactgtaacagttcctaaagtaacccctatttcttgactsaacctaatgggaactctttttaaagaagattttattttaaaaaaagagtgtggggaacatagctaccaatttttcatcttataggaggaaagtgtcagagaatgataagagtcatggctttagaatctgacgaacctgattttacaccacaactctttactttgtggcactgtaaatttaaatgagttacttaacacctctgaactattttgcacatgtgagatgtgacgatgatgataatgtgtactgcataggggatgcggtaaaaattagatggtatatgtacatagttggtctttgatagataatagcttaagaacccagcagttggagaacttgtcccaggcacgtaggtagtccgtgggagggcctagtctaagtcagtgcatctgactt

SEQ ID NO: 637004 - DNA, 568 bp, Homo sapiens
tagcaacattctctttgttggatttgaagctatgtttcatatttcaaattgagtataaacagctttaaatgagaagaagacttcacttaatttgaaaaaggtagaggtttgagaagcatatttagtttttgtcatctttaaaataaaatgaaatagaaaacctaactagagaaatattatatttatttaaaaatatgtgtcaatcarctgtttctgttatcagtaaggcttctagtcaacagtaggccactgtagcatgtggagcaattttgtttcattttgtctcattttgtcatacacctttgtgttagggtagaggttggggttggtgatggagaatctgttccctgatatttgtagtcacatagacatgagatgccctttcttgctatgactgagtcaccagtaagttcactaagccacatgcacaagtgtggagttattgaaaggaggctactcctgaaatttggtgagcttatcagaataagttctactggcgcagccaaacaatagtcccaaacatgaacagtgaggggcagagatgaacaaccattttctctgaggcacc

SEQ ID NO: 637005 - DNA, 568 bp, Homo sapiens
cactgattaaataggatgctgaagtgctggaggctaraagtgggcttgctcgtcccttaggtcagacttctctgctggaaacctggctcaagctggcagaaaaagaacagaatgaaaaatgctgcaggcatcagtgggagagtcggtaagagctcactgactgagcttcctgcgtgacagccagtgcacttctccatagggaggccattctcatctcttatcatgagtcagtgggcccacagtggacccactggcctcatgattcatgccaacggggcctgtcatgataccctttcagggaagcagggaggcatcagtgtggccagagggtgtgagtgtgaagaaaaatggctttgctatcaattccattctcagtagcatcctcaggattgtgaggaaagaggacaaatttcctacaactagtggtcctatgaataccatttattacccttttatctaactgtaagagatctatattgtgcacatagaatgcttgtaatgctgtgccatgttttggggggacagtgtttgtattctactcccagaaatgcagtgtgagttgcaatta

SEQ ID NO: 637006 - DNA, 470 bp, Homo sapiens
agcatgcaaaaatacttgaccggtacacagacagaagcctttgttttcagtcctgaattttaatttaagtatatattttcttggataaggaatactgaatgatgcagacttatttatgcagtgraaaatagttttccattgaaattaagttagaactgtacttcttgtttaaactaatatctgaagcctttagtcattttattagtcagtaaaattgatgaaaaccttaggaaaatgcgttagaacagtcctgtgatgaataggaggcctgggattaataaggaaaagggcaaagggacacatgttgatctgtgtatgtatagagatctggagcttattagaagtttttatgaacattcaactaatgaagcattatataaaattagacatttccgttaagttgtaaaagttactagtctagggaaaaaaaccttcaatgttatttctaaataatttatttatgacatttt

SEQ ID NO: 637007 - DNA, 582 bp, Homo sapiens
gagacataattttaccatgatggaattctaaaaggtgctcacagagaaagggagcatgcaaaaatacttgaccggtacacagacagaagcctttgttttcagtcctgaattttaatttaagtatatattttcttggataaggaatactgaatgatgcagacttatttatgcagtgaaaaatagttttccattgaaattaagttagaactgtacttcttgtttaaactaatatctgaagcctttagtcattttattagtcagtaaaattgatgaaaaccttaggaaaatgcgttagaacagtcctgtgatgaataggaggcctgggattaataaggaaaarggcaaagggacacatgttgatctgtgtatgtatagagatctggagcttattagaagtttttatgaacattcaactaatgaagcattatataaaattagacatttccgttaagttgtaaaagttactagtctagggaaaaaaaccttcaatgttatttctaaataatttatttatgacattttcccaacagtagtaatttaaatatgaaaaattaattttgtaatagggaacattccatgaga

SEQ ID NO: 637008 - DNA, 432 bp, Homo sapiens
tgattctgatgcacagtaaggatcaaaaaccattgctagaagcttaccaatggcaaccctcatgtcaaatttcatgactttttctttgctgctagcctggggccatttgayactaatttcttctttaaactcattcctcttttggcttccataaaatgacactttctcgattctctgttctccgatggtgctttccctgtttcagttttcatttgttcaccatcttcgttgtgttttcccaactcagcctcacccttttctttgcatggtcacacaggatacagaaaatagtatggagagttgtgcagaggatcatttcttttcaagggcttggatattcgattgcatgctgcacaagggcagaggctttattctaatcatggctgcagctctagaacctaggacagtgccagatacactctcaataatgga

SEQ ID NO: 637009 - DNA, 587 bp, Homo sapiens
ttaaaaaaataaaaaaattaaaaaaggaattgatgttaattctttgaacaattagtagaattctctgatgaaatcacctagacctgcagatttcttttttgagaattttaaacttgtaaattcaatcttcttaataattaaagcactattcaatctatttcatactggatgctaatttgtgctttttgaggcattggtaaatttcatctaagctttaaaatttatggtgtagaattattcatatgattttcttattatacttttgatttctgcagggtctgaagggatatccactatttcattcctgatrttgggaatttgtaccttgtctctctttttctttgttagttaaagctttgtcaattttattgatctgttttcaaagaagtagctgtttgtttcattgattttctttattgcttttctgttttcaatttcattgacttctgctctttatttcctcccttctacttgctttgggtttattttgctcttcttttcccaacttcttgggatgggagtttagattattgatttgaaacttctcctcttttctaatgtaagcatttagtgctataaatttccct

SEQ ID NO: 637010 - DNA, 515 bp, Homo sapiens
tctggaaagtccattaaaagggcaggatgtggagtaaataggtgattggattggagggtaaagggcggaaaattcacagcagagacaggtggacttttctaactggataagctacaccaactcatgaatccaagtattccacccctggaaagcaagaggtgaaagcaagttggttccattggtgaaagcmagtcacctgcctgagcccagagacagggtggaaaggctctacaaagttacatggcaggaagcatgggcacagaaaaggcaagcatgaggaatggggggggcggtgttggtgtttttctttgtttgtttgttttgttttgtttgcattctacctcatgccatgtattttagctcatttattcttggaagctgccactgctatggtgatacacagacatcaaggatgtccaatagtatagggctaattttggcaacacagaagataagtgtgggggtatttcacattcataagtaacaaacctatgcccacctggacaggaaccacg

SEQ ID NO: 637011 - DNA, 555 bp, Homo sapiens
tggagcatcaaagaatttgggaccatgttttaaaactatcacaccatttattagggagctccatgaaagctggggaagacaaagaggaacaagttgggaatggggaaaaatcaagtgtttgtgcatgttaactataagtgtctattattcattcaagaggagatagatattgggcaggcaattggatataagtcaggagkcaaggtgagaagttggggctagagacagaaatttaagagttgtttgtgtataggtgatatgtgaaagccataggactggttgagataatctagagagtgtatctaaatagggaaaacgtaaggatctggaactgtttggaaatgtaaggagagtaccaaaagagattgagaagaacaaaccagtgaggcatgtgcttaggatgtttgcacacagtgtgagcagggacagaatggtaggagatagtgagggtagaagaatagcagaggacagcagaggttgagtccaataaatgaacatgaaggagagtaagtgtaagccctgccttaaaaaaatggaatgtttttcttaggaagt

SEQ ID NO: 637012 - DNA, 556 bp, Homo sapiens
acggggcagggagggcaacagaactgaacaaagatgtggaggcagaagagggcaagtcttgacaggagccagtaaatagatcagcccccttggagtaaagtcaaaacagccaagatatgtagggcacttaggtgctagggcattgtagatattatctataatctttgccccactcctatgaggaaggtataaaattattctcactttatagttaaagaaattgacattaaaagaagttaaggacttgctcaaggtaaagcccctctggctggaaagcccaccctttctgctaatccacactgtgtgtaagtgagtcccaggwcagagagctggagatgtgtacaggcctgcggaggttgaaacaatcatgttttggcagtgagaactaccattgcttctactgacaatgatgacgatgatatcatccaacatttactgctcacatgctatgtgttgagtgtaacactgggcattttacataactgatctcattcaatctctattccattcccctgaggatataatgaccaccaccatttcaagagttcagaatcag

SEQ ID NO: 637013 - DNA, 556 bp, Homo sapiens
acggggcagggagggcaacagaactgaacaaagatgtggaggcagaagagggcaagtcttgacaggagccagtaaatagatcagcccccttggagtaaagtcaaaacagccaagatatgtagggcacttaggtgctagggcattgtagatattatctataatctttgccccactcctatgaggaaggtataaaattattctcactttatagttaaagaaattgacattaaaagaagttaaggacttgctcaaggtaaagcccctctggctggaaagcccaccctttctgctaatccacactgtgtgtaagtgagtcccaggacagagagctggagatgtgtacaggcctgcggaggttgaaacaatcatgttttggcagtgagaactaccattgcttctactgacaatgatgacgatgatatcatccaacayttactgctcacatgctatgtgttgagtgtaacactgggcattttacataactgatctcattcaatctctattccattcccctgaggatataatgaccaccaccatttcaagagttcagaatcag

SEQ ID NO: 637014 - DNA, 595 bp, Homo sapiens
aattaaattaagtggttagattaagttagattaatattaatacatgcacacagtacaaaatataaagccaaggaaggatgcactgtgaacaaacgccctcccactgttatctctcagggcctcagttaccctcccaagaagcagctgctgttgctgtccggagatgatctatgcatcagatactaagcatatgagtatgtattcatttttaaacataaatgctgagaccagtttaaaatgatatttacttcaggktttttttttctatatctctacaaaagacattttgcacaacattttaacatttcagatgtttgcactgattgcattttctagaagctggggaattactcattttgcgcctacagacgaatgcttctcttaaagctcagtgaagtgtctgtatgtgaaaggaatatggaaacttcaaatagtctttttcttcattgaataaataaaatatatttggaaagccatcttcaagcttaaggctttttgcagcctagtccctaggaaatggtttgaaaggagctattatgctcaatcgtgttaatctcccagacccttgcatagaattttgacttttcaaatgtta

SEQ ID NO: 637015 - DNA, 590 bp, Homo sapiens
gagaggttagtttttcctgttctaagtcagagttaggaccaaagggtaaaagtgacagaggggctgattttgattccagtgattaaagttgtctagaggacagcagcttgccccatgaaggagtgaattcttcactcatrtgactgtttagcaaaggcttagtgactacctggctaggatgctattagtaggaatcagctgaattaggcagcaggttgaaatagatgatctctttggttgaatcccaggatttgctgaattggacattaaaaagcataatacttgtgctctctactcttatgagttcaacttttttagctgttccacagaatgaatgagattatatagtattgtccctctgtgcctggcctatttcatttaacatattatcctctaggttcatctgtgttgcctcaaatgacaggattttctatttttttgaaataggagaatagtattgcatttcatatatatactacattttaaaatccattcacccattgatgaacactaaggttgtttccaaatcttagctattgtgaataatgctgcagtgagcatgggagtacagacatctctacagcatactg

SEQ ID NO: 637016 - DNA, 450 bp, Homo sapiens
tgcaaaagtccaacagcattattgggtgatggaagttatgtcctcaaattatattttataaaactttccaatgtattagacagtaaatatatgcgcttccaacaacagattcaaaaacaaagcaaacaccacctccaagatcaacaaattctaaagatgttcctaatatataagaatttatgtcccacaccaaagacatgctcagagccaaggatattgatctcatatgagttttccagctgggctgcatgcaccacaatgaaaaaaaaaaaacgtggatcgagaaaatatgaaagttgatcaacctatgacatgaagkgataagtccagaaaaatgtctaaaatgtttcagtggacacagttgttcaacaccttaaagatcaatttaaaactcattctcatctttgcagcagatatcacagatatatagatatagatttaaacaacttt

SEQ ID NO: 637017 - DNA, 672 bp, Homo sapiens
gattaatacaataccttagaccttaagctttcaaaaacaaatatgaccgaaggatggtgtgcatatagaaactgccccaatttaacctattggtatccagctacagacctgacctcccctccagataggcttgcattcccctctcctattccctcctcctgaggtggaattattctcccaccctgccctaaagtccccaccatggatggcattccttgtatttgttgcttcttyggactttagctcatcttgctttagatttctgctgtgtaccttgcaacccaactaatgtaagttctttgggggccaggaccacctccccaacctcttcatgtcctttactctgatgcattcctagcaggtacacagtgtttgctaaccgcacaattgctgagatgtacctgttgctcttcttacaatcatgtctgtgaagtccctgtaacagctcatcctgtatccttggcagtatcagttctatcaacagaaagtgtctcatacagtttcagaaacaggaagatggtgtgtctcagtttgtggtctttgtactaaacagactaaacagcaaattgtaggataatttactcctcagtgattggcctgtctcaggcccagccagaaagttctgttgtggttgttgttgcttttcttcaaaagtaaattgctctgagaggt

SEQ ID NO: 637018 - DNA, 552 bp, Homo sapiens
gcagcaattcacccctctttgcccaggacaggagcagtttccaattcttgtactggcataattatcaacatagctttatttaattcactctaatgtcatgatttgggcaatatataataaaatggtcatcctatttactgatcatctagtctgkccacttcttttcatacaaggggaaactaaaccccagggaagtgaatgacagatatcagctcccaaagggaggtgatggcaccaactgaccaccccaaccaccagccagccaggctgtactggcatcttcatgacttcatgactacagacattctgctaacattgcttgtttttccatatctataggctggattttctttttttccaattgaagtataatttacatatttaaaatacacagtttttaaatgttcagtttcacgaattttaactcccaaaacaacatacaaaatatttctgtcaatcctgaaaatttccactgggcccctttcagtcaattctcccaccttgaggaaaacatattctgatctctggccccaccaattattttgcatgttc

SEQ ID NO: 637019 - DNA, 646 bp, Homo sapiens
tttgtccactaaaaataattaattatttttaaaaggaaatgctagaaatcaaaaatgctataagagaaatgcagaatgcttttgatgggktcatcagtagactgaacacagccaaggaaagaatcagtgagctcgaagataggtcaataggaacttcccaagcagaaatacaaagaaaagaaagagtgaaaacaatagtaacaataacagaacgttcaataactctaggataatatcaaatcgtacaccacatgcataattgcaataccaggagaataaaaatgtaatgaaacaggagaaatatttgaagtaacaactgttgagaactttccaaaattaatgacaccaaaccacatatctaggaaactcagagaacacgatgtttttcagttctgctactttatcactgatttttctgtcaattgttgagggggaataaaatgaccaattatgactgtatctttgtctgtttctccatttaaaaggtcaattttatgtcttaatatttaagttatctcattaggcataagtacatttaggaatattacattttttcatgaattggcccttttattattataatatatccctctttatctctggtaatactcttgaagtcactttttaatatattaataagctaccc

SEQ ID NO: 637020 - DNA, 604 bp, Homo sapiens
tgagttagggcccggcgaacagcagttgtctccagcatctaacacccatgggcctgaacggcttcaaagcaagaacacgttttatatccyttggttaagactgtggggaaaacacaggctcacggaatatagatgctcagctggctcatttgggttttgtggtccaatttgtggatgagatatttataaaatccggtgattacaatgccatctcattaacattcgttaaatgaaaaccacaaagtgcaggatgagaactccagtctgaggggagaggaagaagatgcatagggaggctggttttgctacctcagcacaggctaaaagagagacctgagacagaggacctctcccacttcctttaagtaagacatgtgactgaaggacaaagggagggaagaggaaggagggtagcttttctatttgtcagtttttttccatctctgtgcaaaccaaatctaagtcaaggccaacccgattttcctatgaattcaaattctccattccttgtaagatttagccaaggagacatctcctccaggatgtctgcctaggctacatttacccccatgagatctttgcatgctcaataaggctgtgtgga

SEQ ID NO: 637021 - DNA, 646 bp, Homo sapiens
  misc_feature 145: n = A,T,C or G
tggcatggaacatgacttactgtgagacactagctgagacagttaaggaagtgctggaatcaccacctcccctaaccccaaactgcacagatcacagctccaaaggagatccttctttcttctacttgtaaagaggagagggagntgggaaggactttgtcttgcaatcttggagaaacaggtcagccacaccacagataggggaccacatcagtcatgaggcgtcccttttcaaagcctatgtttccagaagaagtttttagaaaacaaccctgggcccgaagggaaatccgctgccttgaaggggagaaaaaaaaaaaaaaaacagccctggcaggattaatcaccagctaacaagagtccttgggccctgaataaccagcagcaatacccaggcactacayagaaggccttgggtaagactctgagactcactggcttcaggtgacagtcagcacattcccagatgtgatggctacagggtgagactctttctgcttgaaaaaagtgaaggaaaaggaaaatgaacttgtttttcacctaggtaccaggttggccacagaagggtagagaaccaagtaggctcttgggatccccaattccagaacttggctcttggatggcatttctggacctgccctgggcc

SEQ ID NO: 637022 - DNA, 646 bp, Homo sapiens
  misc_feature 145: n = A,T,C or G
tggcatggaacatgacttactgtgagacactagctgagacagttaaggaagtgctggaatcaccacctcccctaaccccaaactgcacagatcacagctccaaaggagatccttctttcttctacttgtaaagaggagagggagntgggaaggactttgtcttgcaatcttggagaaacaggtcagccacaccacagataggggaccacatcagtcatgaggcgtcccttttcaaagcctatgtttccagaagaagtttttagaaaacaaccctgggcccgaagggaaatccgctgccttgaaggggagaaaaaaaaaaaaaaaacagccctggcaggattaatcaccagctaacaagagtccttgggccctgaataaccagcagcaatacccaggcactacatagaaggccttgggtaagactctgagactcactggcttcaggtgacagtcagcacattcccagmtgtgatggctacagggtgagactctttctgcttgaaaaaagtgaaggaaaaggaaaatgaacttgtttttcacctaggtaccaggttggccacagaagggtagagaaccaagtaggctcttgggatccccaattccagaacttggctcttggatggcatttctggacctgccctgggcc

SEQ ID NO: 637023 - DNA, 562 bp, Homo sapiens
gaacatcagcagtagtctggcagtaccctccatgggcctgtggtggtgatggccatggggtgaggctcctctgcctttggaaagaggaaagaagagtgggaaggactgcatcctgtggtttgtgtgccagcttagtcatagaacaccaggtagacgtctaaggtttttgactctagtccctggctctaggatggcacttctggacctaccttgggcctgggagaattgttgccctgaagggaaggacacaggcctagctggcttgaccatctgctgactgtagagtcccaggaccttgagcraacatacgcagcagcaaaggagtgattactgcaggccttggatgagatccagtactatgctggcttcaggtctgacccagtacagtcctagtggtggtagacacaggggtgcttatgtcactccatccccagttccagatgacttagaacagaaaaacagacttcattagtttgtgagaaagtaagggaagagaacaagagtctctgcctgataatccaggggattcttctggatcttgtccaagaccatcgaggcagta

SEQ ID NO: 637024 - DNA, 491 bp, Homo sapiens
aaccttgcaccttccgtggcagaactggctttgagcagttggagttcaggagaccctgaccagcatgtgactgtgtcaagactgaatccatcaatgccactggaacacctgctgtttcgttgggtttctatcgcatccttgggttggagggagctattgacactttcctggctgttcaaaaatgggcacatgtggactatagagtgtagtaattgaacagcaccaaagccgtttgcactctgcttgtgcctgcaggcacacctggctccacagcccgggtctgaggatgctgaggtcacagcctcacaccagctcccagacgtcattggatctgtctcctttttcttagrctttcaaggcaggtgttctccctcctgtttttattttcctttagctcctgaccaactgcttttgtcaaaatcaacagctggcaattgctagctataaaaaccctgggcaacatatggacatactgcctcattatttagggc

SEQ ID NO: 637025 - DNA, 605 bp, Homo sapiens
ttgtaatactgtatttaacctttacaggtcacttttctgagacaccgaacctgtctgtgaagtgtacagattccctgaaagcgtcaagaagccatttgtcctcattgtcccaaacattcattgtatccatggctccaaaaagaatcagtcaggaatactacagaggcctggttgctgccttctaggaacttgtaggctaagggagaggtcgtgacacataatggccttgactgcatatgtcagcccaggcatggatactcacttctgctaaatcaaagagactctgcatatactaacatgtctacaagcctgaagtcctattgtaacattgggcttcttcccccaccctcatcccctgtcttgtactagcttccaatttcaaactagccaaatgagaattggctaaaccaatttttctagtctttctctcccttggtcttctgtttgttttgttctaatttttcaaaagtctggacgaaaggaatttgggttgggatgataccatcattctgtcacttctaaattcattctgttaacaatttttagagtcacatgggtagaagctttgattytgaaaaactatgcacttttaagttttgactcca

SEQ ID NO: 637026 - DNA, 589 bp, Homo sapiens
taacaataggagtttggcctatgtaaggactctgagtttaggcttccaagatacaacaataagagaagaatctagcaaygagaatgacctcatttgctttccacatgcttagcctcattataccatgttatgtccaagttcacagccacaacatcagaatggtaattactgagcacaagttttaaatatggacgttaaaaaaaaaaatccaaggacctgtttttccaacccagacatcttttcattgaatgatttagaaagctttaagttgatccagcttacaattttttttttctttacctcctggaaatctcatatggtcttggatccgtcaaaaaaaccagtcagttcacttgcgctcaaagtatcaagcacaacaaagataaacagaagtgaggaaggttctgggttcactacatctggattttcaagacacctattgtgaagtcattagggaattgatgagaatatggcttcaagcacattttgcagtttgctacaaattctgttgtacataatgcagacgcacactcaggaggccaatttaactgttaacagtgcatggagcgaatgcagcattttaaaagat

SEQ ID NO: 637027 - DNA, 572 bp, Homo sapiens
ctcagtggctgctgcttcatttgacaactcacacggtaatcttaaagytgaagattgtctttaatttgtgcctatgcagtttttcaaaagaacacggaacagagcaacagaaacctcaacagctacaataccaaagatgaggatttctcacaccttttgtttcagttcattatctcctcttgcctggctaaaatactaatagcgccattgaactgtataaaggtaatcaattatgtttctctgagcaacaaaaggaaagggccatttatttgattttattgtttcatttcaattttgtcttatggttttttgccccaacatggaatctctcaaaagtttccatggactccaagtttaagatgttgggatattgaacagttctctctgctcagcagagggtagggaataacattatcacttgaatgttctttgcttaacccttagacttggttccttctatgttcagagtctcatcatcaggggaaggaaagggagtgagggtcagggataggggtcttggtgatgcatcctctcccgagccacagaaccaaagagtttatagaggaatttac

SEQ ID NO: 637028 - DNA, 598 bp, Homo sapiens
aaaaaaacttgaaaaatagaataaaggggtattgtttctttgaaacacacggaaaatgccataatctgtctccatcaaattactcgtgaaaatgctggcccagatgtatgtagatatttaactatggttttgttttggttttgcctgttttcattgtctttacagcttttaacttactgtaaaggtacctaacttaattcctactaattgtagcggtttcattttatacacataagatggttttgaggttttgtttttttaggtggaagaaggatgagatttgttcaaatgtatttattctgctcagtgattctggtctactcttagcaaaccacgataactcattactccttccttcatggtgggattattttactgctaaatgggatgtgagccatctagcgtattcattagaagtgtgaatacttattttacaaaccactctatttagggagttgtgttttgatcttagcatttctagttattgctctctctctcttttaaaagtttaatcwatgggcagaattaaaacaaattcagtgggtattcatggtctcatgaaaatactgttcagatgaaaagtcagcatacagtcata

SEQ ID NO: 637029 - DNA, 603 bp, Homo sapiens
ggtttatttctaggtttgagaaaggaagagacggaggagtttcccttagattaaatgacctccttcaccctatccaagaacactttatgtaagaaaagcacagtcattctttttggtggccttctgttgtgtcaccgctgggtcagagccacaccactctttagaaaaacccaggggcagcttcaaaggccagcttcaaaggtgtgcaaacagtgtgatcccaggaaatcccatgctcagaagggcccaacacttggtttaatactttgctcttgcactcgaaattttcaatactttttgaaccaagactccacatttttatttcttactggatctcacaaattatgtaaccagttgtgcccagaagttgtttttggttgcctaaaatataatttcaaaacaagcactatttaagttacagtaacaaatccactacccagcccagtcagatagaccttgctgattgaaactttcaacgctgacctctgaatccaaatgtacktattgttccacaggtactggaaaaacaaacatttgtcacctaaacggctgagcacaggtattcttatgtacacccttgcatcagcaatatgtgaagagatc

SEQ ID NO: 637030 - DNA, 649 bp, Homo sapiens
gctcccaggcttgtgtagtcaagtgcagtgaactgggcagtaatcagctcaggaccattggctctttcctcctctttcagctacagacacatgccctggcttttgcattgaccttgctttgttagttctagactaatttatccttttgtcagacactttcccttttttaggatactcacaacagagtccactttcagctattggaatacattttaccataaagcccccaaggctttctacccataacaccaacacaaaaaaccaattaagttgcagaggggggaaataatcacaaacttttggcaacctgcttaatgctagacsctctgttttcactggttattctgagtgtcatatgcagatgcagatccaagggagacagggctaaatggtggtgtcaagaattcctcccacaccccaaaaattctttccaatatttgattattaaaatatctatcatttctccaccttgtgtctgtgtcttaagtgtctgtgaatattgtaaaagtgctgtatgtttagtagtgttgtgtgcctggcagtgctgactatgactactgtgccatctgtctgtgaccttgatgtcaggtacctggccatggggctaccagcaaggatgtgcaaaggaagaaccgctgcccctgccctc

SEQ ID NO: 637031 - DNA, 635 bp, Homo sapiens
acaattcttgccactcattctggacctttgattcataatgtcctgggataagtccaacttacaaagattcccaggtgattcgtgtgaccaccatttggaaaccagtaatatatacatccggagtcatatataccattttgaacaaagtagctaaaygcttatctctccttgtgcgattagtttcacatgttcgttgaggttatcatgttaaatggcaatatagacacagtcttagtgattcaacaattcagctgtttcagccgaattgaccagttgctaatttataagcaaattgtaactgatcaatttagtcagaatggatgcaagcccaaagacaaggtggagagcaagctttaatatacactttgtctcaaggccagctcttcatatttccctctttatatttcaaactaagaggcagatctcaggtcactcatctttagaattggtgagaatgagaaacagggaactgaagtgattcattcagattcaatttggaagtcattcccagagcctaaaatatttatctaaggggtctgatttatcaacctcaggtagtctccaaaacacaaaggtattcaggctaaaataaaaccaatcaaaaaaggaaattcaggaggctccagttctaagac

SEQ ID NO: 637032 - DNA, 630 bp, Homo sapiens
tggtaagttctgaaacaaaacaaaacacttcacaaacttcagcaaaacacgaaattgacaccaagtttattgcaggctctctgcctgaggctgattagtaccaattaaaattttaaagtagaaattttttttctaagaaaatacattaccatagcttaagacaaggaagaattttttwaaaagagatagaaagagagagaatccctcctcatagaagatccaacctagcccaaggctcccaggccagtaaagatgctggccttctgattccatctaagcaagagtgtgagttcgccctcggactaggttcccacacaggttgagggtccaggggtggctggtatcagcctcagctccagaatcattccccgttttgagtgtgcaattcttggtaagtgaggttggctcaaggaatatgctgctctgaacattaactcatactgctcagaatggcagagctgatcagaaacttagagattcagtcaattcaatgctctcatttccagatgaagaaactgaggcttgggaagagaaagtgacttattcagatacgctctcctagtgagcaatagtttaagtaccttatcaatttttaaagaaagaaaaagaaagttcttttttatatcaact

SEQ ID NO: 637033 - DNA, 544 bp, Homo sapiens
agcaaaggggccattttggatattataccctggaaggatggtgcactatcatccaggactcaacatataccctaaatgacctatatgattctgtgtccccagcaggtagaatacataggtccaggaaccaagagatggaatgatttaccaatactgcaaccagtaatcctcctgagatatttgttttctatccactcaaggttaggctctttagatctaaagatcctaactcccaaaagaggaacacttgtacctggggacatagttaagagtccctttgaactttaagctacaactgccactcaattactttgggatcctcataccaagaaaccagcaataaactaaakaaatcaaccaaccaactagcaagggtaatcgaccctgcccatcaggaggggcttagcttctgctacacaatagaagaagggaagaatatgcttggcggtcaggtggtccactaagaggtctcttgatgttcccatgctcaccacttaatggtaatacacaagaatagcaaccatagactgagaagggcacagta

SEQ ID NO: 637034 - DNA, 551 bp, Homo sapiens
acacataactacaaaattacctcagcttggcctggttttctctcctgccctcttggggaaacatgggcctggcctgggaaaaggcaggtcatgggctggaaggtaggttttggtactaggaagaaatctctgtatctgtcagctttaaagagaactgggccaaaaatctctaacctcactctctctggactccaacacttccctgcaatcctttggtcttgagcatgtgccagcatgaaggcagactccagttcatacatgaaaggcaagaaaaagaaaatagtaaccttgaatcttctgtgggccaccaggcactcacctttccccaccttgcacactatccagtcaaggctrttgcagcccatctggtggctttacatgggacattaccaaaggcttcttcctccatcctggggttgcaaaggatccaggtcccctccatccagtggggctcttccacatcagaagtccccctcccaccatcctctgcatcctgtttagctatcccatctataccttttggagatgattatttagaaaacaaagaaagg

SEQ ID NO: 637035 - DNA, 423 bp, Homo sapiens
ggtgttagggcttctagcgtttgcttcagtgtttttcacacccacctttctaattctgaaatttgaattttttcttctatacagtcaaggttaagaacacatactttctcttcagaaattgtagctaggtcttctttaccttctctataaacttatctacaggttgatcctaaactttgaaaataagtaagtcatgtttacgttattatgataatgaaacctctctcacttcagtaacaaatagtatcaaatgactgcaattgtatctatatatggagatatagatatatagatatgtcttggagtttttcatggrcattctttttctttcaactttttgcctgcataatagtcgattccccccatccctatctgtttaatattacattatgtgttaagaactgttttttttctgtctctttc

SEQ ID NO: 637036 - DNA, 438 bp, Homo sapiens
tatcactcccaaaataatttctctcacttgccactttgtttatgagtatttttccatctttgtttatgagtattttrtgagtatatttctttctgtatgatattacttatatttggattcatgtccccacagaaatcacctccattaatcccatgtctacttctttttatctagaatagtgactttttctttagttttcctatacacattccagattcttttatgatgcaatatattattttataaattccaggccatttgaaatactctgtttaaagatcagttcctgttattctgaaattcatgtttacaatgtaaattagaggtttaaaaagaagaaagctgttcaggatgaaaaacaaaaattcatcttatctttattctataaactcatggcaagcagcaaactcatctaaatgcatatttcatatttgaata

SEQ ID NO: 637037 - DNA, 557 bp, Homo sapiens
gaacaggtggtgtttggttacatggataagttacttagcggtgacttcgagattttggtgtacccatcacacaagcagtgtacacttttgaaaagcttgtttgttgcagataaaatggctgagaaaagcttaaggttatattaatcaacaataattattttcttagtgtagacttgttcatttggagttaactattggaactgaaggttaccacatccaataatgttatttccttggttctgtattgattttctagggcctttattagactgaaagatttaaaaactgaacttcattggtttaaccctttttytttctggagcaataaacccatctttataaatatacaggtcatatggtagtttatactcaggactttaaaccatttcattcaattatcagtgtacctttaatgtatgttattttctctggttcattattgaattaataagtacatattttctgatagacagtcttccacccattagctcattccagcatatcattttgtctttgtaaataaaagtttattcctattaaaattatgaatatgaaac

SEQ ID NO: 637038 - DNA, 666 bp, Homo sapiens
tatcaatttaaaagaagctcaatctagttttatattttgccaatctaaattagaagttcggataactgatctggatctctatattctttttcacatatttatagcactttgctcatccccctatttaagcacttactacatgactstttatgttacatttctttatttattcattgttttgtgagctagccaagtcaggcacttagtcaaatccatggtttcagcaccgaggacagcgcttctgttagttaatttcttcttgggctctaccttccacaaacttaggatgtggggacaatgtaggcagtacaatgcactgaggtaggtaagatgataatttgcattcagatatgagaacatgaatgagaacttgggtgggtggaggtaagtagcatgcagtgagactggagaggtgaataggaaccagatggtatagactttttcagccacatctggagtttagagtttactctaagagcatagggaataggttataatggtttaatcagggaagttaattgagctatcccatctaattttcaattccgaaagttcaatttggctatcaggaaatatgtgtcatattctaaaaataaaattttaaaaataaaattttaaatgaatacctgcatttaataaataatataactgaaataatataactgt

SEQ ID NO: 637039 - DNA, 666 bp, Homo sapiens
tatcaatttaaaagaagctcaatctagttttatattttgccaatctaaattagaagttcggataactgatctggatctctatattctttttcacatatttatagcactttgctcatccccctatttaagcacttactacatgactgtttatgttacatttctttatttattcattgttttgtgagctagccaagtcaggcacttagtcaaatccatggtttcagcaccgaggacagcgcttctgttagttaatttcttcttgggctctaccttccacaaacttaggatgtggggacaatgtaggcagtacaatgcactgaggtaggtaagatgataatttgcattcagatatgagaacatgaatgagaacttgggtgggtggaggtaagtagyatgcagtgagactggagaggtgaataggaaccagatggtatagactttttcagccacatctggagtttagagtttactctaagagcatagggaataggttataatggtttaatcagggaagttaattgagctatcccatctaattttcaattccgaaagttcaatttggctatcaggaaatatgtgtcatattctaaaaataaaattttaaaaataaaattttaaatgaatacctgcatttaataaataatataactgaaataatataactgt

SEQ ID NO: 637040 - DNA, 666 bp, Homo sapiens
tatcaatttaaaagaagctcaatctagttttatattttgccaatctaaattagaagttcggataactgatctggatctctatattctttttcacatatttatagcactttgctcatccccctatttaagcacttactacatgactgtttatgttacatttctttatttattcattgttttgtgagctagccaagtcaggcacttagtcaaatccatggtttcagcaccgaggacagcgcttctgttagttaatttcttcttgggctctaccttccacaaacttaggatgtggggacaatgtaggcagtacaatgcactgaggtaggtaagatgataatttgcattcagatatgagaacatgaatgagaacttgggtgggtggaggtaagtagcatgcagtgagactggagaggtgaataggaaccagatggtatagactttttcagccacatctggagtttagagtttactctaagagcatagggaataggttataatggtttaatcagggaagttaattgagctatcccatctaattttcaattccgaaagttcaatttggctatcaggaaatatgtrtcatattctaaaaataaaattttaaaaataaaattttaaatgaatacctgcatttaataaataatataactgaaataatataactgt

SEQ ID NO: 637041 - DNA, 385 bp, Homo sapiens
gaaaattttgggaaggaaagaaatatgttaaaaatcagtattttgaaaatatcgtattgagggtgaccagaggtagaacagaaatccatgcagactgaaagtggcaagtctcactaggaagctttctgtagcacagtgggaaaaaagatgaaggcatgaaagaacatggtggaataactgacataactcagtagacatactgcagaaaactttaaaaagagagacatgattcccagtctatcaaccggtagaatattgatttcatttgcagaaactggcaaggagcattccctcagcatgtgatatttcrcatcacagtgttatgaatttttcaccttcatatcatttattataacttataatcacgttttcactgtaatctaat

SEQ ID NO: 637042 - DNA, 604 bp, Homo sapiens
ttgtaaaactaacaaattagcaaccagattagaaatcatggtttaggagtcatacagctagatgcctcaagattcccaacctcctcaattgctctatgggtaatattactattacaaaacctaaaattggtgtttgggatatttttaagaccccgtattctgataatctggctcaactagttctgcgatcccaccgaggaacagcaagaagcaagacagcaagaagacccgcttcaaccctctatgatttcatctcagacctgaccartcagcacactccattccctagcctgctgtccaccaactagttatctttaaaaaactctagcctctgaattttcagggagggtgatttaagtaggaataactctggtctcctgtttagccgtctctatatggattagatactctctgtattgcaattcccttgactttgatcaattggctttatctgagaagcagacaagatgaacctgctgggtggttacaatagcattgaagtcattgacacatctttgcatcattattatctgatggcattttgttaattactatgttaaatgttggtatctcccccaaccagactataagtttgtaaatgctt

SEQ ID NO: 637043 - DNA, 604 bp, Homo sapiens
ttgtaaaactaacaaattagcaaccagattagaaatcatggtttaggagtcatacagctagatgcctcaagattcccaacctcctcaattgctctatgggtaatattactattacaaaacctaaaattggtgtttgggatatttttaagaccccgtattctgataatctggctcaactagttctgcgatcccaccgaggaacagcaagaagcaagacagcaagaagacccgcttcaaccctctatgatttcatctcagacctgaccaatcagcacactccattccctagcctgctgtccaccaactagttatctttaaaaaactctagcctctgaattttcagggagggtgatttaagtaggaataactctggtctcctgtttagccgtctctatatggattagatactctctgtattgcaattcccttgactttgatcaattggctttatctgagaagcagacaagatgaacctgctgggtggttacaatagcattgwagtcattgacacatctttgcatcattattatctgatggcattttgttaattactatgttaaatgttggtatctcccccaaccagactataagtttgtaaatgctt

SEQ ID NO: 637044 - DNA, 558 bp, Homo sapiens
aacattccttcctgataacagaccatcaacctgggagtggttctggccagtctatggaggatgcgcagtaagggttttcatgtcctttgttccaccttttgatattagagactccatcctcgaatcatgctaacaccaccattttttgaacatgccacccatgaaggggcatgaagctccattgtgcatacacatgtttcgcctttagtaaattwtcatgactcctatggcttattaaatacataccttcagccacctaccctgcttgtctaagcataaatttctgtttccttcaaccattccttaagtgcttgctttcaacagcgccaaaggctatgtacgcctcccagcctgtcagagtggccaccttacagacttcaatgctttatgaaaaataatgctctcctttccaaatttatgaaccttgcaattcttcaattgacaaaaggttagtagaagtagagaagaggaagaaaagcatggagcaaaggtgctctttttatgcagatgaaatttcacaggtagccgctttcagaaagaaaccctatcctgtggcaa

SEQ ID NO: 637045 - DNA, 639 bp, Homo sapiens
tttttctcccctttttctctcctcccaacctccccttttttacccttccaacttcctactccaagataactgtaaatagccttkcacccatcatctataccactccttaaatatgcatttaatcacacacacatatatgcttatatatgtccataagcaatatatatacacacatatacatatatctacatgtgtgtacatatatacatacaggtgtattcacatatataagccattttcatcatttgtattatagaaatgatatcacaatatatttgtctccgaattttgtttttctcacttttgaaacagactaaaaacccttacacatttttttctattaattgatgctactccacgggatgcatatgccacaatttatccatttattttctttacatttctcttatctctctttctttccttccttctttttccttccttccttctttccttccttccttccttcttccactcattctgcttccttcttaatactaacaacactacagccaatatatttctgtatataatctgatgtactgatacattttttcctttgggatacttccataggacttggattgcttcatattatatgtaagcttttaagattagtagatatggccagactgatct

SEQ ID NO: 637046 - DNA, 660 bp, Homo sapiens
cagtgcttcttcctattcaggcatgaataatgtcccactttatggatatgccacattttatttaccatttgccagttgatagacatttaggttgtttccactttttggctgtcatagataattctacgaacatttatacacaaagttttgtgtaaacatatattttttaggagtagaattgctgtaccttacggtaactcttgttaaactttttgaggaactaccaaactgttttccaacacagctgtatcattttaaattccttccaactagcaaatgtatgagacttcccatgtctccatgttcttgctccaccctctaacgtatttttggattaatcaatagatatgctttggaagagatgaaatattgaattttatttttaagatcataggataatgaaattcaaatttagagaaatktaaactattttacaaacaaacactttactgcagctgtttacaaaattagtctccgttaagataaatgcaaaatagcaagccatgtggatgctattattgactcttaccatatttgcttaatctgcaatatgctcagaattactctgtgtatctcttcatgattcagggtcatcctatatgtctaatagtctgtcccagagaaaaaaaaatgtatagataatgcctatgacatctcaaa

SEQ ID NO: 637047 - DNA, 454 bp, Homo sapiens
gaattttaggggcctgtttatagagaagtacattgctggctttaatttatccataattcagttcaatttcctatcatgtggttttacaatagaactgagactccaagttctaggtcattaaaagggtcagaaaaaacgtacacaactcatcatgcttttctaggatatttgcatttcactaaggcacaaagccttaaattttgtcatcggagaacaggcaaaggagggtttggacaaaggctatttgagcattttcattatctcttaagtgacagcagaagtgctgtcccctgctctaatacactttcccttttgccaaattacactttctccaatttcaccaaattccatctcttcttggtgatgccttcaaataaccagggtcatgaataattgctaaactacttaacattttcctcrtaaaatatatttattggcttaatatcatataatc

SEQ ID NO: 637048 - DNA, 435 bp, Homo sapiens
acaactatcactgtgatatttgatattttgtggtatttaaagttaaattcytgactctactgcatgaaaagatttatgaaggataaacggtgaggatccaaatttttcaaagtttgctccagagacaatactatcaccagcatcataattacacagggtccttaatgaaaatttaggcatttcaactcttcctaagagctattggctagaaatgttttggattgcctaagaacctgtctttttaccaatgccctagatgaattctgcaaacatcacagttttgaaactcattgtactaaaatatagctgaagataatatatgagaacataagcaaattgactgtacttaaaatgatgactcaggtgagtagatttttaaagtaatgtaaagaactaaaatacttttatgggtgattctcatcttataatattatt

SEQ ID NO: 637049 - DNA, 574 bp, Homo sapiens
gaagccaattaaaactcgcagtagtattgtacaataatgtccacaaaggaaatctcataaagtttgacttttatccttttaaaagaattactaatttgttatgaaataggcatgttgcttttgcataagttatttttagttatacaacaaagaagaaaggttatatgtataggccagtactaatgtagatcaaagagaaagctgaagtgtttggctctatcttaaaccttgtctatcaaatagaattgagaacaatggaatggtaaaaacatcatttaagacaaaatcaaaagccaagaattggatgaaataatcttaatggcacacattgttttctaaatgaattcacattctatatcaaagttttgaaagatcttataaatgracatgctgaaacattctccgagatatttagctgagataaacaaaataattaattgtcttttaaaatatattatacctttattacttaactctctgatctattataatatattactactaatgcatttctattgatttcttcctaagatatcttatggtttttgttttatatatgtcaataacaaagttt

SEQ ID NO: 637050 - DNA, 574 bp, Homo sapiens
gaagccaattaaaactcgcagtagtattgtacaataatgtccacaaaggaaatctcataaagtttgacttttatccttttaaaagaattactaatttgttatgaaataggcatgttgcttttgcataagttatttttagttatacaacaaagaagaaaggttatatgtataggccagtactaatgtagatcaaagagaaagctgaagtgtttggctctatcttaaaccttgtctatcaaatagaattgagaacaatggaatggtaaaaacatcatttaagacaaaatcaaaagccaagaattggatgaaataatcttaatggcacacattgttttctaaatgaattcacattctatatcaaagttttgaaagatcttataaatggacatgctgaaacattctccgagatatttagctgagataaacaaaataattaattgtcttttaaaatatattatacctttattacttaactctctgatmtattataatatattactactaatgcatttctattgatttcttcctaagatatcttatggtttttgttttatatatgtcaataacaaagttt

SEQ ID NO: 637051 - DNA, 551 bp, Homo sapiens
gtggctagtgtaattaaagaactgaattttaaattttatttaactttagttaaatttaaaatccttgatatttagttattagaaagctttatgaaaacatatgasaaaacattctaaaaaacatttatgtttggaaccacgtaaatatatgaatcaaatttttcaagagtaaactttaggaactttaaatatagatgaaatatttccactgtaaaattgacatctgaattaagatgtgcagtaagtgtaaaataaacatcagattttgaagattttaaagaatgtattaataaaataattaataatatttatgttgattatatgttaaaatgataatatcgtaggttgaaataataatattggtttaaataaaacattgttaagataatttaacttgtggccgggagcattgacttacgcctataatcccagcactttgggaggccgaggtgggtggatcacgaggtcaagagatcaagaccatcctggccaacatggtgaaatccctctctactaaaaatacaaaaattagctgggcatagtggcatgct

SEQ ID NO: 637052 - DNA, 551 bp, Homo sapiens
gtggctagtgtaattaaagaactgaattttaaattttatttaactttagttaaatttaaaatccttgatatttagttattagaaagctttatgaaaacatatgacaaaacattctaaaaaacatttatgtttggaaccacgtaaatatatgaatcaaatttttcaagagtaaactttaggaactttaaatatagatgaaatatttccactgtaaaattgacatctgaattaagatgtgcagtaagtgtaaaataaacatcagattttgaagattttaaagaatgtattaataaaataattaataatatttatgttgattatatgttaaaatgataatatcgtaggttgaaataataatattggtttaaataaaacattgttaagataatttaacttgtggccgggagcattgacttacgcctataatcccagcactttgggaggccgaggtgggtggatcacraggtcaagagatcaagaccatcctggccaacatggtgaaatccctctctactaaaaatacaaaaattagctgggcatagtggcatgct

SEQ ID NO: 637053 - DNA, 585 bp, Homo sapiens
cttaagcagaatgtagaaagcactaccataaacaaaaattgataaattgggcaacattaaaattaagaacttacattcttcaaagacaattatattgattatatcttgattcaaatatattgattatattgattcaaaaacaattatgagctaggtgyggtggctcacacctgtaatcccagtgctttggaggctgagatgagatgatcccttgaggccaggagttcgagaacagcctgggtaacataaaacccatctctacaaaatattgaaaagttagccgggcatggtggcacatgcctttactttcagtactcaggaggatgaggcaggaggatcccttgaacccaggaggtcaagattggctgcagcgagctatcatcatgtcactgcactctagcctgggtgacagagtgagaccctatcaaaaaataaatgaataagataaataaaagccacagatggtgcaaagaaataccatacatataacaaactaggaacacttgtcaaaatccatgcaaataaacaaaagacaacaatttataaagagaaatttccaaatagccaaagaatagggaatgcata

SEQ ID NO: 637054 - DNA, 593 bp, Homo sapiens
tagaaaagaatgaggaaactaatttcagtccactgtaggtggaacaattacctaacacatgcattgggttcatggtggtaatggtggtgtctcgacctagttaaggaacacctcctaaaaggagctacttgaaggccaaagtttactgttaatgtggatactcacggaaggagagggaatgcacgcatgattttccattccactgctcccttggcagctcattcctttgagctaccagagtattgaaatggaaaagatttgtgcttgctgaggctccttgagcaggattcttgtcaattccaatcagctgcttacttaggagtttggaacaagccaggggaaacaaggtagggagtcaggcatgaatgagcttacatcagagttatgccrtggagctccagatctgaggcattaacacgaagcacttattcttaaaaagctgatctctctctcttgttttttttaaatttaaaaggaaggtgactgctgacattttaactatacagtgttgatttctagaatggacaatctgagcttcttcaggcattcgtacctgatcttagcactcaatttttaaattgagagttcggtaa

SEQ ID NO: 637055 - DNA, 629 bp, Homo sapiens
tgcaattattaatcctgaactttatattatctcccttctgygtggaacattcttccctcagctattcccacagcagggtaaatctcatcctcccagtcatcaatattgggcatgaggagcttccatggcctgtgattggacagcaattggtcttagctcaaagactgtttgctttttgtagaaaaaccaggcattatcttcctgcactcaaaataaggcttaattttttcttgactataatggtagtaaatgtcaattgcagtaaatctaacgcaagctggaaattataaaagaatatatataaatcatatgtatacttgttctcagaaatagctattcttgatatcttaaaacatgttctctgttctctttcctaatttgaaatcatgttttatatgtaactatgaaattgtgaaacctttccatagttaaaaatcagatggtgctaatttccctctactgctatattattgaggtaagaatatttctgtatacagacagtccctgactttttgtggttggacttaaccattcttccactttatgatgggtttatcagggtattaatttcattttcaacttatgatgtttgtgaattatgataagcttattgtgatgtaggctcattg

SEQ ID NO: 637056 - DNA, 595 bp, Homo sapiens
atacggaatttgagatcgttcatggaatcaccacgtattaaagcggagggatccgggcaagcacattatctgattagccagcatttcacagctggtacagatgaggaaacagggctaaagctgtttgaaggatgcgtctaaggtaatactgcaagtccctggggagaatcttctcctccctgccacctccctacaccatattcatgatcactgactgctgtgggttaaactgtgtcccctacaaagatacgttcaagttctaacctttggtatctgtgactgtgaccttatttggaaacagggaactaaatcaagttaagataaggtcatactgcaggacaggccctaatcgaatgactgatgtttttgtaacagaagggaagtttagacacagatatagaggaaagaagaccgtgtggtgacaaaggcagagattagagtgactcagctatgagccaagcattgctggcaaccgtcagatgctgaaacagacaagggaggattctccyctagagcaggggtccccaaccccgggggccacggacataatggaccgcacagcaggagggttgcaccgcagcgggtgagcaagcaa

SEQ ID NO: 637057 - DNA, 578 bp, Homo sapiens
caaactattgtattaccctgcaatattacttcatttcctcaataaccttaagttatatcttccttttttatccatcttccaagttcttccacaaakatttcaatgcttcaaaaaatactgtgcaggggaaaagcaaagatttagaatcaaatcaactcaagttcagttcctgtgacttctaaatctcttgagtccagtctcagctactaatttgtgttattatagctacttctacttcttccctcatttcacttgttcatgtgcattgccttgattgtgtcaacagttacctttgttatctttctcagaaaggcaccatcatcctgctaacctgagtttggagaactgtatatactgtggtcagcactgacctcacaggaacaataattgtttccacaaggaatgccacattatcttcccaatgggcaactgcacgcactcccatgccaaatcctagatgctggaagctcagcatgggctgccttctggaccaccacgtggccagctggcagggctgacatgaaggagtgggctggctgacactcaaagacatgacttggaagtccagaagactgtca

SEQ ID NO: 637058 - DNA, 578 bp, Homo sapiens
caaactattgtattaccctgcaatattacttcatttcctcaataaccttaagttatatcttccttttttatccatcttccaagttcttccacaaagatttcaatgcttcaaaaaatactgtgcaggggaaaagcaaagatttagaatcaaatcaactcaagttcagttcctgtgacttctaaatctcttgagtccagtctcagctactaatttgtgttattatagctacttctacttcttccctcatttcacktgttcatgtgcattgccttgattgtgtcaacagttacctttgttatctttctcagaaaggcaccatcatcctgctaacctgagtttggagaactgtatatactgtggtcagcactgacctcacaggaacaataattgtttccacaaggaatgccacattatcttcccaatgggcaactgcacgcactcccatgccaaatcctagatgctggaagctcagcatgggctgccttctggaccaccacgtggccagctggcagggctgacatgaaggagtgggctggctgacactcaaagacatgacttggaagtccagaagactgtca

SEQ ID NO: 637059 - DNA, 611 bp, Homo sapiens
aggtttcactattattagtcagcatatatcgaagcatgttcactgggaaaacattttctgcagtgacaatttcaaaygtgactgattaaaaggaattgctaaagaaatttgcagaacagtagcaatgaggcagccatgatctccttaacaggatactaagctctagtacttctgaattctcatttcaatcctgtccaggaatttcagaactttattctccaaaatgcttcctctctcccctaccctcatgtatttacaacaatgatcattatttgcaatctataaacttccagttaacgtcctccaggaaaaccaccttcctgaatctccacaccagattcagctgtcatctcctatttactctcaagtccaactgagaccactgccaagatgaagctggtgtctggagcgtatgttttctcctggggtcttgattaccagtcagtttggcatcttacgagatgatggaaagagaaaagactgaatttatttttctgtgccactacaaaatctcttgacatttggctttccaagcaaacctaaaagaaatgaattaagtaattaaatcctgctaactacgtacaagacaacttccaaacattatttcatgt

SEQ ID NO: 637060 - DNA, 417 bp, Homo sapiens
tttctggttctcacttaaattgtattgtgagaatcatatttatctggttatgctactataaaatgggacactgagcattaaggtcataatcctttacaaaaaattgctggggaaagaaaggtgattaaaagttaccgatgaaagatttatgtattacaggttcagaatgccttatctgaactcctgggagccagataaatttcagaactcataacctgcaggtttctgaaaggtaatacaatgcacataccattattatttaacacctccattgaggtatgaggctgggcccataagcgaatatattaaataccccagcatcaaaaatgtgtcaatgtgcacataagcataaaaaataagacaatacacaactttattcgtgtttaratttgatttttttttccgaatgaatttgct

SEQ ID NO: 637061 - DNA, 543 bp, Homo sapiens
ctgattatctcatctgattagaaactctgattaacagtaatgcatgggtttttctatcaaattgaaaagtgaagtacctcttgataaatgcaaatttacttataatgacaaatcttttaaacaacaacatggggtggaggagggaataggtaatttaaaaattgycccttggtgatagaaagtttaggaaccaattgacctactgtggtctttattctagcttcaatttttaaattaaaattctttacgttttttggcatctcaaataaattcttcctccatgaagtcttcccctatattatcaagaagaagtcatctctccttgctttttgatcctatattatggtatatatgctgttctcatagcaatctgctttcctgttttgttggctttaagatactatcaattataatctgtatcgttattttatatacaacaaagaaagaggaaacactaactaccaactaaactacagcatatcatcttgaatttaaaatgtaaaaaagtgcaaaaaatgttacagaattgatgagaagcaacat

SEQ ID NO: 637062 - DNA, 543 bp, Homo sapiens
ctgattatctcatctgattagaaactctgattaacagtaatgcatgggtttttctatcaaattgaaaagtgaagtacctcttgataaatgcaaatttacttataatgacaaatcttttaaacaacaacatggggtggaggagggaataggtaatttaaaaattgtcccttggtgatagaaagtttaggaaccaattgacctactgtggtctttattctagcttcaatttttaaattaaaattctttacgttttttggcatctcaaataaattcttcctccatgaagtcttcccctatattatcaagaagaagtmatctctccttgctttttgatcctatattatggtatatatgctgttctcatagcaatctgctttcctgttttgttggctttaagatactatcaattataatctgtatcgttattttatatacaacaaagaaagaggaaacactaactaccaactaaactacagcatatcatcttgaatttaaaatgtaaaaaagtgcaaaaaatgttacagaattgatgagaagcaacat

SEQ ID NO: 637063 - DNA, 632 bp, Homo sapiens
cctccttcacacttaacaccatgtggaaactgccaaggcttgtggcttgcaccctcaagagctgtggctcaagctttacctggactcctttgagctgcagctgcagctggagttggagcagttggaatgcagggagcagtgtcctgaggctgcacagggaagcagagcccagggcttgacccctgaaaccattcttttcttctaggcctctgggtccatgatggaaggggctgcctcagaaatctctgaaatgccttccaggacttttcccattgtcttggatattagcacttggcttccttttagtcatgctaatctagcaagtggttgctccacagcccacttgaattcctctcctgaaaatgctcttttttcctctatcacatggccaggttgtgacttttccaaatttttacactctgcttcccttttaaatataggttccaactttaaatcattcttttgctcctayatctgatcctggctattggaaggagccaggccacaacttgaatgctttactatttagaaatttcttccaccagataccctaagtcatcactgttaagttcaaacttccagagccctaggacatggacacaatgcagctaagttctttgctaaaacataaa

SEQ ID NO: 637064 - DNA, 641 bp, Homo sapiens
aattagtttctttgggataggaccttaccaaatacttccaggtccttatggagcaccctgggataatcgtgcttcctttgagtacattcaaactcctctgcttacctcagaaaccaagtgcccagcatccctcttccatctcagaacatttctctagagctcaccttcttgcaaggaactgattacccatccctactccccaaggtctctagtcatcatttataaatctcaaactcatggaggaagtctcttgcccgcagaccgaacgatgacattgatttccaagtacctatctctatgacattcttgcttsccacccaaccaaagtgctttcccttttccttgcatggctctttccctgttggcctttggctctctggaagggcaacaagaagtggcttcgctacttcacattccagaagattgaggacccagtctatgaagtcaatcctaacatgagcctgaggttaaatatggagatgaccctgacatccagaaacagaattttcacccgaaaatttgtctttgaggtacagtgagccactggatgagacacaaacagcaggactgaaaacagctgtctgttgttgtgtacctaaagtacagttttcagttcgcatttggaaattgtggccatatac

SEQ ID NO: 637065 - DNA, 485 bp, Homo sapiens
ataagttgtactgatatgtccatctctgaagcatttcctggatttgtttagcttcaaatatcttgataatggaccaggcaaggagtcgtccagagcagcacagcccagtggcttaggggtctgcactctgtgagtcacaggaaacacctccctcgttaccctgagccactcagttttttttttttctggataagtatgtatttattatagattattaaaaatayagtcagtcttgattttcttccttcagctacatagggaattacaatgtgcttctacaaagaatgcacttatatttccactttgatactttttgatagaagtagcaggaagatatcttctttctactctgagaatttattaaaaaatcttcaatgaatgggattatcgatcttttaatttgtgagggatcttaatctaattacaaaagtagttttacttattttccttctgggctcagttgtttggtgattattgtaggccac

SEQ ID NO: 637066 - DNA, 606 bp, Homo sapiens
tgtttctatgccagtaccatgctgtttgggttactatagctttgtagtttactttgaaatcatgccttcagcctgacttcatgatgcctccagctttgttctttttttaaaagcttaagattgctttggctattcagagtcttttgtgggcccacatgaattttaggattttttctatttctgtgaaggatgtcataatttttgttttatataygttgtttgaagcaaaatattcataactattacattatcattgtggaatgttacttttaacatcacaaagtgttcttctttgctttattgattgtttttggtctaaagtatactttggtatcaggattgcaactctagatttcgtgctgtttccatttgcctttatttttagcctttttgaatcactgtgttttaagattagttcctgtattctgcgtagagttaggttttgctttatatgccaattcgacaattttttttcttttaactaaaaaggtgagttgagctcattcacatttactaacatgactcgtaggcttgttctcaagaagcatataaaacactgcataatgtgtaggtgtgctctactacaacaaattgaagattctgtca

SEQ ID NO: 637067 - DNA, 606 bp, Homo sapiens
tgtttctatgccagtaccatgctgtttgggttactatagctttgtagtttactttgaaatcatgccttcagcctgacttcatgatgcctccagctttgttctttttttaaaagcttaagattgctttggctattcagagtcttttgtgggcccacatgaattttaggattttttctatttctgtgaaggatgtcataatttttgttttatatatgttgtttgaagcaaaatattcataactattacattatcattgtggaatgttacttttaacatcacaaagtgttcttctttgctttattgattgtttttggtctaaagtatactttggtatcaggattgcaactctagatttcgtgctgtttccatttgcctttatttttagcctttttgaatcactgtgttttaagwttagttcctgtattctgcgtagagttaggttttgctttatatgccaattcgacaattttttttcttttaactaaaaaggtgagttgagctcattcacatttactaacatgactcgtaggcttgttctcaagaagcatataaaacactgcataatgtgtaggtgtgctctactacaacaaattgaagattctgtca

SEQ ID NO: 637068 - DNA, 559 bp, Homo sapiens
aactgcagccaggtggagaacctgtgggctgtggcacagcctggctgtaaggcagggcctgaaagccagagaccatgggaaggcagaattgatgagacttgacattgaactgcggagagacgccaagrcaatgaggtttttagcctcagggactaactacctctttaacctcatctttaacgagaccaggatggaaacacatatgactgggagcagctgcattcgggattggaataaaaggaaaattgctgctttcaatgtgatcaaaaacaggcatccatcccacagttggtaaacagtgtgggtatgtgtacgacaaatgtgtgttcttcagtgggggctggaggtggcaaaccctaaaggtagtgatatggacaatgcttcccctgaagtgtcccacagacttctatccagtggtgctaaattctgtccttggaaacattccatgagattgtttgcctcttggatttccacatctacacccagattcatggcccatggggaaaaaacctgggtgatgtcaaccacagcagggccgttcttgagattgaaggcagga

SEQ ID NO: 637069 - DNA, 459 bp, Homo sapiens
agccaataattattttctttttctgaatcctccatttttcacagaggattgcatagaatttgtttagtatctcacagtatctaaaatgacttaggaaaaccaatatactcagagcgtgcaagcccttcctgaatttgtcttttggatttcttctgcatggaacagaattgtgaagacatgaagatgcaattctttatatctcctaatttatcttcttttctcctaatttttcttcccctcagctctcatatcaggcccgcttatggtgtttgccactaattttaactccaacatcaaatttccacctgaacatatggactataaacatctcagcagccacagggcagagtgagcactgctctctgctacaagaatttcaccttctgcagastaaatttagaaagtgatcaaaatcttgaaagggttagggagtgctcagattcaatttcctcattatag

SEQ ID NO: 637070 - DNA, 246 bp, Homo sapiens
tgtaaccctgaccgaaagaaaataaataaactgatcaggagatgactacctagattaataaaatttggaatgttttgcaattgtatgataatgacggtatttgcaataataaaayggctcgcaatttgaatttacaatccctagttactccacaaagcattagtgttttagatgcaagattggctattaacaaggcttctgcccagctcctgtatgaggattctgttatgggtaaactggagacaa

SEQ ID NO: 637071 - DNA, 246 bp, Homo sapiens
tgtaaccctgaccgaaagaaaataaataaactgatcaggagatgactacctagattaataaaatttggaatgttttgcaattgtatgataatgacggtatttgcaataataaaacggctcgcaatttgartttacaatccctagttactccacaaagcattagtgttttagatgcaagattggctattaacaaggcttctgcccagctcctgtatgaggattctgttatgggtaaactggagacaa

SEQ ID NO: 637072 - DNA, 367 bp, Homo sapiens
ggttttaacccttccacttaatcatttttcattcccgattggacctcagtgatggcagcactaggtgtcacattcctaagaccctaatcccctctcacttacattcccacttcaaaaattamaggcataagcaaatctttgaaaaataacattttttgtttgtttgatgtataagtgctgttctaaataattcattaaatagatatattagaggtttattttccttacctgtaaatgccaccatttctcctttaaaactcattgtctccatgttttctgattaattcatcccctcttgaccccttctttggtctccacactttaagtgcaaatgtgtcatttagcctcaatcagttacttttgagtt

SEQ ID NO: 637073 - DNA, 367 bp, Homo sapiens
ggttttaacccttccacttaatcatttttcattcccgattggacctcagtgatggcagcactaggtgtcacattcctaagaccctaatcccctctcacttacattcccacttcaaaaattaaaggcataagcaaatctttgaaaaataacattttttgtttgtttgatgtataagtgctgttctaaataattcattaaatagatatattagaggtttattttccttacctgtaaatgccaccatttctcctttaaaactcattgtctccatgttttctgattaattcatcccctcttgaccccttctttggtctccacactttaagtrcaaatgtgtcatttagcctcaatcagttacttttgagtt

SEQ ID NO: 637074 - DNA, 512 bp, Homo sapiens
gaaaaaaaaaaaaactctggcaggagctgaaatccatagactttaagataaaaacaaataacacaaaaagtttctgaaaattaataaaaataattttaataaattaaaaatcaaaatagaaatacttagaagtaatttacttctacttcatataaaattaatttaaaaattaagctgatttaatagagtacccacataaaaacactttcccaataaaagttattcaatattataataattctgattcaaatttggattcctaaatatgtgagcaaaacattctggagataaaaatatccatcagaacaaaatggtatattcaaaattagagtcaaaatattttcacttcaattaatagagggcatgagaaaactagctttttggctgctagatcacattgttgacaactgctatttccaagtttttgtgttttttttyccccaatccctgccgtgtagccatggctcttgtacagttgagtatttaatcaaacacagaactgaaaaatcatc

SEQ ID NO: 637075 - DNA, 614 bp, Homo sapiens
tatgtcagcaatgagatgatattcagtacagtaatgtgtataaatcactatattaggtgctttgcaaacattctctcaattctcccagccacctaattgggtgcagggggtattgttatcctcagttcacagttgtggaaattgaggctcagagatattaatgcaagtcacccaggattatgcttccagtgaacttcaaggcctggctgtgtcccgttggtcgtctatgttgcctttccccatgtggcatattcctttttctgttccagtgtcctccccaacccaagtgcctcagatgatcctaactagttatgcagtaacctgtggtggtcccatttcttgtgctcatgattggtttaaggatcgggatgtgaccagtattggacaatgagagatgagaggaagtcggctggaaggcttctagaaaaagcattcctcactatcaaaaagagatgcgcaaagcggcagcttctcttctgctgctggatgttaccgaatctgcatatgatagtaggatgacggcagccaccttgtagcaaagagcagagtttcctccaagagaacattctacggggagaagaggaracagcaccaatgacatcactttgcctgag

SEQ ID NO: 637076 - DNA, 563 bp, Homo sapiens
gaaagttcatgggatatttgttacagcagctctacgaagctagtacagtgacgttcacatataatagcgtcagagagctctgaagttcatgcagtcaaagtccagtgcatgcatgcatgtgggtgtgtgtgtctgtgtgtgtatgtgcacacacacatacttgcacagatgtgcactcattcatggggtcgtagggaggagtgtttgttgctgacactggaaaggtagatggatgagctgagctcaagtgtttaccaaaaaggcatgtaggcaggacctaagcttgtggaggaacagcttatgaggtggcccyggagtcctcatacagaaagtagttctgcactttcagcagcacccccagccctgggtgaggagggtaagttcattctatcttaaccgcagtttcagtaaagaggtgtgcaaagaatataaatgccttatttttaaaccacagttctttctccactcctgctgccgtcatcactaatagtctgacccgaacatagagaagcttcatgactttcactgccaaaaacatttttttttaaattttcaaaattcct

SEQ ID NO: 637077 - DNA, 563 bp, Homo sapiens
gaaagttcatgggatatttgttacagcagctctacgaagctagtacagtgacgttcacatataatagcgtcagagagctctgaagttcatgcagtcaaagtccagtgcatgcatgcatgtgggtgtgtgtgtctgtgtgtgtatgtgcacacacacatacttgcacagatgtgcactcattcatggggtcgtagggaggagtgtttgttgctgacactggaaaggtagatggatgagctgagctcaagtgtttaccaaaaaggcatgtaggcaggacctaagcttgtggaggaacagcttatgaggtggccccggagtcctcatacagaaagtagttctgcactttcagcagcacccccagccctgggtgaggagggtaagttcattctatcttaaccrcagtttcagtaaagaggtgtgcaaagaatataaatgccttatttttaaaccacagttctttctccactcctgctgccgtcatcactaatagtctgacccgaacatagagaagcttcatgactttcactgccaaaaacatttttttttaaattttcaaaattcct

SEQ ID NO: 637078 - DNA, 513 bp, Homo sapiens
gttcgaaagctgaggaatactacagccattttctttcaagttacactctgggtttccgctaagatacttccttcctgtcatgtttaaatttttgattggttcataagtatgaaaaaaaattaacaatctaaaattaaagaatgcactaaatcagaatacttttgtaattgctgttacattgtatagagtgacataattgtgttatcaagttacwcttagtgcatgagttttgtcactgaaacttcttttctgatattgtcccttgtttttttccgctattttgctgtgttagtggcaattttgcatgctgtttcatctggaaccactatgctttgtcaggacaagctgtgtcagatacactaaaattcaatctgatatgttgaaatgcataagaacatgcaacttcacaaaaggttgtatccatttccagcactgctgcacacatgttacctacaagccccagaattctgatcaattttgtttcaaaagagtcacggaataaaactaagttga

SEQ ID NO: 637079 - DNA, 545 bp, Homo sapiens
gaattcattaacaaggttatatagtgccttattattctgattttaggtataaattttcactttttagattttcttaaaataagttatgattatgattatgcttattatgataatttgtttgggcatctcctatgactattaaattgatgatttaaaatatttatcccctatgtaagttacatgattaactaatgctacattatgaaatagtttttcattcaaaattaaacttcaattatccttgcttctttctctccttttctaatccagcaaatcagatctatttttatatttgtttacatttttaatcaactacacatccctttaaatctgtttattgctttagaatttgaaagttcaaaaaagagaaaggcctattaagagactgtacagaatttagtacatatttctggacgctttcaaacatttatttccttaagtcaacytctgggtgtgatctcttaataaaactcacaagtctccctgaaatggtaggttagaatagaaattattttaacttctgcttccttatatagattaaaaac

SEQ ID NO: 637080 - DNA, 595 bp, Homo sapiens
atacggaatttgagatcgttcatggaatcaccacgtattaaagcggagggatccgggcaagcacattatctgattagccagcatttcacagctggtacagatgaggaaacagggctaaagctgtttgaaggatgcgtctaaggtaatastgcaagtccctggggagaatcttctcctccctgccacctccctacaccatattcatgatcactgactgctgtgggttaaactgtgtcccctacaaagatacgttcaagttctaacctttggtatctgtgactgtgaccttatttggaaacagggaactaaatcaagttaagataaggtcatactgcaggacaggccctaatcgaatgactgatgtttttgtaacagaagggaagtttagacacagatatagaggaaagaagaccgtgtggtgacaaaggcagagattagagtgactcagctatgagccaagcattgctggcaaccgtcagatgctgaaacagacaagggaggattctcctctagagcaggggtccccaaccccgggggccacggacataatggaccgcacagcaggagggttgcaccgcagcgggtgagcaagcaa

SEQ ID NO: 637081 - DNA, 413 bp, Homo sapiens
gaattcaatccccctccgtgtttttttttttttttttttggaaaagattacttactggggaggttactagaatatttcacttaattgaacttggccaaaaacagctctgaaacttcacatgttaraaactttctctcagttgcagcttgaaaatcttgcaaagaacttagactggtcttgtgtgggttggatgtgcacccctaaactagtcaaatgtggtgagaagggtcataaaaaatttttggctcctgccagaaacagaaggttagcaatgcaggcacagttatctcaagaggaaatgctgagcaaaggcacagctgaccactacacactcatgtgagatttatgtggaacataataattggctgggcacagtggctcgtgcctctgatcccaatactttgggagaccaa

SEQ ID NO: 637082 - DNA, 533 bp, Homo sapiens
gaattccacctccactcagaggtagaaaggccattcctttcctgaccatgttattagtggaggttgcatgggaggcaaaggggacctctrtctttcccagtcatgaaggcagtagtggaggccttgcagggtgccgtaacgctggtccctggcaggcagcagtaaggagctccctctcgggtgccaatggaggctgcaaggggaacctggatttctaacctcatcaggcagaaatgaggtagtgtcccctcttcccctgccataggaatgtcagaagccagttaaaacaggtttaaataagactgagaatctcataaccaaatacccaaaatgtctaggtttcaaaagaaaatcactcaccacatcaagaaccaggaagatctcaagcagaatgaaaaaagacaattaactgatatcaaaacctaaataacagagctgttagaattatctggcaaaaattttaaagtggtcattataaaaatactttaatgagcaattatgtacatactagaaacaaacacacaaaaaaacag

SEQ ID NO: 637083 - DNA, 516 bp, Homo sapiens
aggaagtccagcatggacagggccgtctgattagtgctctgattgtcactaagccatgggctcccagagggcagatgctttttcttatcagtctttgaaagctcactctctctctctagccctttttcaaattatgtaatagtggcaacctgatcaaggaagtaatagctcctatttggcaacataaagtacatgagctttaaaaatggactgaaacgaaagatggaatttgaaatagacaaaattaaggccaggcaccatggctcacgcctrtaatcccaacactctgagaggcttaagtgggtggattgcttgagcccagaagttcaagacaagcctgggcaaaatgaatgaaaccccatctctacaaaaaacacaaaacttagctaggcatggtggcacacacctgtggtcccagctacttgggaggctgagctgggagggtcgcttgtgcccaggagttcaaggctgcagtgagctatgatcatgccactgcactccagcctgggcgaaagg

SEQ ID NO: 637084 - DNA, 284 bp, Homo sapiens
ggctacgatcaatttttcaaaaattttactacaggtgatcaattatttttatttgatcacaattctgaggaagacagtacgaatctactgctgacacgaacattccactccaggagacaagcagaactctcttcataaagtaacatttaggtgacttgcttgtacaaatctgaagtatgtgaatttgggcagcatctccccttgataagctgttaatcaaggattattatttkgcccaattgctccgcaataggtttgacagaggcctcagaacttgggatatg

SEQ ID NO: 637085 - DNA, 582 bp, Homo sapiens
gctacctgaaagctggagaccaaggaatgctgatggtttagttctaataagtgaagggcatataatgcaagtcacagtcaaggacagggaagactgatattctggtttaagcagccaagtagggagagcaaattctttcatcttttgctcttgtgttctatttaggcttgcagtggattgaaggatgcccactcagattggggaggacaatctattttgtgaattccatagattcaaatggtaatctcatcagcaaataccctcacagacacacccagaaatagtgtgtagtcacccatgtwtaatgtttaatgtgggtcccagccaagctgacatataaaattgaccatcagatccattaaagacgttaggttgttaagcggaatgccttagtaaagactgcctcatattcctaattatttaattctggggtctgtaggtgtggtactgttgagacaataatgtaggtccttgaccttcatggctggctgtccagcaccatggaagctggaaatatggtaaaatacatttgcagtagtgaagcatttgatgaaagtcattccaatagtcttgtcggaaaaa

SEQ ID NO: 637086 - DNA, 556 bp, Homo sapiens
aagtagtcaaattttggaatgatgtaacattttttaaaagtcctcacttacaattggattttaaaatcatttcatcttagtaacacagactttattgcactgagaacgtcacttatttcaacctctggtcttctctgctttctgtttgtttgtttgttttgttgtggttgttgttttgtatgtcactctgtgctggtgctgtctcattgtggcccatgctgtctgtgggtcacccctttctgaaccaatcaccccatcccaacacctggccaaggctttmagggtaggtctttgaattaacattaatggtctcgccttcccctacttttttcctctcatcaagatgcattgacttacgtccccttccctgatatctcattagaaattaattcagcaaaccaatcctagctaagatatttgtgaccaaatatgttaaaacatacttattctctcaaagttttaacagaagggcttagtgcatgagacaaatgatttgaataatacacaacacttagaattaaggaatttctcaaataacataatattgttttacttc

SEQ ID NO: 637087 - DNA, 426 bp, Homo sapiens
ttgaactctcatgatcaattataagctggactcagtgtcccaagaaagcagtgccctggataaggaaaactgagaggatggcgtcgacatcctgtgtgtcatccaatcatcacaggactttccagtttaatgtccatctgaatatttgtatttattatccatgtattctatacctttgaatttcataccctctaatacccatgtctgattaggtatttgttcaaattataagtgytacaatttctgactaaaaaaacaacatacagacatggaagaaacaccctattgcatagagaaggaaataaaagtcagcggtaatccatctgtagtgaattgacaattgtcccttatgttcctcccatagtcacatccacaggacattcagaatgagacattattaggaaatagggtcagggctgatataat

SEQ ID NO: 637088 - DNA, 586 bp, Homo sapiens
ctgttttgcatttttatctcatgtttatctcatgtttatagctacagcattctcaatgtcaaattattttggtagctgcattcggtgtagattttgtcttttgtttattcatttctaaatagagtgtatcacagatatacacccaaattccaatagtccagttgtttacaaatgtattaaaaatagctcactctagaattatatactataatccagataagcctcacaagcattatcctcaatgaatggactcgtaagactgtgaaacatagatgttgttttgaaaatgcatggattgaaaaaattaataaaatagagaaattccatcaaggaaaagctttgcagtcactgtgtgcagtaaataggaatataaagaaaacatctctagtttatccatcaaagtatccctcttaagcaagttttaaactgaatcgatcatgaaccaataaatgacaataattatttccactcccattcttatgccatggttgaaatgagamacattccctaccactcgaagtatcttctctttccatatttatttaaagaccacatatattaattagaaatataaatacggggttag

SEQ ID NO: 637089 - DNA, 633 bp, Homo sapiens
gccttgttgggtctccttgtaggaagaaccacagccaagagaaatgcctgtctgttcccggactcaccccaggggtgcccaatcagactgttttacttcccacccagtctcaaaaggcaacctagtcctaagaatttttaaaatctaagttccacaatgtatctctgtctctcaaacccatcatttcatctcatcaaggagcccaggggtgaattttttttaagcaaataattatttaatgcagtgaacaatttatcttagtctatgttttgtatacacaggtcatcatagatttctcaaagaatgaaagggaagaaatgctacttcactactcctgaagtttctcttcatatagaataaactccatttctctctctccctcttttttttttctctccccaccctttccccctcaagtatacttgaaaagaataagttgggcatgctcacttcatctcctccctctttttgcttgggagctgtcaaaccttccaagagcatgcacttttactttatgccataaggtatacaaagacctgcctcaacacagggaggcctatccaattctggggaccactattaggaaacccacctgcccacagtattartacattctctaatactaatacctga

SEQ ID NO: 637090 - DNA, 595 bp, Homo sapiens
ttcagtgtctgaattctgccttcaacttattggcacctcgttcagacaatctcatggacagttctgcaaaccatgtgctctctcatcataccttttgacatagaaagggccacttctrcagaagtctttgtatcatctgcatggggctttatgtcacagtcatcttaaagtttgtagttcaggtcaaatgagatattttcaaagctcagtctgtattcccaaaacagcaataaatcactcagaaagttatgtgctcatttgcacatagcttcaaattactgatttagccagctgagggcatgcattatggttttttagcatatgattttttatttctggtgttctgatcatccagtaattagtggatacagatgaaattacatgctgctgccattgcctcagatggtcaggttttcaggatgccaactcccagctcctttagagttgacataaatattatggaagcaaaaaattatagtcatttgcagggaaatcatgtgtttaattgccaagtgaagcagggaaaaatagcagaagcacgcatcatgtatcagttaatgtgagtgcattattgcatgttgcaaaggggtctgga

SEQ ID NO: 637091 - DNA, 627 bp, Homo sapiens
gtatgaatttctggggacaccaaagcttttacagagaactgcctgtgaacacttatttcaaaacatcttcatttctctctaggmctctcagtatctagctatttaaaaattaatatatacattgtagtagggaaaaatgaaataaagctaaaatgaggtaaatattgttctcagaagaggggaagtgaaaaagtagtttagcagatattcgtttgacctaaattaattattttatttatttatttttgatacaaggtcttactctgttgcccaggctggagtgcagtggtgtgataactgcccactgcaacccccaactccccgggcttaagggatcctcccacctctgactcgtgagtagctgggactacaggtatgcactgtcatgtccaggtgatttttttatttttatttttttgtagagacaagatttccccatgttgcccatgctgctctcaaactcctatgctcaaagcaatccacccacctccgcctcgccaagtgctgggattacaggcaggagccactgtgcccggtcataaattaattattttaaatagaaatcagtatgaggcttctcttgttgttttgtttatagttaactttttcctaataactagcatatta

SEQ ID NO: 637092 - DNA, 627 bp, Homo sapiens
gtatgaatttctggggacaccaaagcttttacagagaactgcctgtgaacacttatttcaaaacatcttcatttctctctaggcctctcagtatctagctatttaaaaattaatatatacattgtagtagggaaaaatgaaataaagctaaaatgaggtaaatattgttctcagaagaggggaagtgaaaaagtagtttagcagatattcgtttgacctaaattaattattttatttatttatttttgatacaaggtcttactctgttgcccaggctggagtgcagtggtgtgataactgcccactgcaacccccaactccccgggcttaagggatcctcccacctctgactcgtgagtagctgggactacaggtatgcactgtcaygtccaggtgatttttttatttttatttttttgtagagacaagatttccccatgttgcccatgctgctctcaaactcctatgctcaaagcaatccacccacctccgcctcgccaagtgctgggattacaggcaggagccactgtgcccggtcataaattaattattttaaatagaaatcagtatgaggcttctcttgttgttttgtttatagttaactttttcctaataactagcatatta

SEQ ID NO: 637093 - DNA, 545 bp, Homo sapiens
accagcttctaaaactctcctttagattgctggttatgtgttctttgattctcttctgcaattttatgcttttctgcttaggaacagcttcttttctctactggaattcgatagcagagaactctcagctattccttctgctgttatgcagagttcacagttgaataacacatctacaacatctgtatttcgaaaacagaagaatttgttttaatgccaagccatttaattattggctagactgtaatccgagaatggtttactcattgattctgaacaatgaagaaaagaggcctgtgcttgttggagagaaaatttttaaaatttaatttaatttgttattttgtcaggagagagctcctttccttatgagtaaaatcwgaaagatatgccccccagagctcagaaatcagcaaatttctaataactttcctctcatttaacggaatatcttctgttgtagtactctgattttactagttattaactgattcatgtccactgcatgtcagcctcatggacagggcattttaatattggataaa

SEQ ID NO: 637094 - DNA, 631 bp, Homo sapiens
tattaattacttaaactcaatgtaactggagacaaattgttgccattattgacgttgttgttgtcgtttcaccctctcaatccagcttttacttactccaggaagaccaaggaagagaaaagaagtttattgtatttgtgtttaaaacattaaaatagttaaagaggttaatcatcagagcaacagacttttccttaggttgaaaactgtcattttatttagagcattacataaatggaattttttgctattatgatttggggaaggaaagtctttgtattcagtctgggaaaataaatgtgatatgcaaagctgtgcaaatttctctgaataaggcactaaatatttagaatacgtaatatatactatactataataaatacctcggtagtctcaaagagagaaaatttaagtggaaatatactaaaataaaaggcattttttacagctaygcaacattcctttaaccacatcgtggttaaagggtgatcagtgagaaatttctaggggcagggttatataaggagcttttaagaagaatgatatagaatatcaaatgagaacgcaatgagaaatctccttgtttggtttcatttctcacttgaaaaaggtcgaacatttttcaactcaa

SEQ ID NO: 637095 - DNA, 631 bp, Homo sapiens
tattaattacttaaactcaatgtaactggagacaaattgttgccattattgacgttgttgttgtcgtttcaccctctcaatccagcttttacttactccaggaagaccaaggaagagaaaagaagtttattgtatttgtgtttaaaacattaaaatagttaaagaggttaatcatcagagcaacagacttttccttaggttgaaaactgtcattttatttagagcattacataaatggaattttttgctattatgatttggggaaggaaagtctttgtattcagtctgggaaaataaatgtgatatgcaaagctgtgcaaatttctctgaataaggcactaaatatttagaatacgtaatatatactatactataataaatacctcggtagtctcaaagagagaaaatttaagtggaaatatactaaaataaaaggcattttttacagctatgcaacattcctttaaccacatcstggttaaagggtgatcagtgagaaatttctaggggcagggttatataaggagcttttaagaagaatgatatagaatatcaaatgagaacgcaatgagaaatctccttgtttggtttcatttctcacttgaaaaaggtcgaacatttttcaactcaa

SEQ ID NO: 637096 - DNA, 638 bp, Homo sapiens
gagcaggtatgtttaagtattgaaaggaaacactgttaaagtagaatacaactatggattataagtacttattttgtttttttaattacagtaacaacttttcaataaagagctcagaaaactttctatagcataaatgagtaacatattagttacaaaataaaacctcaaaaaagggagggattatacagaaggaatgagagaaatatatcacattgtgaattatcttatctcattttttaaatatataaawtctaatttttagataccgtatttgactctccctagatttctgggcactttgttttgatattgtttcctggacagtattttattactataataaaactaaatgaagatgatcttgtaatttaaaataatagaggcaaaaaaaattcactgcattatctaataatgtctattttcacttgcaaaatgtactttgctttcactatatgaaacataggtaaaactttcagaagacgaaagaccaaaaagatgtatcttctgacccaaatacccttgcaatattgtatgaccaggaaatgcctaaatatatttaaacatatgcacttcatgtaatatcaatttttatttttctaactacttgtaatgcacgacgtactttacctcttata

SEQ ID NO: 637097 - DNA, 550 bp, Homo sapiens
ctgctggaaagatgatgtctgggaatatcttagttagcttcatatgaggaggttctatttgggaaacaagcagttattataaaactctactaatataaatacttgaaattaacacatcagcatgtttctctaggagcatgccatgaagtcaggcacaatggcaagcatattgcagttactgcctcagatttacaatgtttatatgccactccttctgaaattcatgcctcattgtgctgcttatcagctagaaacagaaagctggtaaacatagagaactgttattgtttttttggtccaagtttcaagttgggcaggaagagttggaattagaagataaatttttcagcagcaaagctcttcctcaagataaagccaccagaagcttccagctcaggaagagttctgcaattgtgtttatgtaaaggaggatctaaaattcatctacacttcaggggaaaacttagaagacaatcttgaccacatgatracgaacagcagtcgtgaggaaaaatatgaccaaaacctggtcaggtaatgctgagaagat

SEQ ID NO: 637098 - DNA, 576 bp, Homo sapiens
tgtattcataataagggctttatgaacatcgtgtaatttatttcttactccccatgaactaggcagtagtgtgtctatttawcaaacaagcaatcagtttatgaggctttaagggcaacctgcataagatcacactccagggaaaggatctgggacccaaatctcagctttctatttgactcccaagcctctgctcctgcattcgccgttacattgcttactaaaagcaccacgccttgtcagtcactgcaaacagaattcttaagctaaaaacaaacacaactaaacagcaaccaaggaagaaggaagttgtctgagattcagaagggaatatccaggataagaaaaaggaatatgaggaaattcagtaaagggacataaaggaaatacacacatttgccaagtttagaaatgctctcatcaagcaagagcggcttgggtgtttcaatctatcacatttcccagtacttagaaaatcagaatcctaatttatttcactggcctctttggcattactgttattacacacacacaaacaaagcacagatagagtaggcctggttcttcttttttaat

SEQ ID NO: 637099 - DNA, 576 bp, Homo sapiens
tgtattcataataagggctttatgaacatcgtgtaatttatttcttactccccatgaactaggcagtagtgtgtctatttatcaaacaagcaatcagtttatgaggctttaagggcaacctgcataagatcacactccagggaaaggatctgggacccaaatctcagctttctatttgactcccaagcctctgctcctgcattcgccgttacattgcttactaaaagcaccacgccttgtcagtcactgcaaacagaattcttaagctaaaaacaaacacaactaaacagcaaccaaggaagaargaagttgtctgagattcagaagggaatatccaggataagaaaaaggaatatgaggaaattcagtaaagggacataaaggaaatacacacatttgccaagtttagaaatgctctcatcaagcaagagcggcttgggtgtttcaatctatcacatttcccagtacttagaaaatcagaatcctaatttatttcactggcctctttggcattactgttattacacacacacaaacaaagcacagatagagtaggcctggttcttcttttttaat

SEQ ID NO: 637100 - DNA, 687 bp, Homo sapiens
aacttcctattgttcttattgtcttttctttggttaaaagttaattttcaggcactctatctataatgcttctaaataaagagagtgtgtgtgtgtgtgtgtgtgtgtgtgtgtgtaaaatatgcacatatgtgcatatttaaaaaccatttagagtataaaaacaataacaataaaaaatttagaaaaacactgaacataaaaatgatgattatctcatcacaatcagataaatttattttaaaaaaaccatctgtacttccataggggaatatattagtcagcgttctctagagggacagagctaataggatatataaatataactaacaggatatatatatataaatacattatatatataggagtttaataagtattaattcacacaatcacagggtcccacaataagccgtctgcaagctgaggagccagaaagcctgttagagtaccaaaactgaagaacttggtttctgatgttccagggcaggaagggtccaagatgggagaaagatgtaggctgggaagctaggccagtctactcttttcasgtttttctgcctgctttgtattctagctgcactggcagctgattagatggtgcccgcccagattaagggtgggtctgcctttcccagcccactgactccaatgttaatctcctttggcaacaccctcatagacaca

SEQ ID NO: 637101 - DNA, 513 bp, Homo sapiens
agtcaaattgcttctaacagttatccacattcctgaagtgcytatttactggtctagcttccctctctaaacattcccattcttcataaagtattattactatgaagtgagggcgaaactatatgtgaagtgtgtggcatatgttatttgggggtaaagcatagtataatttattgaattactaaaaacttaattaccgatgggctctaaatatcacttgtggttctataattaattgtgtgaacttatttgggttttcagtttcttcatccggggacaggaagattagattcctaagatttctttcagcctaaaagttgtaactatttattttaagttttttacataacagcttttggaaacgcttattgaaagagatcattaattaaataaaataactatagtttgatagtaaaaagtaaaaacagaaatcacataattatgaactattgctttgtaagaacttacataatatataaaatattaagactttctaaactctatggaatattt

SEQ ID NO: 637102 - DNA, 582 bp, Homo sapiens
tagtcgctaatttaccagagtttcattttcattttctcgataagattaactgccccgaacttcyagtaattttatttatgttcacattttctctggtccccaaatactaaactatgtccaccttcactccagcgaactcgccttctatcagctcttcctgggttagccaaagagtaattgttgacttatttcaatacaatcattccaaactggaaatattagcattttcctaattcatgacatagatttatcattttacacaattaaatatgtcttgcattctatttctcaatgatttttattacctgaattctgaaggtaaaatataacagaagttgagattatacaataagagaaataattaccttgcatatgtctctagagaatatagaagaaagtcagagaaagagaaatgtcttttgttgtcaagattattttttgttattctttttacttgtgggagcaaaaagtagctccagaaaaaagagagatcgttatcaatatttgaaaataagaagatgaataattttgccaatattcttgcattgatgcaacgattatatatcaatttcaaagaaggag

SEQ ID NO: 637103 - DNA, 582 bp, Homo sapiens
tagtcgctaatttaccagagtttcattttcattttctcgataagattaactgccccgaacttccagtaattttatttatgttcacattttctctggtccccaaatactaaactatstccaccttcactccagcgaactcgccttctatcagctcttcctgggttagccaaagagtaattgttgacttatttcaatacaatcattccaaactggaaatattagcattttcctaattcatgacatagatttatcattttacacaattaaatatgtcttgcattctatttctcaatgatttttattacctgaattctgaaggtaaaatataacagaagttgagattatacaataagagaaataattaccttgcatatgtctctagagaatatagaagaaagtcagagaaagagaaatgtcttttgttgtcaagattattttttgttattctttttacttgtgggagcaaaaagtagctccagaaaaaagagagatcgttatcaatatttgaaaataagaagatgaataattttgccaatattcttgcattgatgcaacgattatatatcaatttcaaagaaggag

SEQ ID NO: 637104 - DNA, 604 bp, Homo sapiens
ttcagtcttcaaccaagcaaagtatttcagttgtaaaggatttaagaatagaaatagaaaatgattcagagtagcactagaaaaggaagcagaatataacaacctcactcctttcccctggtggttttatttctaggaggaagatgctggaaaattccaaatcctggggctccaaaacgtctttaaggtgaaaactcctgggacttggtggcttttcagcctgcaggattatatcctttaaacatattttattccaactacttgttgagctgctgtgagattctatataactttagggggcgrgggagaaagaaagtaggtctgcagtctgaggacaaataggagtgtttttctcttcatctctttagttcctggttgttagaaattacagggaggctttttgctacataagaatgggcgtaaaattctctatgaacactgacgatcacaaagagttttcaagaaaaaaaatgtggagagaattagaatacagccaagtcgtgtctgattttctatgtcatagaatgtccttcctttgtcagttgagtctctggtcactttaaattagaactaaagcatattgctatagtcaaagtctacagct

SEQ ID NO: 637105 - DNA, 590 bp, Homo sapiens
ttagacagttactatttttcccattttacagataaaaattaatattatccaaattagcaaaaatgacatgttattttacagagaagatgggtgtcttttgcaataaggatgtgtattctctatgcattttacctcttaaatctcataccaaggttgtggttaagaagagagtacttttttcctcaatgggcaaatatctacgtaacttttattattaatctagtagtttagtaagatttagaaatattaactttctgaagtgcttgcttgattccctgttaacttaggtacagacacttatcctagccttcctgcaaacatatacatggatgaatgtcctcactcccattgtcatggctcagctcacttgatccatcagcaccctgtttagtttacctagtaatgcattgtaaatgtgcatgtagacacacacacacacacacacacacasagagagagagagagagagagagagagagagaaagagactgaaggatagaactatgataagcctaagagcatagtatgctcaccatacaagaaaaactaaaaaatgtgtgaaaaccccctgaggaaggttgagcacaatg

SEQ ID NO: 637106 - DNA, 606 bp, Homo sapiens
tttttacaattgttaccttttataacaataacatgaaattacttgataatacattctcctggtcactgtaaatagacacaagaaatatttgtaggatgtaaaatttacattgaacattaatgtattgctttgttaattagtatgcttaattagttgtttctttttcacctatataaagttaaaaaataaagttttgtattagtatttttagatacaattttaaacatgtaaaattttcaacttgaaagaggcactttgcttatttacaaactctgacatctttatcatgtgactccttaggtgggagccacacctgttgycaatatctgatgtttctaagtattttaaactgagttagacatcacgttttctcactgggaactaactagcacactgtcagcacccagtgtgcaattataaattgtgaaaaatttgactgaaaaggctgaggaagtacatgccttatgccagtctcacagattagtgtaggaaatacttgtggattcagaatcattcttggcaaacacaactgggaacttcagaatagtactagacaacaaggtccatatattgtgatccggagttttggtcagagataccaggcgc

SEQ ID NO: 637107 - DNA, 514 bp, Homo sapiens
gtgaactgcaaaagagatgctgatggccagattaaatgttaacgtatttcactaataaggcttttctcagttaccaaaattatctggttgtgagcatattgactatattggtattattcattttgacacctcagattccaaacacatcactaagcttcgaagacatccttaaactatcccttctgggcatttcctcatgggatgaagtaatcatagtcagaaaacctgagttggmcaactcacctgttcattgctgaagtgtgaagacccaactgcctagattcaggttttaactcctctgcctttcaactaacaatgtcgtgataaactgccactcaactttgaggatcaatttcagaatggactgtggtgtggtggctgtaaatatttcctcctcccataagataggtataatgttttactctcttatcttgaagtagtaggcttttgatgagtcaagttaactttctttgattgtgaggaaatacacagaaaagatagttttgggaaatgt

SEQ ID NO: 637108 - DNA, 514 bp, Homo sapiens
gtgaactgcaaaagagatgctgatggccagattaaatgttaacgtatttcactaataaggcttttctcagttaccaaaattatctggttgtgagcatattgactatattggtattattcattttgacacctcagattccaaacacatcactaagcttcgaagacatccttaaactatcccttctgggcatttcctcatgggatgaagtaatcatagtcagaaaacctgagttggacaactcacctgttcattgctgaagtgtgaagacccaactgcctagattcaggktttaactcctctgcctttcaactaacaatgtcgtgataaactgccactcaactttgaggatcaatttcagaatggactgtggtgtggtggctgtaaatatttcctcctcccataagataggtataatgttttactctcttatcttgaagtagtaggcttttgatgagtcaagttaactttctttgattgtgaggaaatacacagaaaagatagttttgggaaatgt

SEQ ID NO: 637109 - DNA, 617 bp, Homo sapiens
gtttcaaattttgtaaaggaatgaagaagagatgaagaaatgaagaactctgaaaaaactctcgagaaatttaattttgaagagmagcataaaaaggtacaattactagaagagacagagagtaaatgaaaattttatgtttcttatttgggaaataatagagcaagagcataatcaaggagagagggagaaggaaatatttaagaaaagatagattaacaaaagaactgtatttgtagtgataaataaggaaagggatcagagcataagagaaggtctggtgtttgataggaggaaagacaatgaatgaggaggaatctgggttcagatgcatgtagatgtctaatgacaggaaaagctatgcggataattgtcctgtaaaatagtcatatgaggttaaaaattcacttaaaatttatcaggatgccactttttttttgcaaagagaaatagaactgataagtgacctggacataacatgccctcaagacaccctgcattcttcctgaaggaaaaccaagatgagaatctaaattttagtcaaaacaacactgttgctcataatattagaatatgagaatttgatctgatcatttaattgtcaatgacattaagcc

SEQ ID NO: 637110 - DNA, 511 bp, Homo sapiens
atggctgctatgttttgagggcaggaaggaatatatytggcatttcagtgatcccttaggtatctcttggcaaacaatgtctacttataactcaaaattctcatgtacagcaacaatgacctgtgtctgtgcttagtgtttcataggagtgatgactaactacatctaaaccagctgtagagaggtctgttcaaatagtattgaaaaataatcctcaagccagaatagttaaatatcagtctaaatattagcgcttactatcaaagaaatgattataattgttcgaatgccaaagttgtattttaacagaaattcctaactgcctttgtgttctacaattaaaaaaaaaaagcctgagtttcattgttatgagataccttcaaaagttttaaccaatttgtgagcttgttactatagttctctaccgatatgcggtggccgtaataatttctgaataagctaacatatcattggtgaatattatgatactaataaataggctcaataaatt

SEQ ID NO: 637111 - DNA, 383 bp, Homo sapiens
tgcagtttcaacattggaatgatgaggtatagtttctaagactaatgaggttgtaatttgagagagtttatgcttttaattacacttgttatctctttcatgtcagaccatagttctttcagactaagtcaaatttttggtgacctgatgttagtttatggtgatacragcactcaggaagcaggaagaaatacaatcaaacagtaaagaatacagaatgtttttgcaacactgggctctcagtgttggaaagctgatatatgacacagataactcagtctgtacatcagataaggcaactcattctgggaagaaaaaaaaaaagtgttctactctcccgaagagccagagttgaatccaggacaatctccattttttcgaag

SEQ ID NO: 637112 - DNA, 620 bp, Homo sapiens
agttaaagagactacaggacaaaagttaaaagatcatacaaattcacacaatgcatagtgctgaaggagacacttttattttgaacttatgacattgtaattcttgtaaatctaccaaactrgacaacatagatacaatataacaagagattaactaaaatgtgtaaatccgaatttaagaatattagaaaatgaagtaagcattaattttatttaactgattagaggttaagaaaaacacccctactggatcaatgttatttcttttttagctgacttgactatttgtgagtcttatttttcaatgtataatgtaggaaagaatgcctcttccaaagctacgggaagctgtctgcccagacctacatattctaaagagagaaaataaagaaagctcaggaattattcaaaatgagccaattcctctttctgaaacctctgggtcctctccaaagaattgactttttacactttttatttaatagataacagttttgacaattgcaaattgatgaacaagcagagagcctatggtaggccggagtttcgtggaactatgaaatcacttctggtcttttggttattgcagatttatttgcgcaaggagattgtttgtgaat

SEQ ID NO: 637113 - DNA, 620 bp, Homo sapiens
agttaaagagactacaggacaaaagttaaaagatcatacaaattcacacaatgcatagtgctgaaggagacacttttattttgaacttatgacattgtaattcttgtaaatctaccaaactagacaacatagatacaatataacaagagattaactaaaatgtgtaaatccgaatttaagaatattagaaaatgaagtaagcattaattttatttaactgattagaggttaagaaaaacacccckactggatcaatgttatttcttttttagctgacttgactatttgtgagtcttatttttcaatgtataatgtaggaaagaatgcctcttccaaagctacgggaagctgtctgcccagacctacatattctaaagagagaaaataaagaaagctcaggaattattcaaaatgagccaattcctctttctgaaacctctgggtcctctccaaagaattgactttttacactttttatttaatagataacagttttgacaattgcaaattgatgaacaagcagagagcctatggtaggccggagtttcgtggaactatgaaatcacttctggtcttttggttattgcagatttatttgcgcaaggagattgtttgtgaat

SEQ ID NO: 637114 - DNA, 620 bp, Homo sapiens
agttaaagagactacaggacaaaagttaaaagatcatacaaattcacacaatgcatagtgctgaaggagacacttttattttgaacttatgacattgtaattcttgtaaatctaccaaactagacaacatagatacaatataacaagagattaactaaaatgtgtaaatccgaatttaagaatattagaaaatgaagtaagcattaattttatttaactgattagaggttaagaaaaacacccctactggatcaatgttatttcttttttagctgacttgactatttgtgagtcttatttttcaatgtataatgtaggaaagaatgcctcttccaaagctaygggaagctgtctgcccagacctacatattctaaagagagaaaataaagaaagctcaggaattattcaaaatgagccaattcctctttctgaaacctctgggtcctctccaaagaattgactttttacactttttatttaatagataacagttttgacaattgcaaattgatgaacaagcagagagcctatggtaggccggagtttcgtggaactatgaaatcacttctggtcttttggttattgcagatttatttgcgcaaggagattgtttgtgaat

SEQ ID NO: 637115 - DNA, 515 bp, Homo sapiens
gtataacattgtatcctttgtgatgctgaatcagacactggaattgctatatggtttctctgtcttagaaaatgaactatacagaaccattacaactaagtttatctataaatatagaaatttcattcattactacccagctgtgtttgcttagccaagtgataataatggattacactggaatgcaaaaaacaatggcaatatggattggctaggaaagcagtaagctagtaaaggacacactggaatccaatttgaagtttttagcctcaattaaaatgtccgggaagtagcagagtaaatggatcaagctgggatgaaataatctaaaccatttcaactcttcaaagtacatcagagttctgccaaacttaagaaacaaaattattgacaataatgracctttggacacagtagactcattcattcttttgttttaaaacacatttttgtttattgagcttctcatatatctcaagccgtgtgttatctctgaaaatatataacatttttac

SEQ ID NO: 637116 - DNA, 515 bp, Homo sapiens
gtataacattgtatcctttgtgatgctgaatcagacactggaattgctatatggtttctctgtcttagaaaatgaactatacagaaccattacaactaagtttatctataaatatagaaatttcattcattactacccagctgtgtttgcttagccaagtgataataatggattacactggaatgcaaaaaacaatggcaatatggattggctaggaaagcagtaagctagtaaaggacacactggaatccaatttgaagtttttagcctcaattaaaatgtccgggaagtagcagagtaaatggatcaagctgggatgaaataatctaaaccatttcaactcttcaaagtacatcagagttctgccaaacttaagaaacaaaattattgacaataatggacctttggacacagtagactcattcattcttttgttttaaaacacatttttgtttrttgagcttctcatatatctcaagccgtgtgttatctctgaaaatatataacatttttac

SEQ ID NO: 637117 - DNA, 586 bp, Homo sapiens
tgggatgaaataatctaaaccatttcaactcttcaaagtacatcagagttctgccaaacttaagaaacaaaattattgacaataatggacctttggacacagtagactcattcattcttttgttttaaaacacatttttgtttattgagyttctcatatatctcaagccgtgtgttatctctgaaaatatataacatttttacatcagtgtaatgatctctggtgaagatcaagctttatctttattttattaaaacaagtctgtcccacagcaggtagcctgactacatttcttttccatagaaaactgcaccattcagaactaattgcaaagtgcctaatcaggtaagtttttcatcgattacttccaccttgctgcaattagacaccaaatcatcagattgctaatgaatcttcagagaaacaataaagcaaatactcttttgatgaattcatagaaaaatttggtagctcaagtaaggattaatagcattacagtatagtagaatttactctcattatttcaggttattaattgatctacacagaatgccagaaaactcatctttgagttaagaaacgcaga

SEQ ID NO: 637118 - DNA, 615 bp, Homo sapiens
attacatatattctaacagtatttcaagtattatgatgcttcatagcattaaaaagattaagaaagtttttaaaatgaaggtacaatttgaacatgaattgattcacagtattttcatactggtggtagaatctaaagcaatccacctgaacaaataagggcagcacagacggaatcgtgaaggctcacaagatatttataaatatgggagactttctaatttagaataaacccctttaaatctttcatataagcatataaagtaacttaaagrgcccaaataaggcattaaaggcatatggaggcctcccacttttccatatattaatgtcagccacctatatgaaaattatcccatgtctatctacaaccatatggaaaaaccatgagaataaatggacatcatctaatgcagtgtttggggaataactagaatgcagggaagatgatataaccaggtgggtatatcaagagggccagaagaactggccttggacaatactccactgctgggatttgggtggaatgcagagtcaagggaatcctaacacttgaagaactcagatactcagataacatcaggaagagactgttcctaaatatacaactatttag

SEQ ID NO: 637119 - DNA, 615 bp, Homo sapiens
attacatatattctaacagtatttcaagtattatgatgcttcatagcattaaaaagattaagaaagtttttaaaatgaaggtacaatttgaacatgaattgattcacagtattttcatactggtggtagaatctaaagcaatccacctgaacaaataagggcagcacagacggaatcgtgaaggctcacaagatatttataaatatgggagactttctaatttagaataaacccctttaaatctttcatataagcatataaagtaacttaaagagccmaaataaggcattaaaggcatatggaggcctcccacttttccatatattaatgtcagccacctatatgaaaattatcccatgtctatctacaaccatatggaaaaaccatgagaataaatggacatcatctaatgcagtgtttggggaataactagaatgcagggaagatgatataaccaggtgggtatatcaagagggccagaagaactggccttggacaatactccactgctgggatttgggtggaatgcagagtcaagggaatcctaacacttgaagaactcagatactcagataacatcaggaagagactgttcctaaatatacaactatttag

SEQ ID NO: 637120 - DNA, 615 bp, Homo sapiens
attacatatattctaacagtatttcaagtattatgatgcttcatagcattaaaaagattaagaaagtttttaaaatgaaggtacaatttgaacatgaattgattcacagtattttcatactggtggtagaatctaaagcaatccacctgaacaaataagggcagcacagacggaatcgtgaaggctcacaagatatttataaatatgggagactttctaatttagaataaacccctttaaatctttcatataagcatataaagtaacttaaagagcccaaataaggcattaaaggcatatggaggcctcccacttttccatatattaatgtcagccacctatatgaaaattatcccatgtctatctacaaccatatggaaaaaccatgagaataaatggacatcatctaatgcagtgtttggggaataactagaatgcagggaagatgatataaccaggtgggtatatcaagagggccagaagaactggccttggacaatactccactgctgggatttgggtggaatgcagagtcaagggaatcctaacactwgaagaactcagatactcagataacatcaggaagagactgttcctaaatatacaactatttag

SEQ ID NO: 637121 - DNA, 557 bp, Homo sapiens
gagaaaccccgtctctactaaaaaatacaaaaattagcagggcatggtggtgggcacctgtaatctcagctactctggaggctgaggcagggagaattgcttgaatcctacaggcagaggttgcagtgagctgagatcgtgccactgcactccagcttgggcaacagaatgagactccatctaaatatacatatatatatacacacacacacatacacacatacatacacacacacacasagagaatattgagtcatgtatacgaatgtatataaagattggggagaaagaaattcacttgtctctctctgtgtaatcacacactgctcattccttgtgtgtcatatacaaaaggtcaaaacatatttcagaagtaacctattgcattttttacaggatagaattttctggcaactgggcggcaaaaatctattgagttgtcattgccaatggcacacagaggtattgccttaaattggggcaaggacaaaaactcagtgatacttctgtctcattccagaaatgtgttcttgtttggataattccagtggagaagt

SEQ ID NO: 637122 - DNA, 602 bp, Homo sapiens
cagctgcacccctgcatgagaaatagtctatcgcaaaccgaaaacagaagtgattaccgaaaacttttcagaatgctaacaatgtacagagaaacgcatgcatgctaactaaagcttctgatgaactttccagtcgtttcctcatctttatttgttttttccccctcatcctttttaagccagcaattattcttcatacttgagaatgacttgtatctaatggatgagcttagagggagaagaaaaatagatgtagtaagtcatgctctttcagagtttctattttacccaaaggagggrctgtgctgagtctgatttgtgtgtcatctgatcgcctgggcgaggaacacagagaagacaatctgttaacgccgagcaccgaccatctctgtgtcaggctccgcaggtggctctgtccttggcaatgtcactcgctttcagcctgttctattgccaggtgtgtttggcgacgtggaaaatactctctcactgtgggaagcttgggatgcagggaggaaactcggatgaactgggtggtaaaaggctaattagaacggaaccacttaaccacttagcggtagaaccatttaaatgtcaaaata

SEQ ID NO: 637123 - DNA, 602 bp, Homo sapiens
ttaatttcttttttttttccctrtagaaagtatttcatttctcgtggtcaaatctgtctttgtgttttctgggttttgtgtcttgataacaagtctttcttcattgcagtaatattaaaatattttctcctactttcttcttaatactttcataaatttcttctaactttagctctttaattcattgggaatttatcttggctctcactctaaattaaggactcctatattgtgtaatggttaatagtataaactctaaaagaagactacttggtttgacttccagctccactacttaccagctgggtgacatccagaaagttctttactctttccctcaagttcctcagctgtacaatggcaatcataatagtttctactaatagaatcatgtattaaatgagttagtacataatggtgcaggataatattagataacaatagtgttagtttttgtctggtttagaatttttagaaacttctctttgtttccagtgttttaagcttcaggatgaaaagctgtattttttttttttaattaaggaaccaaagtctctcatttccaagaaatatttagaattattaaaataatttcctgttaa

SEQ ID NO: 637124 - DNA, 371 bp, Homo sapiens
tatttcactgacttgctttaaattgttttaactgtatttatcttctgtgatgtaaggaaaagtaatggttttacagttcaagacacttctcctcctatgaatcaacacagcattgggatataagtgaaaaaagttagcaaaaaaatggcttctggaaacaattcttcttttttaaagaaaagggcttcctttttaaagaaaagggcttcagggctgacattactcaatctgacatctattagcaaaacttaaaaaactaaatgttatgaactgttgattaactcccawagcatccgtacccatttgtttttcctttttattttccccagccatacagggcccagcaaggtgcaagccctgtataggccagt

SEQ ID NO: 637125 - DNA, 371 bp, Homo sapiens
tatttcactgacttgctttaaattgttttaactgtatttatcttctgtgatgtaaggaaaagtaatggttttacagttcaagacacttctcctcctatgaatcaacacagcattgggatataagtgaaaaaagttagcaaaaaaatggcttctggaaacaattcttcttttttaaagaaaagggcttcctttttaaagaaaagggcttcagggctgacattactcaatctgacatctattagcaaaacttaaaaaactaaatgttatgaactgttgattaactcccatagcatccgtacccatttgyttttcctttttattttccccagccatacagggcccagcaaggtgcaagccctgtataggccagt

SEQ ID NO: 637126 - DNA, 470 bp, Homo sapiens
ctatactttgagttcttatgaaaaaaatgcagctacatagtggataaagtgagaagaaattttctgaggaaaagatggggaagaattggttgaaagtcatggttttcaggctgcaataggattccagacagccggggtgtcacagtacaaacattcaagctttgatttcaggaggaagggaaattgtgctgccctctcagagcctggcatcatcctaatggtggggtgattgacaggttcgctttcccgaagagagacagcaatgaagaccattgggtttcatttcagtcctattcccagcagcagatgttgatggrattcttcgctgtgggaggcactcacaacatgctctgtgggttgaggggtgagaggtgtgttgtgggcaggaggatgtaacaaaaagataaaatgttctctgacctcactgggctcacactccagaggggacatttctctaatcgcagttgatt

SEQ ID NO: 637127 - DNA, 470 bp, Homo sapiens
ctatactttgagttcttatgaaaaaaatgcagctacatagtggataaagtgagaagaaattttctgaggaaaagatggggaagaattggttgaaagtcatggttttcaggctgcaataggattccagacagccggggtgtcacagtacaaacattcaagctttgatttcaggaggaagggaaattgtgctgccctctcagagcctggcatcatcctaatggtggggtgattgacaggttcgctttcccgaagagagacagcaatgaagaccattgggtttcatttcagtcctattcccagcagcagatgttgatggaattcttcsctgtgggaggcactcacaacatgctctgtgggttgaggggtgagaggtgtgttgtgggcaggaggatgtaacaaaaagataaaatgttctctgacctcactgggctcacactccagaggggacatttctctaatcgcagttgatt

SEQ ID NO: 637128 - DNA, 470 bp, Homo sapiens
ctatactttgagttcttatgaaaaaaatgcagctacatagtggataaagtgagaagaaattttctgaggaaaagatggggaagaattggttgaaagtcatggttttcaggctgcaataggattccagacagccggggtgtcacagtacaaacattcaagctttgatttcaggaggaagggaaattgtgctgccctctcagagcctggcatcatcctaatggtggggtgattgacaggttcgctttcccgaagagagacagcaatgaagaccattgggtttcatttcagtcctattcccagcagcagatgttgatggaattcttcgctgtgggaggcactcacaacatgctctgtgggttgargggtgagaggtgtgttgtgggcaggaggatgtaacaaaaagataaaatgttctctgacctcactgggctcacactccagaggggacatttctctaatcgcagttgatt

SEQ ID NO: 637129 - DNA, 598 bp, Homo sapiens
attttgataagaacaattactatcatttttatatggaaattctaacacagtgtctgaactttaaaaaataagcaacttaacatataaaaagttaacaaaactgacatcaagatgatattgtataatcattaatcttctctaccgtaatcaagtcactttgaccacatatgtatgtatgtaacagaaaatatgcaggtgtgaaaaaagaaagacaaattaagagacaaaagaaactagagaaaggtcttttgatgagtaatttaaaaatttagattgaccttagtgttgttggtttttttgagtcagagtctcgctctgttgcccaagctggagtgcagtggcgcratctaggctcactgcaacccccacctcccaggttcaagcaattctgcctcagcctcacgagtagctgggattacaggcaagcaccatcacgcccagctaatttttgtatttttagtagagatggagtttcgccatgttggccaggctggtctcaaactcctgacctcagacgatccgcccacctcagcctcccaaagtgttgggattacaagcgtgagccaccatgaccagccagatgttagtgtttttaaga

SEQ ID NO: 637130 - DNA, 620 bp, Homo sapiens
aagtaactacttaataaataaaaagttaaactgataaattatgaaggcatctgatgaacacatgttggattgtcagaacctttttagtacttggcttgtggccatgtagaattccactgcraatagttaaaatgaaaagaaatttatatacttttggctaggaattggggaattttttgtcttagtttgggctgctgtaacaaaatactgtagactgggttgcttaaaccacaaacacttattcctcacagttctggaggctgggaagtccaagattaagaaaatattttcctaacttgagaaaaaaaaagagtccagtgagggcctgcgggcctgtttcttggtttgcagacaactgtcttctcagtatcctcacattgcaaagagcagaaagaggaagcaagctcttctgtccttaaaaaggcactgatcccattcacgaagatgccaccctcatgatctaattacatcccaaagtctccacctcctaatatcatcgcattaggcattaggatttcaacatatgaatgttgggaagacataaatgttcaatccatagcaactttttttgtgaaatttcataaacaggatgctatgcattaaaggaagagatttgaagt

SEQ ID NO: 637131 - DNA, 620 bp, Homo sapiens
aagtaactacttaataaataaaaagttaaactgataaattatgaaggcatctgatgaacacatgttggattgtcagaacctttttagtacttggcttgtggccatgtagaattccactgcaaatagttaaaatgaaaagaaatttatatacttttggctaggaattggggaattttttgtcttagtttgggctgctgtaacaaaatactgtagactgggttgcttaaaccacaaacacttattcctcacagttctggaggctgggaagtccaagattaagaaaatattttcctaacttgagaaaaaaaaagagtccagtgagggcctgcgggcctgtttcttggtttgcagacaactgtcttctcagtatcctcacattgcaaagagcagaaagaggaagcaagctcttctgtccttaaaaaggcactgatcccattcacgaagaygccaccctcatgatctaattacatcccaaagtctccacctcctaatatcatcgcattaggcattaggatttcaacatatgaatgttgggaagacataaatgttcaatccatagcaactttttttgtgaaatttcataaacaggatgctatgcattaaaggaagagatttgaagt

SEQ ID NO: 637132 - DNA, 582 bp, Homo sapiens
aaaatgggaggcaggtaggtgaagatataatttttagtaaaaactccaatttacrttttaagtaattcagtgtattactaaaatactatatatataaacttaaaatacatgggttatcaatttaaaagacaaagtaagtaaaaatacttttagtaggcattcgtggattgtgaacatccaagttatattggtttgtatagaatggcattaagtaaaaattacagctgtataacagtagttttctaaattgagagagtccacattgtaattagagatcactgtgaccaaaatgcttctccttgatttataatgatgtactgtattttgtactgcttatatgaaatttcagcaagattgacgatattataaagatgcttataaagtgtaagtggagacgctaaattgtgagtacaaagtttctttttcacaacagtgataagaaaatatctttaaaaaatataagacaatataaacatgtcatcattagtttagctactattaaaatgtaacatctagaaagtactgatctccaccttcagacttctgtataagtatattttttcactgatctgttcattagag

SEQ ID NO: 637133 - DNA, 450 bp, Homo sapiens
atttttttgtgattaaaatgcagcctatttgttgggtggggtggccgggggaggggaagagaaagaggagaaggaggaggaggaagaaggaaagagaagttcagacatagctttgagaaaggaatttagggagctagtgaggatggtctctcttgycttccttccttccttacttctatccattttcatgtctcctacagaaagccatgtacatatttgctgccacagctccatactgtcattgatgcatatcaaatggaattaaaaggaggcaagaagaaagatcaggagatattgtttgtcctccactcatgttttggaggtagcagttacgcaaaaagtagtgattgactggcctttgagatcagatgaaatcagcaggctaataccctagagatacctacatattagtgtaattcatacttccatgaatgttttgatattctatgc

SEQ ID NO: 637134 - DNA, 610 bp, Homo sapiens
aataataatgggataaccacatcttgatttgtccagtcccagtttacacattttgtctcactaaatagtatccctttcactctcttaaagtgaccaggtttggatcataaattatataatcactcacttaataatcactttattttttgctctgcccactgtctttttttattaaacaatgaaacttactgaactgctagcattctctcttttagagggagtatatgttcaaacacacttctaatcagtgttggctctcaacatttaaagcacaactttttttcttgtctttaaatggtccacaactcttttccaattcttatgtctgatctcatctcctcccacatcctgtcccattccctgttgtyttctcctaaatgaatcctttgtctctctcgcccactattgcctatatcttcttttatgccaccccctacgcttggaacaaacctattaatccaccaaaggtctgtcctccaaaaacttctttaaaagtcactttagtcagtaagcctacctaagatcatccatccacccacctgtcctatttatggactgaatccatcaggccaacctctttgaggctcagatttgaaacattttttattat

SEQ ID NO: 637135 - DNA, 610 bp, Homo sapiens
aataataatgggataaccacatcttgatttgtccagtcccagtttacacattttgtctcactaaatagtatccctttcactctcttaaagtgaccaggtttggatcataaattatataatcactcacttaataatcactttattttttgctctgcccactgtctttttttattaaacaatgaaacttactgaactgctagcattctctcttttagagggagtatatgttcaaacacacttctaatcagtgttggctctcaacatttaaagcacaactttttttcttgtctttaaatggtccacaactcttttccaattcttatgtctgatctcatctcctcccacatcctgtcccattccctgttgtcttctcctaaatgaatcctttgtctctctcgcccactaytgcctatatcttcttttatgccaccccctacgcttggaacaaacctattaatccaccaaaggtctgtcctccaaaaacttctttaaaagtcactttagtcagtaagcctacctaagatcatccatccacccacctgtcctatttatggactgaatccatcaggccaacctctttgaggctcagatttgaaacattttttattat

SEQ ID NO: 637136 - DNA, 643 bp, Homo sapiens
tctaagcttctaccttaagaaacgttggggaaaaaaaaggcaaattgaggctcaagtaagcaggagaaaagaaataataaagagcacaaataattaaaatagaaaacaaaaaatggaggaaaaacaatcaatagactcaaaagctagttctttaaagttttaacttttttaaaaagttagaaagataaagaagagaatagacacattatcagcatgaagaatgaagggtaatctctctatggctagtacagacattaaaaggtaactttttwaaaaaaaaaaagaagaggtaataagagtatattatgaacaattttattgtaatagattctttaccttaaaagaaatgtacaaattcctcagaaaacacaaagttcaaaactcaaccatactgtatatgaaaatacatttaaaaacatatcatgtccaagtgcactttaccccaggatgcaaagttgatttaatattcaataaataatcactataattctcaataaccagtataattcacattaacaaactagaatataaaaaagcaaaagatccagaataaaaaattcttacatctcaataataagataagccaagtttttaaaagggggtatggctattcaagagcaagatgagcgatataattctgtgg

SEQ ID NO: 637137 - DNA, 546 bp, Homo sapiens
ggtaaggacagaatcaaatgaaaaaaaataaaataaaataaatgttacaacttatttcacctcatggtatcaaattttcaacatatttctttcatcatctacctgaatctctattatatatttattgtatacattattatatgtatgttatattacaatatataaacagtgtatataccaaacatctgataattttcataatttatttacattaaaaatctgaataaacttggaaatcataaggcctttatttttcagtatttttaaaacaaaagttatattttaaatattaccaggtaataatatctgatactaatagtgaccatttattgtatacttccaagataccagtctttttcctacacatttgctcatttgatctcagcagccccacaaaggaaggtattattctcattttattgtgaggaatttaagttattgaaaggttaatagcccaagaacactcagttaataaatagcaggtytggcattcaattccaggtctacctaacacaaacatctacagtccagtacgtccctcttctg

SEQ ID NO: 637138 - DNA, 521 bp, Homo sapiens
agtgtgaaagttcaataggcaaaactgtattttttgaaaactggcaaaaytaaactatgtcatttagggttttatttacaggtggttctgtgtgtaaagaaaagggagggaatgattatcataaacttgtaaaataatatttgatagggaagaaactacctatccctagttggcctggctggtcttgaactcctgacctcaggtgatctgcatgccttggcctcccaaaatgctgggattacgggtgtgagccaccgcgcctggccacttgtgtttttttcatgtgatgtttacaatagcccttggaggtaagtggtgcaagacaaatgtcatctttattggtaattttatttataccagtggctttgttaccagaccccaccacttacccaaagttagccctgggtcaggggtttcctcatcattgtctcttctgtgggtcaccaaaaagatgttaccagaaaggggtcccgatccagatcccaagagagggttcttggattttgcacaagaaagaattc

SEQ ID NO: 637139 - DNA, 622 bp, Homo sapiens
tggaaaagcaaacggggaggaagagtaattcagaagggggaaagtgtttagaaaggcactgggagatttcaaggaaatacccataacttataaggcaagaatagagaaaactcacaggggtgagaagtggcaagaaatgaagccggtaagacaagaggggccaaataagaaggccacatggaccatgctaagaggtctgcatttcatcttgctcagccattgagacagacagtgagtcaaatatttacccagcgcctagtatgtgccaggcaatgtgaaagcaaaagcaacacagtttctgtcctgcctccccagagggcgcagtcaggtgaraaaggacgtgcctaaatagactggaggtgaacatggaatgttaggggaacacaggtgaggactgctcaactgcacctgaagggagaaagaggcaatcactttgggagatgatgcctgcactgcttcttaagaaacaattaggagtcagctgagcaaatcaggcaatcacaaaggtgagttgggcagagaaatacgagtcctgtgggtgggggaaacagcactgcacgtgcatcaagtgttgagtacacagcagagcacagcaatgaggctgggtagcagtgaggatggc

SEQ ID NO: 637140 - DNA, 530 bp, Homo sapiens
acaatgtggaaagattaagttaagctagttagcatatccatcacctcgatatttaacattttttgtgaygagaacattagagatttactgttagtgatattgaaatgtatataacaattatattcaccatgctgtgcaattgatctaaaaaaggatcaaacttattcttcctgcctaactggggctttgtaccctttgactgtaatctccttttccccgctacccccttggccgctggtaaccaccattctactgtctacttctatgagtttagtcgtttttcaatgcaatctccataaaaattccaatgccatttctcatacatatagaaaaataatcctaaaatttatataaaaccacagagaaacccaagtagccaaggcaattgtaagcaaaaaagaacaaagctggagcattacactactagatttcaaactactgtattctataaaatgatagtaattagaacacattgtacagtataaaaaaagacacattgaccagtggaacagggtagagagcccagaaga

SEQ ID NO: 637141 - DNA, 530 bp, Homo sapiens
acaatgtggaaagattaagttaagctagttagcatatccatcacctcgatatttaacattttttgtgacgagaacattagagatttactgttagtgatattgaaatgtatataacaattatattcaccatgctgtgcaattgatctaaaaaaggatcaaacttattcttcctgcctaactggggctttgtaccctttgactgtaatctccttttccccgctacccccttggccgctggtaaccaccattctactgtctacttctatgagtttagtcgtttttcaatgcaatctcyataaaaattccaatgccatttctcatacatatagaaaaataatcctaaaatttatataaaaccacagagaaacccaagtagccaaggcaattgtaagcaaaaaagaacaaagctggagcattacactactagatttcaaactactgtattctataaaatgatagtaattagaacacattgtacagtataaaaaaagacacattgaccagtggaacagggtagagagcccagaaga

SEQ ID NO: 637142 - DNA, 448 bp, Homo sapiens
caggctagaatctccagtaaaatgttgaatgaaatggcaaaagcagacatccttgttttgtggctgatctcggggagaaagaaaacagtgttttaccattaartatgatgtgagctgtggggttttcatagaagccctttactcatctaaggaagttcccttctattcctagtttgttaaatatttttatttcataaaaaagtgattactttgtcaaatgcttttttctgtatctatttaaataatcatatgatttttgttttttgctctgttgatatgatgtatcacaataactgactttcagatgtccaatcaagcttacatttctgggataaatcccacttggatatggtatataattacttttataatagcactttaattctgaaagaactatctaaactgagatctgaaaaactactaggagttatctgagaagaggaaaaag

SEQ ID NO: 637143 - DNA, 541 bp, Homo sapiens
gggagaaagaaaacagtgttttaccattaaatatgatgtgagctgtggggttttcatagaagccctttactcatctaaggaagttcccttctattcctagtttgttaaatatttttatttcataaaaaagtgattactttgtcaaatgcttttttctgtatctatttaaataatcatatgatttttgttttttgctctgttgatatgatgtatcacaataactgactttcagatgtccaatcaagcttacatttctgggataaatcccacttggatatggtatataattacttttataatagcactttaattctgaaagaactatctaaactgagatctgaaaaactactaggagttatstgagaagaggaaaaaggagaaaatttcaaggagaagtattctagagagaaaaaccaagtctaaagttaggagataggtcagattgagagacattaaattaattcattatgattaaataaagaataaaaagaacataatggcaaagagatgagacccaaaatggaagctgtggcaaaattat

SEQ ID NO: 637144 - DNA, 498 bp, Homo sapiens
ttcaattcattaccaagtcttgtcagcaaccacccctcaaatccattcattctcctttatcatcgccttagtgcctactctmctgcagtaactctttaacaggtctgatgtcaactcttgcttcatcagtctccaaccagccaatcatttcaaaatgcagatctcatcctgtgactcctctgctatatactcttcagatacttcccattgttcctagaatgaaggcataattccttggtgattttacctacctctgttcttccccaaggtcagctccttacacattgtcctttacttttgcataggagacatgtttccttccagtctcagtcctatgtctgcctttttcctttgcttgtaattattttcctgcttatctttagtcatcttgcagatcttggctgaatcgttacttttatgaggaaactttcccttacctatctattcaggcaaaatctcatctatttcaagtttcatctgtagtactttgttactcat

SEQ ID NO: 637145 - DNA, 586 bp, Homo sapiens
tcaggattcatacaggatcccacaccacatttgattagtcatgtgtcttagtttttttcagtcgagcagaggcaggtttttgtaaatgaagttttgttagaacacagccatgcccatttgtgtgcatcctatggctgctttctcacatcagttgcagagttaagtgattttaagtgagacaacacagactgcaactatttgctacccracctaagtttaagaaaaaagttgtgcagtaccccttgcttgcttttcttttttaactattcaactcacatctttgactagttggtcaacaggtaagcagtcttacagaatatctcacatttcagatttgtttgtttgcatcttcctgtgtccttcaatttgttccctctcatcaatttctattgtaaactgaaaattaactctagatgatagatcatttagatggaattttttggcaaaaatacttaatacgtgttcctgtttatttcatattctatcatatcaggagatacataatgtctagttatcctggagatactaagattgattggtaggttcagatggtgatagctaatcctttcattctaaatgtcaccat

SEQ ID NO: 637146 - DNA, 526 bp, Homo sapiens
attgtaaactgaaaattaactctagatgatagatcatttagatggaattttttggcaaaaatacttaatacgtgttcctgtttatttcatattctatcatatcaggagatacataatgtctagttatcctggagatactaagattgattggtaggttcagatggtgatagctaatcctttcattctaaatgtcaccatcattctttcatgtgactttcatttgactaaacggttttattatatattgccaaacggcaaatttctagttaccatattatgtgcatatttgtgacatagagtttttctgtaaagaagaattttccttyatccactgtgtaatcatagttggaaagaggggagtaatgcttaacttcttccttttaatatttaattttcaaaactagagtttcatgcctttggtacctctagtagtaattgatacattttcattttttgtttatttattttattatgaacctctgttcatattgtccatatagattgtatgtttttgatcagtcgcaga

SEQ ID NO: 637147 - DNA, 608 bp, Homo sapiens
agttctttaagcatatagataattaagaaaataaattggctaggcactgtggctcgtgcctgtaatcccatcactttgggaggctgaagtgggtggattgcctgaggtcaggatttcaagaccagcttgaccaatatggggaaaccccatctctactaaaaatacaaaagttagctgggcatggtggcatgcgcctgtagtcccagctattcaggaggctgagacaggagaattgcttgaacccggtagaattgcttgaacccgggaggcggaggttgcagtgagccgagatcatgccattgcactccagtctaggcaacagggcraaactccatctccaaaaaaaaaaaaaaaagttagaaaaagttcctatggaaatgtgttataattttattattaaagtactgaaaaatacattattagaaaacttcaccttggaatcttttttaagcattactcttttgcttgtggtttttgtcatcttttacagacttgaatgttgttctaggacagaatattgttgtactttattttagtgaagcataaccatatcaaataacatttcagaactatacattgcacaatcttggacattttcttgtaagaag

SEQ ID NO: 637148 - DNA, 647 bp, Homo sapiens
actgccgaactgcattccaaagtagctttaccattgtgcatttccaccagcagtgaatgagagttcctgttgctccacatcctcgcctgcatttggtgtaatccatgctctggatttgggccattcaaatagtctgtggtggtgtctcattgtttgaatttgcattttcctagtgatgtatgatgttaaacatctctycatatgcttatttgccatctgtatatcttctctgatgaagtgtctgtttagatcttttgcccattttttattctgattgttcattttcttttttaactttttattctgacagtttttttttttcttgggcaccatctagtgaagatacacagaaagctttgaggacataaaaaatgatttattttttcaaaggaaaactcctctctttctgtttctctccttttacctttgtctttcagttatacctgccgccacttgcggagatatgtttatgtgttggacaaactgtatttcccccactctcactgttctacgcttcagcattgcttctcgaccctcagtgacaatggagaggaactcttgtctttaacttgctctcacattctcagatcctatgcttccaggttattaacctctgctgtccatttactgcatgctgcatgttgtat

SEQ ID NO: 637149 - DNA, 647 bp, Homo sapiens
actgccgaactgcattccaaagtagctttaccattgtgcatttccaccagcagtgaatgagagttcctgttgctccacatcctcgcctgcatttggtgtaatccatgctctggatttgggccattcaaatagtctgtggtggtgtctcattgtttgaatttgcattttcctagtgatgtatgatgttaaacatctcttcatatgcttatttgccatctgtatatcttctctgatgaagtgtctgtttagatyttttgcccattttttattctgattgttcattttcttttttaactttttattctgacagtttttttttttcttgggcaccatctagtgaagatacacagaaagctttgaggacataaaaaatgatttattttttcaaaggaaaactcctctctttctgtttctctccttttacctttgtctttcagttatacctgccgccacttgcggagatatgtttatgtgttggacaaactgtatttcccccactctcactgttctacgcttcagcattgcttctcgaccctcagtgacaatggagaggaactcttgtctttaacttgctctcacattctcagatcctatgcttccaggttattaacctctgctgtccatttactgcatgctgcatgttgtat

SEQ ID NO: 637150 - DNA, 485 bp, Homo sapiens
attatttgaatgtgattgcagggctttacatttgttcttatttaaatgtaatgtattgaggccagtcacagtgactcacgcctgtaatcttakcagtttgggaggctgaggcaggtggatcacctgaggacaggatttcaagaccagcctggccaacatggtgaaaccctgtctctactaaaaatacaaaaaattagctgggtgtagtggtacatgcctgtagtcccagctacttgggaggctgaggcaggagaatcgcttgaacccaggaggcagaggttgcagtaagccgagatcacgccactgcactccagcctgagcaacagagtgagactctgtctcaagaaataaataaacaaataaatatatgtaatgtattgaatttatcttgttctgagtcacattttatgaagccataagcctttcagacctgttagctcctccattttacccccagaagcattgaaatcagctctcaaactacc

SEQ ID NO: 637151 - DNA, 589 bp, Homo sapiens
gttccaatttatttattccatgttagagtactgcactcattgtcagatttatcctgaaaactggacctcatcagcaacagagcacactaagaacagaaaccaagggaatacacgaggaggggtccattaaatccaccataagctgcctcgaaacaacacatttcctcagtagttagtagtactggctcaaccacatgccatgaaaggcccacagcagaagagattcaggaactggaaaggaggatgcattcatcagcggtgctgaaatgactcggatacatcagaatcacctagaataattactgaaggtgcgaattaccaggtcccacctcatgtctaatgaatcagaaactccaagttctaactacaacacatatttttttttaagtatgccaggtggttctggaattctatgattcagtaaaaagttcatttaaaaataccaaattmattaaaactgcaacaccctcttctaattagtaaagtaatatatcaattaattctttttccattttgtcagcatattagaagaatagttaaactaaacagaaaggaaacaattttttcttgtactggaaaattactaata

SEQ ID NO: 637152 - DNA, 445 bp, Homo sapiens
ttttcatgttgatgatcactttacaatcagaacaataatacaccctagatcttgtgtctctagtgcctacctttctcaaggtcaactttgcatgttcagcaaaatattaacagtaaacaagttattcctgttttattaagcatattttgattatgaagggttactctgtcctctcaagatcataaacccctttgggaaacaagtcttagatcaaataaaaagaaaaagattcagctgaacagaaagcacacagaggaataaaggcatccagaaatttccarttactgcaaaagtttaaacaggattataatggggaacatgttaagaccaaggaagtagaaacctcaacaacgcagtaaaaagagcaatagcaccaaaagaatactaaaatatttttataaaaatgaaataattatgaaaaacaaagaaaaatacttaacaccta

SEQ ID NO: 637153 - DNA, 650 bp, Homo sapiens
tgacaactaataatgcttttaaattaatcttgcaagttaatttaaggagcaatgtgctatttagcaattaagtaaactttcaactgtgtttaagacttaataagtgtgtggaacttacccctgctttcttgataagtctataaagagataatttcaatctcaatctaaatcatgttggaagagtaggtccttagaaacaccaacttggcatcttcttctgcctcctattaatggaagatccttggtgaaaagaaggaaaatccgaggaaatatttaaaacactgattgtaagtgatgctgctgttaaaactgtaayggatcattaaactctactgcatatgatcttccctcatttgattataagagatgtctcagaatttaattttgccatttttgaatttgtcatcctgtctcttggaaaagtttaagaaaatgttttaaaaatcctatggctaaagttaaaaataatttttatgcatgagattttttaagcaaaaaaataagcattattagtaactcatccaaataagtacattggaaaaaacctatgtggaactgaatcccagaagagatgaatttaaactatataaagtgtgagatctagaactggacaatgcaagtgaagatgtatttggtaaaagaatttaagc

SEQ ID NO: 637154 - DNA, 332 bp, Homo sapiens
ttggtgaaaagaaggaaaatccgaggaaatatttaaaacactgattgtaagtgatgctgctgttaaaactgtaacggatcattaaactctactgcatatgatcttccctcatttgattataagagatgtctcagaatttaattttgccatttttgaatttgtcatcctgtctcttggaaaagtttaagaaaatgttttaaaaatcctatggctaaagttaaaaataatttttatgcatgagattttttaagcaaaaaaataagcattattagtaactcatccaaatragtacattggaaaaaacctatgtggaactgaatcccagaagagat

SEQ ID NO: 637155 - DNA, 509 bp, Homo sapiens
aataaaacctacaataagttgtatgtgatagatcgactgcaaatagtaataataataataataatataataacgtcaacacctaaaattcatatcttaaatctgtattaggcctttgctattcaaagagatttgcattcatcaccacattttgtcttctttaaactaaagaagatgaactccagaaatattaataactaagcctagaacattcagcttctaaggaaccagatacttgagcaatgagcttctagattcaattgttattacattaatagtgacttcttctacagtaattcaattaatatttttctaaaattatcacrtcatacttttataccttcagcattgcaaggcaagtgctcttctcttcaacagcatggataacaccagagggataaggatctgagcatatttccccattgaggcaacagctgagggaatgagtcctgtcttcaaagtttgaagcaaactcagctcagtaatttttattttaaaaatgcataaatt

SEQ ID NO: 637156 - DNA, 618 bp, Homo sapiens
actactaaatcacaggcttaaatctcatagaagactttgaatgtacaaatattacaaaaattgatggctaggtatttttgttagagaaaatatcagggcaatcaaatgcaatcaaaataatttaagattagtcacaattgctgaaaataattatagtgtttggattactatcagttgaccttttgttttttattgtttttttctaacaatctatttctgtctgtctctctctcctctctctacataattacaaacacttgtacacactatattatatatctgtaaaatctagagtgtaggtctgctgaaaaactagaaacctccaaacaaatatcttgattttgatttccaaaacaactaacaatagcccttcagtcttagagatattataattcttcaattattctgtattttagaagaaaaggcaaactcaaaattattagaaactttcattcatgatccytctgatttggtaactattctggaaattttagtttactggattcacttctttttgggaaactgaatgttggaaaggtgtaatggctactctgaccatgtatctgccttatgtcagatccataattgcactatgtattatagacttaatttatttct

SEQ ID NO: 637157 - DNA, 398 bp, Homo sapiens
ccagtattttttattgttgagatacaattttatcttaaaccatgttaatgtttgcctagaaatcaaaagaagagaattccaatttacccaacctctgttacttcgtttgaaatgaaaacwctcgtcgtgagttaggtaggtagctagaaattgtggcaaaggcaacacggaaggcataaactctaactgatttaaaagactgagagagtcctgtatcagccactgcagctactggcacctgcccaaaacatgaaattgagcagcaaattatatttttcacagtctaaagtgtagttttatttccatccctactgacctattttaatgacttcaaaatcatacgttacagggactgaaagagatgactgtgatggtactttgtcttatgtgtttcaaat

SEQ ID NO: 637158 - DNA, 398 bp, Homo sapiens
ccagtattttttattgttgagatacaattttatcttaaaccatgttaatgtttgcctagaaatcaaaagaagagaattccaatttacccaacctctgttacttcgtttgaaatgaaaacactcgtcgtgagttaggtaggtagctagaaattgtggcaaaggcaacacggaaggcataaactctaactgatttaaaagactgagagagtcctgtatcagccactgcagctactggcacctgcccaaaacatgaaattgagcagcaaattatatttttcacagtctaaagtgtagttttatttccatccctactgacctattttaatgacttcaaaatcataygttacagggactgaaagagatgactgtgatggtactttgtcttatgtgtttcaaat

SEQ ID NO: 637159 - DNA, 587 bp, Homo sapiens
taaatgtcaaatttaaaaaaaaaaacatttttccttattgtcttctatttctctcttgctcttttgaaatgtatagattgtttttgtagcataaacgatgctttttctattcagtttctttcttccacaaagaatctatgaaacttaaggattaaaaataaagacttaatttaagttatcatcctatcatataatttcctgtaaaactgtttctttatctcaggctttctgtcttcactattttggtgctgttgcatctgattttctttcaccggrattttattcataagggaattcattttctttatgcatctccctgagcctcctaaaacttagttgttgtgatgctttgtcagactgattccaagagataaaactttttcctcacaggtaaattgctgtttcacttttgatttttttttttttttggttaacttcttagaagacgatttattatttagttttggaattttggttgttaggaattttacaaatgtcttgaagccaaaaatacaaatatgaatataaataaaaaatgatgaatatctctaagagaaaaggacaaaaagttagagtagggtgaagtc

SEQ ID NO: 637160 - DNA, 571 bp, Homo sapiens
tccttctaagggatccatcgtccattatgaggagttattctcattccttagctgttcaatagcaatttaagggtaatttaaaatttaagacktaatttatgaagaaaaattaaaacagtagtcttcacattactcactacatgagttaattttcaaagtaaaaaataattttcatagtaacactttctctgacatcatttcccaatataaatgcatataaaatattaatgctaaaagctaaagaaatggcaatgagaacttctgagaatttaaaggtaattaccatgattaatttagcttcaccactaagcaataccagaatgtatcaaatgcggacaccattatcactcacattttgtctttgttaaaagttaatattttgaataacaatatcctgagtattctttatttctactgcgttcttcaaagtagggcattttggaggtgatcctgcctaataggacagctttattcatgtaatatatttttatatcctgacatttatgttatcacatggtaaatacaaagctgatatgctatctagatatacattttacatacagagacgttt

SEQ ID NO: 637161 - DNA, 614 bp, Homo sapiens
gggcaatttacaaagaaaagaaccttatttgactcatggttctgcatggctggggaggcctcaggaaacttaccatcatggcagaaggcacctcttcacagggtggcaggagagagtatgagtgctgagcgaagggggaagccccttataaaaccatcaaatcttgtgataacacactcactatcaagagaacagccacaattcaattatctccacctggtcctgcccttgaacacatggggattactgcaattcaaggtgagatttgggtggggacacagagacaagccatatcattcttcttgtcaggaatgatgaaagttttagattttctctctggctaatatcactattggcaagaaaaaggaattatgagacacattttagcaaaagagaattttaccatctatgaaaagattaagccttattatgaattcaatttataaagtwtagtgtcaccaagagatatttcagctgtagactttgactatagcaatatgctttagttctaatttaaagtgaccagagactcaactgacaaaggaaggacattctatgacatagaaaatcagacacgacttggctgtattctaattctctccacattttttttc

SEQ ID NO: 637162 - DNA, 628 bp, Homo sapiens
atactcaattcctgtattatagtcacatatacatgtttattcagttatttatttatttatttatttatttatttatttatttattgagatggagtctcgctctgtctcccaggctggagagcagtgggtcaatattgtctcattgcaacatctgcctcccgggttcaagcaattgtcctgccccagcctcccaagtagctgggataacaggcttccaacatgcccagctaatttttgtgtttttagtagagacagtgtttcgccatgttggccaggctggtctcgaactcctgaccccaggtgatctgcctgcctcggcctcccaaagtgctggaactacaggcacgagcaatttaatatgctccccaaactatcattattttaattagcatttctatagcaatcaccttttatgcctttaacctcttttgttcatttgtggccaggtaaattaacccccaacaaattaaattaacccctaccaaaaagttttagttgtrtatttctgtcttattaaatcaaataaatacattaaagaatttattcaagcaaaaaagttaaatgactgcttattgcactaatgtgtaattagtagaatttctgattggtaaatggtcactgcacatac

SEQ ID NO: 637163 - DNA, 591 bp, Homo sapiens
tatattttctgcttaaggtcagagctcaaactcttctattacatgttctttctccagaaggatattctctcagtctgattactatgttggttttaggcagttaaggtttataacaaattaccctagactgggtggcttaaacaacaaacatttatttctcacatctctggaggctgggaaatccaagctcaaggtgtcagcagattcagtgtctggtgaggactctctttctggcttgcagatggctgtcttttcactatgtcctcatatggcagagagaggagggggagagagagagagagtgggggagagagagagaaagagagagagagaaagagagagagaaagcaagtgagagacagcagagggaaaaaattctcctgtctcctcttataagggcactaattccacttcatgagcgctccaaccacatgaactaattccctcccaaaggccacacctcccaatactatcagactggaggttaagatttggatatatgyattttgggaggacacaaacattcagtccataacgtatgtctatctgagtctttgaaaaactgtatagaaatatcacaggatatagatg

SEQ ID NO: 637164 - DNA, 587 bp, Homo sapiens
tttaacaatgacagataatcacaatcattctctcttctatgctgggctaagtgtgaatcttcacacttgtataatactaggaaattctcataggtggggaggggtgtgcagatagcttaataaaaacatgtagctatcttttcacttattttcaatgttttacatagagcaaaggtttcaagtgtctgtgatcagaatgtaaccaaacaaacatcaacttttggctttgytttttattctcagttttaatgtgtcatctggctaatttggaaaagttttattaatttatttttctttaggatgtctacaaatcttatattcctaaaaatgaaaaattctggcaactcaataattaacagataatgtttattgctttctctgaagtgtgccctaccaagtgtgggacataaataaaagattagtaaaacgatatcttcacgatcgcattagatccaggtttcaatacatgcatttagtcgcactctaggggaaaaagaagattatgtaagaatataacgtatagtatgataactcaaaagtcaatcttcccataaatggtcaataatgatgacagtagttataagtaa

SEQ ID NO: 637165 - DNA, 652 bp, Homo sapiens
caataatgatgacagtagttataagtaagtgtttcataaaatgttgttttccttcccrtcaagaatttcaatctattttattgggcaatatattgataataacattgagttatatgttacgtctacactggcaagaatttgaaatgacagttgtgctcagagggtaacaaacccttgggagaatagaaagaaacatgactgcattttcagtatatttgcatatcctctagggctttttctatgtggaatgacgtttcctttgttatttttcttctgagaaagatatatgatataatagttctgaaaaactcctttccaaggaatacctataggaataaatgtttcccaagagagtacactcacagagtctagttactcttttttatttatattggtgttatgctattgtttataatctttgaatatcaaatcattgttatactgaatttgaaaatattttcttaacatgtatattatccaaatcagtatcacaggattattttatagggataaggaagatcacaaaatgctgctttaatttgattgttaatgtttataatccttttatcaaaattttatcattgttaattatgaggcctaaaatacaatattttttcgaaaatattttcttgactaaaaatcaaataaatag

SEQ ID NO: 637166 - DNA, 568 bp, Homo sapiens
tttgcctatctgtgtgttatatctcattttattctaagcttatgactcctacatgcaaatctctacttaatatgtgttcttatatatctcatgttccaaattcaaagttgaattctaaattttttttattggtctcattaatttcagtgaaaattttttcactggtttatctgttagtctaggttttaaaaactgtcaatacctttaccacttccttaatacttcargcaaattcatcatgaggacttaatgatcctttctcctgcatttctatctctctatttacttgcaagacacatggtaaatatctctcttgttctgctgtaagcttctacctaatctcactgcctgcctttctcctgtatcgttatcatatagcaactgagtgatcttttccaaatataaatcacaaaatatactttgctgcttacaactttgtaatggtttcttttggacttaataagatataaattcctcctcatggcttaccatggcttccataatgttgtccataatctttgatgatgacatcttgtatgataccctcatcccccacacattgctttct

SEQ ID NO: 637167 - DNA, 532 bp, Homo sapiens
gaattaaaaaaattagattagcagcaggtgctcagaatggaatatcacagttccaccagccacatagaagtacaaaaataaatactggaacaggaggaaattmttccctagatagacttctaaggaagatctttcaaggagaaaattgctactacccagtttgtagcatttcaggaaacctgattctacagaactacaggctttatacagacctggattcttgggaaatccacttatgactcattttgcatactaactacactatttataagctgcgtgacattaggtaagtttttttaccctcacaaatgtgtgtttccgttttctcatctaaagagcttatttcataagatcatcatgaggatgtaatgagacagaatatgtaaattcttatgtactgaggaccaaatcttatgactgtctttgtaaataaagttttattggaacacaatcatgctaattcattaatgtctgctctgtggcagagttgggtggctatgacagaacagaatgttctacatacaaaatgtat

SEQ ID NO: 637168 - DNA, 649 bp, Homo sapiens
acaatgcctgacacagatattttgccaaattttgaaatatgatttatatttttgtctcagcaagtactcacaatgtacttacaagataaattacttacattaggacattgaaacacatgtatttaaaaaaatctgatctaagttacatactcattaaaatatttctgaggattttyttaggttctaaaattagatttattacagaaatataccgctttatacttaagagtataatatgggaaattttccctcttttattatactgttcaaataacactacagcacttggctgaccacagtgagtataattctgttagaaatgcactgggcggtaccacttgggctaagagaagcatatctccatgtaaaatggaatccaaatatattcatgttcatttgctttgtcatgttattgcttgttctgtgatgtggattggaaggaaatagaggaagaatacgtatgaaagtgatccaatagtcccataagtagtgttttcataaacatagaaattgtcccttcaagtcttcaagcatgaaacttcaatgtgttctatgtgagttccttcctcaggaaaggactttgagacctctcaaaaaagtatcaaataactgaaactcagcagatcaccacatcccaacaatgagatgc

SEQ ID NO: 637169 - DNA, 550 bp, Homo sapiens
ctaaacttagggtccagccatttcaggtagaaggtttataaacagaaatgaaacattacattgcatagtacaatcatggttaatctcagggtataatgttttagattttgaaacatcattctcccttttcttttctctatatgtattggattaccccattttgatcatttcactgctcattaacatttccataaaaatacagaccagaaaaggaggcagatgtataaaatatacatttaatgtatattattagtaacttttcctgaaagttagaatggagaaaaagttgaaactatgagctaatagaactttgaagttatttatcattttcatttattggtgccttgctactattcagtgagctaagcatggataattgagagtctgtcatsaaataagggtccttgaaattacaattttaaatataaatgattgtaaagtcaagtcatacacacgctactaacttgtagttataatagatggattcaaagatctttttacttattcaggaatatgctatttccttctagtcagccaccatttatttagt

SEQ ID NO: 637170 - DNA, 550 bp, Homo sapiens
ctaaacttagggtccagccatttcaggtagaaggtttataaacagaaatgaaacattacattgcatagtacaatcatggttaatctcagggtataatgttttagattttgaaacatcattctcccttttcttttctctatatgtattggattaccccattttgatcatttcactgctcattaacatttccataaaaatacagaccagaaaaggaggcagatgtataaaatatacatttaatgtatattattagtaacttttcctgaaagttagaatggagaaaaagttgaaactatgagctaatagaactttgaagttatttatcattttcatttattggtgccttgctactattcagtgagctaagcatggataattgagagtctgtcatcaaataagggtccttgaaattacaattttaaatataaatgattgtaaagtcaagtcatacacacgctactaacttgtagttataatagatggattcaaagatctttttrcttattcaggaatatgctatttccttctagtcagccaccatttatttagt

SEQ ID NO: 637171 - DNA, 563 bp, Homo sapiens
tacatatgtaacaaacttgcacattgtgcacatgtaccctagaacttaaagtataattaaaaaaaaaaaagaaagaaaatgtgtgtggtgtgtgtgtgtgtgttyctttattcaacttaaaaggggaaaatgataaatgtagggaaacttgcatgaggaattcaaaccaacaagcaaattacccttgttctggggaaagaatccaagcattcaatactctatatttttagcaaaaaataatttttaaagcacttaaattattttcagtgatgtaataaacataatattaggtggatgaatgtaaatgaaggttaaggtaaagagatccaaagtaaaaaaaatatttcttgtattagaggttataataaacggttcatttttaaaaattacagttactggcttctccaattcctatgaaagcaaaagaaggtttaaggttgagatgtttccaaaaaagaaataaattaatcattaagattttttccccaatttcatccggtagactattaatctttataaataaaatacctattaatcccatttctttcatttgacagcaaaaa

SEQ ID NO: 637172 - DNA, 563 bp, Homo sapiens
tacatatgtaacaaacttgcacattgtgcacatgtaccctagaacttaaagtataattaaaaaaaaaaaagaaagaaaatgtgtgtggtgtgtgtgtgtgtgttcctttattcaacttaaaaggggaaaatgataaatgtagggaaacttgcatgaggaattcaaaccaacaagcaaattacccttgttctggggaaagaatccaagcattcaatactctatatttttagcaaaaaataatttttaaagcacttaaattattttcagtgatgtaataaacataatattaggtggatgaatgtaaatgaaggttaaggtaaagagatccaaagtaaaaaaaatatttcttgtattagaggttataataaacggttcatttttaaaaattacagttactggcttctccaattcctatgaaagcaaaagaaggtttaaggttgagatgtttccaaaaaagaaataaattaatcattaagatwttttccccaatttcatccggtagactattaatctttataaataaaatacctattaatcccatttctttcatttgacagcaaaaa

SEQ ID NO: 637173 - DNA, 586 bp, Homo sapiens
acttaaaatactaccatgtgttctattatattatttgttttctaatatatttcgctaggtcatattttctaacatagttagaaaaagctagaataaatgaagatatcggctacaagctagtatttacatttcyctaacacttccctaaacactaagtcttccctaaactctaagctttatatttaatgtacccatggtcacttccatctctatgtcctacaatcgcatcaaattcaacatttccaaaattagagtgactacctccccagcaaattggttgctttcccagaatgttggggtgatcagacccaacacctttattaacaggcaagggtgtactaccatcaatcctgttactgcttaaggcagaaaggttttcattatcattatacactttacaaaatgtcacttaatcttgattttacttcattttatctctgttccttacatattctccctgctacttcctttgttctgattctcaaatttttcactgagactattggaaaaattcctaattgtcaccttgtctctgtcctggaatgcttcaattcattcttcacaacttaatacaaatgttttgtct

SEQ ID NO: 637174 - DNA, 565 bp, Homo sapiens
atgatgagttagcagcctataaaaaataaactaagacataaaacatatgtacatacaaacatgaatatatagacataaacaaacataaatatgtataaatatattataaaataatactagcctaatgaagataacatggaaatgtagaaatatatgtagagtaaaattacataaacctatcattccaaaattgctgcaaatctttgtgtcaaaggtttttttttaactcttctttttgctattgtttatgttgatctttttctttgacttataggcacaataaatcaatgatacaaaatatatacatattttcatattatattcatgttcattttcatatattattraagattatttaaaatatcatttaaagttttattattctacatgataaagtataatttattgagtacagactgaatgtttttattttacatataatatttatgatcattttatgtgtaaattcatttaggtaagtttctccagatgagaatttatatgaaaatgattatacagtattttatctaaaataggtcttagccatagaattactggttgaagg

SEQ ID NO: 637175 - DNA, 607 bp, Homo sapiens
tatatctccaaacagtatgcctatatcacacttgtttccttttattttagagtgtctttaggatgatactctcaggtgctttaagaaaaatccttattttgyttagtttcttttttcatccttgcctatttaagtgtagaacattgattgtttattatgatggaatgagctttttttctttttttgcttatagaggagagcatttttgaaatgttggcaaactatttgcattgctcattttgaaagtgtctttactcatatgcttttaacctattgcatttttaatgttttctgagttctaaactctattcagaaataaggaagatttaattcatatttttttccagtccaaagtagatctatagctgtgtttaagtacctttctttttgcaaaatggagttgaatgtatttttagcaaatgttaacattgttgcagtaagtaatgaaatgacatttgtgaaactgaatttgtggaaaagttgaaatggtgaagtgaatgacagatgttaccaagtgatgaaaattgaaacatctactattttattttcattatggtaaacgtttgtgctagtcttggtccatgcagtttcagtgaagtgaaccctc

SEQ ID NO: 637176 - DNA, 620 bp, Homo sapiens
ggcagcgccttccattacaggcctggaggcttaggaggaagaaatggttttgtggtctgggtccagggggaccctgcttctctgcgcagcctcaggacatggtgtcctgtgttccaacttcttcaattccagccatggttaaacagccaaggcatggctcaggccattgtttcagagggtggaagccccaatccttggtgacttccatgtcatgttgagcatgtgggttcacaaaagtcaagaatcgaggtttgggaacctctgcctagattttcagaagatgtatggaaacaccttgatgtccaggcagaagttcgctgcaggggtggagccctcatggagaacttctgctagggcagtgcagaarggaagtttggggtgggagcccccacacagagtccccactggggcacacggtgctgtgagaagagggccactgtcctccagaccacataattttaaatccacagacagcttgcactgtctgcctggaaaagccatagacactcaacaccaacccaggaaagcagccaggagaggggctgtaccctgcaaagccacaggggtggagatgcccaaggcccacttcttgtatcagcttaacctgaatgagagtcatg

SEQ ID NO: 637177 - DNA, 591 bp, Homo sapiens
gtcatatctaaattgctaaactcatatatacaatccatcactgccttcatggctgtttttatataagcccactgaaaaagcgctaagctgactgggaaagaacattgaatggaaaggtcaccttttccaattaatccttaaaatgagtctcttccaatagaaaaaaaaaaattctgacactctgaacacaccccaaggggtccatctatagataacttctccaaaccyttttttccctcatcaagtttaaaaatatttgcacttgattttgtaggcagacagatcaaaccatatttagtttatgatgagcagttcaggtcacatggtaaacaaataagtggtcaacatgcatttagtccctaccatggccccatagcatgaaaagagctattagttaaaaggacaattttacttttacttttactttcactttcccttaaaatcccaagggctgtgactgagattctcctctggatgtctgccgctggttctgtacgtcttggtctgccacggttgatatgaatgaactttatttgttggctcacagaagccaagcatcaaagttgcttgtacaacagtcagactaagatg

SEQ ID NO: 637178 - DNA, 595 bp, Homo sapiens
atgcagtttttttcaagcaaacggtctcatctggactcacagtctggtgagatgctgagaaaccagagacaaaacatttcccatccttctttccctttcttttccaagcccctcttcctcagccctttggcttctttggaaacttgttattgctgccttatttcaatgattattattatctcgtgtaaaaatagtttaaagtgtgagaaatatcacagccacatgtacacacagagggtgtatttaaatatatccagaggatcaattacaatctcacattaattttgagcattttcgttgcatatggatccaacgcagagtactttaaaaggctratttttgtctcaattatcataagtaacaaaaaagtttatttttcaacaaaagaaaaactagaaagaaagcagcatcacaaaacaacatctaagaattaatagctagctgtaaaactccatcagaaataatccccaaagtacatacattaggttggggaaagatgaatagaaaccaacaaacatcttagaaattccatataaacatttaatcatcaaaaataagctgtatagctagctcccagaggagtactgcaggaaaa

SEQ ID NO: 637179 - DNA, 465 bp, Homo sapiens
ttctgtatcctcaccacatagggtttcctaatgggaaacaacaagacttgagaaaagaaagtttcttctctttccttattgtatgaaaagctctattcactgaagtagcttatactgtatgcacttcattgtaatacttcctatcagagttaagaagacccttagcaataaaattgtgctaaatccatatttcaagggctctaatatgataagaaaagataatggggtccttcatttaagctagagacaataggattgtttatgtataataatgagttcatttagwaaaggataagtcacagtgaaaaaggttagttttcactttaatcagatatgactttccttaaaacttgcctactttagaacagagaagaaaaacaattacaacatttaggttaaatatgctggttttctaaggtcaaaataaaggcatacaaaggaaaatacatgtgaaaataattctag

SEQ ID NO: 637180 - DNA, 527 bp, Homo sapiens
acatatactaagacatatcacaatttcaagaatctcaaagttaaagctaattttaataaaaccttatgaacaaatctaattttttaagatttccataaaccttttatatcctttaataattttttattattttactaattttatcccttaaaattggctcttaaaatctcacatgtctgcctcttctgtggaggtccctgggcctatagggattgaataatttaaattcckgccctgtgtttttcaaaaacaattcattttgattgtcatcttctccctggtctgaagatgaggcattgacaagtgtcaatgctcaagatttagcagaagctagtgccttttttagccccaggagtcaaagccctctaacttaatagcataaggattagctgataggaaatttgtactgcagaaagtcctatcatttctctctaacatgtcacaagttaaaacattgtgatttggtgtccagaagttactgcctgcagcacttcacacgactgtattgaaggaattaggttactcac

SEQ ID NO: 637181 - DNA, 598 bp, Homo sapiens
ccagtctgatagtgtagggtcaagtttttagtctcacttgagacttcttaatctaattaagtagcaaaagaagaaggggaggagaaaagggaggtggaggggaaaaatagataagaattttaagaccttgataaaaatttgtttatcttctagcttctcttactagtaaagagaaggtgatttacacagcgaaacacctgaatgatcaaaaacttaagttccagtgatatacttattgtccctgtatttaaattaattccatgcttaaagtgaaattctcatttccaatatcatgttttcattgttccagtagggtccttacatttttctaattcttcacccttgaaggtagtcttatatttctgtaattaaagaatggaaaaaatgattttcaggagattcagattacagatagagacaaatgcatgtgaycaattgttttagtacatcattatttcacatccatttaacagcatataaaagtcaattacatgattagagaatagtgaataaccccataagaagaatggatatggatatggaattgttaaaattgttatactgagcccctagagaaaaataacatctgcaattaaaa

SEQ ID NO: 637182 - DNA, 517 bp, Homo sapiens
tgaggtcaggagttcgagaccagcctgaccaacatggtgaaaccccatgtgtactaaaaatacaaaaattagccaggcatggtggcacagtctgtaatcccaagctagtcaggaggctgaggcaggagaatcgcttgagcccgggatggggaggttgcagtgagctgagatcacgccactgcactccagcctgggcaataagagcgaaactccatctaaaaaaaaaaaagaagaacgaaaaatgcaggcaggggagatgccttgaacagcccattgaattgagtaagattaactccatcctctgcacctgaggtccaaaatgaactttaaggactcatacatctaataaacatcacaccactaaagctaaatgtcatcctacccctctcacgaagaaaacacaaaacaagctcactactttgaagattttygatgctaagtgtgttacatggagaaaccacccaacttcctttaacttcaaaacggaacatatatcaaagataaaaggaaactgtaa

SEQ ID NO: 637183 - DNA, 459 bp, Homo sapiens
atataagatttacatttattttctcccattttatcggttgttttttcactttctcgattgtgtcctttgaagcagaaaatattttaagtttgataaagttcagttyatctctttttcctttgtttgcttatgttattgttgtcatatctaagaaaccattgctaaatctaaggtcatgaagatttatccctgtgtttttttcctaagaattttatatactagttttacttcttacatttaggtcttcgatccatattagttaatttttctgtggtgtaagagaagggtttgacttcattcttttgcatgtggctatcaaattatcctagcactattggtcagaaggactgcttgttctccattgaatgctattggactcttaagaaaaatcaattgaccataaatgtcatgggtttctatctgggctctcaattctattttatggttctttgtatgtgt

SEQ ID NO: 637184 - DNA, 350 bp, Homo sapiens
tctcttgttagctctaataatatttgctttatatatctgggtgctctggtgctgggtgaatatatatttaaaattgttataccctcttgctgaattgactcctttatcattatatagtgactttctctgtctcttcttatagtttttgtcttgaagtcctgttttgtctaagtgtacctattcctgctttttttggtttscattggcatggaatatcttttttcatccctttattttcagtctatgtgtgtttttataggtgaagtgtgtttcttgtaggcaagagatcattgggtcttgttttttcatccattcagccactctgtcttttgatcggagaggttagtcca

SEQ ID NO: 637185 - DNA, 559 bp, Homo sapiens
gttaaatgtatttcttcaatagacaaggcatgttgacatttctaattttcaatgttatatctttcaatcttatatctagtttttttgtgtgcattcaataaaattacaatacatacagaatgaaaactggaatctggtattttatttgcaaaagtttgaaattcagttgactttaacttttgttttttgcagtttgaaattctctagctacctggatgacaaatataaaatctcagtagtttaaattagaagtttatttcttgtttttgtcacttgtccctcatgtgtcacttgaggcctctactctgcttcactgttatccttactttgaggttcagagtgagggagcaacctctgtgtgaagcagccagtctctggaacagagctctggaaagccttgcattggttccggccagaactacttacaagacttyattaaccaaaacggaaccaggaaatgcagtcttattatgggcctacaaagaatgtggactatggtggggggtgggcagtttggaaggggtgttaggagggtcgagggaggactggaaattttgat

SEQ ID NO: 637186 - DNA, 571 bp, Homo sapiens
agaggaattaattggattttttaaaaaagcacatatagctacaaaaattaggattaaggcagactttatcatctgtcattaccagagtgatgatactctgagtatcatcagaattgaaatctcaggggattttgtagcaacagtatttgtgtctagctgcttttagggtatatctttgctgctttttactaccgtggcgcttacctgaggggctaaaatgatgaacatatgaagcgatgcctttatttaattttgttgcctttatcattgtgtgataattttaattgacaatcatgctattcctaaatttttacaaatytttctcttttcaggatactgagccaatatttgaggaggaatccaaaccaatttattgtcagaattgccaaagcatctctttttgtgcatttacacaaaggtcacttttggttgtgtgttccaaatattggagggtaagataattatataaataagaagctgtatttctatccttcaagacattggtttatcagatttccaaagaaccctaaagaagtacttggtgcaagactattttcatcatttagaattc

SEQ ID NO: 637187 - DNA, 389 bp, Homo sapiens
gggattacaggcgactgccaccacaccgggctaatttttgtatttttagtagagacggggttttaccatgttggccaggctggtctccaactcctgacctcaaatgatcagcccgccgtggcttcccaaaatgctgggattacaggcgtgagccactatgcccggcccaccattgcttttttgattttcctaaactctatctacacgtttgttaatacccyccttaccaaattatcctcgattacccattttgaatgtgctttttccttttgtgactctgcctgatataaaaatttaagaattgtttaacaccagggaaattggaggttagaggattaacatacaggctagagataaatatatgagagtttgcagcatagcggtcatag

SEQ ID NO: 637188 - DNA, 608 bp, Homo sapiens
gttgtgattaattactaggccttagtgactgtagtagtgattatgtcagctaatttgcttcataggccctaagatatattttgctgtgtatatgtcacgatagactaaaagaggcaggagcgtaggtaaaacctgtagctggggaaaaaaacaataatatgttaatgacattttgattaaggaggcttgtattaattgttgacattattatagaagaactagttgacaagaaactgccctgtgaaatccaaaacayataaaatcgggatatactttaatttgctgatgggtgcaactttacttaaaccaacgcaaacatatttcattcactagtttgtttatttattcaagtatttggattccttctatgtggaaggaattttaggcactgggaatacaatagagaagaaaccaaacacagatctttaccatcatagaacatacaccaggagaggcagatgataaataaataaaacatatggtatgttaaatgattgtaagtgtttagtttgagtggtagattttgcaatttatgatggtcaggaaactcttcactaaaaaggtaatattttatagagatttgaagagggcaaaggagtgtgccagaa

SEQ ID NO: 637189 - DNA, 444 bp, Homo sapiens
gatcatcaccaatcacctgatcccgtttagawtgcacctgggagccaggcagtcccacctcaagaccaaagcaactgtcacaagtagcaaatatcactcaccaggcaagggagccacaaagacccccggctggcccccacgctcttggtaacggcgcctacttttgggcccgacctgcaggcttgcagccgcagcgatctgacagctagcaccgcccccggctagagcgggcttgtgacctttgacccctgacccctgacctccacggtgcaggcacatcccgccctgcggtttcccatggagaagcttgaaagcccccttacctgtcacagcttcatctcatgccgcgatgtagcctatcagaccgccggtgggcgccccagccaaggaggacaaggatagggcggaactacggaggatgcggggtgcgtagatcctgctggg

SEQ ID NO: 637190 - DNA, 444 bp, Homo sapiens
gatcatcaccaatcacctgatcccgtttagaatgcacctgggagccaggcagtcccacctcaagaccaaagcaactgtcacaagtagcaaatatcactcaccaggcaagggagccacaaagacccccggctggcccccacgctcttggtaacggcgcctacttttgggcccgacctgcaggcttgcagccgcagcgatctgacagctagcaccgcccccggctagagcgggyttgtgacctttgacccctgacccctgacctccacggtgcaggcacatcccgccctgcggtttcccatggagaagcttgaaagcccccttacctgtcacagcttcatctcatgccgcgatgtagcctatcagaccgccggtgggcgccccagccaaggaggacaaggatagggcggaactacggaggatgcggggtgcgtagatcctgctggg

SEQ ID NO: 637191 - DNA, 444 bp, Homo sapiens
gatcatcaccaatcacctgatcccgtttagaatgcacctgggagccaggcagtcccacctcaagaccaaagcaactgtcacaagtagcaaatatcactcaccaggcaagggagccacaaagacccccggctggcccccacgctcttggtaacggcgcctacttttgggcccgacctgcaggcttgcagccgcagcgatctgacagctagcaccgcccccggctagagcgggcttgtgacctttgacccctgacccctgacctccacggtgcaggmacatcccgccctgcggtttcccatggagaagcttgaaagcccccttacctgtcacagcttcatctcatgccgcgatgtagcctatcagaccgccggtgggcgccccagccaaggaggacaaggatagggcggaactacggaggatgcggggtgcgtagatcctgctggg

SEQ ID NO: 637192 - DNA, 444 bp, Homo sapiens
gatcatcaccaatcacctgatcccgtttagaatgcacctgggagccaggcagtcccacctcaagaccaaagcaactgtcacaagtagcaaatatcactcaccaggcaagggagccacaaagacccccggctggcccccacgctcttggtaacggcgcctacttttgggcccgacctgcaggcttgcagccgcagcgatctgacagctagcaccgcccccggctagagcgggcttgtgacctttgacccctgacccctgacctccacggtgcaggcacatcccgccctgyggtttcccatggagaagcttgaaagcccccttacctgtcacagcttcatctcatgccgcgatgtagcctatcagaccgccggtgggcgccccagccaaggaggacaaggatagggcggaactacggaggatgcggggtgcgtagatcctgctggg

SEQ ID NO: 637193 - DNA, 564 bp, Homo sapiens
ctttattccaaagacaatgaaaagtaattgaagacttttgactaataaatagtgtagcacttttcctaaccacatggtattcaggtttttaaaattgctttacaacaaattatcacagtcttagtgtctcagtggcttaaagcaacacatatgtattgcctcacattccatgggcaaggaggtcaggaacaggttagctgagtcctgtgctcatgctctcacaaggctacaagtggatgtcagccaaactgcaattctcatctggaggctcaactagggaagaatctgattccaaactcctgtcagctcattcagttccttgtggctgtctgaytaggggccctggcttcttactggctctgaactggaagtggccatcagttcctagcagccacccacagttccttaccacatgggccttactaaaggctctctcgcaacatggcagcatactccttcaaagctagcaaggagaatctctctactgagcacaagaaaggagtcacatagatatagatacagccatggatatggacatggacatagatatggaaatggatgtag

SEQ ID NO: 637194 - DNA, 564 bp, Homo sapiens
ctttattccaaagacaatgaaaagtaattgaagacttttgactaataaatagtgtagcacttttcctaaccacatggtattcaggtttttaaaattgctttacaacaaattatcacagtcttagtgtctcagtggcttaaagcaacacatatgtattgcctcacattccatgggcaaggaggtcaggaacaggttagctgagtcctgtgctcatgctctcacaaggctacaagtggatgtcagccaaactgcaattctcatctggaggctcaactagggaagaatctgattccaaactcctgtcagctcattcagttccttgtggctgtctgattaggggccctggcttcttactggctctgaactggaagtggccatcagktcctagcagccacccacagttccttaccacatgggccttactaaaggctctctcgcaacatggcagcatactccttcaaagctagcaaggagaatctctctactgagcacaagaaaggagtcacatagatatagatacagccatggatatggacatggacatagatatggaaatggatgtag

SEQ ID NO: 637195 - DNA, 564 bp, Homo sapiens
ctttattccaaagacaatgaaaagtaattgaagacttttgactaataaatagtgtagcacttttcctaaccacatggtattcaggtttttaaaattgctttacaacaaattatcacagtcttagtgtctcagtggcttaaagcaacacatatgtattgcctcacattccatgggcaaggaggtcaggaacaggttagctgagtcctgtgctcatgctctcacaaggctacaagtggatgtcagccaaactgcaattctcatctggaggctcaactagggaagaatctgattccaaactcctgtcagctcattcagttccttgtggctgtctgattaggggccctggcttcttactggctctgaactggaagtggccatcagttcctagcagccacccacagttccttaccacatgggccttactaaaggctctctcgcaacatggcagcatactccttcaaagctagcaaggagaatctctctactgagcacaagaaaggagtcacayagatatagatacagccatggatatggacatggacatagatatggaaatggatgtag

SEQ ID NO: 637196 - DNA, 609 bp, Homo sapiens
tttaacaaacctaatatctaaatattatttagaccacatgtttatattttgaagacataatttgtattttactaataatctttaaaactgtttttatttctcaaagattaaagtcacatgaactaaaagtcattactgcttttatttttcctttaaagtatttgatctaagtgcttatttatttattttttattttgagatgaaatcttgctctggtcccccatgctggagtgcaatggcatgatcttggatcatgccaaccactgcaacctctgcctcctgggttcaagtgattctcctgcctcagcctcccgagtagctaggattacaggtgcctgccaccatgcctggctaatttttgtatttttagtagagacagggctgcaccatgttggccaggctgatctcgaactcctgacctcaggtgayctgcccgccttggcctcccaaagtgctgggattataggcgtgagccaccgcgaccagccatgcttatttttctttaatacaattaattagagctctatttttatataaacatcacacacataagacatatataactacacagacagattgaagaagatacagtagttttcaagatttttc

SEQ ID NO: 637197 - DNA, 527 bp, Homo sapiens
aaaaaactcttttccagcaaaacaagacccaagaaaaaaaaataaaagctttttaaatatacctacagcttggatatccacttttaattaaggtgatttttaaccatagcactctttaaaaaatgctttcaaatcccctattacccaactgtagccatgctaagtggccaatatttgtggcttttaaactttaccaaaagtaacctctcaggtgaaaccaacaagccttaactaaggttatgacttcacttcgagtgtacatggtattttcacagaggggatatgcagtttttacaaaatctacaatcattaaatgtagctcagccaaaggargttttaagaaaggaagttttaagaaaggaagctagaagttgttcatggaggggaagagaatcagcaaattctccaatattaatcagaaagcactcattccctaagcccagattgaacccaggcctgccactgtataatggtagagaccaaaagacagtacaaccatgtggttacaaggtcaagttctcaatgat

SEQ ID NO: 637198 - DNA, 564 bp, Homo sapiens
catgaattagtcatactcacctctgctgtgccccttgacttctgctgtcatctgcctctggwtcccttgcatgaagtttttctttctagggcttcaaccagaagcttgacattgaatttgggacaaatgtgcctcaggagagtgcatggactcattaagtcccaggtgtccctccttatcataaactgaatgctaaggtgaagctttggaactggattctcctcaaacaagagagagaagaggaagcccataaattggggtcctggcttagtaagatgacttccaaaaggggaaagaaaccaactctcacatagaaaagctcccgatatttgcagactatgagaactcctgacatggtgaagaaaggaagaaaacagcttaagtgcagggagaggaacgtgcctggggagaaaagcctcttgatcctatgcaaatggtttccttcaacaggaaaaaactcttgtaactgctgcctcctgcctgcttctaagaatagattgaaaccacattgttctgaattatatttttgatgactgggcgaagtacctagtttacccagtgata

SEQ ID NO: 637199 - DNA, 564 bp, Homo sapiens
catgaattagtcatactcacctctgctgtgccccttgacttctgctgtcatctgcctctggatcccttgcatgaagtttttctttctagggcttcaaccagaagcttgacattgaatttgggacaratgtgcctcaggagagtgcatggactcattaagtcccaggtgtccctccttatcataaactgaatgctaaggtgaagctttggaactggattctcctcaaacaagagagagaagaggaagcccataaattggggtcctggcttagtaagatgacttccaaaaggggaaagaaaccaactctcacatagaaaagctcccgatatttgcagactatgagaactcctgacatggtgaagaaaggaagaaaacagcttaagtgcagggagaggaacgtgcctggggagaaaagcctcttgatcctatgcaaatggtttccttcaacaggaaaaaactcttgtaactgctgcctcctgcctgcttctaagaatagattgaaaccacattgttctgaattatatttttgatgactgggcgaagtacctagtttacccagtgata

SEQ ID NO: 637200 - DNA, 564 bp, Homo sapiens
catgaattagtcatactcacctctgctgtgccccttgacttctgctgtcatctgcctctggatcccttgcatgaagtttttctttctagggcttcaaccagaagcttgacattgaatttgggacaaatgtgcctcaggagagtgcatggactcattaagtcccaggtgtccctccttatcataaactgaatgctaaggtgaagctttggaactggattctcctcaaacaagagagagaagaggaagcccataaattggggtcctggcttagtaagatgacttccaaaaggggaaagaaaccaactctyacatagaaaagctcccgatatttgcagactatgagaactcctgacatggtgaagaaaggaagaaaacagcttaagtgcagggagaggaacgtgcctggggagaaaagcctcttgatcctatgcaaatggtttccttcaacaggaaaaaactcttgtaactgctgcctcctgcctgcttctaagaatagattgaaaccacattgttctgaattatatttttgatgactgggcgaagtacctagtttacccagtgata

SEQ ID NO: 637201 - DNA, 585 bp, Homo sapiens
ttaatttccttaaaaggacccatgtggtcttgcatgaacctctcctctgctaagcatatagaarataaatgtgtcaaatattgtgcaggatattgcaatatagctgtaaaatagagaaaagtttggtaattgcagtacttacatgggagacagaaataaactagggataggaagcaaaaaaaaaaaacgtgagagtgataaatgctacaaagactcagtggagccactaagaggtcaaagaaagccctttacagtgagatttaaatgacaaggaagtgctagttttacaaagattaatagaaacaatattcagaggaaaatggtgaagtaaaggtgtgaacgccatcaaaatcttagtgtatttgtatcgcagaaggaggcagttttgctggagtgtgggtgaagccaggagagtagaacgggacaggctatgtagaaagccaggaagtaattagggtggaggcctgaaatttgttttatgattatgcacatcaataatgtatgcatataacatcacagaaatgacaaagtatatgtaacttaatcagtttggatcattttcaatgacatatataatgcacatta

SEQ ID NO: 637202 - DNA, 585 bp, Homo sapiens
ttaatttccttaaaaggacccatgtggtcttgcatgaacctctcctctgctaagcatatagaaaataaatgtgtcaaatattgtgcaggatattgcaatatagctgtaaaatagagaaaagtttggtaattgcagtacttayatgggagacagaaataaactagggataggaagcaaaaaaaaaaaacgtgagagtgataaatgctacaaagactcagtggagccactaagaggtcaaagaaagccctttacagtgagatttaaatgacaaggaagtgctagttttacaaagattaatagaaacaatattcagaggaaaatggtgaagtaaaggtgtgaacgccatcaaaatcttagtgtatttgtatcgcagaaggaggcagttttgctggagtgtgggtgaagccaggagagtagaacgggacaggctatgtagaaagccaggaagtaattagggtggaggcctgaaatttgttttatgattatgcacatcaataatgtatgcatataacatcacagaaatgacaaagtatatgtaacttaatcagtttggatcattttcaatgacatatataatgcacatta

SEQ ID NO: 637203 - DNA, 585 bp, Homo sapiens
ttaatttccttaaaaggacccatgtggtcttgcatgaacctctcctctgctaagcatatagaaaataaatgtgtcaaatattgtgcaggatattgcaatatagctgtaaaatagagaaaagtttggtaattgcagtacttacatgggagacagaaataaactaggrataggaagcaaaaaaaaaaaacgtgagagtgataaatgctacaaagactcagtggagccactaagaggtcaaagaaagccctttacagtgagatttaaatgacaaggaagtgctagttttacaaagattaatagaaacaatattcagaggaaaatggtgaagtaaaggtgtgaacgccatcaaaatcttagtgtatttgtatcgcagaaggaggcagttttgctggagtgtgggtgaagccaggagagtagaacgggacaggctatgtagaaagccaggaagtaattagggtggaggcctgaaatttgttttatgattatgcacatcaataatgtatgcatataacatcacagaaatgacaaagtatatgtaacttaatcagtttggatcattttcaatgacatatataatgcacatta

SEQ ID NO: 637204 - DNA, 614 bp, Homo sapiens
agttcagtaaaataactagagaaatgattgcatgtttgaattaaagtatagaactttaggtggttaatttgtttgcaagtaaggaagtctaaacaatgtctagggaagacttaaaaagataaataaaagtatttaagtaattacyctaatgatagtcttattttctttgtctaaagtttctccatatttttatgtaagaattttatcagatagagtagccccccttatcagaggtttcattctccctggtttcagttatttgcagtcatccacagttgtaaaacattaaatagaaaattccagaaataattcataagttttagtctgccccaaagcccaagaataatgagggtcacatattgctataattactctattttattattattgttatccttttactgtgcctaattcatatattaaactttgttattgttatatatatatagcaaaaaacctaacctagtctatgtagagaactatcttcaatttccaacatccactaagaatcttcaatgtataccttgtgattaagggagtccactgaatatcccagaatcttaacttttctcgaagtctatacacagaaccaagttgtcttagagtttaaatga

SEQ ID NO: 637205 - DNA, 575 bp, Homo sapiens
ggtcattggagccgccatcaaaataatttagggaagctaattcatatccctttctcatcctagtttgttaaacgtttttattatgaaatctgttgatctttgttaaatacttttttgtgtttattagacaataatgtctttgctatatagtttactgttatggtgtgtttcaatggctgatttttgtatgggaaaacaactttgcattactgagttaaatttttacctgttcatgacagctaatccttttaatatgttgcaagatgcagtttttagggktttttttgaaaaattttacactgctattcttaagaaatactggtatgcagttgtctattcttttgatgtctttgtttgatctcagtatctgcataatatcgacttcatagaatgagtcgagatgtgttcctgttttcttctgtttttcaaaagtttggatgagttcatttcagctaggttgtttttgtataacttggttcattgtattcttttataattatttttatttctataatgtcagtggcaaaggcagctcattcatttcttcttttagtaattagaatctcctatttatt

SEQ ID NO: 637206 - DNA, 575 bp, Homo sapiens
ggtcattggagccgccatcaaaataatttagggaagctaattcatatccctttctcatcctagtttgttaaacgtttttattatgaaatctgttgatctttgttaaatacttttttgtgtttattagacaataatgtctttgctatatagtttactgttatggtgtgtttcaatggctgatttttgtatgggaaaacaactttgcattactgagttaaatttttacctgttcatgacagctaatccttttaatatgttgcaagatgcagtttttaggggtttttttgaaaawttttacactgctattcttaagaaatactggtatgcagttgtctattcttttgatgtctttgtttgatctcagtatctgcataatatcgacttcatagaatgagtcgagatgtgttcctgttttcttctgtttttcaaaagtttggatgagttcatttcagctaggttgtttttgtataacttggttcattgtattcttttataattatttttatttctataatgtcagtggcaaaggcagctcattcatttcttcttttagtaattagaatctcctatttatt

SEQ ID NO: 637207 - DNA, 504 bp, Homo sapiens
ctgttttcttctgtttttcaaaagtttggatgagttcatttcagctaggttgtttttgtataacttggttcattgtattcttttataattatttttatttctataatgtcagtggcaaaggcagctcattcatttcttcttttagtaattagaatctcctatttattttactttattttttggtcagaaagagtttttcaatgagaaaagtgacaaatgagaataatgcacaataatatacccacttcagaaaactggcattttccttatattttattttatttttttatttccataggtttcttgtaaagaggtggtgtttggttacataagcaaattcattagtggtgatttgtgagattttggtccacccatcactggaggagtatacactgaacctgatttgtagtcttttatccctcaccccatcctatcctttcctctgagtmcccaatgttcattgtatcattcttatgcctttgcatcctcatagcttagctccca

SEQ ID NO: 637208 - DNA, 575 bp, Homo sapiens
gataagatgcttgcatttaatatgagacagtatagccaagctctttggactgtgataaattgctcagcaggtgtctttggggacatgagacaataagatattattctttctcctgaaactgtccagttctattagtttcttagaagctagacagttttggaagtaaaatgaaaagactgctgcttagaattacaacactgcaggtattttatttagtacttgcacaaaattagcatcaagtttattcttcgaaagcatgtatactaatcgtaaaaataaaaaagcatgtatcttccccttcaagcatgataaccaaaaagtaagrtaaccattccatttgggattctagtgtttctttttgtatcaatattgtacaggttccaaactttataactagtcactttacatacatatatgacatatattatatataatattttatatatatatatatttcaacttatattttagattcaaaaatacatgtgcaggtttatttcctgggtatattgcgtgatgctgaggcttggggtatgaatgatcctgtcacccaggtactgagaatagtaccacat

SEQ ID NO: 637209 - DNA, 575 bp, Homo sapiens
gataagatgcttgcatttaatatgagacagtatagccaagctctttggactgtgataaattgctcagcaggtgtctttggggacatgagacaataagatattattctttctcctgaaactgtccagttctattagtttcttagaagctagacagttttggaagtaaaatgaaaagactgctgcttagaattacaacactgcaggtattttatttagtacttgcacaaaattagcatcaagtttattcttcgaaagcatgtatactaatcgtaaaaataaaaaagcatgtatcttccccttcaagcatgataaccaaaaagtaagataaccattccatttgggattctagtgtttctttttgtatcaatattgtacaggttccaaactttataactagtcactttacatacatatatgacatatattatatataayattttatatatatatatatttcaacttatattttagattcaaaaatacatgtgcaggtttatttcctgggtatattgcgtgatgctgaggcttggggtatgaatgatcctgtcacccaggtactgagaatagtaccacat

SEQ ID NO: 637210 - DNA, 526 bp, Homo sapiens
tcaggactcttggacctaatcaagagtcgggtggcttaccagcaggtttccaggggctcttgggcccttgaccaaagactgaaggctgcactgttggcttccttacttttgaggtttggaaattggaggggcttccatgctcctcagcttgcagatggctcattgtgggagttcaccttgtgatcgtgtgagtcagtactccttaataaactccctttcgtatatacmtctatcctattagtcctgtccctctagagaattctaatacagggttttgttttttttttaaatcagtatttccttttttttgaaacatgcatttacttggaacaatagattgttctcacaaaaaaacaatagattggaggggatgatttctagagatggagtctcgctctgtcatccaggctggagtgcagtggtacaatctaggctcactgcaacctccacctcccagattcaagcaattcttctgcctcagcctcccaagtagctgggactacaggtgcacactgccatgctgggc

SEQ ID NO: 637211 - DNA, 592 bp, Homo sapiens
ctttataggtatattaagcaagcatattacagatatattaaataggtatattaacttccatgttgtttcacaattccctcaaaatatgttattttttcaattattttccatcctcttcaaagaggataaattctattaatttatcttcaatttcactaattctttcctctattgtccacatttgtttttgagccaattcagtgggtttcttttccrcttacattttctttttggtaccagaaattctatttggttactttcaaatgttttctaattatctgataaaagtttcaatatgtttactcattataagcatattttcccttatgtcatttgtcagtagcataatcagccttaaaagccttatttgctaattctaacatctgttctctgtgctagtctccagcaattgtcttctctcttgagaatggatcgttatctcattgtttctttgtatgtcaaataattcagaatgtattctggacattatgaaggttatgttgtggaaactctagactctattcctttattgcttgttgttgtcttagcaagcaattaatgtgctaaaatgtatgtactgtgtctcttcact

SEQ ID NO: 637212 - DNA, 592 bp, Homo sapiens
ctttataggtatattaagcaagcatattacagatatattaaataggtatattaacttccatgttgtttcacaattccctcaaaatatgttattttttcaattattttccatcctcttcaaagaggataaattctattaatttatcttcaatttcactaattctttcctctattgtccacatttgtttttgagccaattcagtgggtttcttttccacttacattttctttttggtacyagaaattctatttggttactttcaaatgttttctaattatctgataaaagtttcaatatgtttactcattataagcatattttcccttatgtcatttgtcagtagcataatcagccttaaaagccttatttgctaattctaacatctgttctctgtgctagtctccagcaattgtcttctctcttgagaatggatcgttatctcattgtttctttgtatgtcaaataattcagaatgtattctggacattatgaaggttatgttgtggaaactctagactctattcctttattgcttgttgttgtcttagcaagcaattaatgtgctaaaatgtatgtactgtgtctcttcact

SEQ ID NO: 637213 - DNA, 592 bp, Homo sapiens
ctttataggtatattaagcaagcatattacagatatattaaataggtatattaacttccatgttgtttcacaattccctcaaaatatgttattttttcaattattttccatcctcttcaaagaggataaattctattaatttatcttcaatttcactaattctttcctctattgtccacatttgtttttgagccaattcagtgggtttcttttccacttacattttctttttggtaccagaaattctatttggttaytttcaaatgttttctaattatctgataaaagtttcaatatgtttactcattataagcatattttcccttatgtcatttgtcagtagcataatcagccttaaaagccttatttgctaattctaacatctgttctctgtgctagtctccagcaattgtcttctctcttgagaatggatcgttatctcattgtttctttgtatgtcaaataattcagaatgtattctggacattatgaaggttatgttgtggaaactctagactctattcctttattgcttgttgttgtcttagcaagcaattaatgtgctaaaatgtatgtactgtgtctcttcact

SEQ ID NO: 637214 - DNA, 471 bp, Homo sapiens
tttctactctagcctctcttactgtattctatcagcctttttgcattttattggaataaaagcaattttatcttgacttgaggctacatatgttttccaaataataagaataaaagaattgtatgtgcaaaaccagattataatattttctccttgttagtgaaaagaatcattttaattattttgatactaagaattactttacagatttgagagatatgacattgagatatagcatggtcagttggcttctgtgggaaattgatttgctaaactaaacctaaaggcgagagagcttgaggtaaccatgaaatttttgttgtgtgtttcaatattaatgaaaaccacttctgtatgaaacaaaaacaagtcacacactgtgcctrtaggacaaattacattttttaaactttaagtcattacagtttgattctcatcatttgataattcatataacatctattggatttg

SEQ ID NO: 637215 - DNA, 471 bp, Homo sapiens
tttctactctagcctctcttactgtattctatcagcctttttgcattttattggaataaaagcaattttatcttgacttgaggctacatatgttttccaaataataagaataaaagaattgtatgtgcaaaaccagattataatattttctccttgttagtgaaaagaatcattttaattattttgatactaagaattactttacagatttgagagatatgacattgagatatagcatggtcagttggcttctgtgggaaattgatttgctaaactaaacctaaaggcgagagagcttgaggtaaccatgaaatttttgttgtgtgtttcaatattaatgaaaaccacttctgtatgaaacaaaaacaagtcacacactgtgcctgtaggamaaattacattttttaaactttaagtcattacagtttgattctcatcatttgataattcatataacatctattggatttg

SEQ ID NO: 637216 - DNA, 471 bp, Homo sapiens
tttctactctagcctctcttactgtattctatcagcctttttgcattttattggaataaaagcaattttatcttgacttgaggctacatatgttttccaaataataagaataaaagaattgtatgtgcaaaaccagattataatattttctccttgttagtgaaaagaatcattttaattattttgatactaagaattactttacagatttgagagatatgacattgagatatagcatggtcagttggcttctgtgggaaattgatttgctaaactaaacctaaaggcgagagagcttgaggtaaccatgaaatttttgttgtgtgtttcaatattaatgaaaaccacttctgtatgaaacaaaaacaagtcacacactgtgcctgtaggacaaattacattttttaaactttaagtcattacagtttgattctcatyatttgataattcatataacatctattggatttg

SEQ ID NO: 637217 - DNA, 620 bp, Homo sapiens
cttgtaactcactattattttctttcatttacttattgtatgtctaaattccttttctgtattctacttttgattgtacatgttggtgaaaactggaaaactgtttgcaacataaycacagctgaattcttacaaagtgtagtatcttgtcaaaataaaaaaaaagcataagtaaggtgtacgtgttcgaacatgttggaaaaaactaaagaagaaaacattgtttaaaataacctttaggttgagtagttcaaaatattttccctttgaaatgtgcagtaaaaaacttgaggaagtcgttgtgatcatctgaatatctcatttgagaggatgaagaaactgacacctagggaagttaattaatcaaatagaatggaactcttactatttgtctggccctggactaaccagagtaatttgcctaaggttatattattaattagctataaattgattccagaatatttatttaattttcataaccaatagagaaaatacacacaggccaaattgtaattaactgtgattgaatatctttcatgtatatgtcagatcaatgctatgtatcatcagtcctcttataattactatttttaaaaagtggtgagcacttcttcctt

SEQ ID NO: 637218 - DNA, 473 bp, Homo sapiens
ggaagtcgttgtgatcatctgaatatctcatttgagaggatgaagaaactgacacctagggaagttaattaatcaaatagaatggaactcttactatttgtctggccctggactaaccagagtaatttgcctaaggttatattattaattagctataaattgattccagaatatttatttaattttcataaccaatagagaaaatacacacaggccaaattgtaattaactgtgattgaatatctttcatgtatatgtcagatcaatgctatgtatcatcagtcctcttataattactatttttaaaaagtggtgagcacttcttccttctagaaatgactttgtatttttctcacttcatcagccacttgttttctgtcacttaaaaagctcaargtcctcccaagaacctctaaattttagaaatcacagggaaaatcctgtttttttctatttctaaatatttacatttt

SEQ ID NO: 637219 - DNA, 450 bp, Homo sapiens
agtgactcttctgtttatatatgttctcattctatgattttgcttgaaaacctaatgtcttggaacttacatataaattttaataacatagttagacmagagcttaatagtatttacacagcagtctgcttcattttttaaatctaaaattataatgcaattcagcagaaaaaaatgtctatttgaagtcaggaataaattccttgactactcagtgtaacaaatgttaaaaaaaaaagtcacatttgtccttaagtccttcaactttatcctgtgagatttttatttaaatcatcagtaatcttcatcacatttacttttccaacttttatattgttaaagaggttaggtaggcttttatctcttcgttttaaatgaatcttgaaaaatgcaaccataaatagctttgtaaagttcatatagttttagaacacctattagaaactaata

SEQ ID NO: 637220 - DNA, 343 bp, Homo sapiens
cagaggctggctgctgccagtaccagggtttcctgaggatcctgaaactatgatctcatcctcctcatccgcctcccccgcccctctctccgcgggcgcgcacgcacagcacacacacacacactcacacacacactcatgctgaatgcactatcttccttcctggaccgaaatattcctctagggaaatagtgggcacgctcgtcattgaaaaaaaaaaaaatccttcagaatagagatttttctcttccaaagctkgatttatgtgctttgtttatttcctacagttttccctcacacgtgcaggagatgggaacagagaatcaggtttaaaattaaaaat

SEQ ID NO: 637221 - DNA, 343 bp, Homo sapiens
cagaggctggctgctgccagtaccagggtttcctgaggatcctgaaactatgatctcatcctcctcatccgcctcccccgcccctctctccgcgggcgcgcacgcacagcacacacacacacactcacacacacactcatgctgaatgcactatcttccttcctggaccgaaatattcctctagggaaatagtgggcacgctcgtcattgaaaaaaaaaaaaatccttcagaatagagatttttctcttccaaagctggatttatgtgctttgtttatttcctacagttttccctcacacgtgcaggagatkggaacagagaatcaggtttaaaattaaaaat

SEQ ID NO: 637222 - DNA, 569 bp, Homo sapiens
acctaattataacttccaaatatttctgggagggttctttttttctgaattcactctcattttcagtgtctcttgccaaccattcytcctccctgtgtaagccccagataccgtttaatatcattgaatattagcagcagatggtattaaaagcacagacaaattattgagaatagccagactgtttgattttgttttttaaaatttgatttagatttatttcattttcaaatatgcaacattaaaaagataccaaaagaagttaaaaatctgctttgcctcactgcctacaggcatttacaattaacattttgtctagatctttccagagagtttcctgtatatatggctatctacatatttactttttctaataaacacagaagtcttttttgtataaactacttaataacaatatattgcaattttctttgcatataactattgatttacaaaaattattttaatagccttataccattagattattgtattactccattcttacactgctgtgaagaaatgcctgagaccgggtaatatataaagaacagagatttaattgactc

SEQ ID NO: 637223 - DNA, 586 bp, Homo sapiens
aatgaaaacttgtacacaaatgtttatagtagcattattcttaatagccaaaaggttaaaacaatccaaatgtccatcaaccaacaaaatgtgatatagactttaaatataatattgtttggccataaaaatgaaagaartattatacatgctacaacttggatggaccttgaaaacactgtgctatgttaaagaagccagtcgcaaaagacaacatactatatgattccattcatataaagtgtccagaacagagaaatctacaaagacagaaattaatttagtagttacttaaggctggagagagcaggataattaggtaattagagggataatagttaaaggccaggaggtttctttttgagtttatgaaaatgttctaaaattgactgtgggagtgatcacacatcattgaatacttaatgagtgaattataaggcatttaagttagatttcaatagagccattttaaaatatatatatacatcatctgaattatggaaaatagcccttcttttcagaacaagcaaagtttttaaattctgtgatttctttatttctatttttaatatttttgctgagggaa

SEQ ID NO: 637224 - DNA, 532 bp, Homo sapiens
tactttttaaaaagcaactgagaaaaaaaataggcacttttcaggaagagaagaattaatagaagttattttttagtgttatctcattaattccaagcaggttcccctccttcaggraaaaaaaaaaagctgaaatttgctaagtggatggaggcgttctgattttacagagcttgagagaagacaagggagaggaagagttgtctgattttgctattgtcgcactgttttaggacttcaaacttcttcttgaaaagaatgacaaactttagttctcttcatgttttgcccatgtataggttttgtttcttgttttgtcaaatgacctctccctctgctcttagagacagctcttccaaacttgcacagcattccttctgaataaatactgtccataatagtcacagagtacatggtgtgaattggaaattctactttatatggggaaaataaatctgctgacgctgttattacagagtgcacagatgaacagttgttaaatgtaactggccagttttttgtcttgtcaaat

SEQ ID NO: 637225 - DNA, 490 bp, Homo sapiens
aatgtttacaatttttctctatcactgggtccaagcagtttgattattatatatcattgattgcagtgtggttctctccagtttattacctagaattatcctgatctgtctctccgtgcagcttcatcttggggtgttctcgcacagcaacctttgcctccctraacacctatctttgtttcctcagttcagtaagtctgctgaactcagttcaggttcccaatttttaaactgtggtgtcaaaactctaccagtaagccagggccaagtgataggcataacctcctttgtttccctttgttaaataatcagtcatttgctttttcttttccaatgtttaaaaaacattgtgtcagcattccacctatttctcttgtttctgggagggcaaatcctatacccattaactctttgtggctggaagcatagattatgcctactctaatgtattcagtaacacagaaatgcacaaaataaaaagtagaaatat

SEQ ID NO: 637226 - DNA, 561 bp, Homo sapiens
tctgggatgaaggagggacttttcattcagtgctgtcaccagtgctgctgctgtcatcaacctctcccttgggagttgagccaaagggaagtcttgggaattttccctgaaccttggtataggtgtgctgggaggagtgagaagtcttaggaggtaggaggcaggaggaactgaagcccagctgtgaaggccgcagactgcagtgagaggaggtgagtgcttatgctgggttattctaggcttctgagtatgcttagattccctaagatggatggacagcccctagtgcctgaggtgctgcatgccctgagcatttacctgctgtcaaagtaacagctttacctctggcatctgggattctggcagacacatacccctttccagggtaaccacagccaatctctgttctccacatggttgttgtagactaatcttggggattagaatgacaattgacggccgcatctataacattggccaacatatttaatagagaaaattcagctttattccttaccttatgaaaaaaaartgcctactgacggctgaatagacccctaa

SEQ ID NO: 637227 - DNA, 533 bp, Homo sapiens
cagcattagctgttcttgggagcttggggtgggagtcgggataaagaagactctgggagcatctgccctatgtgtgggagatagaaaagggtagagaatgatgactttcaggagtttttacgtgcattatggatgtcatcctgctttgtaggattgcaaaatttagcaaataaaaatacaggatgaccagttaaatttgaatttcagacaaatgatgaatatttttataagtatataccaaatattgtatgggacagatttatactacatatggggcatatttacatgaaaaaagtattcattgtttatctgaaattcaaatttaactgggtggtctgtattttatctgacaaccttacctctttggcattttcttgagagattgtgataaatacttacatttgcttacattttttttakccaaacacaagaattaagaaaagtctataaggcagctcaacgttaagctctatgctaaatttgtatgaggaagggaagaaaatggaccacaggttcctgctgttataggtaag

SEQ ID NO: 637228 - DNA, 479 bp, Homo sapiens
agaaaagtctataaggcagctcaacgttaagctctatgctaaatttgtatgaggaagggaagaaaatggaccacaggttcctgctgttataggtaagaaatgggacaattgatggagaaaagcttcccaaagagactaagggagcaagaacaatgcaggttgaagaaccaactttccccaaaatgaaagacaactctttccaaacataagagtagagaagtttggatacatatttaaatacatttttatataggagatttcaaagttttgcctggattgtcaatttctcatggacaagtatcgtgctttttgctaagtttcgggcatttagtaagcacttaattatcattkgctaaactgaactgagcatctttttatgaggttaggagttgtgttttaggttgggatgaggcaagagatgaagatttagaatggcaattgggaaaattcaaaaggaactgatcaagaacagacaaaag

SEQ ID NO: 637229 - DNA, 391 bp, Homo sapiens
atatttcctcttgtttctttctctcctatctttgagctttttagatcatcaacaccccattagtctattacccaacttaaatcagggaacttatacctcccaaactcattcagagactccaaacatatatattgatacaggagacctaagaagagcatgtcttgggggttgrggaaacaggcaggtgagaaacttccagattggaaacacagcttcctttctcccgtccagcccctacttcatcctatctgtttccggaaccttgttgtagatgaatctcccttgacttcatgatgtgctgagaaaacaaactcatggctggtgttaaaaagggcccatgacaataccaagtgttggggagaatgtggagaaatcagaactctattcacag

SEQ ID NO: 637230 - DNA, 419 bp, Homo sapiens
gaattcttcatctaggatatttcctcttgtttctttctctcctatctttgagctttttagatcatcaacaccccattagtctattacccaacttaaatcagggaacttatacctcccaaactcattcagagactccaaacatatatattgatacaggagacctaagaagagcatgtcttgggggttgaggaaacaggcaggtgagaaacttccagattggaaacacagcttcctttctcccgtccagcccctacttcatcctatctgtttccrgaaccttgttgtagatgaatctcccttgacttcatgatgtgctgagaaaacaaactcatggctggtgttaaaaagggcccatgacaataccaagtgttggggagaatgtggagaaatcagaactctattcacagtcggttggaatg

SEQ ID NO: 637231 - DNA, 666 bp, Homo sapiens
tataagagtgtggctctcggccgggcgcagtggctcacacgtgtaatcccagcattttgggaggccaaggcagacagatcacctgaggtcaggagtttgagaccagcctggccaacacggtgaaaccccatctctattaaaaatacaaaaattagccaggcatggtggcatgtgcctgtaatcccaactactcaggaggctgaggcacaagaatcacttgaacccaggaagcggaggttgcagtgagctgagattgtgccactgcaccccagcctgaaaaacagagcaagactgtcaaaaagcaaaaacaaaaacaaaacaaaacaaaaaacaaacaaaaawatatggttctcaagggagtggccgaggctggagagatgccagaggaacatcagcatataggcaacatgcattaggaggctggcccatgcagacagagaggagatgagggccagagacagagccctgggccactccgggggccagggagaggtgaaggcaccagccagtagatgtacaggaagggtctgggaggtgggtggaaaatctagaagagtgtggtgtctgggaagacgcatgaagaacacgtctcaaggaggaggtgggctcagctaattcaagtggtgccgatcggtcgatgaggggagtcattgacaagagtagctt

SEQ ID NO: 637232 - DNA, 566 bp, Homo sapiens
tctgttgcatctcagtcaagaatatgatttccaacagaagttcaatacaatgagaatgttttatcaaaytaattataatggaaacttgtcccatatcatgcctgcatttatgagaggtatgttttgaatgtcttcattagttgttgaaatgcagtgaattattgacactctctgctgtttgtctttctaggcacccaataactatagaagtcccatctctaccagtcaacctaccaatcaatccatggatgatacaagagaggatatttatgtcaactatccaaccttctctcgcagaccaaagactagagtttaagcttattcttgacatgagtgcattagtaatgactcttatgtactcatgcatggatctttatgcaatttttttccactacccaaggtctaccttagatactagttgtctgaattgagttactttgataggaaaaatacttcattacctaaaatcatttttcatagaactgtttcagaaaacctgactctaactggtttatatacaaaagaaaacttactgtatcatataacagaatgatccaggggagatt

SEQ ID NO: 637233 - DNA, 368 bp, Homo sapiens
tatttcactgacttgctttaaattgttttaactgtatttatcttctgtgatgtaaggtaatggttttacagttcaagacacttytcctcctatgaatcaacacagcattgggatataagtgaaaaaagttagcaaaaaaatggcttctggaaacaattcttcttttttaaagaaaagggcttcctttttaaagaaaagggcttcagggctgacattactcaatctgacatctattagcaaaacttaaaaaactaaatgttatgaactgttgattaactcccaaagcatccgtacccatttgcttttcctttttattttccccagccatacagggcccagcaaggtgcaagccctgtataggccagtgg

SEQ ID NO: 637234 - DNA, 591 bp, Homo sapiens
tcctgcctcaagtactcatcagcattacattgaggcattttctcttcatcctatagaagtagatacctaatctccacaacccaaacacacagaattttcctttttaaagactctttaaagattttgttcacagtgacatgcaatacttgaagtcataatgtgaaatctccaggaacatttactaattatttcttaatttgggaggcttcttttctaaacctatcatggcagatgatcgctttaggtatggaaaactcgcattcactgaggtcattagggtttctgtggttttatgtgctattgtacagcacawctcttatgagagattccataataactttgtagtaaaagccaccccatcttctggaggatgatattttgggggaaagacagctcttcttatgttgaggcaccaatcaggcagtatgctaagcctcttatcatataatgtcttttataaacatcagaatatttctgtgaggtagttaatattattgttgcaattgtccatatgtgaaaactgaggcagttaagtaactcgcccaggatcacagtgctaaacagtgatgaagtaaggacttgaaactccaa

SEQ ID NO: 637235 - DNA, 591 bp, Homo sapiens
tcctgcctcaagtactcatcagcattacattgaggcattttctcttcatcctatagaagtagatacctaatctccacaacccaaacacacagaattttcctttttaaagactctttaaagattttgttcacagtgacatgcaatacttgaagtcataatgtgaaatctccaggaacatttactaattatttcttaatttgggaggcttcttttctaaacctatcatggcagatgatcgctttaggtatggaaaactcgcattcactgaggtcattagggtttctgtggttttatgtgctattgtacagcacatctcttatgrgagattccataataactttgtagtaaaagccaccccatcttctggaggatgatattttgggggaaagacagctcttcttatgttgaggcaccaatcaggcagtatgctaagcctcttatcatataatgtcttttataaacatcagaatatttctgtgaggtagttaatattattgttgcaattgtccatatgtgaaaactgaggcagttaagtaactcgcccaggatcacagtgctaaacagtgatgaagtaaggacttgaaactccaa

SEQ ID NO: 637236 - DNA, 368 bp, Homo sapiens
gaaggaaaggggagggtagagatttttaaaaaaaactacacattaggtacaatgtacactactggrgttataggtgcactagaatctcagaattcaccactatataattcttccatgtaacaaaaaaaacaactgcaccccaaaactattgaaataaaattttttaatgtaccctgagtgttccttacgtgactagaaccttgttacacatttcaggtttataaaaaatagtctctgtcctcaatctatttaaaatttaagaatagttatctttggactctggaattatgttgatttttatttttccttttggactacattttccagctatgttaacacaaattcatatgaggaatagatgaaattga

SEQ ID NO: 637237 - DNA, 368 bp, Homo sapiens
gaaggaaaggggagggtagagatttttaaaaaaaactacacattaggtacaatgtacactactggagttataggtgcactagaatctcagaattcaccactatataattcttccatgtaacaaaaaaaacmactgcaccccaaaactattgaaataaaattttttaatgtaccctgagtgttccttacgtgactagaaccttgttacacatttcaggtttataaaaaatagtctctgtcctcaatctatttaaaatttaagaatagttatctttggactctggaattatgttgatttttatttttccttttggactacattttccagctatgttaacacaaattcatatgaggaatagatgaaattga

SEQ ID NO: 637238 - DNA, 646 bp, Homo sapiens
tcacccaacacctggcacaccagactgcatgaggcactttgatgcatcctcatttaaccccacagcagccaagtgaagtaggactcctattattcccccaaatttacaagcgagaaccacaaaactcagagcttaaataacttctctaatataagcataaggtcagccctagccaaaacaattaaggtaactgtgatgtagctgatccaagatactgtcttactctcctcttaccatacacagcccctgactggcctttatctgttctccttaaattctgctatatgaaggattatccattcagccaaattggtgttcattaaaattttattccaataaagaacattccctaaagttcagtcattctcaaacgagagcagcattagaacagtctggatggttttattacaacacagcttgctgtgctccgcaccaacattttatcagtaggtctggggtgggctcacaatattcatttctaacaagtcccagggattctgacactactagatcaggaaccacattttgaaaatcaccgccctcaactrttgaaaataagaaattgggcttctaacccatctaatattaagaattcaaagtcaaccataacaaaaatccacaaaactcttcttgtaacccacttaaa

SEQ ID NO: 637239 - DNA, 463 bp, Homo sapiens
atatacaatgatctactctcaaaactttctgccgctgttaccatgtaattcctgctatctgaatatttagaataactagtaaaattagcctgaatgataatcatcacattgtattgtatgcaataactaaagccatattactcaggctttaaattaagaagcctagttcagtaaaaatgaatttggtacaacctaatgtttgatacttgatacatttatttagtttttcagaagacgagatctttatttggcaaatataggcaaattaggcaaatagaataaacatacttcagggattttaaaacattaataaatgcatagtcatagtaatatttcttaaggaaaccaaaagatgcatttaatcaaaattatttctcatctccaatatgctgatgaactgtgaaagtatcaaaaagtcaaagtaaaaaatkaaaacaaattgactttttaagccatggtaatt

SEQ ID NO: 637240 - DNA, 558 bp, Homo sapiens
tcccactctttaagataagaagatgaagctgagcttccagggaaaccagaaaagtagaacttgaatgacacagtatcaaggaagagaaagctgcacaaaatgcaaactccaaagatatgcagatggttcttctcaaatattcaacagagtgctgatcatcacatgcatgtgaggaaactaaggccaaggaaaaagaacaatataaaaggcagaaggtgttcagtaatcacgtaagaccaggaatgatgcatactctcaccagcctgacttaaaaatatcgtaattatgggataccggatagwgtgatcagaaataccttgcctgagtagtggagagtaattaggcctagattaacattgcctggctctcaataatgtctttaaagaaagacacaaaaggatcaacatgtttccaataatttaattacatcccagaaagaaaacttagtaacatttgtaggaatacaaaaatatccagcacctagtaagataaaattcataatgtctgccattttattaaaaattaccagatatacaagaaagcagaaaagtatcaccc

SEQ ID NO: 637241 - DNA, 530 bp, Homo sapiens
gaaaattaaggctttctcagtcatacagtagttgaaagaatgcatcatcagtaaattttaactagaagaaatgttgaaaaaaattattcaggtagaaatattggtaagtgctaccagataaaaatatagatctgtagaaataaatctaaaataccataaattttcttattacttaaatctacataaaagataattgattgtttaaacaaaaataataattatcaaggcaatgtgggatccatagcatacttaaaagtatgataacaatatcacaaaggccaggagtaaggaaatgaaaatacaccattgtaaatttcctaggtttctatacagtatgtgaaataacacactatcatctgaaggtagactgtgataaattaaaaacatatgccataaatcctaaagcaatctttaaaataacagagaaaatgaagccatgaaaatgtgaaaagacaatccacacaatgggagaaaatatttgactattatggatctagtaagggayttacattagaatatataaagaattc

SEQ ID NO: 637242 - DNA, 507 bp, Homo sapiens
gaattaatttgtttttatgtttccatgacaaaatttatactttcatcttcaaagtagatgcttcaaatttattttctaatatttaaattccctagttaagagtggagacaagaagatttaaaatgtctaatctcttagggtttagaaatacaagcaattattgtgtgtgttggatttattacttttgtagattaaaatcaatgggatttttgcaattaatgacaaaattgcatataatggtcttttggtattaatagacttagtaagccatctgtagcagttttcaattctcaacataattgcatagagtagtttgttttccaaggaaaaatctctagacaaactatgcctcattttacttctattttaagctaatcccctgactgaatcttagatgtatgagttactcttctttgragatttgggagtttgcagaagtgtggagataataaaatcatgatttgataagttgcatactgttcagggatggcaggttcttcctatacc

SEQ ID NO: 637243 - DNA, 457 bp, Homo sapiens
  misc_feature 415, 416, 417, 418, 419, 420, 421, 422, 423, 424, 425, 426,427, 428, 429, 430, 431, 432, 433, 434, 435, 436, 437, 438,439, 440, 441, 442, 443, 444, 445, 446, 447, 448, 449, 450,451, 452, 453, 454, 455, 456, 457: n = A,T,C or G
aatgaaaagtagtgaactaatgttaaatgctataatgtggatgaatctcaaaacgattatattaagtgaaagaagccagacaagaaagtgcataatcccatttacataaaattacaaaaaatacaaatctatactgacagaagagatgagtgattgcctttgacatgggagataagcagaggtgttgggaagaattacaaaaaaaatgaggaaatgttttagagcaatggaaattttcatcatcttgattgtggtgatagcttcactggcccatacaaatgtcaaaatatatcaaattttacactgtaaatatgtgtagtttattttataaacaactataccttaataaactgtttttwaaaaattaaaacaaaagcaaagagaaataagtttatatggaaagagaattagaatnnnnnnnnnnnnnnnnnnnnnnnnnnnnnnnnnnnnnnnnnnn

SEQ ID NO: 637244 - DNA, 627 bp, Homo sapiens
aatcttagatgtatgagttactcttctttgaagatttgggagtttgcagaagtgtggagataataaaatcatgatttgataagttgcatactgttcagggatggcaggttcttcctataccaatgtcagtgttttattgtttctgtatgtgtgtgggtggggtaggggaaaggtgaaaataacattctctccttccatttgggtgcacaagtttatcatttagacttaagaatgtgtcatctatctagaaatcagttggatgaaatggaatctgtgaactcacatttagttatgtgacacagatggtcatttttctcctaacaygtcaatgtgtgcctgtgaatgaaatccaaagacccttttgtttttcctagtgtgaacttcaggtacaagagttgagttgttcttactcaattcatagtaatctcattgttatattttggttgtttgactctccaaatctcgttgaaatttaatccctaatgtcagatgtggggcctaataggaggtgattgggtcacgggtgcagatccctcatgaaagtcttggtgctgtcttcgctgcagtgagtgagttcttgctctattggttcccagagagctggttgttaaaaagagcctggcacct

SEQ ID NO: 637245 - DNA, 535 bp, Homo sapiens
atgattttactattctttccagtgccccacaatttgtaaaggattgggtcagaagtaaaactcaattctatccaacctgaaagttcctgctcttttccctgtgtcattcttcaccaatagtaaaaaggcattttgagaagtcctcccaagacttgcccaggttctaaatgcttgcatgaaatttcttcataaaaagtaaatctataaaatctataaaagtaaagtaattgactggggagagagttaaatttaagctatttttattcatttcatttgtacaaaggaacagaaaaggygttgtataagtgagtgagtaaaaagagggtgggaaaatggtgagaaactgagagcatctaagattcctaactcaacatactttaccattttgctcaaggccagccctgaattatcatttccaaatatcctagacataaaacttatctgaaagagccagcaatcttcattaaatatagatgaacaggaaagagaagatgtgagaatggaatactcaagttgtacttgctcaaggcaaaaa

SEQ ID NO: 637246 - DNA, 616 bp, Homo sapiens
tcctgctctcacttgctttatctattataatttatggattactggaattcataactgaataatatgtagatgtcacctgggggtgcgaaaccaattctcctacttggaattgcctgtctaagtaagaatgacacccagtttagtattttgtctctgattagagacactatagatttgcagtcgcctccatgtaatataaatcaataaagaataattttccaggcagtaaatcaattgtcagttcaaagaccctaatacccttgtgcaagatttattgaraacatgaatggcagtcttgttaggagatgtacagcacgctttatagggacataatagtgtaaaccccaaactattaccttcactatggtgaagaatccaacaggaataaccctttcatttccatggaaagcaaactcaaatagatttttcaattacaaaatgaaaaattttaaagataacaacaagataaaaatctctggactgggaagatatatcagtcttgaagtcaccataacccttttgctgggactttctgtaccttgggtgtggtggacctatcaaattagtattctaaacctttgccatccagtaggatatctgctagccccatgggact

SEQ ID NO: 637247 - DNA, 616 bp, Homo sapiens
tcctgctctcacttgctttatctattataatttatggattactggaattcataactgaataatatgtagatgtcacctgggggtgcgaaaccaattctcctacttggaattgcctgtctaagtaagaatgacacccagtttagtattttgtctctgattagagacactatagatttgcagtcgcctccatgtaatataaatcaataaagaataattttccaggcagtaaatcaattgtcagttcaaagaccctaatacccttgtgcaagatttattgagaacatgaatggcagtcttgttaggagatgtacwgcacgctttatagggacataatagtgtaaaccccaaactattaccttcactatggtgaagaatccaacaggaataaccctttcatttccatggaaagcaaactcaaatagatttttcaattacaaaatgaaaaattttaaagataacaacaagataaaaatctctggactgggaagatatatcagtcttgaagtcaccataacccttttgctgggactttctgtaccttgggtgtggtggacctatcaaattagtattctaaacctttgccatccagtaggatatctgctagccccatgggact

SEQ ID NO: 637248 - DNA, 534 bp, Homo sapiens
agatgaagccaagagaagtctgattaacactctacaaaaatatttttaatttgttcgtgtcaaaacatatctttgattcaatagttacagtgttattcattattgtatgcccataatcttgcacaggatcttactctagaaaaatgctcaataagtacttgctggatgaataaaatgattaaatggaaagaaaaacaatgcatgatgcaaatttttctactgcacagaactagaaatattcatggagcagattagacagwttgtaactccagacaatgaagaaggaaatattaagagtagatttttagacagaagaataaggaaaaagtaaaatgcaaaataacattaatgagtcctaaatcaggggaaggtaaacaagaattataaaatgaaaagaatattagagtctaggctaatttttataattctccggctgagaattataagtcataggctttctgaatctcaaaatttaaagttgtgtaaaaggctttgaaattaattataaaacttcagcagtctgtaacgtcagtg

SEQ ID NO: 637249 - DNA, 533 bp, Homo sapiens
ctgtttctccttgcacttatgcgtcatgtcctctaattgaaatyggttagtcagaatgacaggaaacatagggaccttagccaaaacaaatactcttatcagaaagtgcaagcctcattctctcaatgtctataagctgacatcacttaaggggtcgattggtctttgtgtaggtcatgagcccagacttttctatttctattgctagagagatggataacagaaccaaggccttaccccaactctggccattcctgtattcagggtccttagtgcattatcaagaaaggggagatgaaaaagtttgctgagatgaccaagaaagagctaccactatccactctaggtgattaaacatggctgttaatggaaaggctgtccacacattttgctctcggtaacaggaaaataacccttccttctcgttgtggagagaatgatatcttgatttctgttttggcatcaagcatctctctcccaatgtgaaggaagacccttccaaaaagcaaagcaaaacgacatagggaatatat

SEQ ID NO: 637250 - DNA, 566 bp, Homo sapiens
cttcttgtatgtttactattatatctatttgacttagatttaatgagttaatatttatcaggaaaacacacactgatagatgggatggcacaaaggtatagatagatattgctggagtttatgatatcataatcctcccaggctagaatgctgttgcctgtaaagcacagagaatattgctggacctacttagctatcttgactgataacaaccttaaataataggcgtattccaattttccttagagacttatcaacctatttttgtttaagacatttgtgtctyttttgctgagggctgaggttgggaagtaggtatgactttattatatcttatgtgaaataatgctttcatttttcatgtatatttaacccatttgtatttcaaaagcatttttgctttagcattttggaatttaaatgaatttgttaccttgcacatgtcattgattttataaattttggtaatgagcctttactgccttacaaagcaagtcaaattttgcaggctgtcctctcatgacaatctcttcatctgcctagatgatcatgatatggagaagtaa

SEQ ID NO: 637251 - DNA, 566 bp, Homo sapiens
cttcttgtatgtttactattatatctatttgacttagatttaatgagttaatatttatcaggaaaacacacactgatagatgggatggcacaaaggtatagatagatattgctggagtttatgatatcataatcctcccaggctagaatgctgttgcctgtaaagcacagagaatattgctggacctacttagctatcttgactgataacaaccttaaataataggcgtattccaattttccttagagacttatcaacctatttttgtttaagacatttgtgtctcttttgctgagggctgaggttgggaagtaggtatgactttattatatcttatgtgaaataatgctttcatttktcatgtatatttaacccatttgtatttcaaaagcatttttgctttagcattttggaatttaaatgaatttgttaccttgcacatgtcattgattttataaattttggtaatgagcctttactgccttacaaagcaagtcaaattttgcaggctgtcctctcatgacaatctcttcatctgcctagatgatcatgatatggagaagtaa

SEQ ID NO: 637252 - DNA, 576 bp, Homo sapiens
cttgtgtaaacacatggaagtactgtcatgtaaaagtctgtcattttctcttagatatttatgcacacgcaagtatacatatatatgcacatatgtgtatacatgtatgttgtgtgtgggtatatttcttcctgttactcaattttatcttttattcttgattcagagggtacatgtacaagtttgctatatgggtatataattgcgtgatgctagggtttgggatccaaacgatcctgtcacccggatagtgacatagcccctwaaaggttttcaactccttccccaggtcccttttacccgcttttatcagtctccagtctattgatgccatctttttttttttgtccttgaggcaagctcttgctttgttacccaggtgggagttcagtagtgtgatcacagctcactgctgcctcaaccttctgggatcaagcaattctcccaccttggcttcccaaagtgctgggattacaggtgtacgccaccatgcccggtgtattgatgccatctttatgtccatgagtacacaatgcttagctcccacttataagtgagaacatgtggcatttggtt

SEQ ID NO: 637253 - DNA, 553 bp, Homo sapiens
gtgtgtgggcatccttgtcttgttcctaatcttagaggtccagtacttttaatggtgacttggcaggtatgccaatgaattaaaaaagatttttgtggcagcctactgaacactgccagagtaatgctatcacrtattaactttgtttgctgattctctaaagaagataaagtagttgacccaattatatcagcttctattttttctcttaggtcttaggataaaataaccccttgaaaaatctttcctacccttctttctggcatgttatccttagaggagatgcgccaaggagaagctggttctgctcaggtggacagaagttggaacaaaaccctttaaactctgagctctagtttggagtctggagatgtaaaagttttattaaatctgtaactgagtagcttagtggcttagcctcgaactacattttaaaactcttttttttctttcccctcttctcctccccactgcccagtctctagctataactttgagataaactgcatgtgtgttatctttcatcttgaaatgcagcctcagaatgtgctgt

SEQ ID NO: 637254 - DNA, 587 bp, Homo sapiens
tcctctgaaactaaatttatccctttgttgtcatctctcctgtctttatctatggtgacttggttattcctaaagccaatgatgttgagtcccctgaagtggggataagaggaatgttctgttcacaagtattaataatttttaattagcctcctcartgggtaccctttatgttgcaactttttattttcttttctaattttttaattatccctaaccttgaaaaagtcaagaatgattcttctaggggctctgttggagagtacctcaaatagcatcatccaatttcatctttaaaaattccttctccatttaacctaatcagttttgagattggattaaattaaatacctccagtccttttctacttttggatgactgtgatttattcacatatatttatctcatgtctattatatgccaagcattcttttcatattgagaaaaaaatttttccagccctaatgaggtacttaaaatagtaggggaaatagataggatgatcagaggaggtgatatttgaccacaataaacttgtatgaaatgaaggatcactccatatgaaagccctaggtaaagagagtttc

SEQ ID NO: 637255 - DNA, 546 bp, Homo sapiens
atgtaccgctgaacctaacataaatgttaaaaagttatacataaaattgcccaaatgcaaatatctattactcatatctatactgtatggttgaagaacagggaaaatcattatgcattgttgtagtttgagacaactccattacaaaggaggctcaagatagattctgatgatggggagaatttgaggtaagtgaaaaggtgaataggcagtttcaactagcaccagcctatagtatttcattttagcttataatcataaattgtttatagcaatttctgtctgtacacttagacacgrgtataaaaatctcaaacatcttaaattttaatcattaggtgtcatagcaacgtcagcactcaaacacaggactctgcacacagcacaagttcatagctggtaaagtgttggaaagttcagggggagacaactctcattagatgtgatagggagccaatttctgccatcgttttggggaaatgatgcaggaaagttccttttatttcttcaaatagtaaaaaatgcttatgtatcactgaggggcta

SEQ ID NO: 637256 - DNA, 581 bp, Homo sapiens
ctgcagaccttgtccttgtctcttcttgtgaggtccttactctctgaggtctcattgtcctaagcacttctccagtcctctgctcctattagyatctatgacagaatgttgctgtaaaaaatttcaaaggtaaaaatatgtaactgatgcaccttaaccaagattaaaatgcagctgatttgggagagaagaacccttcaatcaaatcagtgtggtggaaaggggtcagaatactgagaggagagcatttgggggaagactttctttctttttttttttttttagatattcaacattatttaatcattcaggaaatgcaaattaaaaccacaatcagagaataaccgtatatctattagaacaaccataatttttaaaggctgatcaattcaagggtggcaagagcaagagcatacaaaaaaagcagtatacaacaatatgaataaatcttagtcatataatattaagggaaaaaaacaaaagattatatacatcatgaaaaactgtttactaaagttttttaaacaactaaaatttttgaactattttacaaaaatacctatccataacaataatactat

SEQ ID NO: 637257 - DNA, 567 bp, Homo sapiens
aagtgtagttaaaaaaaaaaatcttcttttgcttaagagatctgctgtgaaatttcaaggagaaatattgttgctgagaaacaaacacaaaacagaaaaaaacagtaaaataagtttaccccaaaaaggagtgtgcctcaaagtaattgacagcctctttgattttaagtcacaatacatgctacaggtgaagttatttgctttatagtcctagaatctgaatatagacactaatattttatcaactgcaacaaattaatcgatcattttctaatcgggagacttttctgccatcatgtctagtttstcaataatctgtacactgctttttatagaatagtgagtaaattatgcaagagatctaattatacctatttttcagtaggcaagatgggtaaaccatggacttaaatagcaagaaatgaacatctaattttaatttactttctctcaacctcaagaaaaagaagaaaattccagtacaatttatatttgaaaatccagtgtagactaaccaactctaaacaattcatttcaaacacaattgttttgcaattcccaaagata

SEQ ID NO: 637258 - DNA, 605 bp, Homo sapiens
atgttcatttcttgctatttaagtccatggtttacccatcttgcctactgaaaaataggtataattagatctcttgcataatttactcactattctataaaaagcagtgtacagattattgagaaactagamatgatggcagaaaagtctcccgattagaaaatgatcgattaatttgttgcagttgataaaatattagtgtctatattcagattctaggactataaagcaaataacttcacctgtagcatgtattgtgacttaaaatcaaagaggctgtcaattactttgaggcacactcctttttggggtaaacttattttactgtttttttctgttttgtgtttgtttctcagcaacaatatttctccttgaaatttcacagcagatctcttaagcaaaagaagatttttttttttaactacacttttatgtttgggacagcacattactctagagctgtagatcttaaagtgtggcttttctttcaactttcagtagcattagcatcaccaaggatcttgttagaaatgccagtcctaggggaccatcccagagctgtccgatcagaaactgggatgggcccaggaatctgtgttcaataa

SEQ ID NO: 637259 - DNA, 340 bp, Homo sapiens
ggggaaatgcagattcctgggggccccattctagatcaaacccatatattgcaaaccataggcctggaggagagcagaagagaagcccaagagatttaattggacttagtctggaagaggcttttcatggggtccagatcatcccaagtctcccactctcttcccctcatcaggggcactaacaggagcaatatctgacatgtgtaatttattcactgctctctacatgggaagttctggcrtaggagttagcagtatacttggtctatatatatttgactccaggcctcatccttgtcactggttctttttgtgtttgtttttttttgagatggagtct

SEQ ID NO: 637260 - DNA, 516 bp, Homo sapiens
tgaaatccaattaagcctctatacctacattctagtgcacagtaaattcaaagcatagaggtacacattaaatgayaccaagaggaaattatcaggccaatgaagaatgtgagtgatcctacatgataactgacctgaaatatttaaaacgtcaacatcatggagaaaacaaagtagaataactattctagattaaaagaaaccaaagaaacagaaaagcaaaatgattggtatgaatccttgactggatatgcatatggagggaaaaacacattcttaagaaaaatgcagatatttgagaaggatttggatattttatggtttctagaattattgttactttcttagaaatcataatggcattgtggtaatttaggcaaatgtccttattcttaagagatctatgcggaattattaacatctgcagcttaagatttcaaatggactaaaataatgtttgtgtgtgcatgtgtgtgtgtgtgtttaaagagagagagaaaaggaaaaattatatgg

SEQ ID NO: 637261 - DNA, 574 bp, Homo sapiens
tttgaaatataaaaattgaaatggctttttatttgacatatawgtcagatggacgtgaatcaccaacggatacatataaggaatcttgagagagggggccatttctctgaacctggctttcactttcagcccttacatagccaccttcagaagttattgacatgggtaattttaattagtagcattcttacatactttaaataataacatgaagactcatcaagaacatcttacgtatcacccagatgtttgttggttatctgaaaggagcatacttaaaggagttatacagttgtcaaattaaagatgagttatatgttttacttctatagaaactatatttcaaatttgcaagtattttctaggataacaatagattattctcacatatgccttatctgcctcttcctggtaaatataaatattttcatacctaagaaagtaaaaaaaaaaaaagaaagtacagcttttgggatagaaaaaaagctacggagagaacatttagaatataagtgtttggaaaacttcttccacttttaaaaaaaaattgttactaaaaatgacttaagtatat

SEQ ID NO: 637262 - DNA, 496 bp, Homo sapiens
atgtgttgctccaggagagagaagaactccagtcgtaatttgatgaagtagcaaatgatgtgaaattacccaaatttttccttcctgcagatggatcagacttgggcattttcagttaaagtactgctgtctacatgagccactggaacaccacatagatggaattagaatggcagaatcccttttgcctcacccacacgaagctactcttgatcattaattacagtaattttgaaagctgcattttgttttgttakatttccttttacaaatttacagaaactgaataagtatttataaaaatattaattcccgggactctcattttagaaatctaatttagtaagttaaccttgagacctggaaatttgtttttaaaagttatttctttgattttttttttttataaactgaaaacataatactggaacatgtttaaaactcagcaccagctatttattaagtgattctacactaatattatctacaatttctc

SEQ ID NO: 637263 - DNA, 496 bp, Homo sapiens
atgtgttgctccaggagagagaagaactccagtcgtaatttgatgaagtagcaaatgatgtgaaattacccaaatttttccttcctgcagatggatcagacttgggcattttcagttaaagtactgctgtctacatgagccactggaacaccacatagatggaattagaatggcagaatcccttttgcctcacccacacgaagctactcttgatcattaattacagtaattttgaaagctgcattttgttttgttatatttccttttacaaayttacagaaactgaataagtatttataaaaatattaattcccgggactctcattttagaaatctaatttagtaagttaaccttgagacctggaaatttgtttttaaaagttatttctttgattttttttttttataaactgaaaacataatactggaacatgtttaaaactcagcaccagctatttattaagtgattctacactaatattatctacaatttctc

SEQ ID NO: 637264 - DNA, 496 bp, Homo sapiens
tgtgttgctccaggagagagaagaactccagtcgtaatttgatgaagtagcaaatgatgtgaaattacccaaatttttccttcctgcagatggatcagacttgggcattttcagttaaagtactgctgtctacatgagccactggaacaccacatagatggaattagaatggcagaatcccttttgcctcacccacacgaagctactcttgatcattaattacagtaattttgaaagctgcattttgttttgttatatttccttttacaaatttacagaaactgaataagtatttataaaaatattaattcccgggactctcattttagaaatctaatttagtaagttraccttgagacctggaaatttgtttttaaaagttatttctttgattttttttttttataaactgaaaacataatactggaacatgtttaaaactcagcaccagctatttattaagtgattctacactaatattatctacaatttctca

SEQ ID NO: 637265 - DNA, 583 bp, Homo sapiens
ggcatttattttcctttgaagtttcaggttttgagcttatgacctttacttttatgccatttgagatggttactctttgaaatgtcttgaatgartcaaatagtttatttttaagggctttcaaaagtgaggctggacactgatatttcagagaatataagttgtattttagaaatctacattttaaaggttgtctcagctctagctttatatccactcattcaacaaatattttttgattacataattaatagtagaagcatgccagtggcgggttctggatttatgtcgcttatatctcataaaaagatgtacaataataaaaataatgctaatgaaaaagggataaagaccagaaacagaacaagccctccttaaactcaccctttatatatatgattgcgaaattcagtttctcaggaccgtaagtagccagataaattataatcttattcttgtagaaacaatattagggggaaatgtcaaattccacactaaatataccccattttccatgtaaaatatatagatgatctgggttttttggcaagtcagaaaacccagctagaactagcttgaacaa

SEQ ID NO: 637266 - DNA, 574 bp, Homo sapiens
tgaaaaaagaaattaaatcagcaatagaatttgagacaagtatatttcaaaagctggtcaattgaatttaaaattgcaattactatctctagtatatatatttccaaaagttactgtataaaatatatgtaaatatatctatcagtgaaatttgtgcaaaaagagaaaataaactagtatatgttttttaatgtcttagagaaaatgctttgaaaaatttagaaaataagaaatgatatgttaaaaataaggatgattcttcattcctaccaggcttctagtctttttatgaccgattttttatgttactgatgaaagtctaagctttttcctaaagggggtgattacacagtcatcactggtctccaactgtcccagagaactctrctgaggttacttaaattaacctttgctggaataagtttggttaatatgctacctccagagaacccctagcaaatgttaagtgttttattgaagtttgccaggaacattatatcacatgctaacatatttccctggcttacatgaggattattcaaacttcaattgtttaataaacagaaccttatta

SEQ ID NO: 637267 - DNA, 353 bp, Homo sapiens
taaagttataaaagtatattggtttaggttattgttagacagcaggcctaaaggaattgatatataggtaggcctaatgaaatgctcccaggatatttgtaagaaacatgcctgcagttaaggagrcctggagagcagccggctacacttacagcttggtttaaaaccaaccctttctcctcctgcccattcccaccacaacttcacacaggcaggccattctaaatggtgcactgatcaaatctgaaaagtaccactaacgaatgttcagctataaaaatataatcgtcaaaagataagccacataatcttcagtttatagtaagactggataaaactgctttaacaaaggg

SEQ ID NO: 637268 - DNA, 496 bp, Homo sapiens
tctagagatattaaagttataaaagtatattggtttaggttattgttagacagcaggcctaaaggaattgatatataggtaggcctaatgaaatgctcccaggatatttgtaagaaacatgcctgcagttaaggagacctggagagcagccggctacacttacagcttggtttaaaaccaaccctttctcctcctgcccattcccaccacracttcacacaggcaggccattctaaatggtgcactgatcaaatctgaaaagtaccactaacgaatgttcagctataaaaatataatcgtcaaaagataagccacataatcttcagtttatagtaagactggataaaactgctttaacaaaggggaacacattcaacagaaaatgtgccgtatgaaaatgatttttatgtaatgtgtatggttttacataaaagcatttggttgtaataaataatacatttgaactttttttcttaaattagaattttttcttggc

SEQ ID NO: 637269 - DNA, 496 bp, Homo sapiens
tctagagatattaaagttataaaagtatattggtttaggttattgttagacagcaggcctaaaggaattgatatataggtaggcctaatgaaatgctcccaggatatttgtaagaaacatgcctgcagttaaggagacctggagagcagccggctacacttacagcttggtttaaaaccaaccctttctcctcctgcccattcccaccacaacttcacacaggcaggccattctaaatggtgcmctgatcaaatctgaaaagtaccactaacgaatgttcagctataaaaatataatcgtcaaaagataagccacataatcttcagtttatagtaagactggataaaactgctttaacaaaggggaacacattcaacagaaaatgtgccgtatgaaaatgatttttatgtaatgtgtatggttttacataaaagcatttggttgtaataaataatacatttgaactttttttcttaaattagaattttttcttggc

SEQ ID NO: 637270 - DNA, 596 bp, Homo sapiens
catggatgcaattggagaacatggtcaagtgaagtaagccaggaacagaaagttaagaactgcctgttctcactyatatgtggaatctgtaaaaagtttatcataaaatttaaaagtagaacagaggataccgtaggcgaagagggttggaaggatggaggacagagatttgttaaataatacaaaattacatctagataggaagaataaattctaattttgtattctcttgtagaatgattgtagttaacaataatatatgaaatagtttcaaatagctggaaggaggatattgaatgttcccaacacaaagaaataataaatgtttgagatgatggatatgctaattatagatgtatgaaacatcactatatactccataaagatgtacaattattatgtgtcaatttaaggtaatgttaaatggatataaaggtaggaataaaccaattataacatgcatctaaaatataattaaatatattccacatgtcaagagaaatgagttatttcacattgtatctcactgagcctatagtataaggagctgccatattaaattctaagttcgctagtggtcttcatttataatgaca

SEQ ID NO: 637271 - DNA, 596 bp, Homo sapiens
catggatgcaattggagaacatggtcaagtgaagtaagccaggaacagaaagttaagaactgcctgttctcacttatatgtggaatctgtaaaaagtttatcataaaatttaaaagtagaacagaggataccgtaggcgaagagggttggaaggatggaggacagagatttgttaaataatacaaaattacatctagataggaagaataaattctaattttgtattctcttgtagaatgattgtagttaacaataatatatgaaatagtttcaaatagctggaaggaggatattgaatgttcccaacacaaagaaataataaatgtttgagatgatggatatgctaattatagatgtatgaaacatcactatatactccataaagatgtacaattattatgtrtcaatttaaggtaatgttaaatggatataaaggtaggaataaaccaattataacatgcatctaaaatataattaaatatattccacatgtcaagagaaatgagttatttcacattgtatctcactgagcctatagtataaggagctgccatattaaattctaagttcgctagtggtcttcatttataatgaca

SEQ ID NO: 637272 - DNA, 605 bp, Homo sapiens
tgtgatccgtccacctcggcctcccaaactactgagctctcgaccaaggcattccacggaactttcaccatccttactggcctcaggatgcaggcttcataaattgccatagtaagttaaatacattcaaatgcaattaaataaaattttagtgatcaaacatcaggagtgaattatgatagattctgactsttttgatatctggctgatgccagcttttaagcctcacccctctcacttctgccctacatctgtgcaagctgggtactccttcctttggccccatgggagattcaaatcatgctaacctctgctgcccagaaacttttactctggtctcataccctagccatgataaaaattcaggccaatttcccttttttgctctctcaagccattgcagacctactccagagatatgctttgctctctccagaagcctcaattctgtaactgttaacctctcacacctcttgatatgtaagatacatctttcttcttttcttttctttttttctttttttattctctcctttttttttgagacagagtcttgctctgttgcccaggctggagtgcaatggcagcaatcttggctcattgca

SEQ ID NO: 637273 - DNA, 322 bp, Homo sapiens
tatgtgaatggtgcaattgtgtgcgtgttttagttatgaattcagtactatgctttattttattaatttgcmttccatcttgcaaacagatactaacacaaggccttgggtacaggtagttatttggaaggtaatacaagaggccagaatacaaaggcgggaacagtgccagtaatgcagataaagctgataaagtactcatcattgagttagccagcagtgtggttatgtcaagtattaagctaatctctctcaaatccaagtccactattgcatactagagtgggactccactataatagtggacaaatccacatttatg

SEQ ID NO: 637274 - DNA, 647 bp, Homo sapiens
ataatttataaataaggaaattggattaatatttttgttttgttttgctttcagttttccatataagtaattttatttcttccattatattttaaaaatggaaaaagtccaatctttaaacatttttattttaactgctatattagatttatattactgctctgacaaattrccaaaaatgtagtcacttaaaacaacattttcatcttacagctttggaagtcagaaatcctaaaactgaaatttctggagggttctgtttcttctccaggctctaggggaatagttttttctttctttctgagctcccggatgccccctacaattccttttctcgtggccccaacctccatattcacagccagctatgtagtatcttctaatccttgtctctgactttgaacctcctttctttctttataaggatgtttgtaattacattgggtcatcaaaataatcaaggatattctctacatctcaaaatacttattagatactatctgcaaaaatccctttagccacataaggtaacatatttaccacagtgtcaaggaattaggatgtggacctctttgggcagtcattactcaactttttacatctgtagtggttagttaggatgctatataatgaactactgtttatta

SEQ ID NO: 637275 - DNA, 609 bp, Homo sapiens
tgccctggacaaataacaatggcaatgccaaaggtcctctgtcctttaccataccttcattgctttttgattaatgcctgtgttcatgcatcgcctactttctttctttagcatctgtctgactttgctttattcactattatatctttaatgcctagaaaaatgcagaacaaatttgaatttagtcatgaattgtgtagttctcatataactacttatcctgttgaaaatgctttaaaatattaactcatccaatccccaaaacaacactgttagtatccccatttcatcaatgagaaatagatggagtgccattataatattgaaaaatgtgttttctgtaagtcttctctggtctgaaatcatctctctattttctcctgtatctattttataatagttattattatgtmaaaaaattttcaaacagagttcgttttatgattcgtaaagtatctttgtgtatttttacaaagcctttgggatggtgtcatctttaacatctttggggagacaatacatgggatgtttggcatttgacccactaattataactttgattttttaaatagattactttaagaagttaaacttgtcttctgtaacatc

SEQ ID NO: 637276 - DNA, 609 bp, Homo sapiens
tgccctggacaaataacaatggcaatgccaaaggtcctctgtcctttaccataccttcattgctttttgattaatgcctgtgttcatgcatcgcctactttctttctttagcatctgtctgactttgctttattcactattatatctttaatgcctagaaaaatgcagaacaaatttgaatttagtcatgaattgtgtagttctcatataactacttatcctgttgaaaatgctttaaaatattaactcatccaatccccaaaacaacactgttagtatccccatttcatcaatgagaaatagatggagtgccattataatattgaaaaatgtgttttctgtaagtcttctctggtctgaaatcatctctctattttctcctgtatctattttataatagttattattatgtcaaaaaattttcaaacagagttcgttttatgattcgtaaartatctttgtgtatttttacaaagcctttgggatggtgtcatctttaacatctttggggagacaatacatgggatgtttggcatttgacccactaattataactttgattttttaaatagattactttaagaagttaaacttgtcttctgtaacatc

SEQ ID NO: 637277 - DNA, 671 bp, Homo sapiens
atttccttctttttcatggagtttttaaatacaaaacaaagcaaaacaaaacaaacaaaaaacaagtggcctcctttaatggtgtttataatagtggattaatattaccctccctcatattctcagcatcaagcaccagaaacacaaatgcctagagatttgaaaaagataacaaataaatgagccagtttgttgatgcaatataattgtggaaaaatgtagaaaaaaatccaraactcaactatagaaaattatggtattattaaaatatggactcatcaatattgctcaatggatatgaagtttcagttatacaaatgaataagttataagatctgctgttcaacattgtagctataattagcaatatggtattgtgcactttaaattattttaatggagtagatctctacataagtgttctttccacaaaactgaaacaaatgaaaacacacaaggatgcatacgtccaaactcatcaaaatataaacattaaatatgtgtttttgtagatcaattattcctcaattaagcttaaaacataatatgagctcaggattataagatttttctcatttctttcaaaggaagtttaaaatacagattttgatggaaaatagtttgcaaactaacagatatccagtatcaaatgctaattaatataatatgaa

SEQ ID NO: 637278 - DNA, 540 bp, Homo sapiens
tttttctgtctagattaacacttatatggtttggctctgtgtccccacccaagtctcctctggaattctaattcccaggtgtcaagggagggacatggtgggaggtgattggatcatgraggcagtatcctccatgctgttctcatgatagtgagtgatttctcaggagatctgatggtttaaaagcggcaatttcccctgcactctgtctctcctgccaccatgtgggaaggtgcttgcttctcctttgtcttccactatgattgtaagtttcccgaggcatccccagccacgcagagctgtgagtcaattaaacctctattctttatagattacccagtttggggtagttctttatagcagtgtgaaaacaaattaatacaaacatataatgttattaatgatgattagccaaagtgaccactgtttcaattatttagtcaacagacgtcagttaagcatcttcaaaggatatcatgggcactctaagagctaaaggtgataatgacaaatgactaacatataaccaaatacctcaag

SEQ ID NO: 637279 - DNA, 582 bp, Homo sapiens
cataaagctcacttcaactcacatcttttatttgttaccagtaagatcccaatggagtttatctttttattatctatgagacacagttatgattaattgcctccttgcgtttttgccaagtatgctcgccttggctagcatctgaatctttccttaagatcccagtacctctctgtcaaattgagtgtgaggttattactatctccagctagcttacatacattataaagagattcatttgcattgcagaattttagcaaaaagtctccaaagtactttaccctcccttacaaccatttcattagtgcacagtcccaaaggcaacctcaccaactttaggaagatgagacctctttattttatatcctcataagttcacccaaattaccaaggttagtggagtgattygccaattactttcaaggaactttgagtatccagaatttaatattttattttggaactaaaacttttattttagatctttctgtagaactagccacattgcctcatgtgaaatcaaaccacggatgaacacctttttaagtgaaatgttagtttattatttctgtttcctaacgt

SEQ ID NO: 637280 - DNA, 589 bp, Homo sapiens
tatgaacattttccaattttcagcaccacaaaaataaaaagtaaattacaacaaaaacacaatgttaatttcaagctccattagaaacacagggtggggaaaagctactgttttccaattgataatgataaaattagtagggaaccaaatcccatttaaagccttaaaagtggattgcaaacaaaaggcagcaaagaaaaaaaaatcatctatgaaaaactttsactatcattttaaggcatattatctcacttaatggaaatagatagcactcaatttcattagtttccataaaatgaggtaatgtgctgtaaaagtaaagcatttgtagggaaaaaattacaatttaaagtttgatgctaactaaatgctaaaaccctgtataatatctttgctgtgtgttgatgtattcaatgctatgttccactgcagcctgaattactcaagagataaggtttcatcaaaataagcaagtttaattgctctatttaataggtatctaagctatttcttcagcttatttctctaactaattatttggataaagtggaggataaaatttagtatgaaagaaataattaaacatgaa

SEQ ID NO: 637281 - DNA, 589 bp, Homo sapiens
tatgaacattttccaattttcagcaccacaaaaataaaaagtaaattacaacaaaaacacaatgttaatttcaagctccattagaaacacagggtggggaaaagctactgttttccaattgataatgataaaattagtagggaaccaaatcccatttaaagccttaaaagtggattgcaaacaaaaggcagcaaagaaaaaaaaatcatctatgaaaaactttcactatcattttaaggcayattatctcacttaatggaaatagatagcactcaatttcattagtttccataaaatgaggtaatgtgctgtaaaagtaaagcatttgtagggaaaaaattacaatttaaagtttgatgctaactaaatgctaaaaccctgtataatatctttgctgtgtgttgatgtattcaatgctatgttccactgcagcctgaattactcaagagataaggtttcatcaaaataagcaagtttaattgctctatttaataggtatctaagctatttcttcagcttatttctctaactaattatttggataaagtggaggataaaatttagtatgaaagaaataattaaacatgaa

SEQ ID NO: 637282 - DNA, 496 bp, Homo sapiens
tgtcatttatttgggattttctacatggacaagcatgtcatctataaacaaaggtagtactatttctttcttgcccaacactcaattttagtgaaaaactctccaatttctcaacagtaagtataatgtgagttgtagttgtttagtttttttttttattattttataaatggtgtttccctaatttggtttkgcttatttgtttgcaaattgaaaatgtttccttctatttcaagttgttgggagtttttatcattaattagttttggattgttttattcttttactgtactaattaatatgatcatcttattttccttttttattctgttgatataactgattacgttgattaatttttcaaatgtggaactaccctttcatacctagaatataaatttcacttgtttgtggtgcatgatgtttttatacattgttggattcacttttgtaaatattttgtaaggacttttgcacttatgtttatgagaggtat

SEQ ID NO: 637283 - DNA, 494 bp, Homo sapiens
aattatccagtgtcaggcattacttcatagcagtatgaaaatggactaagacaatggtcgtctttcatttctgattctggtaatttgtgtcatctctatgttgtggaggatagtcaagtacttttcttcataagattgaagcttagattattgattttagctattctttgtttgtattctatacatttaattctataaatttttctgwacccctttcactggatcccacaattttttttattttttttattttcatttatttcaccatttaaaaaatgagacatctttgatccatgtgttatttagaagtatgttgttcactttcaagtattttggtattatctagctgtatttttgttttttatttccatttcatttccattgttttctgaaaacttacttttaataatttttgttattttatatttattaagatatgttttatgctaataatgggatctatcctgatgaatgttttatacaagtttgagcag

SEQ ID NO: 637284 - DNA, 494 bp, Homo sapiens
aattatccagtgtcaggcattacttcatagcagtatgaaaatggactaagacaatggtcgtctttcatttctgattctggtaatttgtgtcatctctatgttgtggaggatagtcaagtacttttcttcataagattgaagcttagattattgattttagctattctttgtttgtattctatacatttaattctataaatttttctgaacccctttcactggatcccacaattttttttattttttttattttcatttatttcaycatttaaaaaatgagacatctttgatccatgtgttatttagaagtatgttgttcactttcaagtattttggtattatctagctgtatttttgttttttatttccatttcatttccattgttttctgaaaacttacttttaataatttttgttattttatatttattaagatatgttttatgctaataatgggatctatcctgatgaatgttttatacaagtttgagcag

SEQ ID NO: 637285 - DNA, 494 bp, Homo sapiens
aatgggatattagtaagtggagtccccaaaacagaaaagcagagaaataggacacaatatgcacttaagagaataattatmtaaaactttgctgaaaataattgagcctacatacaagaaggcagaatgtgtaaatgagaaatcagcccatgatattcaacagtaagacacggactcagtaaatcttcccaagtttctcctaagagtaagaaaatcagattgtcatcagatttctgacagcaacattttatgccagaaagcaagaaaataatatttacaaaatagccaaagaaagaaaaatgtaagtcaaggattttagattcagctaggctatccttcaataataaagggcacaataaaatcagttataaatatgcaaaatttaaaggaatatttgtgtctggctacaattctatgatttagaataaatgaaataaatatttcatgaccagccaatatgctaggccacacaggaatttttaaattaaccctgt

SEQ ID NO: 637286 - DNA, 611 bp, Homo sapiens
cagcaggtgtagagatcacatggccagagagggatcaaggaagatgggaggggagcagtggcaagctctttttaaacaactaactcttgagaactaatagagtgaaaactcactcacccccacccaggagggtattaatctcttcgtgagagatttgttcccatcactcaaccattaggccccacctccaacactggggatcaaattccaatatgaggtttgggaagacaaatatccagactgtaggaatggctatatatattttttaagctaaattgctacaaagaaacatactttttagtaatatgatacaacttagaatgttccagttaattaaatataagtagatgtaaaaagtttattgcttcaatataattaatctttcctgaggtgttccagccatcaaaataartagtaaagcagtatagtaggtagagattttgttaatggaataagaaactaattcataaacaatatcatctgttttattttaacataattattcccatcaaattgaaaccataactttttctcctgatggaaattaaatgttataggaagtgatgtggacattaccatcacccaatatctgaatcttttcctatgcatgg

SEQ ID NO: 637287 - DNA, 505 bp, Homo sapiens
aattctaagacaaaacatagattttctgtttttattatagaaatgctagacattttatctggtaattgttttgtttttatctctaaagaatacaaaatttcatgcccatcaaaatgttctctcatttctaccagttgaagattaaaagtatgtgtgcttgtgtgtgtaagatttggatctgatttttgattttttttcaatcctgtgagcacagcttaaatccaataagactcagcaggcatgccaagtcatctctagtttttcttgcacagtttgatgtttaatcaaaagggtcratggcattatgcagatcaagaacaatgttgaaaatgccatatggcatcccctgctaaataaaggttttggatgacagtgggtaataacatctcctcagtcagaaaggaaagaaatgttcatcatgtttggggtgatgtgaaagttggggtgcaattaggtgagaaaaccaaaacggtgtaagagttgggaagaaagatacaataatttg

SEQ ID NO: 637288 - DNA, 558 bp, Homo sapiens
tgccccaaaatagaagatccttgctttttttagagacctaaaaggaaaaattactcttaaatcaatgattgttccatcaagcattattgtgtggtagttaccatgtggtatatcaaagaattataatatatactccctcctgttttcaaggaacttgcaatccagctaatgagccttaccaagtttaccagaayatgctatattatttggaaaatgttaagtagcccaggaaaaacaaatatcctttgatggcaaaattagcctaaacattgtgaaactccctaacacaatcatggcaaatatgaagaagttacagccatacacatgtcctaattttacaaaatatatataaaaacataatacttaatatttgaggaatagcatcatagttaacaaaaaagtttttttcaaaatatcaggattttccaatacagcatttataagaacacaattattttggtggattaatgacccaggagtaataaatagttctttatagatccaaaacattttatagtcctaaatcagtgtttggaaaactatggcttatgtgaaaaa

SEQ ID NO: 637289 - DNA, 576 bp, Homo sapiens
aattgcttcctttgcaattttatgttgtaaatttcatttggtgtttttcttagcttggratttaggcaatgcatttgttttgagcatgcctaatgcacaattccagaaatatgtacaatgtttaggtaagttgtcaaaaagcacagaaagtggtaagaattgccataattggctttcttctcctaagcatcgtgatagcagcattttttgaacctaaggaaacatataaaagccaaacaagtgttaacaataatttgggctaaatgtacagagtttattttacttacattgtgtgctacgttgctggttcagactccagaaggtttgctgtcattgttaacaagaaaaaaaaaaaagttaatgagccaataaattcattcagttaattcgcgcgcgcgcgcgcgtgtgtgtgtgtgtgtgtgtgtagcagtattagaagtgcactaagtatctaatttcattcaaggatttatcatttatcaagtctacatggtttatatggatgtttagaaagaattcttctgactattcatctagaatcaatcattgcaactaagttggaaaaggcaagattct

SEQ ID NO: 637290 - DNA, 582 bp, Homo sapiens
tggtgtaagcactaggatgaaggctttgtttagtcagagagagagacagaaaagagaaacaataattataattcagtttgctcaggactataatatgcacacagagatgtctaaatacagatgaggtatctgctaactggcaggcagagaaggattcagagaagaggtgaattgaattctgaaagatttatctgaatgtacaggtttaagtttggttctttaaagtttcagaattaatacaaatttatctttgtatacacctgctatattcaaactagstttcgttctctattcccacagcaaaatgtgtgcaggggtacccatggtaaaataatgcacattctctaactccaccttacatatatacattaaacctccttctcctggaaaactccctaattccaatattattaaactcacattaatacataaaaaaagttgactttcagataggataatcaatcatctgccactaaattttcaacaaattttacaggacaacatatagattgtaaataattccatagctgtactaggtatttcagaaacaaattcaccatatacaatattgaagaattttct

SEQ ID NO: 637291 - DNA, 520 bp, Homo sapiens
gacattgttaataattaattgtaaataggtttgtgtttatgktcaaataatatatatataagtttaaataatatagaagcttatattaatttgcattaataaaatattaatataaaatagtttaaggccagaaaagatagattcaagtagttagaaagaggatattaaatatttctaatcaaaaaataataaaagtgtgagatgatgaatatgttaattgccctgatctgatcactgtacacaatatcacaatatcactatactccataactctgtataataattatgtgtcagttaaaaatataagttaaaaaaactagagcttatgaacaggaaataaataagactactgcaattttttaattcatttttgaagagttaatacattgttcaactttgagacataaaatattatatctgttaccacattttataaaaatgtgccttctgaataaaattttgctttgacttaaaaacactagatttacatatctcccgtactacacaaaagggctgccat

SEQ ID NO: 637292 - DNA, 520 bp, Homo sapiens
gacattgttaataattaattgtaaataggtttgtgtttatggtcaaataatatatatataagtttaaataatatagaagcttatattaatttgcattaataaaatattaatataaaatagtttaaggccagaaaagatagattcaagtagttagmaagaggatattaaatatttctaatcaaaaaataataaaagtgtgagatgatgaatatgttaattgccctgatctgatcactgtacacaatatcacaatatcactatactccataactctgtataataattatgtgtcagttaaaaatataagttaaaaaaactagagcttatgaacaggaaataaataagactactgcaattttttaattcatttttgaagagttaatacattgttcaactttgagacataaaatattatatctgttaccacattttataaaaatgtgccttctgaataaaattttgctttgacttaaaaacactagatttacatatctcccgtactacacaaaagggctgccat

SEQ ID NO: 637293 - DNA, 576 bp, Homo sapiens
aattcattaaattttatttgtatgtataatttgtctagagccagtgacattgttaataattaattgtaaataggtttgtgtttatggtcaaataatatatatataagtttaaataatatagaagcttatattaatttgcattaataaaatattaatataaaatagtttaaggccagaaaagatagattcaagtagttagaaagaggatattaaatatttctaatcaaaaaataataaaagtgtgagatgatgaatatgttaattgccctgatctgatcactgtacacaatatcacaatatcactatactccataactctgtataataattatgtgtcagttaaaaatataagttaaaaaaactagagcttatgaacaggaaataaataagactactgcaattttttaattcatttttgaagagttaatacattgttcaactttgagacataaaatattatatctgttaccacattttataaaaatgtgccttctgaataaaattttgctttgacttaaaaacactagatttacatatctcccktactacacaaaagggctgccataaagaaccaca

SEQ ID NO: 637294 - DNA, 459 bp, Homo sapiens
cttgctcctgcatacctcttgagtaaacattgaaattaaggaagaaattttaaaaattctctgaagttcataaaaatagggacacaacttaccaaaactctgctaaagcagggttaagaagwaagtttatagccctaaacaccttcatcacatcaagaagtcagaaagacctaaaattaacaatctaatgttgtacctataagcactagttaaaaaaaaaaaagaaaaaaacaaccacaaagctaccagaagaaaaagaaatcattaaaattagagaagaacttaaaaattagagatgcaaaagtctattcaaaatatcaatgaattcaagagtttgttctctgaaaaaattaaacaagattagacctctagatagattgacaaagcaaaaagaataaaaaagagacaagatcaaataagcacaatcagaaatgacaaagatgaaattacaactggtcc

SEQ ID NO: 637295 - DNA, 459 bp, Homo sapiens
cttgctcctgcatacctcttgagtaaacattgaaattaaggaagaaattttaaaaattctctgaagttcataaaaatagggacacaacttaccaaaactctgctaaagcagggttaagaagaaagtttatagccctaaacaccttcatcacatcaagaagtcagaaagacctaaaattaacaatctaatgttgtacctataagcactagttaaaamaaaaaaagaaaaaaacaaccacaaagctaccagaagaaaaagaaatcattaaaattagagaagaacttaaaaattagagatgcaaaagtctattcaaaatatcaatgaattcaagagtttgttctctgaaaaaattaaacaagattagacctctagatagattgacaaagcaaaaagaataaaaaagagacaagatcaaataagcacaatcagaaatgacaaagatgaaattacaactggtcc

SEQ ID NO: 637296 - DNA, 459 bp, Homo sapiens
cttgctcctgcatacctcttgagtaaacattgaaattaaggaagaaattttaaaaattctctgaagttcataaaaatagggacacaacttaccaaaactctgctaaagcagggttaagaagaaagtttatagccctaaacaccttcatcacatcaagaagtcagaaagacctaaaattaacaatctaatgttgtacctataagcactagttaaaaaaaaaaaagaaaaaaacaaccacaaagctaccagaagaaaaagaaatcattaaaattagagaagaacttaaaaattagagatgcaaaagtctattcaaaatatcaatgaattcaagagtttgttctctgaaaaaattaaacaagattagacctctagatagattgacaaagcaaaaagaataaaaaagagasaagatcaaataagcacaatcagaaatgacaaagatgaaattacaactggtcc

SEQ ID NO: 637297 - DNA, 592 bp, Homo sapiens
tttaatatacaaaatcaatagcattttatatgaataacactcaggctgagagtccaatcaagggcacaatcttatttataataatcacaaagaaaatgaaatacccacccaggaatacagctaaccaaggaggtgaaagatctattcaaggagaactacaaaacactattaagagaaatcagagatgataaaaataaatgaaaaacacttcrttctcatggattggaagaatcagtatcattaacactgccatactgcccagagcaatttacaggttcggtgctatacctgttgagctaccaatgtaattcttcacaaaattagaaaagaaaactattctatgatttatagggaaataataaagggcccaaacagccaaagaaatcctaagcaaaaagaaaaagatggagacgtcacactatctgcctttaaacaacactataaggctgcagtaaccaaacagcatgtaatactacaaaaagagacacatagattaatggaacagaatagaacactcagaagtaaagccagacacctaccaccatctgacatttgacaaggccaagaaaagctatacgcagaagaatgaaac

SEQ ID NO: 637298 - DNA, 561 bp, Homo sapiens
tctacccattaccaatttgaggcatgatttttttccctcaaaaagaaatgagaagaaataagtagcccttaatttccatttttaaaatttatatcagtaaaagctgtctgttctattggaagaacaaaagtcagggaagtttgcttcttatctggatgattttcattctttgttgtaggcaaatcacaaggtgtcaggatttgtcagctttatttattttctttttcttttccttttctttgctttctctccctctttgagtttccttttttccttccatctgttcatatattgaaaagatattttattagctgggggtggtggygggcacctgcaatcccagctacttgggaggctgaggcaggagaatcacttgaacccaagaggcgaaggttgcagtgagctgagattacaacattgcactccagcttgggctagagagctacactccctcccccaccctccccagtgcccccccaaaaaagacttttttttctaaaaattttaaaattcaatcgtaaaaaattacaactcatatccaaatacgttcaccttcttttc

SEQ ID NO: 637299 - DNA, 561 bp, Homo sapiens
tctacccattaccaatttgaggcatgatttttttccctcaaaaagaaatgagaagaaataagtagcccttaatttccatttttaaaatttatatcagtaaaagctgtctgttctattggaagaacaaaagtcagggaagtttgcttcttatctggatgattttcattctttgttgtaggcaaatcacaaggtgtcaggatttgtcagctttatttattttctttttcttttccttttctttgctttctctccctctttgagtttccttttttccttccatctgttcatatattgaaaagatattttattagctgggggtggtggtgggcacctgcaatcccagctacttgggaggctgaggcaggagaatcacttgaacccaagaggcgaaggttgcagtgagctgagattacarcattgcactccagcttgggctagagagctacactccctcccccaccctccccagtgcccccccaaaaaagacttttttttctaaaaattttaaaattcaatcgtaaaaaattacaactcatatccaaatacgttcaccttcttttc

SEQ ID NO: 637300 - DNA, 523 bp, Homo sapiens
tggactgaaggtgacaaaccatctttgcaatttttttttctattttctatcataagagaaagaacacggactttctatacaagatagaataaatggtataaaatgaaacaaaatattctgaataaggccaatggaatcaataccaatatgaatcaggaggaagtaaaatatgaccctgagggaatataaagaaagaaaaataaaagacagaagtgcaaataagtggtcctttcattttggagataaaaatgtctaatattaaatcttctgaagctgtatccaacatgcatgaaaaaaatagaaaaatcttaaggaaaaaawatactgtgatacttcaccagcaagtaagggatgtgtcatggtgataggtgagtctttgcttgtgagcagtcatttggcaacaaataatgttgacttggccaatggggaagagaggtctctcttgtgaccggcacttgtatgatgaagaaaaatctttgtctcaccaagcctactaactgctatgcactacttattaattggg

SEQ ID NO: 637301 - DNA, 620 bp, Homo sapiens
aggtgagtctttgcttgtgagcagtcatttggcaacaaataatgttgacttggccaatggggaagagaggtctctcttgtgaccggcacttgtatgatgaagaaaaatctttgtctcaccaagcctactaactgctatgcactacttattaattgggcataattagcactcttaaaatacgtctaggcagaaaagcaaattattaaaagaccttgtcatttttatgcgttttgaactgaaattttgagctttcacacaaaaagaataggaatctcaaaaccgcctttatggatgtagtagcagagactgatcatgatcatcaaaacccattctcttttctctagaatgtacagctagatgacatttcttattctcgcctggaaacctgatgtcacccatagaatggagcagggttgacttcctccaacctccacacctgctatcgaactttcccactcatgctcttccatgctycttgccttgttactagccagatgttgatatccagaacaatctttgaaatgatgtgtataacgtagcagagcatctgccgatttggatcacttaatgtgcagagaagccttgaacttccttgaacatttttggacaatttcaatgag

SEQ ID NO: 637302 - DNA, 556 bp, Homo sapiens
ttcagcctgggtgacagaatgagatcctatctcaaaacaatgaaaaaaattgaatttaaattaaaaaacaaagatggcctttgaaacctgcaaatataatggattacattgcagaagaatcctgagtgtaaagagcccaagacttttatgatggacagtcagcatgaactttgctctagaggaagacactggctctatcttccattggttctcagcaaacctgcacttcgtggtagcaggaaccactatctctatcttccaagtattaacatcctagaaaagacagtttggaacagaggcagtcaatgtctctgtttaccagacatgtagaaatgcaagaactcaactgatccttgttcctcccaatatatctatccctagtttatacactgctttggattctggtgaattttcccatgaaaaacaccactgtcagtcactctgattaacctgcctgaaacagctaaacccagatatgttcattgtgtcttagtaaaatgtattaaggttattatcaacasaatgccaagcagcagaatgaggctaaccaagggta

SEQ ID NO: 637303 - DNA, 387 bp, Homo sapiens
tgtgtaactccccacagtaaccaaaaggagtgtcattttggggagatccctgaagtcatctgagagctacatgaatctctagtggtgttttcataagcacytaaagtctcttattaccttaataaggtgcaattcactattttttggggagggaggcaagttaaaaatctcgattctacatgtaaagtattgttccagtttccctgaagggtaatgtttacaattttttcttggggggtgggggcggcacggactattcctgtaaatgcacaggttgacaacacctctgacagggcccttcagctggctagtaagcctcgggactcccagattagtttcagtaattaagtctgtttcttgttttataagacatttcctgaagacaat

SEQ ID NO: 637304 - DNA, 644 bp, Homo sapiens
ttactggtgcatgtaaatcattacttagatgccaagagcacacaggagaaatttcactcaggaaagacatatcaactttgactgtaacttagaaattatacagtagaattttgctaataactatatataactatatataaatatatatatataactatatatatataactctctctctatatatataactatayatataaagttttgtaaaggtggaagtagcagagagtgttctattatctggcccaatgtaaaaagcatgtacttaaaaaaaacttgagcttcccatgctgggaacagtaacagtgaagagggaaaaagagagagagaaagagtgaactccatgggaggtgtcacataagagcctccttcttcatatttgttccaaatttgtccaaagttcactttgctattcttttttttttttggtcataaagtaattttagaccttaaagactaatataaatttaaattattaataattttatattacttttattttgcctgactcaagcatctctaggagaataagaaaaaaatataatttaggccttaattttctaaagatgtgtaaagacttagtatcagaagcagccagatttgaagcaacatgaaataagaataactaaatataggagggaggg

SEQ ID NO: 637305 - DNA, 608 bp, Homo sapiens
taaatgcttcagtaaatgattgcagccccaaaattgaaagaacattctattcaagcctacgactatggaccgcacacggaatctaagtctttttagaaggactgttttgtgcttgaaaagattgattttggttgtccataatcctcatgttttctttgacatgtattttggatatttcygcattttagttccttttgtgaatgtttgcactcactggattgacttttaactgaaatgtctgcaattctttgcagaaagtatacttttctcatttagatattctgggctttaatgataaaacaaaatttgtaggggaatgtaatactgcaaccttgagagtaccatgaaagtcagtgtatgaaaaacaccattcacgttaaaatagagcattgagtctgcataaattcgattccttttttccagcaaaatatcattttattcgagaaccaactacccataagctggattataaagtaatatttaaagggtgaatttttaggtgaaggctgagaagtttcaagaaacatatacacatgactaagcaagtattagctgacagcattttgttgggtgctgaaggcacaaaagttgcccccctctcctactct

SEQ ID NO: 637306 - DNA, 554 bp, Homo sapiens
ctgtgtagaaagaaaacagttcagattgtaagtttcagaaaaaggtgtcattatggagcaaatcacccaaactccttatgttttgtgatgaaattgactggaaaattaccaaagttctcttcattttgttgtggktatacacaaattaagtcactattggtaaacagatcttttctaaaataactagagctcacaagtttaatttattcctgaatagaacagtctacatcaacctcattaagcagcaaaatgtcatgatttgatttggtagaagtcaggtagagaagccagcctgccctccctccctccatcactatttctccttctttccttccttccttccttccttcctcccttcctccatccctccctccctcccttccttctgtctgtctgtgcttccatctttctttgcactctattatatgaattatataattttgtttgaattgtgcactttggatcactagacgtggggtatagagcaaccaaaattgagaaaaggcatgtatgaagaagttcagaatactacagaaacacagtttggatatttg

SEQ ID NO: 637307 - DNA, 527 bp, Homo sapiens
taatatcatctgcagcttaaaacactgcagcacagcaaagcatggaaacaattactgcattatgaaaaagttcatgcataattcgtggactccattataatgcttatgttgatcttaaggcaaaaataaaaaagactatgcttttagttttacatygtattcaccttgcttcatctgctgaaggttatgcattgtattaaataatgtagtcttttgtcaattccttataaaataattgctaatctaaaacagtgacaagtacagtaacatcatgttaaggaagagaataaaaaactcaattgtctcttaaaaagagccttctagaatgtcacttatataacaaatatagttcattcaaactaatcttaggtccttgctccactgcttctgctcattctctcgtaaaattctcactatttatatcaggggtcctaagtcctaaatgtagcctgatgaatagatacaactcataacatcagctgaattaactgtcactcctacatactgatttgtggggcagcagttct

SEQ ID NO: 637308 - DNA, 410 bp, Homo sapiens
cagatgcatccatttctgtgagtggtgagaacctgtttcatcagcagcaatgtaactagccagcggmcaaatggcagatgactttgaaagacattctaaggagggtaactggcgagctggtgtggagttgaccttcattgctttcagagggatcagaagactccccctacccttctattcaaaggaagggattcttccttgattgggaatcattagatttcgttaaccccatcaaattctatgtgcctgtttatgtgtgattttttttttccctagggaaaacatgtataagttttgttaggttttctaatacaaaaatcttttctttatacaaaaagattctggactacaacctgtctggcatctttctccagattctgtgtcacattgtattctagaataatgagaga

SEQ ID NO: 637309 - DNA, 410 bp, Homo sapiens
cagatgcatccatttctgtgagtggtgagaacctgtttcatcagcagcaatgtaactagccagcggacaaatggcagatgactttgaaagacattctaaggagggtaactggcgagctggtgtrgagttgaccttcattgctttcagagggatcagaagactccccctacccttctattcaaaggaagggattcttccttgattgggaatcattagatttcgttaaccccatcaaattctatgtgcctgtttatgtgtgattttttttttccctagggaaaacatgtataagttttgttaggttttctaatacaaaaatcttttctttatacaaaaagattctggactacaacctgtctggcatctttctccagattctgtgtcacattgtattctagaataatgagaga

SEQ ID NO: 637310 - DNA, 472 bp, Homo sapiens
tagctgggattacaggcatgtgccaccaygcccaactaatttttgtatttttagtagatatggggtttcaccgtgttggtcaggctggtctcgaactcctgacctcatgatccacccacctcagcttcccgaagtgctgtgattacaggcatgagccacagcacacagcccatctttttttaaactatgtttgtttaatcatcacaaatctattcatctatccactcctttatttatctatccacctcttattttgtacacatttcaaagtaaactatagacatctgtatacttatctttaaatatttcaatatgtacatcattaactggtgttaagtatttctttatagcttttcctcttggtggaaagtttacatacaaagaaatgtacacattttaagtacatgttcactgggttttgacaagtacatgcatcagcaaaacccaaaaccctatcaagatagagaatgtg

SEQ ID NO: 637311 - DNA, 545 bp, Homo sapiens
gaatccctactagtagtcaatgttggatatcttgtatgactttgcttctggcctcgtcagttttgccttctgggagttttaaactttagcttctttcttttttttagatggagtttcgctctgttgcccaagctggagtgcagtggcgcgatgtcggctcactgcaacctctgcctcctgggttcaagcaattctgctgcctcagcctcccaagtaactgggattacaggctcacgctgccatgcccagctaacttttttgtattttagtagaracggggtttcaccgttttgcccaggctggtctcaagcccctgagctcaggcagtctacccgcctcggcctcccaaagtgctaggattacaggtgtgagccactgcgcccggcctaaactttagcttctaacactactttcagatttaaaaaaaaaatttcaactattttaattttcaaaaaatttcaactattgttttaatgtttattattatttatattgtctcttaactcttggaaaatattggttccaagattttttctcttctgcat

SEQ ID NO: 637312 - DNA, 285 bp, Homo sapiens
aaaaaattgataaattagacaaccaaaattaaaaatgtttgctcttccaaagataccatataagcaaataaaagcacaggccacacattgggagaaaatagttgcaaatcatatctgacaaaagacatattcataatacataaactcttacaactcactgacaaacaactcaattttwaaaaatgaggatatacagaaaatcattggaccttcctcttaattttgctgtgaacctaaaactgctctattaaaataattaagtctttgttttttgagacggagttt

SEQ ID NO: 637313 - DNA, 543 bp, Homo sapiens
gccaggatggtctcgatctcctgacctcgtgatccgcccgcctcggcctcccaaagtgctgggattacaggcgtgagccacgacgctgggccagagctgggctcttaagttttacggtgaacatgctcatcaargaattttttttttttcttgagaacagggtcttaactctgtcacccagctcgaagtgcagtggtgcaatctgggcttactgcaacctctgcctcccaggctaaagggatactaccacctcaccctcctgagtagctgggaccacacgtgcgtgccaccgtgcctggctaagttttgtatttttttagagacagggtttcaccatgttgcccagactggtcttgaactcctgggctcaagcaatcctcccgtctcagcctctcaaagtgttgggattacaggtgtgagccactgcacccagcagaggaattcttccaatgacaattttgttttctctgtatactttccaaaggggtgaaaaagactagatctacttaacagctgtatttctttttgtgaattaattatttg

SEQ ID NO: 637314 - DNA, 543 bp, Homo sapiens
gccaggatggtctcgatctcctgacctcgtgatccgcccgcctcggcctcccaaagtgctgggattacaggcgtgagccacgacgctgggccagagctgggctcttaagttttacggtgaacatgctcatcaaagaattttttttttttcttgagaacagggtcttaactctgtcacccagctcgaagtgcagtggtgcaatctgggcttactgcaacctctgcctcccaggctaaagggatactaccacctcaccctcctgagtagctgggaccacacgtgcstgccaccgtgcctggctaagttttgtatttttttagagacagggtttcaccatgttgcccagactggtcttgaactcctgggctcaagcaatcctcccgtctcagcctctcaaagtgttgggattacaggtgtgagccactgcacccagcagaggaattcttccaatgacaattttgttttctctgtatactttccaaaggggtgaaaaagactagatctacttaacagctgtatttctttttgtgaattaattatttg

SEQ ID NO: 637315 - DNA, 543 bp, Homo sapiens
gccaggatggtctcgatctcctgacctcgtgatccgcccgcctcggcctcccaaagtgctgggattacaggcgtgagccacgacgctgggccagagctgggctcttaagttttacggtgaacatgctcatcaaagaattttttttttttcttgagaacagggtcttaactctgtcacccagctcgaagtgcagtggtgcaatctgggcttactgcaacctctgcctcccaggctaaagggatactaccacctcaccctcctgagtagctgggaccacacgtgcgtgccaccgtgcctggctaagttttgtatttttttagagacagggtttcaccatgttgcccagactggtcttgaactcctgggctcaagcaatcctcccgtctcagcctctcaaagtgttgggattacaggtgtgagccactgcacccagcmgaggaattcttccaatgacaattttgttttctctgtatactttccaaaggggtgaaaaagactagatctacttaacagctgtatttctttttgtgaattaattatttg

SEQ ID NO: 637316 - DNA, 594 bp, Homo sapiens
tcctttagtttatatttggacgttaatcacctgtccaccaaatggatttttaaaaaaaagttacctcagtatggtccatagcagtacaattgcaagttttgcatttgatttgcatttatctgattattaatgaccttcagcatctcttcgtatgtttagtagctgcatatgcttccttggtgtgagatatttattcataggttttgccaattttttattaattatctgtgctttacaaaagttcacttgtaagtattttaaaaatatttttggtatttctgtttcacaaacatctttatatttgtaatttgccttttcattttatctaaagtgtctccaataagcaaagtttcacaattttgtagagtttaaaattagagattgcctatatatttagaacatttttwaaaaagaccttccatattgcaaccatttttttctatttcattaatttccatttttatctctcatcatctatattctttgggtttatttttaatgtcaaaaatttctgcttggctgtttttaaaatatatatttatatgttttcttttactggctaatatcttcctctgttagtaggtgatttaggct

SEQ ID NO: 637317 - DNA, 531 bp, Homo sapiens
agagtttaaaattagagattgcctatatatttagaacatttttaaaaaagaccttccatattgcaaccatttttttctatttcattaatttccatttttatctctcatcatctatattctttgggtttatttttaatgtcaaaaatttctgcttggctgtttttaaaatatatatttatatgttttcttttactggctaatatcttcctctgttagtaggtgatttaggctaattttaaatcttggtcttttacttttaatatcattgtgtctgatgaaatccaaaatccagtatgttttcctaaatattttgttccataagtgtcttattttttttaatccttaatctcttacctcaaccccatattagttactctttctggcaatggttattagggatgaactacttaagaaagtcagctccaaggaccttcagtgggaargatgagaaacaaaagaatcctagactgtggacccccagacaacaaaacacatttcccacatttacttctcatcccataaagctgtctg

SEQ ID NO: 637318 - DNA, 535 bp, Homo sapiens
ttcattaaatacaatacataaataaaggggttttttctttgtttcttttttactcacatctacctcttcaggagaagagttattactgccacaaaactgtttgggatgctctcagatatgtaaggttgattaacctgtaaatgtgcatcagatagtaaatcaactaagctttattgatgctgccaacatgtgttagccatagacaacacagttagaaccagggccaagcaggggatttctagagaggggtactgggttttgtaggaaaaaattgaaaaagaccctggaataaggagcttctgggttatgacattgttttaaagtaccaactcaactctgcaatcatcaaaaaacaaagagatattttaaatctcaatccacagccatagaattggttcactggcattttttatctagactttttctttggaagcttgttgtacctaccacatctgcaggagtggcgcgygcacgcacacacacacgcacacgcataaataaatatagatagatagatagatagatagataaatat

SEQ ID NO: 637319 - DNA, 520 bp, Homo sapiens
tttaggtaaacatacaaaaacatttcttcagagttctgcacaatcttaaagagttatagtttgaagcaacatgttggactttcttttctttttatttcctactatctcccttagtgattttgtgtcttctatctataggtcaaatataatttatatcccaattcctttcaaatttatatttgttgtccagcacacacttcttgatgttcctcaaaggcactaaaaaaccaacaggttcaagcataattcagtatcttatcccatttcccattcaatttatgccagtcttcacaactggtatttctctctctctctctctctctgttttttttttaatctaggcaaagggaattatcacccctcagccatagatgtcagagtcatgtccgygattgctgactaactctcaacctcaaactcaatcaatcacttaaaaaattattgatttatacctgctgaatatcagttgaataaaatacttctctcagttctctttgtcattcattactcattactctag

SEQ ID NO: 637320 - DNA, 607 bp, Homo sapiens
cgtaatatgacttgtgttttagacaaaacatttgtattaagttgtgaagaatgaattgaagcattccaggacagagacaaggtgacaattaggaatttttccaatagtctcagtgaaaaatttgagaatcagaacaaaggaagtagcagggagaatatgtaaggaacagagataaaatgaagtaaaatcaagattaagtgacattttgtaaagtgtataatgataatgaaaacctttctgccttaagcagtaacaggattgatggtagtacacccttgcctgttaataaaggtgttgggtctgatcaccccaacattctgggraagcaaccaatttgctggggaggtagtcactctaattttggaaatgttgaatttgatgcgattgtaggacatagagatggaagtgaccatgggtacattaaatataaagcttagagtttagggaagacttagtgtttagggaagtgttagagaaatgtaaatactagcttgtagccgatatcttcatttattctagctttttctaactatgttagaaaatatgacctagcgaaatatattagaaaacaaataatataatagaacacatggtagtattttaagta

SEQ ID NO: 637321 - DNA, 528 bp, Homo sapiens
ttattctttggccaattgctctgttttattattttaataattgtcagtagctgaatatcactaatcaaatttatttcatttatgtgtttacttggctatttatttgttttctgtttctccrtatcatgtaaaacaacatgatgtcacagtcctatttatttatggctatatcctcaacaattagaacagtgctgagatgactaataaatatttgggagtgaaatgtacttgggagacgagtttcagtaaggacaaaaggagtcaggtgataaaaccaggtcatgagaggagaaaagaagtctcaaaagggcagaagaattggacatcaagatttctgtatgctgatatatagaggaagacagatactgatacaggtactgtctacatctaaatggacactcccaaagtcttatataagttgtgctttatttttcatttctactttcagaacctggctctctataaatgatgagtttctcaaaaaataatctaggctcagcaaacttcaaacaagttgaagtttattag

SEQ ID NO: 637322 - DNA, 503 bp, Homo sapiens
tcccaaaactatcttttctgtgtatttcctcacaatcaaagaaagttaacttgactcatcaaaagcctactacttcaagataagagagtaaaacattatacctatcttatgggaggaggaaatatttacagccaccacaccacagtccattctgaaattgatcctcaaagttgagtggcastttatcacgaaattgttagttgaaaggcagaggagttaaaccctgaatctaggcagttgggtcttcacacttcagcaatgaacaggtgagttggccaactcaggttttctgactatgattacttcatcccatgaggaaatgcccagaagggatagtttaaggatgtcttcgaagcttagtgatgtgtttggaatctgaggtgtcaaaatgaataataccaatatagtcaatatgctcacaaccagataattttggtaactgagaaaagccttattagtgaaatacgttaacatttaatctggccatcagcatctcttttgca

SEQ ID NO: 637323 - DNA, 576 bp, Homo sapiens
ttacatgcaacagtccttaattttagaataaactttaaaaaaaagctctcaaaatatttttaatatggatttccccttacctttgggtttttttccaaaattttacaaacattttactttattaagttaattatttcaaaatatatataatattttaaagtttcaaagtttatctattatttgaccaattatgtggacctcttcagcctttcaaatsacatctagtcaaggcctgaggtttatttttaacctattattatttttcctcattttcttagataatttttctggccagatgcattatattaagattttcagtttctatacagactaactgctgaaatcatggcaatattttcccacttgaaattattcaagtgggaagagaacgctcaggtgacaaaatatttttggtcagctacataatgaaatttgatagcaaagaacattcaaaagagaaaatatttgatgctgcaaagtcacatatttatttgcttatggagaataaaataggaaattacaaaattaaggaaaagtatgatttataaacagaacattgcagtgactgtcaaaagc

SEQ ID NO: 637324 - DNA, 561 bp, Homo sapiens
caggggagatagaatttaaatagataaattactaaaacctataataatgtgcttgaagtatggagaaggcaatgtattcgtgcaaatgggtgagatattaagcctatctgagtccatagataaggagaactttctcaagtaggtaatatttaaaatgggcttaacatgacatctgcccaaatttcagaattaatatagtgattatttttacaaatggtaaacaaaaattygatgatcaaaaataatctagttgttcattttcaagattctagttcatgatttgacacttgcaaatgtcataagccctcctattaagctgtctttaagttcttccattttccctgtgtcgtcgacaaaatcaagaaattgttaagctatacatatttgagaaatgaatacatgaatgaaatgatgactagaaaacacaatgatcacatgtctaagttttagattgacattgttcaaataatcttcttatcgtaatagaaaaatgatgttttgagaaaaatgtacaagaaacaatgtaaaaggacacactttgtttccaagataaaataaaaa

SEQ ID NO: 637325 - DNA, 622 bp, Homo sapiens
cattgggctaaaaccaaggcatcagcaatcctgcatttccttctggagattctagggaagaatccattttcttattttttgagtagagagagcccacatttcttggctcatggcctccttcctccagcctcaagcccttatcatgtcccatcaccctggcctcttcttcttcttgtgaacacctgtgtcattgcattgagaccactcagaaaatccagcatgatctttctatttcatggtcatctgaattagttccatctgcaatcttaatttcacttttccatgtttacaggttcggggattaagacgtggatgtgtctgagaggccgttaccactgttaataaaattgataacggcggagccacggtggttcacgcctgtgatcccagcactttgggaggccgaggcgggcggatcaccaggtcaggagatcgagaccatccttgctaacacggagaaaccccatctctactaaaaataaaaaaaaaaaagaaaattasccgggcgtggtggcgggcacctgtattcccagctactcgggaggctgaggcaggagaatggcgtgaacccgggaggcggagcttgcagtgagctgagatcgagccactgcactccagccaa

SEQ ID NO: 637326 - DNA, 622 bp, Homo sapiens
cattgggctaaaaccaaggcatcagcaatcctgcatttccttctggagattctagggaagaatccattttcttattttttgagtagagagagcccacatttcttggctcatggcctccttcctccagcctcaagcccttatcatgtcccatcaccctggcctcttcttcttcttgtgaacacctgtgtcattgcattgagaccactcagaaaatccagcatgatctttctatttcatggtcatctgaattagttccatctgcaatcttaatttcacttttccatgtttacaggttcggggattaagacgtggatgtgtctgagaggccgttaccactgttaataaaattgataacggcggagccacggtggttcacgcctgtgatcccagcactttgggaggccgaggcgggcggatcaccaggtcaggagatcgagaccatccttgctaacacggagaaaccccatctctactaaaaataaaaaaaaaaaagaaaattacccgggcgtggtggcgggcacctgtaktcccagctactcgggaggctgaggcaggagaatggcgtgaacccgggaggcggagcttgcagtgagctgagatcgagccactgcactccagccaa

SEQ ID NO: 637327 - DNA, 520 bp, Homo sapiens
tttgattgtcatcttctccctggtctgaagatgaggcatttgacaagtgtcaatgctcaagatttagcagaagctagtgccttttttagcccccaggagtcaaagccctctaacttaatagcataaggattagctgataggaaatttgtactgcagaaagtcctatcatttctctctaacatgtcacaagttaaaacattgtgatttggtgtccagaagttactgcctgcagcatttcacacgagtgtattgaaggaattaggttactcactgcatagtttgtagttggtagcattctagtgatagaaatatgaccaaattatcacagatgtaatagstctcatgccaaacttatcaaagtaagacaacttaacttttctctccatcatttacaaaaatgataaacgtaaatatcagttttggaaatctaatatgagaataaaaagtatcattttatactataaacaaagagcaaagtaagaacaaacacattttttttcagctatttaaaagagcatca

SEQ ID NO: 637328 - DNA, 632 bp, Homo sapiens
tatttaacatttgttaataaayagattgatatctagacctccaatctgccttacttgtttaatttgtcaagatgtgtaagaaagaaaaaatgtgtttgttacagcttatcttcagtcatagtttcccctagataagttaacgtaatgcagaatttgttgaagataataaactagttattacttggacttttgagttactcaggtttcttgttaaggtcttcatttatttctaatgcttgttatttaatgtgaaaagactttttcttatttgtttcagaagaatattctggaaaaaatcagttttgaaccaacaggatgcctctcacattatttggacatcattcaccatttacccaatcgcttatgaggcattttacattttaaaaaacacactctatatcagaccaaacaatatttttgggagaaaaattatgctgtatatacagaaacagtttttgcttttcaaatttgtcttggagccagccctctcacagacacctggctgagtcctgtggagacaggttgaaataagtaaaaatggaatcgactttgactaaaattccgtaggctttccaagccaaacatatatgctttagtagctgtttattaaaatactaaggaaagatgagaga

SEQ ID NO: 637329 - DNA, 619 bp, Homo sapiens
taatgtatacatagaatacttaattttaactgtgaatgaatgtttaaattagaatataattatgtgtaattttagttaaccgaagaaaccctattgaatgactcacatactcaaggatgagatactcaaaaataggatctaactttagagaaattgtgaactagacagacatttttggcatgcctctccagtcttcagatagcaaacactatttttctggcttcagaatattttccatttggcataccttttacttgtcttttgtgaccttcctccaaattctgataaagtatttcaaaacatcttagttgtaattgtgagcttataatagcttaagatatcatcttcctacatagcatattggaaacttatttttaaaaaagaaaaaattccaagtgataaaacaatttgagtcaaaatgtaaaggtactatgactgcagtagatcacatagcccaacatcacttcaacaagtgagtatgtcttccatgtgctcattactacattgtgaaaataacccatttgaatgggtaacrttttacagatctaacagtgtcttagagttagttactcagtgggattccgtacatatacttcatggtaattgaacactgaaagct

SEQ ID NO: 637330 - DNA, 653 bp, Homo sapiens
caataatgatgacagtagttataagtaagtgtttcataaaatgttgttttccttcccatcaagaatttcaatctattttattgggcaatatattrataataacattgagttatatgttatgtctacactggcaagaatttgaaatgacagttgtgctcagagggtaacaaacccttgggagaatagaaagaaacatgactgcattttcagtatatttgcatatcctctagggctttttctatgtggaatgacgtttcctttgttatttttcttctgagaaagatatatgatataatagttctgaaaaactcctttccaaggaatacctataggaataaatgtttcccaagagagtacactcacagagtctagttactcttttttatttatattggtgttatgctattgtttataatctttgaatatcaaatcattgttatactgaatttgaaaatattttcttaacatgtatattatccaaatcagtatcacaggattattttatagggataaggaagatcacaaaatgctgctttaatttgattgttaatgtttataatccttttatcaaaattttatcattgttaattatgaggcctaaaatacaatattttttcgaaaatattttcttgactaaaaatcaaataaatagc

SEQ ID NO: 637331 - DNA, 653 bp, Homo sapiens
caataatgatgacagtagttataagtaagtgtttcataaaatgttgttttccttcccatcaagaatttcaatctattttattgggcaatatattaataataacattgagttatatgttaygtctacactggcaagaatttgaaatgacagttgtgctcagagggtaacaaacccttgggagaatagaaagaaacatgactgcattttcagtatatttgcatatcctctagggctttttctatgtggaatgacgtttcctttgttatttttcttctgagaaagatatatgatataatagttctgaaaaactcctttccaaggaatacctataggaataaatgtttcccaagagagtacactcacagagtctagttactcttttttatttatattggtgttatgctattgtttataatctttgaatatcaaatcattgttatactgaatttgaaaatattttcttaacatgtatattatccaaatcagtatcacaggattattttatagggataaggaagatcacaaaatgctgctttaatttgattgttaatgtttataatccttttatcaaaattttatcattgttaattatgaggcctaaaatacaatattttttcgaaaatattttcttgactaaaaatcaaataaatagc

SEQ ID NO: 637332 - DNA, 598 bp, Homo sapiens
ttgataggtggagcaaaccaccatggcacatgtttacctatgtaactaacctgtacatccttcacatgtatgctggaacttaaaataattacttgtttagtttttccatgatataatgcaagctccttatataagggtaaggatacttttagtcttgatcataactacattcccaatacctagcgtaaggctggtcatacagtgttgctcaaaaaagtattgtcaaatgaataaatgcttaaataaatggcaaacatttgaagaaaattgcttagtcctaaacagcgggtttgaattwattcttactttggtgatagatactgtattaattcttattaagttcacttttaataaatcatgtatcactggtaccacaaatttcaacatatttgtcaatttctacaaaactgaatattgctgcatttgagatgatctcattgtcttgaaccaggcagggttatttttttttaaaaaaaaggtgtcctgatttactttttattcttgctgtagttcaagcaaagtcccttgatttgttcttctcatcaaaagaaaaacagagttcaagggggagttcagctaatttagattcatgatcaat

SEQ ID NO: 637333 - DNA, 598 bp, Homo sapiens
ttgataggtggagcaaaccaccatggcacatgtttacctatgtaactaacctgtacatccttcacatgtatgctggaacttaaaataattacttgtttagtttttccatgatataatgcaagctccttatataagggtaaggatacttttagtcttgatcataactacattcccaatacctagcgtaaggctggtcatacagtgttgctcaaaaaagtattgtcaaatgaataaatgcttaaataaatggcaaacatttgaagaaaattgcttagtcctaaacagcgggtttgaattaattcttactttggtgatagatactgtattaattcttattaagttcacttttaataaatcatgtatcactggtaccacaaatttcaacatatttgtcaatttctacaaaactgaatattgctgcatttgagatgatctcattgtcttgaaccaggcagggttatttttttttwaaaaaaaggtgtcctgatttactttttattcttgctgtagttcaagcaaagtcccttgatttgttcttctcatcaaaagaaaaacagagttcaagggggagttcagctaatttagattcatgatcaat

SEQ ID NO: 637334 - DNA, 564 bp, Homo sapiens
tggggggcttgtacccaacatttagtataacacatcccactagatttaggcaactttggccctctaccattatccatctccctaataattacctcagctccccgtgcagtgtttttggacacagcctaagacatacagactggcttttccttccacatggactgacttggctcttgtgaaacacaaatgtgtttcttatctcaacaaattctggaaagaaagctattttccaatttttttttgttttttgtcatagaccacttctcatagccttttataccttgaatacaggctaactagcagtgaattgtacatcagtaggttactcaagtgaacctctccactgattttattacatttgctttatcttgacctgaggtggtagctccttctctccccscttctccagtagatggaatggggatcaccatactgctttctccaacaatgtctcctccttttgttatattaaattcacctcctggaagcatttttttgtatatgtgggaatgaggagaggcactctatctgtcaatcttgagggtccaagagtctctaaaataa

SEQ ID NO: 637335 - DNA, 466 bp, Homo sapiens
tgttctaatacaaaattgaagtcctcacttggagttcagtctgcaatagttgttaaaacgttcattctaaaccaatgaccattatagaattttgtgcccatagtaagtaataaatacatgtgtcttgggacacaattaagaaattttgctttttattgtacaactttgggcaaatttaaagattctgccggcagagggaaaatactttcactaggggacatagaacaattctcaataactacmcctaccacctactcacttcaatatccttgtgctaagagatgattggacaaataagacaacatatcgcaatgctacttgatcttgataattagaagggggaaggtctgttgttatgcaatgaacagggaagaatattttgtacgttggtgatataatttaatatttctttgtaatatctcatttgctttattttaaatggacaggaccactagctccagcttga

SEQ ID NO: 637336 - DNA, 554 bp, Homo sapiens
aaattaatgcacaaaaatcagtagctcctctatacaccaatagcaaccaagcagacaatcaaatcaagaactcaaccgtttttacaatagcttcaaaaaacaaaaaaatacataggaatatacctaactgaggaggggaaagaactctacaaggaaaactacaaaacactgctgaaagaaataatagatgacacaaacaaatggaargacatactctgcttatgaatgggtagaatcaatattgcgaaaatgatcatactgcgaaaataaatctacaagtttaatgcaattcctgtcaaaataccaccatcattcttcacaaaacaagaaaaaaaaattctaaaattcatatgatgattactcagcaagatggccaaataggaacaactccagtctacagctcccagtgtgagggacgcagaagacaggtgatttctgcatttccaactgaggtactgagttcctctctctggggcttgttggaaagtgggtgcagtccacggagcatggtggggcatcgcctcacctgggaagcgcaaggggtcggggaattc

SEQ ID NO: 637337 - DNA, 553 bp, Homo sapiens
aaattaatgcacaaaaatcagtagctcctctatacaccaatagcaaccaagcagacaatcaaatcaagaactcaaccgtttttacaatagcttcaaaaaacaaaaaaatacataggaatatacctaactgaggaggggaaagaactctacaaggaaaactacaaaacactgctgaaagaaataatagatgacacaaacaaatggaaggacatactctgcttatgaatgggtagaatcaatattgcgaaaatgatcatactgcgaaaataaatctacaagtttaatgcaattcctgtcaaaataccaccatcattcttcacaaaacaagaaaaaaaaattctaaaattcatatgatgattactcagcaagatggccaaataggaacaactccagtctacagctcccagtgtgagggaygcagaagacaggtgatttctgcatttccaactgaggtactgagttcctctctctggggcttgttggaaagtgggtgcagtccacggagcatggtggggcatcgcctcacctgggaagcgcaaggggtcggggaatt

SEQ ID NO: 637338 - DNA, 581 bp, Homo sapiens
tggaccccttggggtgtgttcagagtgtcagaattttttttttttctattggaagagactcattttaaggattaattggaaaaggtgacctttccattcaatgttctttcccagtcagcttagcgctttttcagtgggcttatataaaaacagccatgaaggcagtgatggattgtatatatgagtttagcaatttagatatgacttcactaaagctgactagtttaatatccagcttgatacccactgctacctatcttgagcaccaacccacgtgaaagagtcaatgttgttaccaggcattagatagcagactggtttccccacaacatgagttcacattaagkgggtttagtgacgaattaacagaaaacatagccaatctttcactgcctttgagacataaatattaaacaccaaaagagaaacttcaataaattccaaatttaaaaaaattaaacaataatgcaaaattagaatacaaaaacattcaatgcaacacgtataaaataagaaaactttacacaataaaacaaacaatttagcaattaaaattcttttcataattaaaaaggatatgc

SEQ ID NO: 637339 - DNA, 581 bp, Homo sapiens
tggaccccttggggtgtgttcagagtgtcagaattttttttttttctattggaagagactcattttaaggattaattggaaaaggtgacctttccattcaatgttctttcccagtcagcttagcgctttttcagtgggcttatataaaaacagccatgaaggcagtgatggattgtatatatgagtttagcaatttagatatgacttcactaaagctgactagtttaatatccagcttgatacccactgctacctatcttgagcaccaacccacgtgaaagagtcaatgttgttaccaggcattagatagcagactggtttccccacaacatgagttcacattaagggggtttagtgaygaattaacagaaaacatagccaatctttcactgcctttgagacataaatattaaacaccaaaagagaaacttcaataaattccaaatttaaaaaaattaaacaataatgcaaaattagaatacaaaaacattcaatgcaacacgtataaaataagaaaactttacacaataaaacaaacaatttagcaattaaaattcttttcataattaaaaaggatatgc

SEQ ID NO: 637340 - DNA, 614 bp, Homo sapiens
atttattggcagtgacccagatcttcaatgagcatcaaaaataattttaagatctgaagttacacaaaaagtttatctacaacatttatctcacttacatatacccatttttttgtttctaatagttcatctaatttactcttgaaaactgaggtattagacaaagctagtcatcatttaaagttattttcttgttaaccattttcgatagcttaggaatatcaagtaatcacttaagtaagaaatttaaatacatagttttttgccacaaaactataaaaaaattatttaatattttgtttcaatttttaacacaaaaatattgaattatgaagggcaagkattttttaaatcatatttcaaagggatatgttcacttatttttttaaagtaagttaagattatttttattacagaggactaattatttacaaaatgccattaaacagctgtatgatcacacacttactttcaaaaaatgtaagcagcactctctttaattttgtagaataatttcagtcattgtaaagtaaatattaagaaacttttttttaattacaaagtaatacctcctctcccttcatttatgtaattatagccatggtccttgacct

SEQ ID NO: 637341 - DNA, 614 bp, Homo sapiens
atttattggcagtgacccagatcttcaatgagcatcaaaaataattttaagatctgaagttacacaaaaagtttatctacaacatttatctcacttacatatacccatttttttgtttctaatagttcatctaatttactcttgaaaactgaggtattagacaaagctagtcatcatttaaagttattttcttgttaaccattttcgatagcttaggaatatcaagtaatcacttaagtaagaaatttaaatacatagttttttgccacaaaactataaaaaaattatttaatattttgtttcaatttttaacacaaaaatattgaattatgaagggcaagtattttttaaatcatatttcaaagggatatgttcacttatttttttaaagtaagttaagattatttttattacagaggactaattatttacaaaatgccattaaacagctgtatgatcacacacttaytttcaaaaaatgtaagcagcactctctttaattttgtagaataatttcagtcattgtaaagtaaatattaagaaacttttttttaattacaaagtaatacctcctctcccttcatttatgtaattatagccatggtccttgacct

SEQ ID NO: 637342 - DNA, 614 bp, Homo sapiens
atttattggcagtgacccagatcttcaatgagcatcaaaaataattttaagatctgaagttacacaaaaagtttatctacaacatttatctcacttacatatacccatttttttgtttctaatagttcatctaatttactcttgaaaactgaggtattagacaaagctagtcatcatttaaagttattttcttgttaaccattttcgatagcttaggaatatcaagtaatcacttaagtaagaaatttaaatacatagttttttgccacaaaactataaaaaaattatttaatattttgtttcaatttttaacacaaaaatattgaattatgaagggcaagtattttttaaatcatatttcaaagggatatgttcacttatttttttaaagtaagttaagattatttttattacagaggactaattatttacaaaatgccattaaacagctgtatgatcacacacttactttcaaaaaatgtaagcagcactctctttaattttgtagaataatttcastcattgtaaagtaaatattaagaaacttttttttaattacaaagtaatacctcctctcccttcatttatgtaattatagccatggtccttgacct

SEQ ID NO: 637343 - DNA, 580 bp, Homo sapiens
gtttgctgattagcatatacataattttctttctttttttattttaaaggataaaaacatcatcttgttaaaatattgttgatttaaagttatattatcggatgcttattataatgactcatgagaaatcagacagagtcagatcccctcacttcatgagcacagatgatatactaacttgagaaagagacacttggctggatgggaattctggttcctgtgctatcacactatttcctccgtttatttgcttggataactccttctcatttttattgtttcagtttacatgttacttttcccaaaagacgtttcttattccttaaccttaatctggattatcattttgttatgggcttcatgaattttaactactcttatcatctcttcacacttttatgagagttcatctcagtgtcttgctcttttatsggttgaaaactctgaagatagaaaaaccccagcacacacggatttattactctatcctaatctcgatcagatggcctggtttagagtaatcatttactgaaaaaataaaaacaaaacatagacttaagaaagaaaaatacatacatac

SEQ ID NO: 637344 - DNA, 396 bp, Homo sapiens
aatgttcttgagtgttagaatggaaacaaggcaggaaaacaggagaaagcagaagaacgtgtccaccccagccccctggaaggctgttgattctgaggcaggcagccatgagacaccagtagcgccaacatttggaggacgcagattttgactaagagcagttttgcactccctttaactgttgataatatgagctaactaaatacatagtatgtttcagacattgtattcataataagggctttatgaacatcgtgtaatttatttcttactycccatgaactaggcagtagtgtgtctatttaacaaacaagcaatcagtttatgaggctttaagggcaacctgcataagatcacactccagggaaaggatctgggacccaaatctcagctttc

SEQ ID NO: 637345 - DNA, 581 bp, Homo sapiens
tgtattcataataagggctttatgaacatcgtgtaatttatttcttactccccatgaactaggcagtagtgtgtctatttaacaaacaagcaatcagtttatgaggctttaagggcaacctgcataagatcacactccagggaaaggatctgggacccaaatctcagctttctatttgactcccaascctctgctcctgcattccccattacattgcttactaaaagcaccacgccttgtcagtcactgcaaacagaattcttaagctaaaaacaaacacaactaaacagcaaccaaggaagaaagaagttgtctgagattcagaagggaatatccaggataagaaaaaggaatatgaggaaattcagtaaagggacataaaggaaatacacacatttgccaagtttagaaatgctctcatcaagcaagagcggcttgggtgtttcaatctatcacatttcccagtacttagaaaatcagaatcctaatttatttcactggcctctttggcattactgttattacacacacacaaacaaagcacagatagagtaggcctggttcttcttttttaatgaagg

SEQ ID NO: 637346 - DNA, 581 bp, Homo sapiens
tgtattcataataagggctttatgaacatcgtgtaatttatttcttactccccatgaactaggcagtagtgtgtctatttaacaaacaagcaatcagtttatgaggctttaagggcaacctgcataagatcacactccagggaaaggatctgggacccaaatctcagctttctatttgactcccaaccctctgctcctgcattcsccattacattgcttactaaaagcaccacgccttgtcagtcactgcaaacagaattcttaagctaaaaacaaacacaactaaacagcaaccaaggaagaaagaagttgtctgagattcagaagggaatatccaggataagaaaaaggaatatgaggaaattcagtaaagggacataaaggaaatacacacatttgccaagtttagaaatgctctcatcaagcaagagcggcttgggtgtttcaatctatcacatttcccagtacttagaaaatcagaatcctaatttatttcactggcctctttggcattactgttattacacacacacaaacaaagcacagatagagtaggcctggttcttcttttttaatgaagg

SEQ ID NO: 637347 - DNA, 581 bp, Homo sapiens
tgtattcataataagggctttatgaacatcgtgtaatttatttcttactccccatgaactaggcagtagtgtgtctatttaacaaacaagcaatcagtttatgaggctttaagggcaacctgcataagatcacactccagggaaaggatctgggacccaaatctcagctttctatttgactcccaaccctctgctcctgcattccccrttacattgcttactaaaagcaccacgccttgtcagtcactgcaaacagaattcttaagctaaaaacaaacacaactaaacagcaaccaaggaagaaagaagttgtctgagattcagaagggaatatccaggataagaaaaaggaatatgaggaaattcagtaaagggacataaaggaaatacacacatttgccaagtttagaaatgctctcatcaagcaagagcggcttgggtgtttcaatctatcacatttcccagtacttagaaaatcagaatcctaatttatttcactggcctctttggcattactgttattacacacacacaaacaaagcacagatagagtaggcctggttcttcttttttaatgaagg

SEQ ID NO: 637348 - DNA, 507 bp, Homo sapiens
atctcctttgactccatgactctcattcaggttaagctgatacaagaagtgggccttgggcatctccacccctgtggctttgcagggtacagcccctctcctggctgctttcctgggttggtgttgagtgtctatggcttttccaggcagacagtgcaagctgtctgtggatttaaaattatgtggtctggaggacagtggccctcttctcacagcaccgtgtgccccagtggggactctgtgtgggggctcccaccccaaacttcccttctgcactgccctatctccagttctccatgagggctccacccctgcagcraacttctgcctggacatcaaggtgtttccatacatcttctgaaaatctagacagaggttcccaaacctcgattcttgacttttgtgaacccacatgctcaacatgacatggaagtcaccaaggattggggcttcttttctctgaaacaatggcctgagccatgccttggaagtttaaccatggctgga

SEQ ID NO: 637349 - DNA, 613 bp, Homo sapiens
catgactctcattcaggttaagctgatacaagaagtgggccttgggcatctccacccctgtggctttgcagggtacagcccctctcctggctgctttcctgggttggtgttgagtgtctatggcttttccaggcagacagtgcaagctgtctgtggatttaaaattatgtggtctggaggacagtggccctcttctcacagcaccgtgtgccccagtggggactctgtgtgggggctcccaccccaaacttcccttctgcactgccctatctccagttctccatgagggctccacccctgcagcaaacttctgcctggacatcaaggtgtttccatacatcttctgaaaatctagrcagaggttcccaaacctcgattcttgacttttgtgaacccacatgctcaacatgacatggaagtcaccaaggattggggcttcttttctctgaaacaatggcctgagccatgccttggaagtttaaccatggctggaattgaagaagttggaacacaggacaccatgtcctgaggctgcgcagagaagcagggtccccctggacccagaccacaaaaccatttcttcctcctaagcctccaggcctgtaatggaagg

SEQ ID NO: 637350 - DNA, 642 bp, Homo sapiens
atattctatatgaatatagatacggaaaatcaacaaaatactaccaaataaaatccagtaacataaaaaatgtctgtacctagataaagtaagttttatccttagaatgcaagtttagtttaacatataaaaataaacttaatataccatattaacaaaataaaagagaaaaaccacaatcatctaaatacaaatgaagaaagcatttaacaaatctactaccttttcatcatcaaagaaagtactcaatcaagtaggaatagaagagaacttcctcaatctgataaagagcatctactaaaacttgacagctaagagcatgcttattggtggaagaatgggtactttctccttaagattaagaacaagtcaaggatgtctaagatcaacatttctgttcaacattgtattagacattctagccacagcactaagggataaaaataaataaarggcatcacaaatggaaagaaataattaaaatcttctctatttgaagatgacatgcttttgtatgcaggtatatagataattctgagaaattcacatatataagaatgctattaaaactaataaatatattcaacaagatcaatatagacagatcttcaagattaaaaactgtatttttatacactcata

SEQ ID NO: 637351 - DNA, 610 bp, Homo sapiens
ccactgcagctactggcacctgcccaaaacatgaaattgagcagcaaattatatttttcacagtctaaagtgtagttttatytccatccctactgacctattttaatgacttcaaaatcatatgttacagggactgaaagagatgactgtgatgatactttgtcttatgtgttttcaaatgagtaggattaaattttgaagtattcatttcacaggagaagctcaagataatagtatggtttatctggtgcaagcaacagaaaacaacatcatttaatagaaaaaaatcattgaaattatatgaagaagtcgaaagtcaaagggaatttataactaatgtgatagattgtaagaaggccaactctgagatgactcaggtccaaatgtttttatcccctacttagagacaaagtccaggtagaaaatgagatgggacttgtatgtgtgtcacaagccaactcttagagtaggaaaacaaagagcatcttactaattttcaggtatgacattaaagattcttatgagtatttcctgaaataatactgcatgtgttaataaaaatgaagaaattatgatttctaggtaatattgcgtgtgtctgttacactca

SEQ ID NO: 637352 - DNA, 610 bp, Homo sapiens
ccactgcagctactggcacctgcccaaaacatgaaattgagcagcaaattatatttttcacagtctaaagtgtagttttatctccatccctactgacctattttaatgacttcaaaatcatatgttacagggactgaaagagatgactgtgatgrtactttgtcttatgtgttttcaaatgagtaggattaaattttgaagtattcatttcacaggagaagctcaagataatagtatggtttatctggtgcaagcaacagaaaacaacatcatttaatagaaaaaaatcattgaaattatatgaagaagtcgaaagtcaaagggaatttataactaatgtgatagattgtaagaaggccaactctgagatgactcaggtccaaatgtttttatcccctacttagagacaaagtccaggtagaaaatgagatgggacttgtatgtgtgtcacaagccaactcttagagtaggaaaacaaagagcatcttactaattttcaggtatgacattaaagattcttatgagtatttcctgaaataatactgcatgtgttaataaaaatgaagaaattatgatttctaggtaatattgcgtgtgtctgttacactca

SEQ ID NO: 637353 - DNA, 558 bp, Homo sapiens
tccatcgtccattatgaggagttattctcattccttagctgttcaatagcaatttaagggtaatttaaaatttaagacttaaatttatgaagaaaaattaaaacagtagtcttcacattactcactacatgagttaattttcaaagtaaaaaataattttcatagtaacactttctctgacatcatttcccaatataaatgcatataaaatattaatgctaaaagctaaagaaatggcaatgagaacttctgagaatttaaaggkaattaccatgattaatttagcttcaccactaagcaataccagaatgtatcaaatgcggacaccattatcactcacattttgtctttgttaaaagttaatattttgaataacaatatcctgagtattctttatttctactgcgttcttcaaagtagggcattttggaggtgatcctgcctaataggacagctttattcatgtaatatatttttatatcctgacatttatgttatcacatggtaaatacaaagctgatatgctatctagatatacattttacatacagagacgtt

SEQ ID NO: 637354 - DNA, 620 bp, Homo sapiens
tatgttgtgttttgtgtctgacttgtgcatagaatgcacttgagagtcatctgtattgtgcatcaggagttcattttgttttattgctgagtagcattctgttgtacagatataccacagttcgtttatctatgcccctgttgatgggcgtttagggtgtttccagtttgggtctattaggaataaagctgttatgaacatttgtgtgcaggtctttgtgggaacacactttcatttctcttgggtaaagacttaaaagtggaatttctgggtattaagtgtacacttatcttcttaaaaacttgttgcccattgaaaaaatagtgtggttccctcctttacttattgattgatrtgaatttttggtatcttctggctctgagtgctttgttggatatacgcattccaaataccttccctagtctctggcttgcctttctctcgatggtctcaattttaatgaagtccaatttgtcagttttttttaatggtttgtgtccatttaagaagtagctgtgcatcccagaatcaactattgactagtttttcattcctctcctatgcctctccaatgctcctctccttttctccaaaccaagcattctccggtgtctatgtct

SEQ ID NO: 637355 - DNA, 586 bp, Homo sapiens
aagtccagctgtggcaaccggagggcaaaagctcttgtagagatgaacttctgastaacgggagggggtttgaaattccctgagagatcctgagagggagttagatgaaccagtaagtctgggctgcaggagaggaggcagtagaggtgaggctctgggggaggaaaggctgtggagggactcagggacaaacatctgggatgcaggctcaagggggttttgtgggggttgtgatacaaggccctaatctgtatccctgagtctgtcttcagtcaagtggacattccactcttgtgtgctgattctttgaggggagctcagtgaggtgtggatcctaggctttgaatgagatggggccaagacagagtttgaatgtgggaagttaggatgggagcctgaggagggtgagaggggacaggtgacactgagggacacctactttccttctgaaagatttgctgggtgcaggtgccatgtgagtcattgtgctgagccctaggaatccagagatgaatagaataggatgcccctctgcccccaggaccccacagtccaggacagcaagaggaggggatgggtaattcca

SEQ ID NO: 637356 - DNA, 558 bp, Homo sapiens
cccttcacctgttttttcaactggggtgaatttcatargttcttccacaaacattaagcatctttaattctttatccaacctctactatgatcaatcgttagcacactgtcaaacttgccacttttcagctcatctgacctgctttggtcactcaaaaatccagggttccactgtcaggagaagagcctctgaaaagtcatcatgagaaacaattcatgtaactcagtggttcttcagggttccacaagaatcctcagggtagacaccccctgacctagtctttgtatgaggcttcctgggcccccagctccttcacaggctagagggcattaggttcttagtatttccaggctggattccagagaatggaatgaaaaaggggttcaaatattccaatggtttttttctgtttgtttgtttgtttcctgtttttgttttgaggcggagtttccctcttgttgcccaggctggagtgcaatggcacgatctcggctcacttcaccctccacctcccgggttcaagtgattctcttgcctcagcctcctgagtagctggg

SEQ ID NO: 637357 - DNA, 558 bp, Homo sapiens
cccttcacctgttttttcaactggggtgaatttcataggttcttccacaaacattaagcatctttaattctttatccaacctctactatgatcaatcgttagcacactgtcaaacttgccacttttcagctcatctgacctgctttggtcactcaaaaatccagggttccactgtcaggagaagagcctctgaaaagtcatcatgagaaacaattcatgtaactcagtggttcttcarggttccacaagaatcctcagggtagacaccccctgacctagtctttgtatgaggcttcctgggcccccagctccttcacaggctagagggcattaggttcttagtatttccaggctggattccagagaatggaatgaaaaaggggttcaaatattccaatggtttttttctgtttgtttgtttgtttcctgtttttgttttgaggcggagtttccctcttgttgcccaggctggagtgcaatggcacgatctcggctcacttcaccctccacctcccgggttcaagtgattctcttgcctcagcctcctgagtagctggg

SEQ ID NO: 637358 - DNA, 558 bp, Homo sapiens
cccttcacctgttttttcaactggggtgaatttcataggttcttccacaaacattaagcatctttaattctttatccaacctctactatgatcaatcgttagcacactgtcaaacttgccacttttcagctcatctgacctgctttggtcactcaaaaatccagggttccactgtcaggagaagagcctctgaaaagtcatcatgagaaacaattcatgtaactcagtggttcttcagggttccacaagaatcctcarggtagacaccccctgacctagtctttgtatgaggcttcctgggcccccagctccttcacaggctagagggcattaggttcttagtatttccaggctggattccagagaatggaatgaaaaaggggttcaaatattccaatggtttttttctgtttgtttgtttgtttcctgtttttgttttgaggcggagtttccctcttgttgcccaggctggagtgcaatggcacgatctcggctcacttcaccctccacctcccgggttcaagtgattctcttgcctcagcctcctgagtagctggg

SEQ ID NO: 637359 - DNA, 558 bp, Homo sapiens
cccttcacctgttttttcaactggggtgaatttcataggttcttccacaaacattaagcatctttaattctttatccaacctctactatgatcaatcgttagcacactgtcaaacttgccacttttcagctcatctgacctgctttggtcactcaaaaatccagggttccactgtcaggagaagagcctctgaaaagtcatcatgagaaacaattcatgtaactcagtggttcttcagggttccacaagaatcctcagggtagacaccccctgacctagtctttgtatgaggcttcctgggcccccagctccttcacaggctagagggcattargttcttagtatttccaggctggattccagagaatggaatgaaaaaggggttcaaatattccaatggtttttttctgtttgtttgtttgtttcctgtttttgttttgaggcggagtttccctcttgttgcccaggctggagtgcaatggcacgatctcggctcacttcaccctccacctcccgggttcaagtgattctcttgcctcagcctcctgagtagctggg

SEQ ID NO: 637360 - DNA, 593 bp, Homo sapiens
agcttatttttttcagctcatcctgcatttcttcagccaggaaatccaaatgtggtcagctcagggctggtgcagctgctttctgatgcacctgctccctctctgcgttaccatcgccagcactgggactttcatcctccaatttgttgcctcatgagcacatgatagctactgaatctctaggcatcttatctatgttccagacagaaagagggggagagaaaatggggataaaggctttgacaaggggcataaagactgttttctggcaaatgatgccttattttgaaaaaagcagagccctccttggaacttctggctacatttcactggccaaatatgtattatgtggacaccctasctgcagtgaaaactgggaaattgggcagttagctttcagcctgtagaatagaagtggactaggaagaaggtgattggaaagggtgttgagtgaacatcctactgatggccatacctgttttcataattagtctgaaagttccttgagggcacctccctagctcttggcatgggactgggcattgaatcaacaaaggaagaaatgcccaaattcctttggaaaggaagggctt

SEQ ID NO: 637361 - DNA, 593 bp, Homo sapiens
agcttatttttttcagctcatcctgcatttcttcagccaggaaatccaaatgtggtcagctcagggctggtgcagctgctttctgatgcacctgctccctctctgcgttaccatcgccagcactgggactttcatcctccaatttgttgcctcatgagcacatgatagctactgaatctctaggcatcttatctatgttccagacagaaagagggggagagaaaatggggataaaggctttgacaaggggcataaagactgttttctggcaaatgatgccttattttgaaaaaagcagagccctccttggaacttctggctacatttcactggccaaatatgtattatgtggacaccctacctgcagtgaaaactgggaaattgggcagttagctttcagcctgtagaatagaagtggactaggaagaaggtgattggaaagggtgttgagtgaacatcctastgatggccatacctgttttcataattagtctgaaagttccttgagggcacctccctagctcttggcatgggactgggcattgaatcaacaaaggaagaaatgcccaaattcctttggaaaggaagggctt

SEQ ID NO: 637362 - DNA, 587 bp, Homo sapiens
tgccaaattcctccaagaattttgttaatttttgcttcatattttgggaatatgttgttaagtttacacaagttaaaaattattgcatcattctttttgtcattattccttttgtcattgtctatttttatttgaacaaagttgtttgccttaaagtttcatttgacagatattaatatagctatgccagaatctttcctgtttgttaatgttttcctggtatattttatttcatcccatttattctcagactttctgtatcatatactgtatttaagctggatttttgaattttcatctaaaagaatatccatcttttaaatgctgactctgttctatttattaatacatttgttttacttttgctattagccatgttttttctttgcttccctttcttcatttccttccttcgattggattgattctttattcccttttatgtcttcctttggttttcaaattatacwtttctgttttggggtggttacttttacaattttgatatgcatacttattaaaatctacagttaatcattatccctactctcctgggaatggggagatcagcaggggccaagaccctt

SEQ ID NO: 637363 - DNA, 551 bp, Homo sapiens
gccaaagacaaggtgtgacttggaaggaaagcagctggctttctggggtgcttctgatgaaagttccagaaaagaagctccaacagttgcattcagtaaaggaaagctccagaaaggccctgcacccatgacggtatcatttaagaatgtggcagatgtgatggcttatgcctataatcacagtgcctcgagaggccaaggcaggagaatcatttgaggctgggaattgaagaccagcctggccaacatagcaagagatagctctacaaaaaaatttaaaaattggctgggcctggtggtgtgcacctgtagtctcagttactcaggaggctgaggcgggagaatcacttgagcccaggaatttgaggttgcagtgagtgagccttgatcttgacactgcactccagcctgggtgacagagtgagaccctgtctctaaaaaagaaaaaaaaaaatgtgagttatytccattaccttccagtgaccaggctgaacgtgaatacatactttccaaaccatttgtgaaacaatccaccatggcttggcgcttta

SEQ ID NO: 637364 - DNA, 551 bp, Homo sapiens
gccaaagacaaggtgtgacttggaaggaaagcagctggctttctggggtgcttctgatgaaagttccagaaaagaagctccaacagttgcattcagtaaaggaaagctccagaaaggccctgcacccatgacggtatcatttaagaatgtggcagatgtgatggcttatgcctataatcacagtgcctcgagaggccaaggcaggagaatcatttgaggctgggaattgaagaccagcctggccaacatagcaagagatagctctacaaaaaaatttaaaaattggctgggcctggtggtgtgcacctgtagtctcagttactcaggaggctgaggcgggagaatcacttgagcccaggaatttgaggttgcagtgagtgagccttgatcttgacactgcactccagcctgggtgacagagtgagaccctgtctctaaaaaagaaaaaaaaaaatgtgagttatttccattaccttccagtgaccaggctgaacgtgaatacatackttccaaaccatttgtgaaacaatccaccatggcttggcgcttta

SEQ ID NO: 637365 - DNA, 303 bp, Homo sapiens
cttggcttctctgcaatgagatagcagaatggggactgcagggcatcggtgaacatccctggtgcaccaacttgctcaccccasaacttcattccagatgaccctgatgaacactctgaacaaagacaagtacaacttcaattgcaaccgctggctggatgccaatgaggatgacaatgagatagtgagggaaatgactgcagaaggcccaacagtgcgcaggatcatgggcagtaagtactgacaggctctccatcctgggaggcagtggaactcctgcttggtgtcccgatgggcctgacc

SEQ ID NO: 637366 - DNA, 414 bp, Homo sapiens
tccccagtcttcaagctgatgtgatagcgaaagtctgaacagcccaaggcagagggaggaagggaaggggttagtgcagggggtgacaggaagcagggtgcgtgtataggagggcagcctggagctggaggtttgtggggaacacacgctgggaattgaaaatccaggctcctgttctaascagccctgcaacttggggcaggggttccttccatctctgtgaggtctcctcaactgtaatggcagaattctagtaggttctctgtctgctccagaaggtgtgaatgggcttagagcaggaaagcgtgtaaatcacaagcaagaacatcaaaacataagagcctgaaaggatttcccacaatcatctggtctagcttctctgacagtggacaaggaaactgagacaaaggaagg

SEQ ID NO: 637367 - DNA, 646 bp, Homo sapiens
cacccatgaataagatatttcttcctttccaatttagatctttttatatatttgcttgcctacttgccttggctgaaatctccagcaccacattgaatacaagagatgactcgtttctgatcttaaggggaaagtgtcctgtccagtctttcatgattaactatgatgttagctgtgggtgttttatagctaacgtttatgggttgatgaatttccttttcattcctagtttgttgatgggtttttttaatcatgaaagggtgttagattttgtcaaatgctttttctacatttattgagataataatgtgatttttgctttttattctattaatttgataaattacattaattgattttcagcagttaagccaatttgtatctctgggataaatcctacattgtcatgatgtataattcttttgatatgtcgctggattctttttgtgaatattttgttgaagatttttgcatccatattcataagagatattggtctgtagttttcttatgaygtctttgtcagttttggtaccagggtaatgctggcctcagaaaatgagttgggaaatgttccctcctcttctatttttggaagagttggagaagtattagtattatttcttctctgagtgtttgatagaat

SEQ ID NO: 637368 - DNA, 501 bp, Homo sapiens
gggcataggcttttctttctggctaggttttttttaaattactaattcatcttttcacttaaaagatttggaattttatttttaatggacatattgtaattgtatgtatttatggagtacaatttaacattttgagacaaatwtatgttgtatcatgatccaatcagtgttgttagcctatccatcacctcatgcatttatcatttctttatggtgagaatgttcaaaagcatttcttctagctattttgtgatatacaagtctttattgttaactatagtcattatactgtataatagaacatcagaacttattcctctcatttaattgtaactttgtacccattgatcaacttctccccatcctctcctcccccctcctttccccagtctcttgtaactactcttgtaaaaatattattcaattccctgcctctatgacatcgacttatctctctctctcttttttttaaaatattccacatgggtgaaatcactggta

SEQ ID NO: 637369 - DNA, 624 bp, Homo sapiens
ggcaaattttatgttatgcatattttaccacaatttttttttaaaagaagcaggataacagagtcagggaggccccttcctctgtgctaatggtcccctgtctggaacacagggttctagactagtaggtaccttcttgggaagggaccacaaaaagagaggtcaaggatcctggggttgtgttcctgagaggacggaaccctgtcttctggcagctgaagggctgatgcctagatagacactgtgttgtgtcggaaacactggaacagacaagcagaagcctcagggagactagggggtttaattccaggaaggcttgactcaaaycaaagctggagaagcaactgatgggggttatgtagaaggggttcttgtgacagcaggaggttgtcccaactaacccccacaatccccacaatcacaggctctgacctcttaggtgccagactaattgcccttggtcatgtcctacgcaaggggcaggcagaaagcaattgaactgagaataaggagacccacagtctagtcctagctccatcagctattggccatttgaccttggatggatccccacatccctgggcctctgtgcacccatctctgtaatcaacaccctgcctcccc

SEQ ID NO: 637370 - DNA, 586 bp, Homo sapiens
aaatggactcttctgtacctatctcctactgcacatttgtaagaacagctctgaatagatacctacagcttctgaaccctgaggtgtgctcatcttcagtttattagatgttgcaaaatttacctccaaaaatggttgtattacattaattaccaccagtagtatatgaagattccyattccccacaaacattaacatatattttttaaaatttttattcagtgtgtacccaacagcatcttattgtagttttaatttgcattcccctgcttatttggggagattgagaatatgttcatgaatatattttggccatttaggcttttctcttctgtaatttttccatttatatcttttattccatttttctcttgtcttgtttgcctatgtttatcatacagatatttttcttgttttaatagacttcaatttatcaatattttcctttgttgcttatgcttttaatgaattatttacaaaatcccatctctaaattgagattaaaaagatactcctttagagtttcttctaaaaattttttatttttgttttttcacatttaagtcttcagccccatctgaaagtt

SEQ ID NO: 637371 - DNA, 578 bp, Homo sapiens
cttcctgagagacaccatctcatagagctgcctctcaatcaacccatccgctttcttctmatccagccagttgctacaagggaaggtctgctggataccagtgaaggggcacagaatcaccacctggggagagtggagcacagtgtctccggcattgagtctccagtagggtcctcttcgtgatgttcagcaggctcccagccccacatttagagacatctgtattaggactctcaaggaatggcaccttttctgttgcctatctcattaaatcttaaatcaagaaatgcaacctccaaggagtcttccaaagtaggtatcacccatcttccaattagctattcaaatctcaaacttttcctctatacacaacactctctttgaataccgtatttctttaagcacatcataaattctcagttaatctgaaccaaatgaactagactactaggttaattccctataattatcttgtaggaaaaaggtaagtcccatgcaagctaattaatatctggaatgtaatataaaaaccaacttctctcttttaggcttgatcctcattcaaccttctctcttat

SEQ ID NO: 637372 - DNA, 552 bp, Homo sapiens
gcgagtgagactgcccatgcaagtctcatcagagaacattccagtggcctggcccagaaaactgacttttaggtcaaattgactggaagggaatccagagcttttgcttagtggctgtgtgaccttgggtcagtggcttagactctgaatctagtttccgtccacacagtattaaaactgcccacctcccgggaactatggagatcatgtagcctgagaatgcggctagtgattttgacttcggagtgtgtaaacagaacagctgttgtggtcaatttgagcacgctttccaaaacagagatggcaggagaagctgtgtttaacatccctttgtgtccggaattgctgggttcttggtctcactgacttcaagaatgaagccgcggaccctcgcggtgagcattacagctcttaaggtggcgcgtctggagtttgttccttttgatgttaggatgtgttcggagtttcttccttctggtgggttcgtggtctcgctggctcaggagtgaarctgcagaccttcgcggtgagtgttacagctcttaaggcagc

SEQ ID NO: 637373 - DNA, 536 bp, Homo sapiens
ttagcagggcagctctgctccctggagacattcagggtctgtcctagccattgttccaccacccccagggcatcatcattgtctctgtggcccaagctcagctgccaccctatcttggcctcacccactgagaaggctagtagtggcagtggacaagacccacctgatatcataagccccagacatgggtccgacacacaccagctacagtcacatttcatctgcaggcactcagtctcggtcacactacctgcaagggaggctggaaatgttcttcagtgggacacataagaccagccacatgaaatagagtagtcataaaataacagaatagttttattctattactataaaaaacagggagaatggattttggtggatagccacagtctctgagacaagtagatgctgttaatatcctcattttataacataagaaactgacgcacagaaagrctaatttgccaagatcacacagtgagtaagtcatgggattagaacccagggattctgtctgcagagtttgcggctcttaa

SEQ ID NO: 637374 - DNA, 540 bp, Homo sapiens
aactcctgctcatgatctcgaaatggcttaaatgatagtttctcagcaaagcctcccttacgttggtgacaggactccctcttacttatcactgggagtagcacaatcactgttgaatgaattaagtttggatggatgggatcctgaatggaacatgtgcaagagcaagtmtctgtccatagtcactcttcattcatttcttcactcacccatgtaatattttatgcaatgacctataattcatcaagaaaagagaaagatgatctgtattccacacatgaagaacaaactggcattttcagcaattctccagtgatacaaaccataaactcattgagtgcatactttgtactatttaacacagaactgcacagcaatgaggctcactgagaagtggatgaggttaatggagaaaatggagtcaaagtaagtaaaaatctgctcctttgttatagtcaagttgaataaaacacatatgttttcatatgaagttgaatgctctcttttaactctctattttatctacaattgtgggtttag

SEQ ID NO: 637375 - DNA, 540 bp, Homo sapiens
aactcctgctcatgatctcgaaatggcttaaatgatagtttctcagcaaagcctcccttacgttggtgacaggactccctcttacttatcactgggagtagcacaatcactgttgaatgaattaagtttggatggatgggatcctgaatggaacatgtgcaagagcaagtatctgtccatagtcactcttcattcatttcttcactcacccatgtaatattttatgcaatgacctataattcatcaagaaaagagaaagatgatctgtattccacacatgaagaacaamctggcattttcagcaattctccagtgatacaaaccataaactcattgagtgcatactttgtactatttaacacagaactgcacagcaatgaggctcactgagaagtggatgaggttaatggagaaaatggagtcaaagtaagtaaaaatctgctcctttgttatagtcaagttgaataaaacacatatgttttcatatgaagttgaatgctctcttttaactctctattttatctacaattgtgggtttag

SEQ ID NO: 637376 - DNA, 518 bp, Homo sapiens
tcctgtgtgattactcccctaaccatcagcttcaggcctttggcctagtcttcagtggacagaaccaagccaaaggaaaggaaaaataataatctggcatttagcacaacctctttggcactgcaatgcccactacatcaccgattttatgtatttattttctgtttctcattcaaatccattttatagccttcatgacaaaacactccaaaccagattcttttaggaaacaaaatgactgataaatcattgaaaacattaaaattagaaaactagaccacctctgcaactaaacaatttgtgtttttcaccctgagtcactttacctggaaaagtaacttgcactattcacctgaggtcaaagaaaagcgatgcattcatgacytacaggatgcatagtaaagttgaaaatcaatgacaaaatctttccagccctgggctctcctaaaaagaaaatcagtccctgagtgcttagaccacaggcagccctcactagtcaactgtgaaatatgttttct

SEQ ID NO: 637377 - DNA, 577 bp, Homo sapiens
aagccatcacgcctggctaatttttgtaagttttgtaaagacagggtctcactatgttgcccaggctggtcttgaactcctgggctcaggcagtcctctcacctcagcactgcaaagtactgggattacaggtatgagtcaccacgcctggtggaattggcttttttaaatgcatataaacctaatctctttttaaaggctctggcaactacattgcatgataaaaatagttttcattcaatatttcagattggaggtgaatgatgaggagatacagagatcaayccttcaatgtcttcactgcttagctacctggaaactctgaagccaagtaatgcaattccaattctactaaaaaagctgaactcggtaataaccaaagagctcacaggattaaagagctaaagactattagcaatcatctagcccaaccccttagttttacaaataaggactgaggaacatagaggtaaatagcactggttcctttaataaaccagaaattatacttaataattcatggtttcagaaaaaaaattagtggtgccctctcaatatgtttgcccagggggctata

SEQ ID NO: 637378 - DNA, 568 bp, Homo sapiens
tgtttgaattaagcatgcttgatacttgctctagctaaagaaagcttatttataacatggtgcagaggaatttttagaaattattttaaattgtgataaaatacacataacacaaaatttaccattttaaccatcatttgaaaatggtatgattcagtgatgttgtggtttgaattttttgtttgaatgttatggtttgaatgtcccaggacaaacattcaaaccataacatcactgaaccataccacttaaaaatgctggttaaaatggtcaattatgtactccaaattatgtactccaattatgtactccaaaactcatgttgaaaggctgaataatattccagtgtataaacaccacattttgtttatccatttatccatcaataaatkctagggaccatggaatactatgcagccataaaaaaggatgagttcatgtcctttgcagggacatggatgaagctggaaaccatcattctcagcaaactatcacaaggacagaaaacaaaacaccacatgttctcactcatgggtgggaactgaacaataagaacacttggacacag

SEQ ID NO: 637379 - DNA, 577 bp, Homo sapiens
tcggctggggtaggcagagtgtcatagtatctgaagctgttctttcagagggctggtggccaggcaggactcatgaaacagacatttcttacccctaacctaattcacccccaagctgggagctgggaatactcagaagcaaatgtctcttccaggatctccttatgtgaccccacagacaggaatcaccctgaaacctcccattcctccaatcttgtcctctactctctttctstgacacacacacacacactcttttctctctcacacacacacacacttttctctctcacacacacactcacacacactcacatatactctcacacacactctctcacacactctcacactcacactctctcaaacacacacactttcaccctcacacacactctctcaaacacacacacacactggctcactctcacacacacacacaccctctcacactctcatacactcacactctcacacacacagtttctcacacacactcacactctcacacactttctctcacacacactcccacacacatactttctctcacatacactctttctcacacacacac

SEQ ID NO: 637380 - DNA, 628 bp, Homo sapiens
aaaaataaaaacaatgcaaattatacatgattagcataatagtaaattagggagagaaagatttcatctgaatgtgaccctcagtttagagattgatatagtttggatttgtgtccccacccaaatctcatgtcaaattggaggaggggcctggtgggaggtgattggattatgagggcagacctcccctttgctgtcttgtgatacagttctcatgagatctgcttttttttttttaagtgtgtagcacttccccctttgcccactctctcttccctgctgccacatgaagacatacttgcttccccttcacccttccrccatgattgtaagtttcctgaggcctccccagccatgacttctgtggaactgtgagtcaattaaacctcttttctttataaattacccagtctcagttagttctttatagcagtgtgagaatggactaatacaggggtcttcatatttgcaatgttatctgaactaaaaaaaaaaaatctacacaagttcgcttgtacattcaatttatacttttacatacttaagaggttttttttaaattataaaggaaatgtaagaaatgtttaaagtataatctttatgcaatgaaacttacatgaatgaatga

SEQ ID NO: 637381 - DNA, 392 bp, Homo sapiens
gcagtggcatgatctcaatctcagctcacagctcactgcaacctccacctcctaggttcaagtgattttcgtgcctcagcctcctgagaagctggatttacaggcacctgccaccacgcccagctaatttttgtatttttagtagagatgggggtttcaccatattggccaggctgatctcgaactcctgacctcaagcagtccgcctgcctcagcttcccaaagtkttgggattgcaggcatgagccattgtgcccaacttcgtctagctatataacaatgcccttccatgatgtcatgagtgtatcagagaatgtaagggttatgcgtatatagcccatataaaacctggttcccccatagtcccgtctcacattatgtggcattcaaat

SEQ ID NO: 637382 - DNA, 392 bp, Homo sapiens
gcagtggcatgatctcaatctcagctcacagctcactgcaacctccacctcctaggttcaagtgattttcgtgcctcagcctcctgagaagctggatttacaggcacctgccaccacgcccagctaatttttgtatttttagtagagatgggggtttcaccatattggccaggctgatctcgaactcctgacctcaagcagtccgcctgcctcagcttcccaaagtgytgggattgcaggcatgagccattgtgcccaacttcgtctagctatataacaatgcccttccatgatgtcatgagtgtatcagagaatgtaagggttatgcgtatatagcccatataaaacctggttcccccatagtcccgtctcacattatgtggcattcaaat

SEQ ID NO: 637383 - DNA, 567 bp, Homo sapiens
attggtgacaaattgcttcagcttttgcttgtctgggaaagactttatttttccttcatttttgaaagatacctttgctgggtctagtatttttggctaaaaggtacttgttttataaagcattttgaatatgtcattccattttctcctgacctgcatgatttctgctgagaagtccactgttagtctgatggaggttcccttttatgtgacttgatgctttttctcttgctgtttttagaattctgtcattgtctctgacagtttgacaataatgtggcttggagaagacatttttgaattgaacctatttggggatctttgagcttcatctatctagatgtctatatgtktttcaagacttgggaagtttttagctatttttattaaataggttttctatgcctttgcccatctcttctcctttgggaaattccagaattcatttaaaattttggtcattttatggcatcctactggtcacataggctttcttcattcattccttttttttttcttctgcctgcattattagaaaaattattttgcttagcctattgacacttg

SEQ ID NO: 637384 - DNA, 587 bp, Homo sapiens
aaagtaacatataagtagactcctaatgaatccttttaatgttaaaattagtgttayagaacaatggaagatccttttcaggactcaaaataacaaggtgagacccatttctctatggcagtctcataatggctctatatctcttgctaatagcacccaatgcttactgtacaactataattagaattgttgacatcaatataatttttgatgctgaagcccaggcacttttactttgtattaatcacttataaaatttgaattaaaactgtctttatcatttctaagaagattaaacagagcttccatatgtgtctgacttttccatatgtaaaacaaatgttctttcctttttatagtttctcactaataagttctgatctttgttaatgcatggagatacagataatgtggaaatctgtaagttggcttgtgtgggacacttccaacaacaccaggtgttcctgtatttaaagctgccatagcatcttgggccagtctaggtgtgaaggtaggaactttgaaattcattctgggaatcaaggttttcctaggctaacaatgtaagccctgcaaaatcaccaaaa

SEQ ID NO: 637385 - DNA, 587 bp, Homo sapiens
aaagtaacatataagtagactcctaatgaatccttttaatgttaaaattagtgttacagaacaatggaagatccttttcaggactcaaaataacaaggtgagacccatttctctatggcagtctcataatggctctatatctcttgctaatagcacccaatgcttactgtacaactataattagaattgttgacatcaatataatttttgatgctgaagcccaggcacttttactttgtattaatcacttataaaatttgaattaaaactgtctttatcatttctaagaagattaaacagagcttccatatgtgtctgacttttccatatgtaaaacaaatgttctttcctttttatagtttctcactaataagttctgatctttgttaatgcatggagatacagataatgtggaaatctgtaagttggcttgtgtgggacacttccaacaacaccaggtgttcctgtatttaaagctgccatagcatcttgggccagtctaggtgtgaaggtaggaactttgaaattcattctgggaatcaaggytttcctaggctaacaatgtaagccctgcaaaatcaccaaaa

SEQ ID NO: 637386 - DNA, 592 bp, Homo sapiens
gaaaaagagcagcacgtgaaaagcataaagaaaatagagatcaaaagcttttcaggcgaactgtatatattctgtttgactggctcataggcaggaagcgataaaggggaagaagctggaaagaagggagttaaatggtaaggaggatgaggtggaatgctacagcgctcatcctggagagaattgaccaaaagcagctactaaggcaacatcagagaagatccagaaatgatgtttggtttggtcctggaaacatatcacatgtggcttatgggtgaagggatggaatccagactctgacagaagctggttagtagcatttttcattgagactggaagtgggagagtagtgttaytgtgtttaaaacaaattatagattttttagaagatattttcccataaagttttatctcttccagattaagataattatttgtttcattaaaggtaggaaaattagtacctagtttcatttgttgattaatgttttaagacaaattgaatttttgctatggaaattatacatatgtaacagaatcagtaatacattgtgctaaagcattttttaaaatatcaataacaaaacactaa

SEQ ID NO: 637387 - DNA, 530 bp, Homo sapiens
atatggactctcacagtctatttccatggattctgctaacattgacttaacattgaccagttaataaatattaaaagttcccaacttgaactgttatagtaagtggttaatatcatggggtctgacacagaatgattaagtacaaatcttggtttcaccacctggtaattgtacaatttagggcatgttacttaatctgaatctttatttatcttataaaatgtmgcaagtaataccacatatttcatagggtggttgtgaggcttgagtttgacaagacaagcacaatgcctgtaacttcaaagtcctcagtagctattataattatcttagcattttagagtttccagttttaaataattctattttcatgtcaagataatttctctggtaataaattacctgattttggattctgggtctcataagtattaatttgtctactggtagttcattacacatgctttaagctatttatctgtagtcctagcacatttctgcattttattttcacatctaagagaagtcag

SEQ ID NO: 637388 - DNA, 530 bp, Homo sapiens
atatggactctcacagtctatttccatggattctgctaacattgacttaacattgaccagttaataaatattaaaagttcccaacttgaactgttatagtaagtggttaatatcatggggtctgacacagaatgattaagtacaaatcttggtttcaccacctggtaattgtacaatttagggcatgttacttaatctgaatctttatttatcttataaaatgtcgcaagtaataccacatatttcatagggtggttgtgaggcttgagtttgacaagacaagcacaatgcctgtaacttcaaagtcctcagtagctattataattatcttagcattttagagtttccagttttaaataattctattttcatgtcaagatwatttctctggtaataaattacctgattttggattctgggtctcataagtattaatttgtctactggtagttcattacacatgctttaagctatttatctgtagtcctagcacatttctgcattttattttcacatctaagagaagtcag

SEQ ID NO: 637389 - DNA, 574 bp, Homo sapiens
aaggggtagaagccatacgccagtgataagaatagatgatttcctttcttccgccagactctaactagaaatagcaatatgtatgtgtacatagagaaagaaagaggaaatatgaacagatgtaggaatatttacagagagggaatgtcatttttagtactgaattggtgtaaatgaggaaggaaaataatagaatcctagagtggtgaataatagctccggagaaatggcttctttctccctccatgtccaaaagctccttggcttacagccagatggargttttcatttttttattaaataaattctggttcccgtgatcagtttggattaggctggtttttcaataaagaatattctaaacacagagttaggagtttcatggaatttttcactcagagcacatagtagagtacctactggtgtttgaaggctcacggtacctgctgaatattctaaaacagaactagatgcgggatggctaagcagccagcaggtgaacagtaggttagcttgaaattgaggatgcagacagagcaaactagctctctgaagttaaattaatttgtaactc

SEQ ID NO: 637390 - DNA, 476 bp, Homo sapiens
gtgtcaggttatatgatccatgatgctatttgacttttaacaaattattgctgaaatatagtaattgaacatatttaattttkcactatcttctcaaaggcaaaataagaggggcaagagaggcagaaaagaggaaggaaggaaaaggggactgaaagagggaaaaagaagaaatatatttatcaatttctatttgagagatacaaaaccatttctatgttgaaggaaaatgggcttcttgagtatttcagaaacatgattaattttatgagactgtgtctgcatttgttctcaaagtatggtagatacctagaactttggaatttcttgagatgctttcaggggatctgcgaggtcaaagatttattttaataataatatatatcttttgagttttttaccatgttggcttaagaatgtccatgaaaaagcagtgaaaattattaattttattgtctcgatccttaaagtacaca

SEQ ID NO: 637391 - DNA, 592 bp, Homo sapiens
tatgggttggggaaataaagtagggtttcttgaaagttaggttttatagaatgtatttgaggatggctatgaggcagtgtgaatggagggcaatactagcaaagcacatgatcagaaattgcttggaattcacagttaagtgtgaactgtgtcagtttggtttacatggcctgatgaagcagatgagagaggaacgttaggaaatatggaggaaaccccaaagtggggaggggagttttggggagggaggaggaagccagtgaaagatcatgaatgctggggaagagagtttatatttagccmcagagacacacaggaaatatgtttatttcatgggtatagaaatggaacaaaatactcaggaaacagtatactctttacattatcattaatatagctttaagtgctacttggtgcatgttttaggagaatacgggacagggaagcagattcatacgtagataaaatatgacaaaatatttgcttgtaattttttttaatctcatgacttccacagaacctaacttagaaactcccattacatctctcctatcatatttgacaaagaaagacacgttaccaaaactttact

SEQ ID NO: 637392 - DNA, 619 bp, Homo sapiens
ttttatagagacagtcttaccatgttgcccaggatggtcccgaactcctgggctgaagtgatctacccacctcagcctcccaaagtgctaggattacaagtgtgaggcactgcaccttgccgaaaactttactaatattttgttttctcaacctacatatttagaaacacacacacacaccctcctccctctagaccaatagttcgaaactggggctgctttcttttttctccagggacactgccaatgtctggagacactttcagttgtgacaacaagggacgggcttgtaataggtgtttgrtaagtggaagccatagatgctgctagacttcctataatgcacaagatggtctaccacaacatacaagtatctggaccccaagtcaacagtgttgagattgacctagaccaatacacaccaaggcatttgtttccagggtacgattacagtataaaatacaggtcatccagttaaatttgaatttcaggtaaacaatgaatacatttttagtataaatgtgtaccatgcaatattttagacacaattatattaaaaacatattcattgtttatctgaaattcaaatttaactggtgtcatctatttttatttggta

SEQ ID NO: 637393 - DNA, 545 bp, Homo sapiens
aggtggtgaaaagattgggattgtaagagtggaaagatatgatttctttcttccctcatcattagagttatgtatgacatttctacacaaaagacagattaacaagaaaaaaagcagaacaaatttatttcatcaaagtttttattaaataaagacttaaagacccagggaaagtgtctatttttatgttcaggttggatgaataatgctcagccatgtagaaatacaactggacaaaaggatctgatctaatgataataggttgagaraggaaacctagcagagcctggctgtttgaattcttcttggtttcattgtgttgcattccttccccgcaacccctgcaacttccttgcaggcaaaggaagtcatagaattattttatggccagttatcacacagaatagtgcgggaagatcagagtgactttcttccttctgagcctctcccaatctatttcagttcaaggtactttgggatagcattctccgagctccaacaggatccaccaaactgctatctgagcttgattacaagtcatcata

SEQ ID NO: 637394 - DNA, 557 bp, Homo sapiens
atttttcaaaacagcatgggaaattcattttatttatctcttataaagcttaataaacagctatagagatctttatgaagaggactttgtctcttgaaggacaatattctattttagtcttaaaagcattaaatttttcaatttttaaacaaaattctcatcaattggatgttatacccatctatttatatgtgagaagaacaaagcttatattactttgttttttttatactaccagggcatattttaaagtttsaatgtttaaacatacttggtcagttgaagagaatgactttcttcattactgattgaatatacagggagaaattttagcaagaagaatgtatgacttttttaaagaaaataatttctgaatgataaaaaggaccattttcccataaagacagtcaaggtaaaatacaattgagtagaactaagaaaggaaacaacctcttcagttaatgcattttcagagctaagcacaaaggtgcttcctaaacaaaaggatctttacaaatgagggtgctctttagagagaatattttcaaaggacccct

SEQ ID NO: 637395 - DNA, 557 bp, Homo sapiens
atttttcaaaacagcatgggaaattcattttatttatctcttataaagcttaataaacagctatagagatctttatgaagaggactttgtctcttgaaggacaatattctattttagtcttaaaagcattaaatttttcaatttttaaacaaaattctcatcaattggatgttatacccatctatttatatgtgagaagaacaaagcttatattactttgttttttttatactaccagggcatattttaaagtttgaatgtttaaacatacttggtcagttgaagagaatgactttcttcattactgattgaatatacagggagaaattttagcaagaagaatgtatgacttttttaaagaaaataatttctraatgataaaaaggaccattttcccataaagacagtcaaggtaaaatacaattgagtagaactaagaaaggaaacaacctcttcagttaatgcattttcagagctaagcacaaaggtgcttcctaaacaaaaggatctttacaaatgagggtgctctttagagagaatattttcaaaggacccct

SEQ ID NO: 637396 - DNA, 589 bp, Homo sapiens
ttcttactacagctttcacatcacctccatttatatgtacctgtgttcaacttccctttcattaaaataggaattattcattttcatcgtattgctggcatactctcttcataatccaaccttaggcttgcaataaaaatcttcacaacccaaataccatgagaatacttgtggttaagcctagaaaatattaactgatcactcaagaatatatataacaattttcagtatactagaaaaatatcactagtttttttttcagtattttttggagatgaaataatcatactgtttgtaattgtcttaactattaccagctttatgtaatttgtcattttastatattctacatatgtactctaatttagtctgacttattttattctgccaatagtcatttggggaaaaattacagtagtaagacagaattttctgaacatttaagatcacattcaagcaagaaacaacatattttgcaaatgggtcttaggaataccctcagagaagcgtagggaaatatttgagaaaggtcttatggttctgcaaggatcttggaatctacaaggcagattaatagcccaattatttc

SEQ ID NO: 637397 - DNA, 589 bp, Homo sapiens
ttcttactacagctttcacatcacctccatttatatgtacctgtgttcaacttccctttcattaaaataggaattattcattttcatcgtattgctggcatactctcttcataatccaaccttaggcttgcaataaaaatcttcacaacccaaataccatgagaatacttgtggttaagcctagaaaatattaactgatcactcaagaatatatataacaattttcagtatactagaaaaatatcactagtttttttttcagtattttttggagatgaaataatcatactgtttgtaattgtcttaactattaccagctttatgtaatttgtcattttactatattctacatatgtactctaatttagtctgacttattttattctgccaatagtcatttggggaaaaattacagtagtaagacagaattttctgaacatttaagatcacattcaagcaagaaacaacatattttgcaaatgggtyttaggaataccctcagagaagcgtagggaaatatttgagaaaggtcttatggttctgcaaggatcttggaatctacaaggcagattaatagcccaattatttc

SEQ ID NO: 637398 - DNA, 607 bp, Homo sapiens
gtatgagtttagtagaccttttttttttggcaccaaataatattccactgtcaagatttaccagttgatttattcatttacctatcgaggggcatcttggttgtttccaaattttggcaattgtgaatagagtttctataaacaactatgtgtagatttttgtgggcatacattgtcagttaagttgggtaaatatcaaagagcataattgctggatcataygtgaagagtatgtttggttttgtaaaaatctgccaaactgtccttcaaagtggttgcaccattttgcattcccaccaataatgaataagagttcctcttgctccacaacctggccagcatttgatattgtcagtgtttgggattttggctattccaataggtttgtaatggtaccacattttttgtttttatttttaattctcaaataacataacatatgatactgaatgcatgttattaatgtatacttgcttgccatctgtatatttatcttctgtgatgaggtgactgtttatgtctgttgcccattttaaaaatcaggttgcttgttattgttgagtttttaaaagctttttgcatatttgggctatcatttttttttttt

SEQ ID NO: 637399 - DNA, 593 bp, Homo sapiens
atgggttttggcaaagatataatgacaagtatccattatagcatcatgcatgatagtttcattgtctaaagaatcctttgtgctctccctattcatcccttcctgcatgctgtgccctggcaaccactcatctttttactgtctccgtaattttacctttttcagagtaccatgtagttcacatcatacagtatgtagccttttaaaattggcttctttcacttagtaatatgcatttaagttgctgtatgagtttagtagaccttttttttttggcaccaaataatattccactgtcaagatttaccagttgatttattcatttacctatcgaggggcatcttggttgtttccaaattttggcaattgtgaatagagtttctataaacaactatgtgtagatttttgtgggcatacattgtcagttaagttgggtaaatatcaaagagcataattgctggatcatatgtgaagagtatktttggttttgtaaaaatctgccaaactgtccttcaaagtggttgcaccattttgcattcccaccaataatgaataagagttcctcttgctccacaacctggccagcatttgat

SEQ ID NO: 637400 - DNA, 594 bp, Homo sapiens
ttgaatgggatttcctcatcctcccttcacatcactgtccccaggaacaaagttatcagtggtctcagggccagcccctcacccagctgggacagcctgggcaatggctgtggccatcaatctcctcagaccaatacatatttcctcagaagctaggcacaacccaaatatttgctgtcaccaggcagtagaaatgttaayagcaaaagaagcaaacatttttcatttgggcttttcctttgtgatgctaaaaaaaaaaaaatgaggtaaaaaatcaccatggcaatgaatggaaagctgctaaatctgtagggacatcaaaagtgttaggctctcagaatcaaaataaggagaacaatagtctctccctacccttccacccaagcatacacacactgcatagacgacaagaaatctttccatcagatccagacagtcagaaagtttgaatattttcgacatgtactctcattcatttaattctaaagtactttagttttcaagcaaaagtggaaataaagcatttcacagtccaggtttatgccaagacttgccgcctctagggaggtctctcctccacccacacacccccag

SEQ ID NO: 637401 - DNA, 594 bp, Homo sapiens
ttgaatgggatttcctcatcctcccttcacatcactgtccccaggaacaaagttatcagtggtctcagggccagcccctcacccagctgggacagcctgggcaatggctgtggccatcaatctcctcagaccaatacatatttcctcagaagctaggcacaacccaaatatttgctgtcaccaggcagtagaaatgttaatagcaaaagaagcaaacatttttcatttgggcttttcctttgtgatgctaaaaaaaaaaaaatgaggtaaaaaatcaccatggcaatgaatggaaagctgctaaatctgtrgggacatcaaaagtgttaggctctcagaatcaaaataaggagaacaatagtctctccctacccttccacccaagcatacacacactgcatagacgacaagaaatctttccatcagatccagacagtcagaaagtttgaatattttcgacatgtactctcattcatttaattctaaagtactttagttttcaagcaaaagtggaaataaagcatttcacagtccaggtttatgccaagacttgccgcctctagggaggtctctcctccacccacacacccccag

SEQ ID NO: 637402 - DNA, 571 bp, Homo sapiens
cctggaggtggtgatcagacatgaactacaacgtgtcctaacagtcctgctcctcttgatttcagtatcaacaatcagacaagcgtgagytggcttgtcccatcaatatctttgattaattatagggccaacagaggcagttttgggaagcattgttctaggtagcattttaataactttatttcctccagtcaagctatattataatatctattctgagcacaaggttaaataatagttttaccacctcttcctcaaactcacatggtgttgtctttctagattcttcttaaaatctaatcaaattatactgaacatcaatgccatttatgtatgtgaaagttagaatgaagtccttcttacagaaggtactagatagcaaataatgaatagtggcaactatctttcatcttagctctgctgtcatctttggtgactgaaagaggtcgcttaactgtgagtatgcattaagccaaatgcagactcatacttaatgtgtagatcagctaggagtttattatttgcttgttttactttaatgtaagattttctatagaaattctttaaattt

SEQ ID NO: 637403 - DNA, 571 bp, Homo sapiens
cctggaggtggtgatcagacatgaactacaacgtgtcctaacagtcctgctcctcttgatttcagtatcaacaatcagacaagcgtgagctggcttgtcccatcaatatctttgattaattatagggccaacagaggcagttttgggaagcattgttctaggtagcattttaataactttatttcctccagtcaagctatattataatatctattctgagcacaaggttaaataatagttttaccacctcttcctcaaactcacatggtgttgtctttctagattcttcttaaaatctaatcaaattatactgaacatcaatgccatttrtgtatgtgaaagttagaatgaagtccttcttacagaaggtactagatagcaaataatgaatagtggcaactatctttcatcttagctctgctgtcatctttggtgactgaaagaggtcgcttaactgtgagtatgcattaagccaaatgcagactcatacttaatgtgtagatcagctaggagtttattatttgcttgttttactttaatgtaagattttctatagaaattctttaaattt

SEQ ID NO: 637404 - DNA, 571 bp, Homo sapiens
cctggaggtggtgatcagacatgaactacaacgtgtcctaacagtcctgctcctcttgatttcagtatcaacaatcagacaagcgtgagctggcttgtcccatcaatatctttgattaattatagggccaacagaggcagttttgggaagcattgttctaggtagcattttaataactttatttcctccagtcaagctatattataatatctattctgagcacaaggttaaataatagttttaccacctcttcctcaaactcacatggtgttgtctttctagattcttcttaaaatctaatcaaattatactgaacatcaatgccatttatgtatgtgaaagttagaatgaagtccttcttacagaaggtactagatagcaaataatgaatagtggcaactatctttcatcttagctctgctgkcatctttggtgactgaaagaggtcgcttaactgtgagtatgcattaagccaaatgcagactcatacttaatgtgtagatcagctaggagtttattatttgcttgttttactttaatgtaagattttctatagaaattctttaaattt

SEQ ID NO: 637405 - DNA, 598 bp, Homo sapiens
attgcacaattggtaattggttaagcaaattatagtatatccactgtacataacattatacatccatagaaaattatgttaataaactttttttaaatgagcgaaaattatattgctcatttttttctaaaacaagcatatctttaaaaatacaaaaggaaactttcctaatgtttctaatactctattcagtgcattatattcagtgaaatttgcaagcaactcttcacgagcatattgatttcatgaagacatgtttacctctacaagctttgacaataattttaattcttctgcatrtaaaattcttaatacaaaaacctgagattggtttataatcaatagtaatgaatagttttacagaattcaggctgaggctttctattaagctaaaaatctcattacacatggctaatgaatggttgcaatgctcataaaagttgattgtgaatacggctgatatttgttgggcctacttggaagtatgcacaattcaggataggcaaatccttcaaaagcagaaaagcaaactctttaagttggtatgatcttctgtttttcatcacatcactgtcaccaccctttccctattttatca

SEQ ID NO: 637406 - DNA, 560 bp, Homo sapiens
aggctgaggctttctattaagctaaaaatctcattacacatggctaatgaatggttgcaatgctcataaaagttgattgtgaatacggctgatatttgttgggcctacttggaagtatgcacaattcaggataggcaaatccttcaaaagcagaaaagcaaactctttaagttggtatgatcttctgtttttcatcacatcactgtcaccaccctttccctattttatcaaggttcttcttccatgcacccctacctgcactgactgcattacttaatgagaattcccagatcacccactcattcagtcagtcagtcagtgtggtgactaattctacgtgtcaccttgactgggccgtggggcacccagccttttggccaaacattattttggatgtgtctataagggtgtttctagataaaattaaaatttaaatcaatagactgaataaaacaatgtcttccccagtgtrggtgggctttatccaatccgttaaaggcccaaatagaacaagaagcagaataaaagaaaattcatcttctgcctgactgcttgagctg

SEQ ID NO: 637407 - DNA, 611 bp, Homo sapiens
caaaggatagaaaataatatgtttggctctccatttctgcaaawacatgttgatgatagtttaaaaaaaaaaaaccattgatgattgtttctaaatgctagaagaggtagtacaaggatagatgagcctgcattaattagtcctaaaagttgcagagtgataacaggatttagataaaagcacaaagaatctacaaggtcttaattagtgatcaaattcagcactgagtttgcaatactgtttcaagcttctgtctgacttgaaatcttgcctttcattcaacatgcccgtgttctcatatgcatttaccatggctactccactccagtctgctcctgctcagattaccctagaagagcctaggagggcactgctatcatcttgaagcagtcagtggcagaaggcagcaaactatagctaaagggcaaaatctagtccaatgcctgtttttgtgggacctacaagcaaaaacagctaagcaaaataatttttaaaggaagaggagagcagagtaagatggctgaatagaaggctacatttgccatccccgctgacacacaccaaattttaacaaccaactatgcaccaaaaagcaccatcagaagaaccaa

SEQ ID NO: 637408 - DNA, 576 bp, Homo sapiens
acccatctgacaagggactagtaaccagaatatataaggagcttaaacatcttataggaaaaagtctaatccaatgtttttaaatggtcaaaagatttgaataaacatttctcagaagataataaaatggcaaagaggcatatgaaaaagtgctcaacatcatcratcatcagaaaaatgcaaatcaaagctacaatgagatatcatctctcctcagttaaaatggcttttatcccaaagacaggtaataaaaatgctggagaggatgtggagaaaagggagcccttctacagtgttggtgggaaagtaaattagacaacccctatggagaacagtttgtgggttcctcaaaaaactaaaaatagaactatcatataatccagtaatcccactactgcatatatacctaaaaaaaggaaatcaatataacaaagagatgtctgcactctcatgtttgttgtagcactgttcacaacagccaagatttggaagcaacttgagtgtccaagaacagatgaatgaataaagagaatgtggtacatatgcataatggagtactattcagccataaaaaag

SEQ ID NO: 637409 - DNA, 576 bp, Homo sapiens
acccatctgacaagggactagtaaccagaatatataaggagcttaaacatcttataggaaaaagtctaatccaatgtttttaaatggtcaaaagatttgaataaacatttctcagaagataataaaatggcaaagaggcatatgaaaaagtgctcaacatcatcgatcatcagaaaaatgcaaatcaaagctacaatgagatatcatctctcctcagttaaaatggcttttatccmaaagacaggtaataaaaatgctggagaggatgtggagaaaagggagcccttctacagtgttggtgggaaagtaaattagacaacccctatggagaacagtttgtgggttcctcaaaaaactaaaaatagaactatcatataatccagtaatcccactactgcatatatacctaaaaaaaggaaatcaatataacaaagagatgtctgcactctcatgtttgttgtagcactgttcacaacagccaagatttggaagcaacttgagtgtccaagaacagatgaatgaataaagagaatgtggtacatatgcataatggagtactattcagccataaaaaag

SEQ ID NO: 637410 - DNA, 630 bp, Homo sapiens
agaagttgcagtgagctgaagctgaaatgcaccactgcactccagcctgggtgacagagtgaaaccctgtctcaaaaagaaagaaaaaaaaaagaatgaataagacctagtatttgatagcacaacggagtgactataatcaataataatctgatagtacatttaaaaataactaaaaatatrtaactggattgtttgtaacacaaaggaaaaatctttgatgggatgaatatcccattttccatgacataattattacataccacatgcctgtatcaaaacacctcatgcaccccataaatatatacacctactatgtacccacaaaaatttaaaatgaaaaatatttcctgacatgtgaagcatatatgaaatttaatttcaatatcataaaacaaagagtaattgggacacagttatgcccatttgtttacctattgtctatggctgctcttgagctgcgacagtagtcctgacaaagaccaaacaacatggctgggcatggtggctcaagcctgtagtcccagcactttgagaggctgaggtgagcagaccatgaggtcaggagttggagaccatcctggccaatatggtgaaatcccgtctctactaaaagtaaaacaattacct

SEQ ID NO: 637411 - DNA, 564 bp, Homo sapiens
ctctgtgtcctgggttcaagtgattatcctgcctcagcctcccaagtagctgggattacaggcacytgtcaccatgcctggctaatttttgtattttagtagagacggggtttcgctatgttggccaggttggtcttggactcctgacctcaggtgatctgcctgcttcagcctcccaaagtgctgggattacaggagtgaaccacaatgcctggccatgtctaatatttttaatcttccactgctcttgctgagatgaagggttctgtcatctttaaaactatagcagttcaaaagactaaccttctagtttttcttccttcccctctcaatgtacaagcattagagaaattctctaatttttttttgaaattaatgatttttaagtataattacacaaaagatactagctatgaatacagatttaaagccatcaagatgtttgccataacttcccaccaataaatcctgccagcatccagtgacatacagctggaattcagtttagatagcttttccagaacatttctcaccaatggccaaaataaacagaccacttcatgt

SEQ ID NO: 637412 - DNA, 564 bp, Homo sapiens
ctctgtgtcctgggttcaagtgattatcctgcctcagcctcccaagtagctgggattacaggcacctgtcaccatgcctggctaatttttgtattttagtagagacggggtttcgctatgttggccaggttggtcttgractcctgacctcaggtgatctgcctgcttcagcctcccaaagtgctgggattacaggagtgaaccacaatgcctggccatgtctaatatttttaatcttccactgctcttgctgagatgaagggttctgtcatctttaaaactatagcagttcaaaagactaaccttctagtttttcttccttcccctctcaatgtacaagcattagagaaattctctaatttttttttgaaattaatgatttttaagtataattacacaaaagatactagctatgaatacagatttaaagccatcaagatgtttgccataacttcccaccaataaatcctgccagcatccagtgacatacagctggaattcagtttagatagcttttccagaacatttctcaccaatggccaaaataaacagaccacttcatgt

SEQ ID NO: 637413 - DNA, 577 bp, Homo sapiens
gcctcactcacatgcccgacagctagtgctkgctgttgactgagtgcctcagttattctccacgtgactttctgtcttccatttggctagacttacatggtagtgtcagagacagcaatggcaaaagctgtaaggccttttgagaccgtggctgcagagctcatgcagcgtgactttcaccataatctaccagtcaaagcaagatacaaggccaggccttatttacaacaagagtaaaaggcatcccttttggattagagaatattaaaaaattttttgatcattaatctagcacaaagttgtaaaatgtatgaactacttactattaatgaaaaattgtgttccttttgggggaactttcttactatttgaacttatcaaatgatataaagaaataccaaacttattggggaaataagatcatgtttttctggcaaaagctgacattttcatatgaatgtatgtacaaattccaatgcctatgaagctacgatggtaacaaacatcactgaaatgagccaagtcaagattggagtaatctggaccatatatgctctatctgaaaatggaaaagtcg

SEQ ID NO: 637414 - DNA, 577 bp, Homo sapiens
gcctcactcacatgcccgacagctagtgctggctgttgactgagtgcctcagttattctccacgtgactttctgtcttccatttggctagacttayatggtagtgtcagagacagcaatggcaaaagctgtaaggccttttgagaccgtggctgcagagctcatgcagcgtgactttcaccataatctaccagtcaaagcaagatacaaggccaggccttatttacaacaagagtaaaaggcatcccttttggattagagaatattaaaaaattttttgatcattaatctagcacaaagttgtaaaatgtatgaactacttactattaatgaaaaattgtgttccttttgggggaactttcttactatttgaacttatcaaatgatataaagaaataccaaacttattggggaaataagatcatgtttttctggcaaaagctgacattttcatatgaatgtatgtacaaattccaatgcctatgaagctacgatggtaacaaacatcactgaaatgagccaagtcaagattggagtaatctggaccatatatgctctatctgaaaatggaaaagtcg

SEQ ID NO: 637415 - DNA, 488 bp, Homo sapiens
ccactgatattttaaaacaaagattaaayattggtaagtaattttgttaaacaacatgaatctaaaagttacatggaaagacaagagacccagaatagagagcacaatactgaataagaagaacaaagtcaaaggatggacaccacctgacttcaagacttactataaagttacaacagtcaagatagtgtggtattggcaaaataatagatccatggaacagaggagagctccctaaaatagacccagacaaatacagtcaactgatctttgagcaaaatcaagtcagtggagaaaaaaatcgccttttcaacaagtggtactggaacaatagaatgtccatatacaaaaaaaaaaaaaaaagaatccagacatacctttcacaaagattaactcaaaatggaccgtaaacctaaattcaaacacaaaattatgaaacttctagaggataatgtaggaaaaaatataggtaagcaaatttggcaatg

SEQ ID NO: 637416 - DNA, 488 bp, Homo sapiens
ccactgatattttaaaacaaagattaaatattggtaagtaattttgttaaacaacatgaatctaaaagttacatggaaagacaagagacccagaatagagagcacaatactgaataagaagaacaaagtcaaaggatggacaccacctgacttcaagacttactataaagttacaacagtcaagatagtgtggtattggcaaaataatagatcmatggaacagaggagagctccctaaaatagacccagacaaatacagtcaactgatctttgagcaaaatcaagtcagtggagaaaaaaatcgccttttcaacaagtggtactggaacaatagaatgtccatatacaaaaaaaaaaaaaaaagaatccagacatacctttcacaaagattaactcaaaatggaccgtaaacctaaattcaaacacaaaattatgaaacttctagaggataatgtaggaaaaaatataggtaagcaaatttggcaatg

SEQ ID NO: 637417 - DNA, 488 bp, Homo sapiens
ccactgatattttaaaacaaagattaaatattggtaagtaattttgttaaacaacatgaatctaaaagttacatggaaagacaagagacccagaatagagagcacaatactgaataagaagaacaaagtcaaaggatggacaccacctgacttcaagacttactataaagttacaacagtcaagatagtgtggtattggcaaaataatagatccatggaacagaggagagctccctaaaatagacccagacaaatacagtcaactgatctttgagcaaaatcaagtcagtggagaaaaaartcgccttttcaacaagtggtactggaacaatagaatgtccatatacaaaaaaaaaaaaaaaagaatccagacatacctttcacaaagattaactcaaaatggaccgtaaacctaaattcaaacacaaaattatgaaacttctagaggataatgtaggaaaaaatataggtaagcaaatttggcaatg

SEQ ID NO: 637418 - DNA, 467 bp, Homo sapiens
tcccttccatgggtaaattagtagcatcgttgataggtcctaggtaatttttttttcttttttagctagaagattaagtagatcttgatgtttttcacaggggatattgtagaacggtattgtatagtgtaagttgtagaaacatttctaccgaggagcagatggtaaaagtaaaatattcaaatgcataggcctctaatatcaaggcaactatttgtaaatatatattttgggaactttcstgttcaggaaatttattattaagcagtattgtctttcaaaccatatttgcgagatttgaaaagtcactttgaagaaaggaaatgaagcataccatcagcaattttcaaaagttctgagacatttttctacagtattgatataataaagatgaacacatttggaaaatgttctcaatattttcattgtgaagagtatttatttttgttgctggaacaaccagaagc

SEQ ID NO: 637419 - DNA, 538 bp, Homo sapiens
ttagccactgggatgagaagatgaggaaaagatcaaaatccatgggatcaattctgaaaggaaactgaggaagtcagggctgcctttgagatggtcctgyccaaagagtcttcagcagagaaattttggtggattccattataagaaagtggtatatagagaggtttgatccttaatattctgtgtcacacacaaaagataactatgtgaagtgatatgatcatcagttcaactgtgataatcatttcacaatgtatacatataccaaaacattacagtctacactgttattatatgcaatttttgtcaactgtacttcaataaagctaaggggaaaaatgaaactaaatttttctgaattcaaatatgtagcatgtcattatagagtttgagcaattttttttagcttcaactatatcgctcatattcccagctataacaaatatttaagggaagacagaataacttggctggctttgaattgctggaatattaatattaagatacagttagaaaataaactctcaatagaatggaa

SEQ ID NO: 637420 - DNA, 538 bp, Homo sapiens
ttagccactgggatgagaagatgaggaaaagatcaaaatccatgggatcaattctgaaaggaaactgaggaagtcagggctgcctttgagatggtcctgtccaaagagtcttcagcagagaaattttggtggattccattataagaaagtggtatatagagaggtttgatccttaatattctgtgtcacacacaaaagataactatgtgaagtgatatgatcatcasttcaactgtgataatcatttcacaatgtatacatataccaaaacattacagtctacactgttattatatgcaatttttgtcaactgtacttcaataaagctaaggggaaaaatgaaactaaatttttctgaattcaaatatgtagcatgtcattatagagtttgagcaattttttttagcttcaactatatcgctcatattcccagctataacaaatatttaagggaagacagaataacttggctggctttgaattgctggaatattaatattaagatacagttagaaaataaactctcaatagaatggaa

SEQ ID NO: 637421 - DNA, 538 bp, Homo sapiens
ttagccactgggatgagaagatgaggaaaagatcaaaatccatgggatcaattctgaaaggaaactgaggaagtcagggctgcctttgagatggtcctgtccaaagagtcttcagcagagaaattttggtggattccattataagaaagtggtatatagagaggtttgatccttaatattctgtgtcacacacaaaagataactatgtgaagtgatatgatcatcagttcaaytgtgataatcatttcacaatgtatacatataccaaaacattacagtctacactgttattatatgcaatttttgtcaactgtacttcaataaagctaaggggaaaaatgaaactaaatttttctgaattcaaatatgtagcatgtcattatagagtttgagcaattttttttagcttcaactatatcgctcatattcccagctataacaaatatttaagggaagacagaataacttggctggctttgaattgctggaatattaatattaagatacagttagaaaataaactctcaatagaatggaa

SEQ ID NO: 637422 - DNA, 434 bp, Homo sapiens
ctttgaactttccagaaatggttctagaattccctttaaagcagttgtgtagcaacacaaaaaacttgtaattgccctctaggaatgtgttaagtrgagttctctctatagagctgagcatgtccaccttacacagatgtgttcaataagcctgaagatgatagactcagaatatttatatatagatatagatatacatacacacgtatatttttgtatatgtgcatacatatacataaacatagtatatacatatatatgcaatacatgcacttactctctatttctaaagtttccctttaaacttattattttctttcaaatgcatatgattatctcaaccattaaatgaggttctgattctgcaaatagataatagactaagctattcagaaaggtctagaaaaatcatcttaaaagtgatttaagaagag

SEQ ID NO: 637423 - DNA, 434 bp, Homo sapiens
ctttgaactttccagaaatggttctagaattccctttaaagcagttgtgtagcaacacaaaaaacttgtaattgccctctaggaatgtgttaagtagagttctctctatagagctgagcatgtccaccttacacagatgtgttcaataagcctgaagatgatagactcagaatatttatatatagatatagatatacatacacacgtatatttttgtatatstgcatacatatacataaacatagtatatacatatatatgcaatacatgcacttactctctatttctaaagtttccctttaaacttattattttctttcaaatgcatatgattatctcaaccattaaatgaggttctgattctgcaaatagataatagactaagctattcagaaaggtctagaaaaatcatcttaaaagtgatttaagaagag

SEQ ID NO: 637424 - DNA, 598 bp, Homo sapiens
tatgggtgaagttaaatacccctgttaaacattattgttttgtaagatagctggaaaagttcaccttaatagctcattgctcaaaatgctttggaaattttgaaacatatggctggatatacggtgagctaatgaatatagtttctagtcctagatatgcagctgaaccacagtgtgagtagaaaactagcaaccaactgttgagtgcctcttgtgtactaagcattccgccaagtagtctttgggcataagaagatatgacacagatccaagcctcaaggataggtagggaaaaagacaagaagcaggcaattgctaacaaggccgaagagcygttgagaaagaggaagacaagggaccctgaataaagaatgcaacaaagatgagagaatgggggagggagtggtgaggggagagtatgagaatgggggagggagtgttgaggggagagtatctgacaggaggtagtaaatgtgcaaaggtctggaaataagcgggatggggaacgggaagtgaattatgtgactaaagattgtgggtacaaaggaatctgatgctggatgggagaatccatataggtcttgagtattttgctcat

SEQ ID NO: 637425 - DNA, 612 bp, Homo sapiens
ttcttaaacactgctttgagaaaaggaagaccatctggtggtaagtaaaggaaatggaatgttaacaagagtaaggcaagacatttatattcagaaaccaaaccaacgaacaaaagtaggtttagtaggccttgtataaaatgatggatctcttattaaaattggagtataagggaggggcatcatgataaggaagaacagtcgaggcagagaccagagtaagaagtcagagtaggggtagatagccttcaggcagactagatcttcttgtctcgaccactttcactcaaattcttaaaatatcccttgtgtacataagattagtgacagaacatgaaattggactaagcccaaagtagaacaaaagtagctccaccatgattctatttacgctgattggtagaatgtgctcccctggaggatggrccattatgactgcactgagacagatctttaagtttgcagatgactctgaagctgttctagctggggagacaagaatatttggtaaagctgtgtgaatggggaaaataatagcagataaatttcagctgtggaaagtgtaatttaatatatctagggaaatataatacaaactatgctgatatgatg

SEQ ID NO: 637426 - DNA, 535 bp, Homo sapiens
acgcttccctggtaatgtgatgcttaaaatccatgtttgcctattacgatgagaacaatattttggcaatctgagaagataacttaggatgttagatctgagggattgtctatactttgtaggaaatgatacttcgaattccagagttcagctaaggctgaaagttaaaggcaggatcactcaggacctggaactgcagcaccgtttctgcatccaaaactagctrtgcaattgctgcaaataaaatctgagcctaaaggcacaatatttgtccgaagaagccagagaagtcccagtttttctttaagagttttacaagcaaaagcatatagaaagccctgataagtgacaggagaaggagtgggaggtaaaaaatgtattaaaaagcaaaagaagtctatagcactggagctttaagagtagtctccagaccagaaacaggatcacatgggaaataggttagaaatgcaaaattttggatatcttcccccttctaccccagagctactgaaaataaactatacaggaagagaat

SEQ ID NO: 637427 - DNA, 601 bp, Homo sapiens
tagaaaggtaaatgtgttatgtttcttctaaacacatttttctacactacacaaatttaatagtgaaaatatatgaacacagtctgctttctgaaagaatattataaattattcctagacttaaatttgcatagtcgttagaggaaataaatatgctatctggcatattagagaggatatctaaaattacagataactagaagttcatttctagggcattagacattttcattatttctattattgctttattattgttgctcttaagacatgaaatgaatttttagaaatgcccctaaatgcctttaatcaaattacaaaaaagagcaccaattcttctgagttgatgytggcactgccagtgtgcactggcttagagagctgagctgaaggctggatgtcagctccacttgtccctgggcagagacctctgtgcagtgcacaagctgacacagcctcccccaagctgtccactgcttgtcaaccatgggtcacaaactgacaacctaacgtccaaatgtagcctacaggctttgtttgttttggcctagtaagtagaaatagcttcaattcgtggccagtagttttgaattagaaaatt

SEQ ID NO: 637428 - DNA, 523 bp, Homo sapiens
cgtccaaatgtagcctacaggctttgtttgttttggcctagtaagtagaaatagcttcaattcgtggccagtagttttgaattagaaaattttgcagaatcatctgaattcctctggaaaactagaagacatggcaacctggaacttccattcctgactagtaacaattggccggggctaaggggcaacttccctgctagaggaacatgtrctcttcaggtcacagttcccctgccttcctttgtattcatctggcctctgtgaacatctaggtttacaatttggtatgactcaatatagtcatcacctcttccatttttctctccaggtaggtttaacaacttttaaactctgtgtccactgaatcaagtacagatttacatagcagcatctgtaacaactaattgtacctctttgtttacagccttttccctacaagacagtaaacttctgatgaccagagatcagcctattaatccatctctgtaattccagtgcttattagattgagttgcatgataaa

SEQ ID NO: 637429 - DNA, 603 bp, Homo sapiens
cttggactttgggaagtgggatccagtctgctcatgggatatgtgttgactacctcttatggaaggggccgttccatgccatgcatgctgccagacagttgtgctactcctggctgcctgggttccttgaagtccattcccagtgcaggacaacctcacggcaacattgacattgcacgttcaagaatcttaaatgattcttactgaatttcaaaccttgaggagaggacactgtggtggtatcagtaaggatagctgggacatatttaagaaggactgagatgaagtaagacctgaaagacaagcgtcyacaatttctacctctaaaaggtagaaaggcatctaaccatttaaaaaatacattatcatgaacaaaacacagaaagatgtatatctctgttggcgttctagctaaataaaataatagcagtatgaaaaatttttaaagggagatagtaactggaaaaatctaaaagaatgttgttactgattcaggatatatattttcagtgtgctgttccatgtgatatcatgggtattttatttttgtgtacaatagcttcatagggactctgcagaagttattcctgagtcctatctttt

SEQ ID NO: 637430 - DNA, 573 bp, Homo sapiens
cttcaaagtggttttcagcagtgctggtctcagctctcttgaacctgcaggacagacagtggcaacactcttgtcaaggagccagagtctcagattataacatcttggtgataatatattttgcctgttgccaaagcatttcatttaaaggtttgggcacatgtaaatatatttctggctttccttttctaagttccctcctctaacctcttyagtctcaatttgagtttatttccatcatagaaaaaagaatgtagaaggctaaagccccattagtaatacagtagtcagggacatctcacctatttgacaattatttattgaggacctatgtacacaggcactctgctaggtaccaggggcatggttggcactggagacatggttggctgttttctgccatttagaagcttaaactttccatttctatattgtttgaaggctgtgattatcttcctgataatctacgtgctctttttatacttctctccatcaaatttttgtatctgtctcctgattcatcaagttatcccccagaataggggcttttagggaaattccacagaaacctga

SEQ ID NO: 637431 - DNA, 573 bp, Homo sapiens
cttcaaagtggttttcagcagtgctggtctcagctctcttgaacctgcaggacagacagtggcaacactcttgtcaaggagccagagtctcagattataacatcttggtgataatatattttgcctgttgccaaagcatttcatttaaaggtttgggcacatgtaaatatatttctggctttccttttctaagttccctcctctaacctctttagtctcaatttgagtttatttccatcatagaaaaaagaatgtagaaggctaaagccccattagtaatacagtagtcagggacatctcacctatttgacaattatttattgaggacctatgtacacaggcactctgctaggtaccaggggcatggttggcactggagacatggttggctgttttctgccatttagaagcttaaactttccatttctatattgtttgaaggctgtgattatcttcctgataatctaygtgctctttttatacttctctccatcaaatttttgtatctgtctcctgattcatcaagttatcccccagaataggggcttttagggaaattccacagaaacctga

SEQ ID NO: 637432 - DNA, 383 bp, Homo sapiens
tacaggtattgctcccaaagacatgaaacaatatggaagcctgtagccaagtttgttatagactgttttgttgggctggcatgaacaggaggcttatgggatcctgggtctgcatcctagcctaacatatgttttcttttgacagaaagacacacaaagcacaccagatttgctacagcttaagactaacctcacaaatcccttttcattaatttaaactttacagatwatataaacaatgatccttgttacctcttttaccagtttgcatgggaagagagaggccaaaagcctgaatggtaagaaatttctacccttttgctggcatgtcaggcttctgggttcccttccccctagctcaactagagaagcattttaaggtt

SEQ ID NO: 637433 - DNA, 514 bp, Homo sapiens
atagagtttttaagattactacaaactagtaaagaggaaaagcaactcaaagagagagaaagagagaaagaaagaaagatctgttcagggtctttgcccatttttaatttggattatttgttttcttgctattaagtttattattattttaaaaattaaccccttatcagatgtatggtttgcaaatattttcttccattccataggytgcctcttcatcctgttgattgtttctttgctgtataagactgttttagtttgatgtaatcccatttgtctattttgcccttcattatctgtgctttagggattctatccaaaaatcattgccacaactaatatcacaaagcttttctcccatgttttgtcctagtggttttgcagtctcaggtcttacatttaggtctttaaaccatctggggttgagttttgtatgtggtgtgagataaagtctaatttcaattttctgcatgtggatatgcagtttttttcaacagcatttattaaagagact

SEQ ID NO: 637434 - DNA, 570 bp, Homo sapiens
gtagtacaatcctgttttcattactattgctacatagtacattttgaaattaggtagtgtgatatctccagctttattcttgttgctcatgatcgattttgctcttaaggatcttttgtgataacatatacattttttggtgtgttatatttctttgaagaatgtcattggtatttacataggaattgcattgaatctgtaaatcrcttggggcattgttgtcattttgacagtattaatttttgcaatctataaataataaatagctttctatttatttgtgttttcttcacttttttcatatatgtttcataattttcactatataagtcttttaccacgttatttacatttactcttaagtatttattttttgtagcttatgcaaacaggatttttttctttgtcaggtctttcattgctagtgtatggaaacactactgatttgtgtatgttcattttgtatcttgccacattacggaatttgtttagtagttttaacctagtttgctgcagtctttaggattttttacatataagaccatgctatatgcaaacagggacatattt

SEQ ID NO: 637435 - DNA, 571 bp, Homo sapiens
gacaaggctgacactcacagattaagggccctttgaggtggcaggggtcacctgcaggggctgaatggaggccaatttacagggaaagttgtgtgtctgagatatcagaacagtgatttagaaacaaaaaccaaggsagtagtctaccagcaaaattacctctcatggccaggcatggtgtcttttacctgtaatcccagcattttgggaggccaaggcaggaggatcgcttgaggccaggagtttgggacctgcctgtgcaacatagtgagacctcatctctacaaaaaaataaacaaaattagcagtgcatggtggtacatgcctatactcctagatgctcaggagatggagatgggaggatggcttgagccccagaaggttgaggctgcagtgagccaagatcacaccactctactctagcctggccaacagagtgagaccctgtcataaaaaaataaaagttgcttctcaggaaccagggaaggggcacacaattactgtgtgtcaactgtttggaagcacctcactcattagtgactgtcatcatcagaacaattttacaaagtga

SEQ ID NO: 637436 - DNA, 597 bp, Homo sapiens
tgttcggtccgtgcctgaaacaaacatgattaatatccataatcttattaattttattatccctaggaggcaaagtctccaaagttttccaaatgatcttgcaaaggcaactctcctcagattccctaggaagttttcagattttatgaataggtgccaacagctatcagatgtcttccaacgatggctgctgcatcccagtttcacattgctaagggttaawgaaggacattgatatgaaagaagcatcccagagacccttgacacattgtgagagtacacagagggtggggctccatcaacctcccacagacactcagccatactattcccattccctgccatgagcaagagtttcagggcctcacaggggttcaaaggtggccaaatcattgccactctttgtagtatgaagtacaccaacacgtaaaggtaggctaaacattgataatataatagctttaaatgtgtataaatgtatgcttacaacctcaaaaatgccatgcaatattattgttctacttacaagatcagtgcaggaattataaagcattaattcagagtggactcttggcagtgtgtaatttatggtgcatg

SEQ ID NO: 637437 - DNA, 594 bp, Homo sapiens
aggctgaacttacaaccagactcgcaggcaacaccttgccttgtgccatgcttcaatcaygaagaggatgtgagaaagagtaggagaaaggagacacaaaaaatggcatttccatagcagagacccccaaggccagtccatttgattctctggatttcttttctgtacaacagtgatggaaggtagcctgggaaagccattcgtctcaggcttcaccttggatacctttctattcactgaactgattccattctttagtgtaccattgcctcataaatccagaaatagcagggacattcatttttgataaagtatccatacagattaggtttattctattgaaaattttattaaaatccttcatttatcttccagatagtagattctattaaccaagttgcataaagagttctgattcccagaggtaagaactgagcctggctttctagttacatgtttactggtaaccccgtctttccctataacacttaagcatatttaaagaatataccctcccctgcctccagccaggattgtaagctcctcaagagcatggctgtgtcttttaacatcaaggctccaggtgagaagagt

SEQ ID NO: 637438 - DNA, 594 bp, Homo sapiens
aggctgaacttacaaccagactcgcaggcaacaccttgccttgtgccatgcttcaatcatgaagaggatgtgagaaagagtaggagaaaggagacacaaaaaatggcatttccatagcagagacccccaaggccagtccatttgattctctggatttcttttctgtacaacagtgatggaaggtagcctgggaaagccattcgtctcaggcttcaccttggatacctttctaytcactgaactgattccattctttagtgtaccattgcctcataaatccagaaatagcagggacattcatttttgataaagtatccatacagattaggtttattctattgaaaattttattaaaatccttcatttatcttccagatagtagattctattaaccaagttgcataaagagttctgattcccagaggtaagaactgagcctggctttctagttacatgtttactggtaaccccgtctttccctataacacttaagcatatttaaagaatataccctcccctgcctccagccaggattgtaagctcctcaagagcatggctgtgtcttttaacatcaaggctccaggtgagaagagt

SEQ ID NO: 637439 - DNA, 587 bp, Homo sapiens
tgccaaatctggtaaggaaataacaaaaagagagttatgacaacattcccttatgcatgcagatacaaaaattatgaataaaatattcagtagcatatacaaaaaatgtgaatatgaacagttggttttagaaaggccagratggctttgattggaaggtcttttagtgtaataaattagaggagaaaaaaattacatgagtgtataaattgccaaatagaaaagacaaaaattaaataacataaaatttaccctccattctaaatataagttctatgaaagtaggagcaacaggaaaatgctctaaacctgcaaatacagaatcaaatgtaattccaaatgtaagcttttatagctatttaaaatcagggatgagacaagtatagaactattattagttggaattgtttccttaggttgcatattatgcaataatgcaagaaactaaaaacccatacaaatactggcaaagcagcagcaaattactttgtttgtagattacagtattacacatttagaaaatccaagagacttcgacaaaaaaaaaaaacaaataatgccccacacaaacaggattttaaacaaca

SEQ ID NO: 637440 - DNA, 638 bp, Homo sapiens
aatgtaaaagtattaattgtactgtgaggaaggaaggaccactccacaagacctgcgttttgaacgataayggctgttggagaatgcacagtagcaaaaatcaagctggagttgggccaagggatgtattctatttacttgtgctcactgaattttttcttcaactaatccaatttctttagttgtctctggagttaatgttcttttactattcaattctggatcccctctcaagacagagaacaaatttgacatggcataagtagggatgcctagagttggccaaatccaattaatatctcctagcaatttttgaaagtcatttaatgtttttaatgtgtcttttcttatttctattttttgtggtttaattttcctatcctctacctgcactctgaaataatgaaaaggagtagaggtctcaatcttatcagatgctattgtcagccctgtgttttaaacctctgtttgcagaaatgtgtaacagccaattaatttgtctctggtttttgcagcacacaaaatatcatcaacataatgaatgatataatagtctgaaaatttgtctctaactggttgaagagcttgagctacaaaagtctgacaaatagttggactattaagccttccctgaggca

SEQ ID NO: 637441 - DNA, 535 bp, Homo sapiens
gatcttctctctttcactatttccatatttacagaggatattactataattttacaaacaagaaaactgagtcttacataacttttccaaaagaaaataatcaggattagaatcccaaaggttagtaccaaaaatttagtattctttttcctatattgcagcttcttaaactgcgtttctgggtatgtgatgacaggctttgggacacatgaagatgtaagatcagcattgttctcatcttcctgtaaaatatgtttgattggaatatctgttcaacgaattactatcttgtatatttagatattttgtggagtagaactcaaaatgcacatgatttcatacacgcatctttcaagwaaattcagccacgtggagggcttctctggtctatatcctcactcttttaaagacgtgttcattttcttccttaggatacttaacgggacattttgagatgtcctataacatatcatattatctgtctgctattaaatacaccataaaacacggtgttcccccaccaattatttggaaa

SEQ ID NO: 637442 - DNA, 406 bp, Homo sapiens
ctatcccctgtttaactctgctgttcttgcagttgtcaaaaaaaactggtcttttttttccccccacctccaagatatgtcttttctgtttatcacctgycaactaaaattgtccataccctgtgttttactattgtattctcctttaaagttttagtaaagattttagaagtctcaattcaagatctaccatgctgtatcacttcctgcagaaaaaacttgtgttccatttgccctgagaactttgtagactgggctggtacatgagaacaactcccacacctatcagctgccacatctttgtccaaaatacctctcctatctattccctactccattcacttgcaatgaccttagttcagggcctccttctcctcatacttaatattgcttttataaccgcacc

SEQ ID NO: 637443 - DNA, 400 bp, Homo sapiens
gaattccctgacccattgcacttcctgggtgaggtgatatctcgccctgctttggctcatgctcggtgggctgcacccactgtcctgcacccactgtctgacaagccccagtgagatgaagccctcarttagtacctcagttagaaaattcagaaatcacccatcttctgcgtcactcacgctgtgagctatagaatggagcagttcctattcgcccatcttggaactgccccccaacatttcttttctgaatcaattagctggtaaaatcctgggtagacccctccccatactcttttaaaaaattgtaaattactcataacacaaaacttactgtttaaccatatttaagcgtacaacgcagtggtttgtgatcattcacaatgctgtataagcatca

SEQ ID NO: 637444 - DNA, 400 bp, Homo sapiens
gaattccctgacccattgcacttcctgggtgaggtgatatctcgccctgctttggctcatgctcggtgggctgcacccactgtcctgcacccactgtctgacaagccccagtgagatgaagccctcagttagtacctcagttagaaaattcagaaatcacccatcttctgcgtcactcacgctgtgagctataraatggagcagttcctattcgcccatcttggaactgccccccaacatttcttttctgaatcaattagctggtaaaatcctgggtagacccctccccatactcttttaaaaaattgtaaattactcataacacaaaacttactgtttaaccatatttaagcgtacaacgcagtggtttgtgatcattcacaatgctgtataagcatca

SEQ ID NO: 637445 - DNA, 607 bp, Homo sapiens
ggtagaaaaacaggaactcaggagacctaaggaagcaatcataatgtatgaggtgcctggtgtgccatcgtctggatgggatcatctggtgagtttcagttcttttatactttttgagggacctaggggtcctttaccaaggatgaaactcatagaaaacaaataaaagtttcaagctttaagaccagaatggtcaatttctatgtttatataaagaactatccatggaactacaggggaggtttcaattcaagtgccagtgctagctgcaatctgcctcaagtctgcctaggcttctttcaaactgtctcaggaccttggccaggagaatagctttctctcccatctgagggctcctctcccatctgtagggctgctgagatagccaagttcttagaatacctcagttccagagcagactcctttgcatmagcctttcagaccagctctggactctctctagatctcagcccgtgtttatggtgtgcagggggataaggcggaactagacccctatgacttcctcccagaaacacatgctatctgacagagtggttattctgcaggactctagcaggggattctccaagtccacttctctgatgta

SEQ ID NO: 637446 - DNA, 515 bp, Homo sapiens
gagacttacctttgcaagatcttctggtggactttggagagacctaaagatcaaakaatcactctatcccaatctaagttataataaattctttcaacattgcctcgaggcagtgactagatgcgtgtacatctcttctgtgtagtagtacattcctgatttctgttcaacagggaactcaccaagagactctcatactctcaaatcctggagaaattctctttcactggaagtctttccagggaaaaagttttcttttctggcttctaagatgacaggtgggcactgtgacctgggattcccccgaaatacttgctctatttcagaattctaatgaagttcctcctaatggtaaaaaggagcaccctaactcttaattcaggagctttggtgattgagcagatccttcacatctggacactgagggaggggttgttcattcagtcagaagaccttgaactgatggtggctttagatgtggttgcagttttctgtagcaaaagaaaggtgtttta

SEQ ID NO: 637447 - DNA, 515 bp, Homo sapiens
gagacttacctttgcaagatcttctggtggactttggagagacctaaagatcaaagaatcactctatcccaatctaagttataataaattctttcaacattgcctcgaggcagtgactagatgcgtgtacatctcttctgtgtagtagtacattcctgatttctgttcaacagggaactcaccaagagactctcatactctcaaatcctggagaaattctctttcactggaagtctttccagggaaraagttttcttttctggcttctaagatgacaggtgggcactgtgacctgggattcccccgaaatacttgctctatttcagaattctaatgaagttcctcctaatggtaaaaaggagcaccctaactcttaattcaggagctttggtgattgagcagatccttcacatctggacactgagggaggggttgttcattcagtcagaagaccttgaactgatggtggctttagatgtggttgcagttttctgtagcaaaagaaaggtgtttta

SEQ ID NO: 637448 - DNA, 583 bp, Homo sapiens
gcactcctttggctgacccagctggtgtctcagtatgtcaaatatccccctagtccacaatttctgggacttattcagcactggactcacctaagagttgcagtccttatggcttagactgcctttcaagtttacttggaaacacagagaactgtaggccccctgtggtgaggttttcaggcactgaagttcttactgctgggattgctgattcctctcaggttaggactggcttaaatgctccctctgcctccaggggcaggtgtcagctgagtttgatctagttttcctttgtgtctaacataacaacaatgagttcagtgcctcataattgctgtgttcttccttcccccccgtgcccagagatagactgtgcaccacatgactgctactgaggttgrgagggaggggggttggtgattcaggactgtttttttccatctcttcagtgcctcttttagggatatgaagtccaaaccgggtactatgagtgctcacttgatttttggttctcatgaaggtattttttctgtgtagttgttaacttggggccttgtggggtatggggaaatgattagtggag

SEQ ID NO: 637449 - DNA, 510 bp, Homo sapiens
aggcaggagaggccttgctaggccccctgtgcctcctcctccctggtggtctctcacctctctgcctctgcctggggatgtgcaggactttatgcttctgccccagggagcagggaggagctggagccggggaccctcgaccctcccgggccccaggacccacctcccaccacggagactcagggtcgcccctcagcagctcaagcacgtcgcccgtctggaaggtcagcacaggcttcccgggaggggctgggttgccatggtaattctgcayggccaccatcttgggacctgcaaaggataggacagctcactcagtgactcagcagctcactcggtgactgacttggccccggcccgcagcccaccccatcaccaagctcggcctcccccagcacacacagccttgcgcctgcatctcccttccctaaatccttcccataagcctcatgtctttttgataaatatcataattatttatgcaatagacagattcaggggtcatcatgg

SEQ ID NO: 637450 - DNA, 583 bp, Homo sapiens
cattatgcaaatgcaaggtactgattattagagcaatttaaaaacaggccctccatttgggcttattttgcttgataaagcatttttaagtggcaatattttgtgttaattttttcaaccagctgctcttattatttgattatgcattattcaaagctctcaaaagcgagcttagagcacttgagaaaataacttcagtgttatacgtgcccacacaggggactggctccagctcccagaaagatgttctggatctaagacctgtgctacccggcacagagccactggccacgtgtggctgtccggctcacaacatgacaagctgcagtgacctgcgcccaagtgcgagctccataagccagatcagaggactcagcgcaagcaccacmaaacgtaggctgcccaaggatgatctgtgacactgatcacaaggtgacccagataatattttgaatatgctgggttaactataacatacatttttttttttaagagatgaggtcttgctctgtcgctcaggctggagtgcagtgacaggatctatgttgcccaggctggtctcgaacttctggcctcaagcaat

SEQ ID NO: 637451 - DNA, 481 bp, Homo sapiens
  misc_feature 161: n = A,T,C or G
aaggagaaatagactttcccagacaaacaaagcttagggatttcaccaacaccagacctgtcctacaagaaatgtaaagggagtaatttgatcagaaggaaaagaacattaatgagcaataaatgatcacctgaaggtayaaaactcactggtaatagtanatacacagaagaacacagaatgttataacactgtaactgtggtgtgtaaactactcttatcctaagtagaaagatgaaacaatgaaccaatcagaaagaataactacaataactttccaggacatattcagtataataaaatataaatagaaacaacaaaaagttaaaaaacagggatgaagtgaaggcatagagtctttattagttttctttttgcttattcgtttatgcagatagtgttaagttgttatcaggttaaaatcatgggttataagatagtatttgcaagtcttatggtaacctcaaaccaaaaaacatac

SEQ ID NO: 637452 - DNA, 690 bp, Homo sapiens
gtgggcaagttactgagcctttcggaacctcagtttcttcatcagaataactgagatcatgaacacctgctttcccagatgcaatcaggagacgcagcctagttaatacctgccgttctataaaacatccaacgctggttttgtctgtgaaagaaaaatatatctcggggcccccacatcactaagctaaagggaagtcaagctgggaactccttagggccaacstgcctcccattctgttcaaggtcacccctctgctcactgagataaatgcatatctgattgcttcctttggagaggctcatcagaaactcaaaagagtgcaaccattgggtctcttatctacctctgacctggaaaccccctccccgcttcgaatcttccacctttgcctccagctgtctcacctttccagaccgaaccactgttcatctttcatgtggttgattgatgtctcatgtctccctagaatgcataaaaccaaactgtgatctgaccaccttgggcacatgtcctcagggcctcctggggctgtcacaggtgcacatcctcaaccttggcaaagtaaactttctaaattcactgggacctgtctcagatttcagggattcacatgtcttatatctttttaatattaaacatgcattgccctaatttattttcattttggaaacccaactaaagcaaata

SEQ ID NO: 637453 - DNA, 690 bp, Homo sapiens
gtgggcaagttactgagcctttcggaacctcagtttcttcatcagaataactgagatcatgaacacctgctttcccagatgcaatcaggagacgcagcctagttaatacctgccgttctataaaacatccaacgctggttttgtctgtgaaagaaaaatatatctcggggcccccacatcactaagctaaagggaagtcaagctgggaactccttagggccaacgtgcctcccattctgttcaaggtcacccctctgctcactgagataaatgcatatctgattgcttcctttggagaggctcatcrgaaactcaaaagagtgcaaccattgggtctcttatctacctctgacctggaaaccccctccccgcttcgaatcttccacctttgcctccagctgtctcacctttccagaccgaaccactgttcatctttcatgtggttgattgatgtctcatgtctccctagaatgcataaaaccaaactgtgatctgaccaccttgggcacatgtcctcagggcctcctggggctgtcacaggtgcacatcctcaaccttggcaaagtaaactttctaaattcactgggacctgtctcagatttcagggattcacatgtcttatatctttttaatattaaacatgcattgccctaatttattttcattttggaaacccaactaaagcaaata

SEQ ID NO: 637454 - DNA, 690 bp, Homo sapiens
gtgggcaagttactgagcctttcggaacctcagtttcttcatcagaataactgagatcatgaacacctgctttcccagatgcaatcaggagacgcagcctagttaatacctgccgttctataaaacatccaacgctggttttgtctgtgaaagaaaaatatatctcggggcccccacatcactaagctaaagggaagtcaagctgggaactccttagggccaacgtgcctcccattctgttcaaggtcacccctctgctcactgagataaatgcatatctgattgcttcctttggagaggctcatcagaaactcaaaagagtgcaaccattgggtctcttatctacctctgacctggaaaccccctccccrcttcgaatcttccacctttgcctccagctgtctcacctttccagaccgaaccactgttcatctttcatgtggttgattgatgtctcatgtctccctagaatgcataaaaccaaactgtgatctgaccaccttgggcacatgtcctcagggcctcctggggctgtcacaggtgcacatcctcaaccttggcaaagtaaactttctaaattcactgggacctgtctcagatttcagggattcacatgtcttatatctttttaatattaaacatgcattgccctaatttattttcattttggaaacccaactaaagcaaata

SEQ ID NO: 637455 - DNA, 690 bp, Homo sapiens
gtgggcaagttactgagcctttcggaacctcagtttcttcatcagaataactgagatcatgaacacctgctttcccagatgcaatcaggagacgcagcctagttaatacctgccgttctataaaacatccaacgctggttttgtctgtgaaagaaaaatatatctcggggcccccacatcactaagctaaagggaagtcaagctgggaactccttagggccaacgtgcctcccattctgttcaaggtcacccctctgctcactgagataaatgcatatctgattgcttcctttggagaggctcatcagaaactcaaaagagtgcaaccattgggtctcttatctacctctgacctggaaaccccctccccgcttcgaatcttccacctttgcctccagctgtctcrcctttccagaccgaaccactgttcatctttcatgtggttgattgatgtctcatgtctccctagaatgcataaaaccaaactgtgatctgaccaccttgggcacatgtcctcagggcctcctggggctgtcacaggtgcacatcctcaaccttggcaaagtaaactttctaaattcactgggacctgtctcagatttcagggattcacatgtcttatatctttttaatattaaacatgcattgccctaatttattttcattttggaaacccaactaaagcaaata

SEQ ID NO: 637456 - DNA, 584 bp, Homo sapiens
ctctggtccggtatcagcaactcctgacaccagtgtttaagttttagaaaaacacataaacaatttctttctaatcccagccaatctgatcacaaataaaacttccttcataaagcccatcttctataaatcctcttcaacttgtttagaactttcattattttcccaagcccccattcttagtcctatagtttttcttttttgtaaattttggaataactaattatttaatctcaggacaaaaatgtaccacttaagatttttttctcatacaaagttatttttccctaaattcatattttgattaatagacctaaacatatttagtatttttataaaatttaagaagccaagaaagaactttgatgtatttaccaatttggctcaattttggatataacttggtcatttaatgagtattattacttaatacaactttaaaattttaaattgcatagaagtttcatttataaatgttaatttcatttcygattacctaatttattttttagtaattacacctagattacttacgaaaattaaaatattagagcaagtcactattttattttttattaaccaat

SEQ ID NO: 637457 - DNA, 635 bp, Homo sapiens
ttctaagcttgctgctgaacgctggtggtctgtgtgtgagaggtgtttcaaattccaaaactgaacttataattttactcmccacacccacccccatttctgtgttaccagcttctattaccactttgatgctattattctcctcacatataaagttgtatgcattaaggcagcactttccaaatggtgttccttgctttttgaggtgtgaataaacattctctgtgtgtgtatctgtgtgtgtgtgtgtgtgtgtgtgtgtgtatctttgggagaaggttctttcttcaaataactttgagaatgtcttcgtcctaactccccacttagatattgactgttataagttgttttttcaatgaccttagacatcctgcagtcgagaagatttttaacttaaatgttaaagtatgatttcatattttaaaaaaactattttaccataaaattctttcttaaaaatagaaagtctgataaaatccatggagtgaattttggaaaatattaccacagggccatctttggctaagttttcttctccatgtacatctggttggtttccaatcctccacatcctacttactaacatctcccaaacctgcttctgccccatgtccccattcactttcgcagcc

SEQ ID NO: 637458 - DNA, 559 bp, Homo sapiens
ttcacacttctactggccacatctcacctgggtacttatgtacccgtgggttggacaagcttgaaaatggtaaaggaaccatactgactggacaaaagatttacattaaagactggtgaccctaagaagctgtaaaaataggctaaaattagtttgtaaagaactgtgaattgagtttgatattaaaaggtttaactatgtcaaacagatttagcatacacaaggtgaatgtagaaaacaaacgtagtataacatgccataaaattgttcatatgacttcctcaccaaaaaatagactcctgaaatcacactcatactattttcatggattaacgaaattgccgaaatggaaggaataaggagaaattgtttgcaccaaacctctcaaacagctaaagaggttcataaaagctcaattatttcatgaagatcatayacttgccaagtggcagagtgaggaccacatcccacattttccgcttcacagtcgaagccagtaatccctagtcttgattgcatgatagagactatgaaaaccagtgatggtttaatgagtccc

SEQ ID NO: 637459 - DNA, 559 bp, Homo sapiens
ttcacacttctactggccacatctcacctgggtacttatgtacccgtgggttggacaagcttgaaaatggtaaaggaaccatactgactggacaaaagatttacattaaagactggtgaccctaagaagctgtaaaaataggctaaaattagtttgtaaagaactgtgaattgagtttgatattaaaaggtttaactatgtcaaacagatttagcatacacaaggtgaatgtagaaaacaaacgtagtataacatgccataaaattgttcatatgacttcctcaccaaaaaatagactcctgaaatcacactcatactattttcatggattaacgaaattgccgaaatggaaggaataaggagaaattgtttgcaccaaacctctcaaacagctaaagaggttcataaaagctcaattatttcatgaagatcatacacttgccaagtggcagagtgaggaccacatcccacattttcygcttcacagtcgaagccagtaatccctagtcttgattgcatgatagagactatgaaaaccagtgatggtttaatgagtccc

SEQ ID NO: 637460 - DNA, 591 bp, Homo sapiens
acttcttatttgagggcaataatgccagaggaatatttctgtatcattaactcctcatcttccagacttatctttaagtgacatttccttcatattggcccaggtttatataacactgcacctaatcacagattttagaatagtttatagccaggaacatttcagagagagaagcacacrataatttattctaaggtctaatgacatttggtctaggattagatggtaaaaagcatcagattggaaaccatttcaaaataagatacgatatagatattatgtacatttttaaaaatttgctctggatgttcctgaccatatatggagagaatcatattcattagtcagtagtcttggtgtaaccgctcaagagcacatgcaagcacactggatgcatgaaggtgaacaaatagcatcatgagatatttattgtgaaatcaattatagtaaaagctgcaaagtacaacctaggtgaggcaggtttgcatagcattgtaactgaagagaaaggagacctatatggtttagtaatgagacaaaaactttattgaaagaaaatacagaatgacacagaagaaaggaagaagaaaa

SEQ ID NO: 637461 - DNA, 489 bp, Homo sapiens
ttcactcccccttatcccatttcctagaaacatctaatttattttccataattatgaatgtgcctattctatatacagtcacgtgctacatagcaacactttggtcaatgatgaaccatatatacgcagtggttccacagaattataatattgtattttttaccataccttttctattttagatacacacattcttaccattgtgttacaactgcctacagtattcagtacagtatgctgcacaggtttgtagcctaggagcaataggctatactatataacctaggtaygtagcaggctaaccatctagatttgagtaaacacactctatggtgtttacacaacagtgaaataacctaacacatttctcagtgtatctctgtcattaagctacgtgtgactgtatttcatataaatggtatcacaatatttgtccttttgtgtctgagaattatgtgtttaattattttagggactgccaaactgttt

SEQ ID NO: 637462 - DNA, 566 bp, Homo sapiens
tccaattcaacaatcaatatatacatttgtccatattttagcatctttataatttggatatattttataattgatggcgtcttacaatcactttccacagaggggaattgtggcagaaagtgtgctacgtgccttatcttaattattactcctgttggtatgacaggataatcactattactcaaagttttcatcaatacattatttaggaatcaatctgagaaaataatatgggtcccaataattgtctgaaaatattcaattgataattttctggtaagatcaaaaaagtgccagcattaaaacttggagaatgggtatctgtggcttgggtaaaatctggagataatagtgaagcactttttaaggaaatgggaattacsaacactcttgatgatatagtgaatgatattgtaaagaaaaacacagatattgatgactctaaatagaagagtgattcaaaagatttatatgctaaaatgggaaaacattttagtaataccttaaccagtttattttattcatattttcatttatattgatacataacatacgtgtgtgtgtgt

SEQ ID NO: 637463 - DNA, 611 bp, Homo sapiens
ttaaaccgggacactatagattaggagatgaatcaatgttgcaaataataatcaaatagtagaaagagatgtgtgccataaaatcattcatatgtactataatgggagatgagagaacagcaagattatgtttgatttatggcaaaatatggatataacagaagataatttaagaagatgtggtatytgagcttcatattacagaattggggggtggaagaaagccattcaaacacaatagacagtatatgccaagctgcagaaggagagggcacagcctttgaaggcctattgagcacttctgtttgagtggagagtgggctggaaagggcatgacgggagatgggttcatgaggcaagtgcaagagagtgcaggggacttcagtcctgggtggaggtgacagggtattaagcaaggtgacattgtgaccataactttgcttttgaaacaatggagaagagacagcactggatgaagttgattctatggatcataacagaattcttgagatgactgagtatgcagtgtaatggttctgaagtaggaagatggagaggcttttcccaagaactaaaagagggagtgcatagttaggagcagatatgcaaaa

SEQ ID NO: 637464 - DNA, 586 bp, Homo sapiens
tcatactaaccagctcccaaccaggctctttattaataaaaccaggataatcatatcacacctacctaccacagcaagttatagctttggtagttatagcaatgttataacattgactgtaacagtcaatgtttatggaactaaggtttatttaagtgatcctattttgagtactctctctctctctctctctctctctwtatatatatatatatatacatacacatatatatacacacatatatatattagctcaataaatgtaataaacatagaacatgggtaattttattattgccatttcatagttagaaaccttaaatacaaagtgttgagtaatttgcccagtgtcacatagtctatagcaatgttagaagtcacacccaagaattcttgtttcattggccacaaattcaccactccattcatgcagcttctttagtgagaaataatgacaaagagaagagtgaaagcactttggcaaatgtaatatattatataaatataagattctggcatgcaaaatcaaaggtagtgccaggcatcccatgtatgtttgtgtgtgcacatacacatatatgtttat

SEQ ID NO: 637465 - DNA, 612 bp, Homo sapiens
tattgtggcctagtaaggtctggacactatgctaggagctttcaactgttacatcatttaagccttgaaaaaaatcacatggcttatctgcaatcaagtttccayatttcatggataatataagtaaggcctttttagaggtaacatattcaaagtcagataattaataagtattgctattgatactcaaactcaggtttatgtgaattacaaggttatggggattttttccttgttattgtttattttttgttgctgttgtgtctcaccagatagaacatggtggggcccactccaattgtactcatgtagaaataatggttcataatcttagccactacatttggctttcctcaacctgacttatcctgcggcctatatgctttcctttaataaatagattggctcttcagacaaagcattaaagcagcttataatgtaaaaacaattttaaacagagatacaatcactcaggaaagttggtgccacaaaacttcattttacttcaccaaagcatttatttttgtctgtaatacttggaagtcttctaaatcttttgattatgctttgagcaaaaatattcatatcccttccctcttcatacactctaaa

SEQ ID NO: 637466 - DNA, 612 bp, Homo sapiens
tattgtggcctagtaaggtctggacactatgctaggagctttcaactgttacatcatttaagccttgaaaaaaatcacatggcttatctgcaatcaagtttccatatttcatggataatataagtaaggcctttttagaggtaacatattcaaagtcagataattaataagtattgctattgatactcaaactcaggtttatgtgaattacaaggttatggggattttttccttgttattgtttattttttgttgctgttgtgtctcaccagatagaacatggtggggcccactccaattgtactcatgtagaaataatggttcataatcttagccactacatttggctttcctcaacctgacttatcctgcggcctatatgctttcctttaataaatagattggctcttcagacaaagcattaaagcagcttataatgtaaaaacaattttaaacagagatacaatcactcaggaaagttggtgccacaaaacttcattttacttcaccaaagcatttatttttgtctgtaatacttggaagtcttctaaatcttttgmttatgctttgagcaaaaatattcatatcccttccctcttcatacactctaaa

SEQ ID NO: 637467 - DNA, 648 bp, Homo sapiens
agactttacaacttccgtaattatgtgagctaattgccataacaaatcttcttgtatctatatctatagctaactgtctacatatatggattgcatacacacacacacacacacacacacacacacacacacaggcacacgcacagagatatacatcttattatagacagatagatggatagatatgcccatatagatatatatgcccatatctctatctatctatctatctatctatctatctatctatctatctatcttatctatcttttattgtttctttytctctggaaaatcctgaccaatacagactctattaaataaacccaaaagacttgcatatcttaagatgagtttataattcttcaccttgagaaaaagtggacaaagtgatgacacccaacctcactgataaggaatcccattatatggaaaatataatccaccaaaatgagattccttatgatagaaataaagttatatgtggaaagggaaacagatacatgtggacagaaaatagtcatgcatggaaggggagacagcatagagggataaactcagaatgaaaattaaagcctaaggccagctaaacccagtctgctgttatgtaagtcttgtatattttttgtgagggacacaaaaaaagcc

SEQ ID NO: 637468 - DNA, 598 bp, Homo sapiens
ctgctgctgctccagggagcatgcacagagcaccatttactaycccaaagggctccctcagcatttgccaaacattccctctggtctgagctaatgttcctgttgcatagatccagtttcctacctagctattagtcccttgagtccaagagatatttcttcttactctttgtaccttcccatagcgattagaaaagcatgccagtcaatagtaagtgtagaggaagtttgtttaacttgactggttgattagtgggttgatttactgccagctcagtggctgtttctctcccattacttccacctcccatgaggactgcacctgcggcagcgattttatgtgaacttggattactgtatggaaatggaggtgagcatatgtagatatttgtattatcgtatctttcaaataacatctctcaaataatgatacttgtaaaacttttcctcatgtttatttgcagggtaatgcatagacagttgccttggaaacactcactctgaatattctaaattttctataatggaaaatcttgcctttaccttataatttatagtctctctcatttttggattttgctgagaatacataatgaga

SEQ ID NO: 637469 - DNA, 630 bp, Homo sapiens
ctttttgaccatttcctaatcttgggcatatttttctgtcggtagacattcaaaattatcttcctcacgtagtttaatttccttttgtggcaatgtccttaatctttcattgagactgctgcacctacacaactttatgtggaggctgtaaagaaaaatcgggagtagagagttgtcacacagggaaatgtagcctagccaaccctctgtgtcattcaccaggagaccttccttgtggcacaaacaacagagaaaggaactgaaaccagacttcatgagctctagaccgcagccagcaaatagaacactgatgattgggagcagttcagtgggtgctccctagaaagccggttaacctttttttgaaagggtaagactttcacrgaaaggcatgaatgagtaatgattggattccatatgaggaactacattggtgctggagaggttttggagctgggatcctgggtccaaaggaaaaataatgagaacattaagataaaactacctgctaagatatttactcttgttttgctcacatgtcagcatgcctaagggaagaacttgaggaattttgagagtccgatgccactccagtggattccaagtcagattgaataggagttgttatga

SEQ ID NO: 637470 - DNA, 598 bp, Homo sapiens
tattaaatgagttaagttttagctcaagttcctcttaacattgtaaggaattttgcacatatgatgctagatgtatatttaaaaacctaccaagaccatctcttcataacctttaaaatgtgcatttatcctttaagaaatatcacctgaatctcttcawactcatcagttccattctctctacattctctttctcctgaaaatataaaaagcacttttttctgagacaacttacatcgcttgttttccgttttgtatttgtgcacttttaaaacacacataaaactgagaattcatccattcctctgtacccagatactagatgatttcacataacccactttaaaactaactttaaagaaaccatgaaaatggagacaaatctgataatgcacacaaaatttctgaaacctacaaaccatttccaggcagacgtgcttcaaagtcctttatctaaaagattagatcggagatacctaaaaacccatgacaaaggtaaatcacagacgaacaaaaccaagcaagtaacaaggcccagtggttttctgttaggtgaaaagtgggaaaaacaaagcaaaacgtttgaagtgcaacttac

SEQ ID NO: 637471 - DNA, 562 bp, Homo sapiens
ctactttttatatttgccaaacttcttgaaaatgcatctgcatgaatgtatgctaaaaaagataaaaaatatcccctcttttgtcggagtggtaaatgaaaactcagaattttatgtatgcattggyaaaagcacttatgatttactaataactctaaaaataaatcattttcttttttgcagctatatcttgcttcttcataaagtggacagtaacatacttacagactggtgaagagaagttcagaaaattgttgctgttcagcaataatagttcatatttcttaagcacttactctagtagactatatacaataactcagtactcagaacaaccctataaggtagtaccacttttatgtccattttataggggcagaagctgaggcacagagaggttaagaatcatgctcatggtcacacaactaacaaatggcaaagcaagaatgaatccaggcactttgacttcagggccaacaggcttattatgcctgcacttaccaaatgtctactatgtgctttgcacttttgattatgcaccattgcttaatggaaaggatga

SEQ ID NO: 637472 - DNA, 356 bp, Homo sapiens
tgtttggaattcttcggcaggggagatttgtttatgttatttcattctaattaaattaatgaccaaactaataaactaattctagttagttgaattttttttataatttggattataatataataattttttacttattttgctgctcagataatttcagttttggtcattgaagttctttccagttgccccatatccgtctgacatactcaatagttgtgagtcgttgttttttttttttttttttttcagcattccccttattttctggcactataaaatcctctggaatcatcttttatattttctgtcttagccctagcttcagccatttytctaagtagccctgttttctt

SEQ ID NO: 637473 - DNA, 531 bp, Homo sapiens
taagagtcaagttttgagttcaaactttcattactataaacgtcagatctttttattatatgaggatgccttcaagtttgaagtatgagataagctgtttagctcaatatctgatacatcattactactcagtaaattttattagtattatttaagtataacggaattaggccattcttgcactgctataaagaaatgcctgatgctgggtgatttaccaagaaatgaggtttaattggctcacagttctttaggctttgcagaaagcatagtgcccgcatctgcttctggtgagaactcagggagcttttactcatagtggaaggtgaagctggaacagacatgtcacataatgtggtgagagcaggagccagaggggagggaggtgccacacactttccaacagccagatcttgtgagaattcaagcaatgagagatctacsctccatgatttaaacacccaaacacttcccatgaggcctcacctccaacaatggggagtacagttcttttttatttttttctgtttt

SEQ ID NO: 637474 - DNA, 527 bp, Homo sapiens
aacacccaaacacttcccatgaggcctcacctccaacaatggggagtacagttcttttttatttttttctgttttatttatttattgttttgagacgggggtctcactctgtcacccaggttggtgtgcagtggtgttgactgcaatctctccctcccaggctcaagtctcaagtgctcttcccacctcagcctcttgaatagctggaaccacwggtgtgtgccaccacacccagctaatttgttctgtttttggtagagatggggttttgccatgttgcccaggttggtctcaaactcctgagctcaagcagtccacctaccttagcctcacaaaatattgggattacaggcataagccaccatgcttggcctgggattacatttcaacatgaaatttggaaaggacaaatatccaaatcatgttaataattgtctcaaggggagtttttttttttttctctctctctctctttctctttctctgtctcatgaagtagagcctcagtctcttatccagtaagaatt

SEQ ID NO: 637475 - DNA, 527 bp, Homo sapiens
aacacccaaacacttcccatgaggcctcacctccaacaatggggagtacagttcttttttatttttttctgttttatttatttattgttttgagacgggggtctcactctgtcacccaggttggtgtgcagtggtgttgactgcaatctctccctcccaggctcaagtctcaagtgctcttcccacctcagcctcttgaatagctggaaccactggtgtgtgccaccacacccagctaatttgttctgtttttggtagagatggggttttgccatgttgcccaggttggtctcaaactcctgagctcaagcagtmcacctaccttagcctcacaaaatattgggattacaggcataagccaccatgcttggcctgggattacatttcaacatgaaatttggaaaggacaaatatccaaatcatgttaataattgtctcaaggggagtttttttttttttctctctctctctctttctctttctctgtctcatgaagtagagcctcagtctcttatccagtaagaatt

SEQ ID NO: 637476 - DNA, 461 bp, Homo sapiens
caggcataagccaccatgcttggcctgggattacatttcaacatgaaatttggaaaggacaaatatccaaatcatgttaataattgtctcawggggagtttttttttttttctctctctctctctttctctttctctgtctcatgaagtagagcctcagtctcttatccagtaagaattcttcctcttggcagcacatgttataaaaaattataagaataatgtaaggcatggatgaaaattattgctaatctttcctctcaagtaacagttataataataagttgatattccatacagaagctttggctagaatatagcaaattatgcacagtgagctatatttcctctctatagtccctttgtaacaaatcctaaaaaatgtctgtgatgcttttggaagttttgctctaaaactctttcattgacttcaaagctttgatcatgtttggcagaagaggt

SEQ ID NO: 637477 - DNA, 461 bp, Homo sapiens
caggcataagccaccatgcttggcctgggattacatttcaacatgaaatttggaaaggacaaatatccaaatcatgttaataattgtctcaaggggagtttttttttttttctctctctctctctttctctttctctgtctcatgaagtagagcctyagtctcttatccagtaagaattcttcctcttggcagcacatgttataaaaaattataagaataatgtaaggcatggatgaaaattattgctaatctttcctctcaagtaacagttataataataagttgatattccatacagaagctttggctagaatatagcaaattatgcacagtgagctatatttcctctctatagtccctttgtaacaaatcctaaaaaatgtctgtgatgcttttggaagttttgctctaaaactctttcattgacttcaaagctttgatcatgtttggcagaagaggt

SEQ ID NO: 637478 - DNA, 457 bp, Homo sapiens
aagcattcaagatgttgcttggctgcttctaacaacctaagttcacatgtgtgagcmaagaagttatgtaaaactggaacttatatttaaaaggaaagtagaccataaaagtttgaaaaatttgcaacctgtccataaatagtaggccatatcatagaaaaggaaagcccattttctggggaggaattcaagccagctgcagaaattcacataagtaaagaggagccagatggtcatagccaaaacaatggggaaaaggacatgaaggcatttcaaagaacttcctggcagcccctcctatcacaggccaagaagcctgggagggaagaatggctttgtgggccacacccagggccctgctgcactgcagagcctggagacactgtatcccagctgcatctctccatccctgctgctccagttccagctgtggctcaaagaggtccaggtacatctc

SEQ ID NO: 637479 - DNA, 457 bp, Homo sapiens
aagcattcaagatgttgcttggctgcttctaacaacctaagttcacatgtgtgagccaagaagttatgtaaaactggaacttatatttaaaaggaaagtagaccataaaagtttgaaaaatttgcaacctgtccataaatagtaggccatatcatagaaaaggaaagcccattttctggggaggaattcaagccagctgcagaaattcacataagtaaagaggagccagatggtcatagccaaaacaatggggaaaaggacatgaaggcatttcaaagaacttcctggcagcccctcctatcacaggccaagaagcctgggagggaagaatggctttgtgggccacacccagggccctgctgcactgcagagcstggagacactgtatcccagctgcatctctccatccctgctgctccagttccagctgtggctcaaagaggtccaggtacatctc

SEQ ID NO: 637480 - DNA, 561 bp, Homo sapiens
gtgtcaccacactcagctaatttttgtatttttattagagatgggatttcattacgttggccaggctagtctcgaactcctgacctcatgatccgcctgcctcggcctcccaaagtgctggggttacaggcatgagccactgcacccagctgggatatgacattcttgattggaatttcttttctttaagaatgctgaaaataggcccccagtctcttctggcttgtaaagtttctgctgagatgtccactgttagccaaatggggtttcctttttatgcaatttgacatttttctttagctgcctttaagattcttttctttagcattgatcttggacaatgtggtgactatatgccttagtgatgttcattttgtatagtatctggcaggtgttttctggattttttttgtatctaaatgtctacctctctagcaaggttagggaaattttcttgaattatccccccaaatatgtattccaggtttttaaatttttcttctctctcaggaatgccaataatttgtaggtttgayatttttacataatcccacatttctc

SEQ ID NO: 637481 - DNA, 639 bp, Homo sapiens
aagtaaattaaggtattttcgtgtaagtaggtcttctcatccaatgtttttttctgtattagaggaccttacatccttaacataggcaggaggtacatgtgtctagtggcaaagatgcatattgatccatctgctcagtcgggtgttatttgaataggaaacacaagaggaaagattagctatatctcagattgtctaaattgagggctttcaaattgcagggaaattataaatgtgtgggagtgggcctaagaaatatgaaatttcggatttgtaaattagtttgtaaagattctatgtgaaagaattgaagttaatctgctacatcacataaacaaaattaaggacaaaaatgatatgatcatctcaatagacacagaaaaagcatttgataagattcagcatcccttcatgacaaaaactctcaataaactaggaatagaaggaatatacatcraaacaataagggtcgtgtattataaacccacatagccattatcacattgaatgggaaaagttgaaagcattccctctaaaaactggaacaagacaaggatgcctactttccccactcctgttcaacatagtactggaagtcctagccagagcaatcgggcaagataattaaataaaaaacat

SEQ ID NO: 637482 - DNA, 594 bp, Homo sapiens
ctttttatttataataaccaactgacaaactatggcttttcagacttgggtatttgatagatgttgcctcagaaaggaatgaattaccttgttacttgaagaataaatgacagtatcatcaaactttcaaatagtaattagaattttggaaatttacatctactacatggagctggagaggtttccaatacttaaaaacttttctgacaaaattggtggtgatattaatgaatctcatttttgaaattacataataaaatacatcaacattcacttgagagtaaaccatgatttcaaatgacaaatgcaggatatttcaaaacaattcatggataaagattcattcaaattgcaagattgaccaatgaattctaagtgtaayaaaatgtggagcatttattaacttggttctggatttccacattgcaatagaacttcagaaaactatcatcttgccaagtattggtgtagtatcaaaagagaatatccaaaactacctgaagaagctattaaaatacttttccctctcccaacttagtgtctgtgtgatctcagattttctccgtatattttaactaaacaatatattagcaa

SEQ ID NO: 637483 - DNA, 454 bp, Homo sapiens
gaagggtttatgtagctaccatattttgagtttggccttgaaaaatatgcacaatttagatatgcaaaagggagatgggcaaatataatgtgaataaaatggtagaactatggtagaactgtgtatggtaggagagtgggaagtgtgtacaactaccctcactccaaataactagtgaacaaggaaagcatggttttgccattgttaattctttgaaaatgtcttcccctgaaagttttccttaatatctagaagtacakgagtgctgagttatggtgattaattgaaggtttcagaaacaagtatctgtaatatgttacccaataaggaataacaaatgaccttgccatcatggagttgatataaattttaccttccatcagcttgttagaattataatccagctctcatgtccaccaaatgtttacaaataaattatttttaaagcaagatc

SEQ ID NO: 637484 - DNA, 553 bp, Homo sapiens
gagaatcatagaaactgaaaagcagatatgctttagtaattatggttttaagcccaagcttaatgtggcctagaatccccttggtagggaatctaaatgtttcaatgacaagacagagagctctaaacatggacaacaaaaggcagaatcttatatatactgggaaaattttaagttaagtgccagagacaggcaaagaacaagsaagatcattactagggagtctggaaaggtaatggtcttaagaatgcaataacagaggaaggtgagaaacaggacaatcgttgatgggtacagttatacatgagcaaacatatgccagtggaccaaccaggatattccaggagctcaatttgtactacaaagtcgatagatgctgcgtttaaaatacttttaagtccaacttatttcattctgagtattagtgtcttaccaaacacgtttgtccagattctgatgccatgaatggaattaattgtgtaatgtgtgtgtatatcactcaaaataataaggaaaccaaggcaaaagtgaggatagtgaggactggagtggc

SEQ ID NO: 637485 - DNA, 497 bp, Homo sapiens
gcctgccatcctgatttagatgattttgttaatggtaactcctcatcaaaatctgtcttgggttgatcccagtatcattctgacaaaattattcagaaaggtaactagatcagtgagggtgaggagcataaatctataatgataagtaaaatatatttaaaaaatcactgcatcttatttttattctcatgaggttatatatatatatgctatatactataatatgcatatattactacatatatacatgtatatacatatgtattgtattagtttgttttcacactgctgataaagacatacttgaaactggrcaaaaaaaaaggtttaattggacttacagttccacatggctggggaggcttcaaaatcatggtgggaggcgaaaggcacttcttacatggtggtggcaagagaaaatgtgggagaagcaaaagtggaaacccctgataaacccatcagatcttatgagacttattcactatcagaagaatagc

SEQ ID NO: 637486 - DNA, 618 bp, Homo sapiens
ctgtgcatatagttgtaagtgtagttgtaaaaatgaatatcattcttgcaacttgctctttgttctttattccatttctactcgttctccttgatcctcgtgaacactttataatcatttctcctttctgttcctccccttaaaaaacttgcttattggggattattatacataagaattagaatatccaaatcaatttctcacaatgtggtccctgattgcatgtttcttctgtaataataatygcctctttgtgtttctatccatttcttctccggtagtgctgtcatcttgctttggtgtccacataaaactcttgacaggttatatgaatctaaagaatgtgatgccgaattacccatgaggtaactttttaaattttattttgtgacagggcctctcgctctatcacccaggctgaagtgcagtggcatgaccacagctcagtgcagccttggactcctgggcttaagcgatcctcctgctttagcctcctaagtaggtaggactacaagcacataccaccacacatggctatttttaaaaatatattttttatagagatggagtctcactatgtttcctaggctggttttgaactcccaggctcaagtgatc

SEQ ID NO: 637487 - DNA, 633 bp, Homo sapiens
gggtattagaatgaagatatatccttttgaggaccacctttcatcccacaaaaccttgataccaaaactggacaaagccattattataatgaaaactataaaccaagatccccatgaaattaactaaaaaattccaaagaaaattttataatttgaatataacaatatataaaaagtatattatgattaaaagtaagtaaggtttatcctaggaattcaaggctggttgaaatatgaaaatcaatcaatacaacttgccatatgaatagattttaaaactttatgattgtcttaataaacacagaaaaagtwtctgacaaatctcaacctctattcctgagaaaaccacatagcaaaccagaaatgttagaaaaattcctcaacctgataaagggcacatacaaaaatatcaacactcaacatcaatacttcataatgtaaagtaaatactttccccctaaggtcagaaacaagacaaggttgttcactttccttacttctgttcaaggatatactggaggctcaagtccatgcaataaggtaggaaaaagaaatggaaggaaacaagaatgaaaccaaggaagtaaaactctctttattcacacacaatattatttatctatttagaaacct

SEQ ID NO: 637488 - DNA, 531 bp, Homo sapiens
acttcttacgtggtggtggcaagagaaaatgaggaagaagcaaaaatggaacccccgataagcccactagatctcatgagacttattcactatcacaagaatagcacgggaaagaccagccctcatgattcaattaccgaaaactgggttactcccaaaacacgtcagaattctgggagatacaattcaagttgagatttgggtggggtctcagtcaaaacatattatgtattatatgtgtccatataaaaatatgaaagtaaacatttatgcatctatgcatataaacatacataatagaatagtctttcccgttagtctaaggctagaggtcactgatgtcaacacactttgttctttcagcctctctgctytccctggggcttgggttttgcttttgtcctctcagtatgtgagggctgaccttagcagaaagttggctgtcttaaatatggcaggtcatctatcaactcctccccaggctgtcggagtttcttttaatctcacttgtaactttccagggaggtttac

SEQ ID NO: 637489 - DNA, 551 bp, Homo sapiens
cttgtgaaaatctattgaagcccaagggcttagaagaacaccatacttttatctgttttctttgggaggatatgtacagaaacaacttattttagttccttgaatgtggtcatattgtaccagccagaagggctttttatgagtcttccaatacaagataaagtatattttgttattagaatatcagttccagtagagatacctcttaaaactggccatttaacagtctttgacatttggcttttaaatgcaaatacatatttgaaaaaaatccacagaattaatttttaatgatttaaaacatgcaaaagaatgttttcttttaaactaagagtcatcaaagaaaattttaataatacaatttttattttatatgaaaaatatttatataatttacattggatcttacctttcttctcaatarttttgctgtttgataattgttttgtgtatagtttttagtaacatttgagggttgcatacggtaacagtgttctcttcagctgcatgatcttgtgtgagttatgcaaccattctaaaccacagtttcc

SEQ ID NO: 637490 - DNA, 541 bp, Homo sapiens
aagttcaggttgctttgatactcacatattatgagagggggatgaactcagaattgaaattcttaaagagttgtgttaattggaagaagagaaggactttataaacaattagtttgttaatagttaatattwggaaataggggtcaggttttcaagtcaatttgattatttttctacttgtaagagacatagagataaaaggaacactgctctaatgtccatgaaagttacctttggtaaagaataagaaaaatgttacttgtaataatagacaagtgataagcaaatgcttagggatttctttatttaaaaaagaaaaattatacctagtctcagagatcaacaaacacttcttgaagtggagactgggagttactttagaaaacctgtaaggataagcaggatattgactagtgaagttacaaaaaaagacaagtccaaggagaaaagctaaagggataaaacaggataatgaaggaaaacaaggaatttacaggaatatgcagaagaaacatatgggaaaacaacaaggaaactgaaa

SEQ ID NO: 637491 - DNA, 541 bp, Homo sapiens
aagttcaggttgctttgatactcacatattatgagagggggatgaactcagaattgaaattcttaaagagttgtgttaattggaagaagagaaggactttataaacaattagtttgttaatagttaatatttggaaatagrggtcaggttttcaagtcaatttgattatttttctacttgtaagagacatagagataaaaggaacactgctctaatgtccatgaaagttacctttggtaaagaataagaaaaatgttacttgtaataatagacaagtgataagcaaatgcttagggatttctttatttaaaaaagaaaaattatacctagtctcagagatcaacaaacacttcttgaagtggagactgggagttactttagaaaacctgtaaggataagcaggatattgactagtgaagttacaaaaaaagacaagtccaaggagaaaagctaaagggataaaacaggataatgaaggaaaacaaggaatttacaggaatatgcagaagaaacatatgggaaaacaacaaggaaactgaaa

SEQ ID NO: 637492 - DNA, 602 bp, Homo sapiens
ttagtatttgcacaaagccagtttttactcttcaagaaaatcaaaaatatctgtgttacctaccaacagcaggctaatagatagctatgaaacatatgatattcgagctggcactccatctctgaaacaagttacttaaaactgaagtatgcacatagcctatgttaggccaccgaaaggcacatagcaaaacctggttacagcttgaaatatgttgtctgaatccctggcatcattcattttaaggaaaaagaatgacaagcaaatgaacctaaccaaaataaattgctgtgtgcattcattggagctcacgtgtttgttttttttttttttttcattttatttttttaaaaggaaaacaaagtattctcaccatgtgaaaacaaacccaagtctgaatggaagcatgtcagtctttacttctrtaagagcaagtgtgatttgaaatatagtcaagattttttcattgaacatactaaacagaacagtaaactttggtaatggaagtgtctgtcttatttagatgactgaattttgcatttgaagagacagatttgtgttcttcttttctaaatatcagaaataaaactaagaagtgtaca

SEQ ID NO: 637493 - DNA, 297 bp, Homo sapiens
tgggcatctgtgtatatagttcccaagtctattggccatggttttccctaccaaaggtttcctcctggacttttccttgcttatcttcctgctcaacaccacataatttgatattttatgcatgtatgagaggttgggaygggggagtaatttatccttgatagatggaagtatgtttgaccatctcttcctccactctgaatataggtcctcaaacctcttttagttccagtaaggtggtaaatctcccttacttcactatactttctttagcccactccaaggttatgctacagc

SEQ ID NO: 637494 - DNA, 442 bp, Homo sapiens
aagatctggacttcatttccagattcaccgttaactagastgtgacctactgaaactatcttattttttcagggatatcgaccatataatacctatgatcctttcctactcaacaattctattcatttatcaatactcataaaaagctatagtattttgatttaacttaaagaagttgatatggtttggctatgtccccacccaaatctcatcttgaattatagttcccataatacctatgtgtcatgggaaggacccagtgggaggtaattgaatcatgaggataatttcctccatgctgttctcatgatagtgaggtatcaggagaactgatggttttataagcttccggcatttcccctgcttgcacttctccctcctgccaccatgtgaagaaatacatgtttgcttctccttttgccatgattgtgcatttcctgct

SEQ ID NO: 637495 - DNA, 442 bp, Homo sapiens
aagatctggacttcatttccagattcaccgttaactagagtgtgacctactgaaactatcttattttttcagggatatcgaccatataatacctatgatcctttcctactcaacaattctattcatttatcaatactcataaaaagctatagtattttgatttaacttaaagaagttgatatggtttggctatgtccccacccaaatctcatcttgaattrtagttcccataatacctatgtgtcatgggaaggacccagtgggaggtaattgaatcatgaggataatttcctccatgctgttctcatgatagtgaggtatcaggagaactgatggttttataagcttccggcatttcccctgcttgcacttctccctcctgccaccatgtgaagaaatacatgtttgcttctccttttgccatgattgtgcatttcctgct

SEQ ID NO: 637496 - DNA, 609 bp, Homo sapiens
ctattactgaatggccttctatcactgatagccactgttatctcactctgagattagcaattagtctttgacatcagtagcttttcaaaattacccattcagggccattcccccaaaaaggtttttattttacatcatagaattcaaaggattttgtgtagatttgcacgtctgtcttttttcttcctttctctttctttctttctttctttctttctttctttctttctttctttctttctttcyttccttccttccttctctctctctctctctctttctttctggcactaattacttcctttatctgctctcaagctagttaaagagggtctttttactgcaaatgaaaaatcaactcatttattttagccatgtcatggttagtttggctcaacggttattcagaatcgttaatcaatcaataaattgttgagagattcaacaaatatttattaaacacttccatgtactacagtctacagtgcaccttccaggggaaacaaatcaagatcgaagcacagtttctgccctcaaggatggagggcccaaaacttgcagtgttattattgaatagagaccttcaggaggtagttcttgaaaaatatt

SEQ ID NO: 637497 - DNA, 609 bp, Homo sapiens
ctattactgaatggccttctatcactgatagccactgttatctcactctgagattagcaattagtctttgacatcagtagcttttcaaaattacccattcagggccattcccccaaaaaggtttttattttacatcatagaattcaaaggattttgtgtagatttgcacgtctgtcttttttcttcctttctctttctttctttctttctttctttctttctttctttctttctttctttctttccttccttccttccttctctctctctctctctctttctttctggcactaattacttcctttatctgctctcaagctagttaaagagggtctttttactgcaaatgaaaaatcaactcatttattttagccatgtcatggttagtttggctcaacggttattcagaatcgttaatcaatcaataaattgttgagagattcaacaaatatttattaaacacttccatgtactacagtctacagtgcaccttccaggggaaacaaatcaagatcgaagcacagtttctgccctcaaggatggagggcccaaaacttgcagtgttattattkaatagagaccttcaggaggtagttcttgaaaaatatt

SEQ ID NO: 637498 - DNA, 548 bp, Homo sapiens
acaaatttggttaccggcatgaataaaagatgaactaagcctaatgaaggttaagagtgatgagagtgaccttcagagagtcaaaaatccaaaacattatctgtttaatattgaggtatgttaaatatacatatacatataartatatatgcatatatatgtgcgtatgtgtacacacacatatatatacacacacatatatacacatacacacatatatacacgtatatatgtataaacacatacacacatatatacatatgtgtatatatatgtatatacacatacacacacatatacacacacatatacacacatatatacacatacacacatatatacacacacacatatatatatacagctccctaacagattatcttttctaattattcagacattgcacctattaattccctattgctacttcaacaaattaccaagaacatggtgatttaaaatagcacacagttattctttacagttctgagttctgaaatcagttacactgggccaaaatcaatatgccagcagagctgggctttctc

SEQ ID NO: 637499 - DNA, 548 bp, Homo sapiens
acaaatttggttaccggcatgaataaaagatgaactaagcctaatgaaggttaagagtgatgagagtgaccttcagagagtcaaaaatccaaaacattatctgtttaatattgaggtatgttaaatatacatatacatataagtatatatgcatatatatgtgcgtatgtgtacacacacatatatatacacacacatatatacacatacacacatatatacacgtatatatgtataaacacatacacacatatatacatatgtgtatatatatgtatatacacayacacacacatatacacacacatatacacacatatatacacatacacacatatatacacacacacatatatatatacagctccctaacagattatcttttctaattattcagacattgcacctattaattccctattgctacttcaacaaattaccaagaacatggtgatttaaaatagcacacagttattctttacagttctgagttctgaaatcagttacactgggccaaaatcaatatgccagcagagctgggctttctc

SEQ ID NO: 637500 - DNA, 548 bp, Homo sapiens
acaaatttggttaccggcatgaataaaagatgaactaagcctaatgaaggttaagagtgatgagagtgaccttcagagagtcaaaaatccaaaacattatctgtttaatattgaggtatgttaaatatacatatacatataagtatatatgcatatatatgtgcgtatgtgtacacacacatatatatacacacacatatatacacatacacacatatatacacgtatatatgtataaacacatacacacatatatacatatgtgtatatatatgtatatacacatacacacacatatacacacayatatacacacatatatacacatacacacatatatacacacacacatatatatatacagctccctaacagattatcttttctaattattcagacattgcacctattaattccctattgctacttcaacaaattaccaagaacatggtgatttaaaatagcacacagttattctttacagttctgagttctgaaatcagttacactgggccaaaatcaatatgccagcagagctgggctttctc

SEQ ID NO: 637501 - DNA, 348 bp, Homo sapiens
tggaaacatctatgggatttgacagtaagaatggtacytttgcaaaaccatgttagaagaatgaggtgaaatggaatacagattgtgaatattaatgtgcaaattagaagtgattaagacaaactagcacataaacctataatgtattttattttgaaattgtacgtctttttttttctaatcctttccttccccagccctatcttctctctgtttaaccttataaaaagggcagatataagagcgtaaatgaactgggcactaaaaatagttgagacttgaatatttttctgaaaccaaaggggctgttatagaagaagactaaaaatataggaaaaaggtgggaca

SEQ ID NO: 637502 - DNA, 586 bp, Homo sapiens
gggttagaacttttgtaaaatttattttgttctagttcatccttcttttcatggcaagccttacccaaatataatccaaaaagatatataggttgattgtgagcttgaaggagcccaagatacctctggggaaccttgagctttcctataggcttcatcaaagtcatctgctactctggtccctagattccattcaagaaggcatgatgaccmggtcttcttatttttctgtccagagattctgcagggccatgttctaacctgacaacatatgtaatcaagcattttgacactttgcatgaattgcacagatatgttaatgaaaataagttaaaaccttaagtaattcaaatgagatttcagcttctaattctctagttaattcatggagggtttcttctgtagtaattggttggttactctttggtcaacttcctatccatttattcagtctccattcagtgaagagataggaaaggtgtttattgaacatggttcacttgcaaagcattgaggtgttgctgacaatataatgtcctttgtcttcttgatcttatattctgcaggagatccagacattgtagag

SEQ ID NO: 637503 - DNA, 553 bp, Homo sapiens
ctatcaacaaaataagagtaatgggatggcattagtggggatgtgtgagaatgcttttgagaggacagtcaggcaaggtgtctcagtggaggtgatatttcagctgggacttgaagaaaacagccaggaggagacctgtaggggagcacatttcaggcagaggaaacaacaactgcaaatacttgaaggcaagaagattttgtactgagcatgtatcgaatatgataggatataatcgatgagggagagtggtatgaatcgggcttggggaaacagacagagataacatcatgtagaatttgtaggtcatggtaagaagtagaaaaaattataaacaggactaaaatgtgatctgaaagaagttaaaatttcytctgtctttttttcagacagtgaacagacaaaccaaaaacatatttattgggagtacacagtatactaggaactctataagtgcctttcatgtgatagctcattgaatcctattaccaattctatgaaggagaattttatgaggaaattaaaccacagtctaagcaactccctgagaatt

SEQ ID NO: 637504 - DNA, 559 bp, Homo sapiens
tgcaaagtgtgtggcttgcttattgtgtggcacaatgaggattaagataagacaaaatatgatttctgtccagctgccttgcatttggttggtgagatcaaacaactaaggcctatgaacttccctcaaggatgataagctgcacagcaaagcagaggccaccaaggtcaccatagactgactgcactgtctgtaaagacttgagtaggtctggaagaagtgagagagaagaaagatgaaagactttccagataggggaaaaaaagcaatacgcaaaggcataaaaatatgtattgaggaatgatgggctctactgtgtaaaatgtactccacgttctaaagagacctacacacaagcacacaaccaaactgcytctgttgactcctactcttgcctttccccactccacaccccttaccagtctaagaacccaggtggaaatctgagtttttgataccaagaccaggagttcttttccttctgcctaccacaaagaagggaaggaggactcttgcccttctcctttacaatacaagagaaggaggccccaacataatc

SEQ ID NO: 637505 - DNA, 612 bp, Homo sapiens
tttatcatgtagcaagagattatgtggtttatgctggctaaaaattccagacaccactgcttatctgatactagctatttaagttaaacatatgcttttaggagaaaacaactagcctcttcaatggagtaagccttgaaaattcaatttttggtaacagtagcttccaaagaaaaaataagactgtggtctaaagctatgttactaaaatctctaacaaatctgaagtgaggggtgacctggatctaaatgacaatatgtatactgacaatgaactccaacatattaaatcccattttacttgacatatcagcagcaatttttgacacagttgatcacttttttcctttgaaactggaagcattccttacatggctttcaggattccacattyccccggttattttcctgttgtattggccactgcttctaagtcttctttgttggttcctcttccttttcccaacctgaaaatattgaaagtcccagagatttatttacactcagacatccaggactatgacttaaatgccatctatatgctgttgaatcccaaatttatgtctccagtcctgtttctctctttcttttttttttttttttgaagtccag

SEQ ID NO: 637506 - DNA, 506 bp, Homo sapiens
cgctaatttgaaatgatttattatctttatgatatygaaccttcgaaccaaaaactaatacaagtctacaatttgtcatctgattggttagatttagataaatatccaaactaatatgataagtaaaagtttttcttaatgtatttgttagcataacctaaccagactcaactcactttttgtgacaaagcatgatttgatgtgatctgagttgatttagagatcttacatatcctatttgctgtgaatgttgcaatatttagctacggaaatattactatactggaggacaaaattatgccccaaattcaaagggagtgctgcatgtttcacaatgcatttatttaattgagtgtttaattgcagtttcatataaagcagacaaattataagtatagagcttcatgaattacaacaacatgaactcaccaaaaatcaccatattggttaataatggaagattattaaaggtgcccagaaaactttcttgcatctccttccaaaga

SEQ ID NO: 637507 - DNA, 592 bp, Homo sapiens
agtctgcctcagtttcttcatttgtaaaatagtgatacatattatatcatcacaaggttgctttgaggatttaatggaatattgcaagtataacagctcagaagaggactatactaatacagaatattactgctacaagtgattgaagcccaatttaagttggctgaaagaaataaacaaataaaatatatttttggcttagataaaagagaaggacaggggtggggttgaacttcaggtcttgtgaatctaagaaatcaaattacctgtctcaacttgttccattgagtctcagcttcattctttcctactgcaaatagatctcttctgctttttggaagacatgacacaggttcttttagacttaataccatctttccttgtcaattgtttgtacttggggcatayggtcacatgttgattttatgttgagtctcgctaatgtccaatgctgatgtgagtttgcagagagacgatgcccagttaaatttgaatttcgaatgaacagcagatttgtttgtttgagacaaggcctcactttgttgcccaggctgcagtgcagtggtgcaattatggctcactgcaaagtcaa

SEQ ID NO: 637508 - DNA, 547 bp, Homo sapiens
agatctaagataatgccacattattgttctgtcatgcttaacccacagtcgagctataagaaatgcttatgcaatctttgtcctggttaatgctgagagtgtaggtcaccagtttccccaactcttttttccccttaaatgttagatacctcatttgtccccactatttgtctcttgtctttagcattttcagtctgcagtctggcaygatttcactgcactttttctcctacaggtgacacatattacatattcagagaggtcacattggatttccattctccaagcctgaggtaagaagcagacactctctacctctacccttaggagaagaaattctcagcaaagaaacacctccttccatgaaagtgtcttcaaattctttccatctccaaaccaaatccttctattctctatactcctttgatttttttttttttttttgaaatttgcattgtgttgggaagctcactttggtgcattttatcgtttctatcttggtgctttcaacacaattcctagcttaatatcctgtccatatgaaata

SEQ ID NO: 637509 - DNA, 509 bp, Homo sapiens
cactacctattaaaggtaatggaatttcagaatctagtataagcttctcattcagaaaatgttttacttttgggaaaactaagataagaataaaagacatttagatatagctctcctaatatttcacaataatattgatatttaaaataaataaacaaattgagtaaggctatctctccatggtgtcaaattattcatttggtttagttaaaaaaaaaaaagtctagtcaatttgaacgattgataatgttcaaaaaaaawatccctgtctacctgattgacctgatttctctgtgtcacataaatactgtctggggaaatgatagtgagaatattctatgttttaccttttctttttttttatctgaggacaggtctttcatagatacactgatacagtcaagttgtggggcagcagtgagagagtatgctattctccaaggaagacacataacggatttacccctcatggttttctgtcttcttagacactttccccctgtagttaa

SEQ ID NO: 637510 - DNA, 578 bp, Homo sapiens
tagattgtaaagttcttcaagtcaggggatgtcttctatctctatgttttctccagggctaaatgggcactgagcacataagagtgtcataaatattttattgatattcaaccacaataggtattgtcactgcttgatgagaaatcagactctgaagaaaattcatggtattacatttcagaaataggaatagaatagaaattagaagagaaacaggatccaattttcaagaattttgatgtaatttactagagagttttcagaacattcttctgtaaagatttttaatattagtttgccactagcaattactatagtatcagatataaaactgcatgttataaaatacttacatattcctatrattgtagttttaatgtgaccttttaaatttttatttcatttattaatcatattaatgctaataaactactactaataagtgcaccttcacttttatcttatttaactttcaaattaggtaaatctaatcccgatgcaatccaggaaggtaggctagaagatatatttctttctacttcgtgacagatgggattcgaattcagtttctttacttc

SEQ ID NO: 637511 - DNA, 503 bp, Homo sapiens
tggggtttttgaacttgctcattcatctccctggtttctgccagccagaggtaacagcatcattcctgttaatgtataatttcactcctctatgacattcttcttgttttcccatagtcttccatgaactgcagtcttttttttttttttttgctaatccttccatgtaaaaatcatattatttgtttttgatatataacttgtagctttaaaagtattattycctcaaagaagagaaaaagtacctctgccctcaaaatactttgcacactttctaaaaatttaagaacagctaatttgtagagttaggaaaagggaatcttattattttagaatgtgctgaaccattcaatataatgcagcaaagaaatttcaattttaccctcagactaattgcccagaaagaaaaataaatatacaagaaagttagctatgtacaaagtggccagatgatcaatagataagaaaggcatttgggagacgatgtatttatctattcctat

SEQ ID NO: 637512 - DNA, 528 bp, Homo sapiens
gcaaagtgggagatagtcttgaaaatgtaaatgagtgggaatcatagaagctctatcagaaagtttgtattctgcatccaattgccagttcatacaatttgcacaattcttccataaaatagaaaaaggagaaagtagaggtcatattagttctttcctcctcattttatgttttgctttgaaaatgacctttttaacatgaaatgatggcagtaatggattgagtcctttcctttttttcccttcctctctccatccttctcttctttcctttctttctttattcttttttttttttgagtgtcagtgraaagattgtattgaacagtctcaactcacagacataactgaaatatattttgctattttaagttccaacccattgtgaattggcatgcaaaagtagaaaatttaatattgccaaataacaatatctctatcccttaccaagaaaatattaattgtgtcctttttgttttcagtcttttccagtttacagctattccatatctggtaaatatttaacaa

SEQ ID NO: 637513 - DNA, 366 bp, Homo sapiens
ggcaaaatttctattgggataatggcttaaaagatcagaaaattaaaattatatatttcatgctattatatgatagcctgcatatcttcaaggaagttaagcttcatgatctagaataacagaatatgtagatctgaaaggaaatatagaggatgacacaaacctgatatttggcaaataagagtatagagaatcagccaagaacagtggcatgtttccctttatttgtccaccttcttgtaagcattgtaygtcttatattcccttgtatgccttgccatttcagtattttctaaaacatttaaatttgccttataaataagttaagcccttagttcttcccactagtgacctatatgttgtttt

SEQ ID NO: 637514 - DNA, 366 bp, Homo sapiens
ggcaaaatttctattgggataatggcttaaaagatcagaaaattaaaattatatatttcatgctattatatgatagcctgcatatcttcaaggaagttaagcttcatgatctagaataacagaatatgtagatctgaaaggaaatatagaggatgacacaaacctgatatttggcaaataagagtatagagaatcagccaagaacagtggcatgtttccctttatttgtccaccttcttgtaagcattgtatgtcttatattcccttgtatgccttgccatttcagtattttstaaaacatttaaatttgccttataaataagttaagcccttagttcttcccactagtgacctatatgttgtttt

SEQ ID NO: 637515 - DNA, 543 bp, Homo sapiens
tataaataagttaagcccttagttcttcccactagtgacctatatgttgttttccatgctttctatccatgtaaattcagctcatagcaaggtaatcattgtcgaactcggctaatgaggaaaacatattttgaaaacttctgaagcagtactgcttcaaggcctcatagtgactcaggaaatggtcctagatcttgggggtcttgcatttgcctgtgctgaggttagttgtgaggtccctttctcatgttttgcaacaaacaatagtaacatgcccaagtttgcaaataatkacttttaacaaaataaaataaaaaactataaattaaactgcataatatgattacttgagtaatttgattttttttgagtcttttgattttttttttcttctgataagatagaaagagataaaatttgggctgtagagcccagaatttcacagggaagtgtgatttcttcatgtgctttgggtgaatgaaagtgtgaccaccacaagagtaaacacatcttgtcctccttttcagtactacaattcacaac

SEQ ID NO: 637516 - DNA, 572 bp, Homo sapiens
tataggtatagacatacatacatgcatatatggttttgacaaaatataattctagattcaaagataattatctacacaaacgaagagatcgtctcatcttgtcattgatatatggtagctagaagaaatctaacgtaatctcagtgggaaacattagaaataacattaaaaagtcaggaagaagataagtatgctcgttgcacctctatcttcctatgcatttcagtcaatgtaataataaaaggaaaaagttaaaatgtgtaaatattagaaatgaagagcttaaactgccatttctccagcactatcactatatcaagataaattggtgtagtttgaagaaataaaagggctttgcaatatggtggactacaaaatatgtaaagattgagacttttttaatatcaataatttgaaaatgccaagagaaattccaatcaagayaaatgaatgctaacaaataaatctaaacttatatatgtgcaagatatataagtaaagctgtacaaaattttttaaaacttttaaagaacatgaaaatatggatagatatacaaattgaatgaacactc

SEQ ID NO: 637517 - DNA, 591 bp, Homo sapiens
ggcgcttggggctgcctcttactttcttccaaagtgacagttttacctgatagttagcaagtgrgaggttaaacacctccctaccttctgagaggaaacagaaaagaagcagagtagagctcaggataaggttccggggccagaggctttgcctctgtccccacagcaatgagcagttactcttgtctctaagcctcagagacatttcatctgtgaaacagagagaataatagtattatgttctaggtgggtttcacaattatttttggtaacagatacaggggacgagcacagtatccgccacatagtaactggtcacaaaagtaggcaaagataatgatgataaaacatgggccattactctcacctaccaactccccaaatgtctactcccaatctgaacctaaagtacagatggagaattctagtataaaaactaaaactcaactcatgggcccttctgctctgcctgctggggcctctgcctgtacctggagaaatctgcagcagaagctgcacctctgtagtgatgatagagatctcagtgtgcacgcagttatggggcgatcttgctgtccctgaccctgggac

SEQ ID NO: 637518 - DNA, 611 bp, Homo sapiens
attctgtttgagtatgcaacttagcataggtcaagctgaatttttcctcttcattgctccaaatgttgatattttcagaatagattgggtagcatatacatgagaataaatttcttaagcatataaaggtcaatgtcatgagaacaaaaattgtctaccccacatactgccgggactgcctggacactgaggacaaagccacccctttctgtttacattactgtgactttgctattttcacagcttcattgtcccttctttacctttgmaggactgttcctcccacacaaatggtatgattactcataacaggaacttccttaaaatccactaactcttcaatgtaccgcatcatttggagtcctgagatgctttcagtcttttacctcaaaatcctcaccttgtgattcccacaaattcatggctattgtattgggattcttatccaatcttcaccaatttcctgtggcgaaaggcctgctttaagccaaattttcacctctcaacaaattctgaacttattttcctatttctaacatccaaagctttgcggagttggtgccttcctttactgcagtaaataatgaattcagccttgtcttataaacagg

SEQ ID NO: 637519 - DNA, 631 bp, Homo sapiens
tcttataaacaggtcatgttggtcctttttgggtgttggtccatatttagtatagaggttcactttttcagatgtccagagagcccctcagagctggctccctgactgcctcccagcctcgtgtgcctggcctgctggcctccttgtgctagcaatgtgagccactcagcttccctgggacaccatgytcttcaatatctccacatctctgcccatgctgtttcctctgcatacccaggagtcttcatttatgcttaagttccagaaaaagcatcatttcccttatgagaacttcgctgatcgactccaccctcagacagaggtaatcatttccttttctttcccactgctattttgtgcccatgtatttgctatcagatgaatacaaaactcactctcacactgtattgtaattacacattttcctgtccttgaagtacttgagatctgagtgtgtgtgtgtgtgtgtgtgtgtgtgtgttttaatatctgtgtccttaatagcaggtacaggaaggccacttggataagtgatttaagagaaagcaaaaacaaaagaaataaatgcataaatggagaaaccaagagaagtagaggcaaacaaaaggaaaagagggaatatgatttgcct

SEQ ID NO: 637520 - DNA, 265 bp, Homo sapiens
gcgctgctctccagcttctgggggcagaggagcctctctttgctaggctgcatctgatcctctcagtcatgcagtgctgccagtctctcagtgtgtcttagtccatttgtgctgttatagcaaaatacctgagactgaataatttttaacaaatagaaatttattttctcacagctctggaggctaggacgtccaaagatcaaggaaccactaggttcagctgtctgatgsggatgatctgtgcttccaagatgtcgccttgttg

SEQ ID NO: 637521 - DNA, 385 bp, Homo sapiens
gaattcaccagaaatgcccatgggcatatcaccattgagagggtagaggcattgtctcctgtggagaaccacaccaggaacatgtaagttcccacacaagctgatttgtgaagttctcctcctctttctctttctttctcaattaaattttataaaccaagcttggaaaaatgtttyaagctaagtagcagtaagtgtttttgaatgatgtcattgatgattggggtctctgaaatctaggactctagttctactcccagtatcccagaagaggagtgagcagcacacagtgcacggtgggctctgcgggctgaggctggcgagtcccggggccgtgtctcacgacacgcagacatgcagcatggacggcgttctgagcagatgc

SEQ ID NO: 637522 - DNA, 558 bp, Homo sapiens
tcttccagatctttctgctctgaaatcctcagcttgtggacttggtcccaggatggttcttgcagagcaaggcaacacgtgtagatggaagcatcaggggcatatgagtagagggtctctgcttatgccccctttttgggagcaagrtgaagccccacccaacttataatagccaggatggtctcactgcctaggcctaagtcaatcatgatgactagaatgaggtgacaatggttgatttttcttcagccaaaaaccacctgcaccaccccccaaccttaaaagacagggctgctggaaggtgaacaagattcgattctgtttcagccagaaagatgacaggaagtatggctgaaaattgggcaggtgacttattctatgtgccaagaccctgctcagaccataagtatgagctgctcttctccttttcagacttcccttgatatgttgctgccaccttaacccatcccagactcaagagattctacttcaagaatctctcctttctcttttagctctacaatcttctgataccccctgtgataagaaagattcagg

SEQ ID NO: 637523 - DNA, 558 bp, Homo sapiens
tcttccagatctttctgctctgaaatcctcagcttgtggacttggtcccaggatggttcttgcagagcaaggcaacacgtgtagatggaagcatcaggggcatatgagtagagggtctctgcttatgccccctttttgggagcaagatgaagccccacccaacttataatagccaggatggtctcactgcctaggcctaagtcaatcatgatgactagaatgaggtgacaatggttgatttttcttcagccaaaaaccacctgcaccaccccccaaccttaaaagacagggctgctggaaggtgaacaagattcgattctgtttcagccagaaagaygacaggaagtatggctgaaaattgggcaggtgacttattctatgtgccaagaccctgctcagaccataagtatgagctgctcttctccttttcagacttcccttgatatgttgctgccaccttaacccatcccagactcaagagattctacttcaagaatctctcctttctcttttagctctacaatcttctgataccccctgtgataagaaagattcagg

SEQ ID NO: 637524 - DNA, 619 bp, Homo sapiens
atccattttgagttctcaagaatttaaagttttgttgccagaaaaatagtgatcaactattctctataaggtaaatacctttttttcaaaaaatattccartttaccagatacatattctttatataatcatttttgttctccaggaatcagactgtgactttatccttgctcacatttttttttcatttttttctgttctgtttttggtaacagtgttatttatctcatttttcctcatcgtgacatatttattttaatgttaatatacacatatgcatattttaaaacataagaagtaaaaataactttattatgaaactattagaagttaattgtagaaaaactagaaaataataaagaaaaaatttaaagtcatttaagtccaaagataatcactgttgatactttatattgattcaaaaatataggtctgtgaagatttcagtattacaaagatggactaatgctgtatggaatgctttgcaatttgcttttttactaactaaatcttgaaaaccttttgtgatgtacttctcatgagcaggatgtacataatttattttattctatcctttaatattggaaattcacttgttactaattttcagttttactaa

SEQ ID NO: 637525 - DNA, 327 bp, Homo sapiens
aactcaaaggttctgattgaattggactagagtggggcccaggcattgctatttattttaaaaagcacctgatgtgggttgactgtgctgccaggggagagcactaaggccttatgttccagctttcacttagtaactgtgtgtttcggggacatcacttaacctgtctgaatatcatctgaaaartaagaacaatagttccccattataactcacgagtcagatgtgtttcaaaaaggcaatgaattattgtttgccaacacactttaaaaattgaaaagtgatcatataaaatattatcattaactgcaaaaagtaccagtataa

SEQ ID NO: 637526 - DNA, 515 bp, Homo sapiens
ttgcagcccctgagattcccgccccaccctctgccggctcctgattcacgtgggagcttttggggatgcacttccctgctgccattccacacagtacctgccaggatccagttccatgagctgtccctcttgatggttcccagaacaggaatgtggagcatggggacctcactaaggacatctgcaaagtagatgagaaattgatcctcatcccaagccctggacttcctgcatgccctcatgcaggggccctgctttgattcccatagctctgccttcattgcaggtgcctggagcgcctctgcagcatccaagcacttactctgcccacactgagtctgctgctgtgggagagaamcccgctgctctgtgggccacacccacagggaaaggcaggacctgttcccaagggagggacaaggcgtgttgcctgtcagctgctgggcagcgctcatccgtctctctcatgacacaggtgcagttccctgggcccttccaactccttcctaagggct

SEQ ID NO: 637527 - DNA, 515 bp, Homo sapiens
ttgcagcccctgagattcccgccccaccctctgccggctcctgattcacgtgggagcttttggggatgcacttccctgctgccattccacacagtacctgccaggatccagttccatgagctgtccctcttgatggttcccagaacaggaatgtggagcatggggacctcactaaggacatctgcaaagtagatgagaaattgatcctcatcccaagccctggacttcctgcatgccctcatgcaggggccctgctttgattcccatagctctgccttcattgcaggtgcctggagcgcctctgcagcatccaagcacttactctgcccacactgagtctgctgctgtgggagagaaccccgctgctctgtgggccacacccacagggaaaggcaggacctgttcccaagggagggacaaggcrtgttgcctgtcagctgctgggcagcgctcatccgtctctctcatgacacaggtgcagttccctgggcccttccaactccttcctaagggct

SEQ ID NO: 637528 - DNA, 625 bp, Homo sapiens
ccttcggaccccatccgactgtgtggcacagcttctttatatcagctcactcctctgggcctgagtaaaccatgtgcctgtagaaaaaaaaaaaaatgagaagggaggcaaaaagctcatcttcttgtagctgtcayggatgtaaaaatcctggcagcaaagtgggacttgtggtaataattgtgacacaatagattttgacaagagagactgttgatatgttcatttgcatactgatgtgtagtactctttcttcacgttatacactctgggcccaacttgcaggcccaaccattcctccagaacaaggcattgctcaatcacttaagtccaaaaaactctacataagaaaagtggcattttttgtttttgaaagaaaaagttataaaagagaaaggatgtaaagataaatataaagcaggattatgtgtggctgtatatttcctatgggaaagtatgggcaatctttcaagctcatatacaaatgacattgactgaaggagattgaaatcccataagaaaatatgtagctgactatttgagaactatgaaaactatacacctaaccattgacgcgagagcctagaatccattgagaattgatttactcctaaaattctagcaa

SEQ ID NO: 637529 - DNA, 625 bp, Homo sapiens
ccttcggaccccatccgactgtgtggcacagcttctttatatcagctcactcctctgggcctgagtaaaccatgtgcctgtagaaaaaaaaaaaaatgagaagggaggcaaaaagctcatcttcttgtagctgtcacggatgtaaaaatcctggcagcaaagtgggacttgtggtaataattgtgacacaatagattttgacaagagagactgttgatatgttcatttgcatactgatgtgtagtactctttcttcacgttatacactctgggcccaacttgcaggcccaaccattcctccagaacaaggcattgctcaatcacttaagtccaaaaaactctacataagaaaagtggcattttttgtttttgaaagaaaaagttataaaagagaaaggatgtaaagataaatataaagcaggattatgtgtggctgtatatttcctatkggaaagtatgggcaatctttcaagctcatatacaaatgacattgactgaaggagattgaaatcccataagaaaatatgtagctgactatttgagaactatgaaaactatacacctaaccattgacgcgagagcctagaatccattgagaattgatttactcctaaaattctagcaa

SEQ ID NO: 637530 - DNA, 580 bp, Homo sapiens
tattgctgtgcaatgtcaagtggtacagccactctggaaaggagttcgacagtttcttaagaaactaaacgtatgcttattatatttcctagcaatcgtactcctgggcggttatctcagagaaaagatatcttatgtctacacaaaaatctgcaatggttgtttatagcaactttgtttgcaacagctaaaaacactaaaatttccgacaataggtgcatgattaaacaaactatggtacgtccataccagagaataatacaacaataaggaaaaataaactactgacatgtgcaacaacttgcatggatggcaaaggaattagggcgagtaaaacaagccaatctcagaaggtcacatacgataagatttatagagcattctcgaaatgatcaaattaaagaggtggagaagagatcagtaattttcagggttgagagttggtgggggctggatggcttgacttyaaaggggaagcacaaaggatgtctttgtgatgatggagcagttacgaatcttgtctgcggtggtggttacagaaatctacacataccaccaatgacacaaaactatttgcaca

SEQ ID NO: 637531 - DNA, 527 bp, Homo sapiens
aagcaaccaataatgacattaataacaacaagcaatttgctgtaatgaaacattttcatatctggacttttttcgggagaggagggggcatcagttatgtccattagaatgggaatgttggaacatcttggagtatctgttattaggctaacagaatactttcaaagactgaatttcrggaggaaattttttatgctatttttgtatttgccatctggaatgacactgcaagctggcaaatacaaaaacaatgtgagatatttccatcacatagcatttgttatggattcatcatggaatgtgagtctctgaacatcactccaataactgtaattatcccaacttgaccttcttgaccggttcaaacaacttcagtgctgttaatgtttgtgttcctgtggaggaaggagatgcctgttcccaattccaaggaagctagctgagatcctgactcaaagcttcaagcacatgcttcccccatggacacagctagctatcatgcctatttatgggcagcttatttccaa

SEQ ID NO: 637532 - DNA, 527 bp, Homo sapiens
aagcaaccaataatgacattaataacaacaagcaatttgctgtaatgaaacattttcatatctggacttttttcgggagaggagggggcatcagttatgtccattagaatgggaatgttggaacatcttggagtatctgttattaggctaacagaatactttcaaagactgaatttcgggaggaaattttttatgctatttttgtatttgccatctggaatgacactgcaagctggcaaatacaaaaacaatgtgagatatttccatcacatagcatttgttatggattcatcatggaatgtgagtctctgaacatcactccaataactgtaattatcccaacttgaccttcttgaccggttcaaacaacttcagtgctgtkaatgtttgtgttcctgtggaggaaggagatgcctgttcccaattccaaggaagctagctgagatcctgactcaaagcttcaagcacatgcttcccccatggacacagctagctatcatgcctatttatgggcagcttatttccaa

SEQ ID NO: 637533 - DNA, 618 bp, Homo sapiens
ggaaaagagcagtttaaggggaggatcatgattctagggaggaaagagcaagttataggtataaacaggctgacaggacttgaaagaggctggactccagacactcggatttctggggaagggggttccaatcacagcaaacgtcatcaaatgcaaaggccctgaagaacttggcagacaaattccagaaatagcaaggaagccagaggtagatgaatgcagagggagagaggccagagaggaaagggatgargactgattgtgcagggctgtagggccttcatacagatttggctcatgctttttaagaagacctggcttccgtgtagagtattaacagattgaaggggaagagagatgagataggtggtgaaggtgagaagctgttagctactggtcgtgtgttaaacagagagcgagctttgctaatgtgctggctgtggagtgtgagggaagtagagtcaagagcagccccagggtgtagggagaggaggtggagttgagtgttttcagtggagatttggacacgtcacatttgagacatcttttagactggcaagtggagatttgagttgttcaatggaggtctgaagttcaggagagaggtccaggcaggag

SEQ ID NO: 637534 - DNA, 618 bp, Homo sapiens
ggaaaagagcagtttaaggggaggatcatgattctagggaggaaagagcaagttataggtataaacaggctgacaggacttgaaagaggctggactccagacactcggatttctggggaagggggttccaatcacagcaaacgtcatcaaatgcaaaggccctgaagaacttggcagacaaattccagaaatagcaaggaagccagaggtagatgaatgcagagggagagaggccagagaggaaagggatgaagactgattgtgcagggctgtagggccttcatacagatttggctcatgctttttaagaagacctggcttccgtgtagagtattaacagattgaaggggaagagagatgagataggtggtgaaggtgagaagctgttagctactggtcgtgtgttaaacagagagcgagctttgctaatgtgytggctgtggagtgtgagggaagtagagtcaagagcagccccagggtgtagggagaggaggtggagttgagtgttttcagtggagatttggacacgtcacatttgagacatcttttagactggcaagtggagatttgagttgttcaatggaggtctgaagttcaggagagaggtccaggcaggag

SEQ ID NO: 637535 - DNA, 567 bp, Homo sapiens
gtggccctgaggcctggcactgggaaatagatcaattctgactcctgtgaaatacttgagaagcactgaggcagcaatttcctagaaagagaataaaataacaagaaaaagacagagagagaagggatacctgagtaaccacacttttatagatctttaaggaaaccacacttcatatatctataagcaaccacatatttatagatctgtttttcttttctttttaatgaaagtagaatagatttgaagcacatgtggagaacaaatacaaagaaaaaaccctaatttaaaaaatgacccaagatgtggatggcttgggtgagtagatcttggttcactactctggtgaaccaagagtggttagagattcaggatgggatggatgaggacgaggtctatgtgggacaygggaggaaggtgggaccatcctggggagtcaccagtcccacggttgcggatggatggttggagctaagacttctgcctgacttcagcccgacttcagcccttcttcctacctgtgaggatagagattggccctcatcagtaaattagcttattaagatt

SEQ ID NO: 637536 - DNA, 567 bp, Homo sapiens
gtggccctgaggcctggcactgggaaatagatcaattctgactcctgtgaaatacttgagaagcactgaggcagcaatttcctagaaagagaataaaataacaagaaaaagacagagagagaagggatacctgagtaaccacacttttatagatctttaaggaaaccacacttcatatatctataagcaaccacatatttatagatctgtttttcttttctttttaatgaaagtagaatagatttgaagcacatgtggagaacaaatacaaagaaaaaaccctaatttaaaaaatgacccaagatgtggatggcttgggtgagtagatcttggttcactactctggtgaaccaagagtggttagagattcaggatgggatggatgaggacgaggtctatgtgggacacgggaggaagstgggaccatcctggggagtcaccagtcccacggttgcggatggatggttggagctaagacttctgcctgacttcagcccgacttcagcccttcttcctacctgtgaggatagagattggccctcatcagtaaattagcttattaagatt

SEQ ID NO: 637537 - DNA, 567 bp, Homo sapiens
gtggccctgaggcctggcactgggaaatagatcaattctgactcctgtgaaatacttgagaagcactgaggcagcaatttcctagaaagagaataaaataacaagaaaaagacagagagagaagggatacctgagtaaccacacttttatagatctttaaggaaaccacacttcatatatctataagcaaccacatatttatagatctgtttttcttttctttttaatgaaagtagaatagatttgaagcacatgtggagaacaaatacaaagaaaaaaccctaatttaaaaaatgacccaagatgtggatggcttgggtgagtagatcttggttcactactctggtgaaccaagagtggttagagattcaggatgggatggatgaggacgaggtctatgtgggacacgggaggaaggtgggaccatcctggggagtcaccagtcccacggttgyggatggatggttggagctaagacttctgcctgacttcagcccgacttcagcccttcttcctacctgtgaggatagagattggccctcatcagtaaattagcttattaagatt

SEQ ID NO: 637538 - DNA, 576 bp, Homo sapiens
cttttgattagtgactagtatgagaagcaagaaagataaattgcaatgtaataagcaagtatttgctaagccaatgagtgaattttcatgaaaataagtgaaaataggccaggtgcggtggctcatgcctgtaatctctgcactttgggaggccgaggtgggtggatcaagaggtcaggagatcgagaccatcttggctaacacactgaaaccccatctctactaaaaatacaaaaaattagctgggcgcggtggcgggcacctgtagtcccagctacttgggaggcagaggcaggagaatggcatgaacctrggaggcggagcttgcagtgagccgagattgcaccactgcactccagcctgggcaacagagcaagactccgtctcagaaaaaaaaagaaaataagtgaaaatacaaactttaaatgtcacattgaaaaggaagaataaaaacctattgaaatctagaatcaacttatttatcagtctatatcccttctgaaaaagtagatacacaataaaatgtgccctatattactttcttgatgaagaaattgcctgtatgtcttctgtgag

SEQ ID NO: 637539 - DNA, 576 bp, Homo sapiens
cttttgattagtgactagtatgagaagcaagaaagataaattgcaatgtaataagcaagtatttgctaagccaatgagtgaattttcatgaaaataagtgaaaataggccaggtgcggtggctcatgcctgtaatctctgcactttgggaggccgaggtgggtggatcaagaggtcaggagatcgagaccatcttggctaacacactgaaaccccatctctactaaaaatacaaaaaattagctgggcgcggtggcgggcacctgtagtcccagctacttgggaggcagaggcaggagaatggcatgaacctgggaggcggagcttgcagtgagccgagattgcaccactgcactccagcctgggcaacagagcaagactccgtctcagaaaaaaaaagaaaataagtgaaaatacaaactttaaatgycacattgaaaaggaagaataaaaacctattgaaatctagaatcaacttatttatcagtctatatcccttctgaaaaagtagatacacaataaaatgtgccctatattactttcttgatgaagaaattgcctgtatgtcttctgtgag

SEQ ID NO: 637540 - DNA, 663 bp, Homo sapiens
cttacttcaatcatggaattaacagtgtgtagtgacaattaagcttgctcattagaattgccttccccatggaaccaaaatcatcaatgctgatactattcagtgaacactttattcactacacccaatgtctatttgctgctggccaaatattttgttagtttgtgtcttccatgagccagggagctcggcaaacgcaagggtccagtcttctttggccaggtgtccaccatgtgctggcctgaagcctgcattcaataactaaatttttaataatatgaattaacaaatgaatgaaaatgacttgaacaggtgaggatatatacttgaataaaaattttgaattaagagaagaaaatttaacagaatgaaatgtctatggctactaatttgagggtagtgatttgcaaagagaagtgatcaaastcatagcacaaccaaatgaatggagtggaagaagtatcagctggaagtgctctgcagaaattggcctggatcatcaaaactggtttgtattgtgcttggaagacaaatactactatttctcatcagtgtgagacaggctgccctgtcaagcttgtgcttatttccttactgactggagcagcttgaagaagttacaagaggaaccacaaaacccaaaaactctatatccaccatatt

SEQ ID NO: 637541 - DNA, 575 bp, Homo sapiens
ctccacagtttctgcagaaatagtccccatccttccctctgcacacttgcagtaacaggcagcttgtagctgtcaaggtagcctctccatgagacagctctaactcacctcaagaacatccttataatgagcagaaagctgccgcaccaaaacttgctctcggctcatcagtttgaagcaacacaaattaaatatcttaacttttcctatgaacaggacaccaactatttggaaagatgtgtcatgcgccaccactgagcagagggcgctaagcaaattttcccatctgttccttccatcagtcccctaagaagtggtttccttctcctcaccctcgcagaagtagtgactcatcatgcagacaaggaygccttccacagggacccaggctacgctgcaccctccagatgtgggctgcactgtatgagtgcactggacaaacagtggctgtgcttgcagtcttcactataattctattaatgtggcttcaatctgcactcacttgagtgaatatattatgaactaagacaagtgaattgccactaaattaaggcaaatttttggagggttttcct

SEQ ID NO: 637542 - DNA, 575 bp, Homo sapiens
ctccacagtttctgcagaaatagtccccatccttccctctgcacacttgcagtaacaggcagcttgtagctgtcaaggtagcctctccatgagacagctctaactcacctcaagaacatccttataatgagcagaaagctgccgcaccaaaacttgctctcggctcatcagtttgaagcaacacaaattaaatatcttaacttttcctatgaacaggacaccaactatttggaaagatgtgtcatgcgccaccactgagcagagggcgctaagcaaattttcccatctgttccttccatcagtcccctaagaagtggtttccttctcctcaccctcgcagaagtagtgactcatcatgcagacaaggacgccttccacagggacccaggctasgctgcaccctccagatgtgggctgcactgtatgagtgcactggacaaacagtggctgtgcttgcagtcttcactataattctattaatgtggcttcaatctgcactcacttgagtgaatatattatgaactaagacaagtgaattgccactaaattaaggcaaatttttggagggttttcct

SEQ ID NO: 637543 - DNA, 548 bp, Homo sapiens
ctgaaccatcagtgtgaacatttcagttctacccctggctcctaaaagctgtgctcagaatatgaatagataaaatccctagaattctcacagtatcatagtttggagaaggtgtctctggataaaaagagaaagagaacacccyacaggagaaaagtctggacctgcaactgtgggcacaaccaggaaggcaataacaactgcccatcttccaatgcaaggggcttgaagttcacttcttggggctgagaagatgctccaggttgggcgagagaggcttctttacaagctattacatgggattcattgttgagttgactttttctgcctctaggtatagggcttatattccacaggtgccaggattctgtctgatatctgcaccactatattcccaagaccaaaataaaatacaataaatcatatattaatggcaaaaattaattagttattgaattttttaaaaacatcatgtaaaaccaggagaagaacacagttgtggggggcggagaaccttttcaagaaacatcaacaaatacctttatgtg

SEQ ID NO: 637544 - DNA, 511 bp, Homo sapiens
ctggacctgcaactgtgggcacaaccaggaaggcaataacaactgcccatcttccaatgcaaggggcttgaagttcacttcttggggctgagaagatgctccaggttgggcgagagaggcttctttacaagctattacatgggattcattgttgagttgactttttctgcctctaggtatagggcttatattccacaggtgccaggattctgtctgayatctgcaccactatattcccaagaccaaaataaaatacaataaatcatatattaatggcaaaaattaattagttattgaattttttaaaaacatcatgtaaaaccaggagaagaacacagttgtggggggcggagaaccttttcaagaaacatcaacaaatacctttatgtgcttaagaatttaataaaaatatgaactcaataaaaaagaacccaaaaataagtcgataaaaggaaagacatggaggaaggagccaacgtatatacactaaggtcagttttaactgttttcc

SEQ ID NO: 637545 - DNA, 517 bp, Homo sapiens
ttgatgtgcctgtaaccagggatttccagcaatacggaagccacaatgcgaatggaccacaaccctgccaacaccttgatttcagacctcttctctgcagaacgacgagagaatagacttctgttgttttcagccaccaactttgtggtaattggttacgatagccctagtamcctagtacagtgaagaacaagaatacaggactatttctgcttgtgagaggaaagcaagtaactggcccatcctttctgagaggtctcctgttcactgctgtgcttcggtgtgtaaaaaaaaaaaaaaatctccccacgaagcagcagacatgtgtgtcttgggttgtatgatccagagatgtctccaatgtcctacactttatttatctctggtgaccttcaggcagtgttggccacttgaagacactagagaagtctgattacctttttgaatcagagcaattaactagaaaatgacttcagattaggttttcgtgagatgtaaagagtgtcagggggctagc

SEQ ID NO: 637546 - DNA, 581 bp, Homo sapiens
attacctttttgaatcagagcaattaactagaaaatgacttcagattaggtttycgtgagatgtaaagagtgtcagggggctagcactttttcaagaacactgggaactataggcaagattgaattctccacaattacaaatgactaatattggaaataaaaacgagactaagtaagttttgtatgattgaaattatgcaaagcatattttctgatcacaattgagttgaaccagaaatcaataacaaaaagatatgtgaaaaaatccctaagtgtttgcaaattaaataatacatgtcaggatacattatggtccaaagaagaaatcataaagtaaactatcaaatactttaaataaattgaataaaagtcagtgttccaaatatgtggatgcagtgagaatggtgctctgaggaaaatctgtggtattcagtgcttacattttaaaagaagtaacatctcaagtcaattatgtaagtttccacgttaaaaaagtcaaaaaagagcaaactaatcctttcgtagggaaataaagataagaacagaaataaataaatcgacactgccaaggtaaaagtcag

SEQ ID NO: 637547 - DNA, 581 bp, Homo sapiens
attacctttttgaatcagagcaattaactagaaaatgacttcagattaggttttcgtgagatgtaaagagtgtcagggggctagcactttttcaagaacactgggaactataggcaagattgaattctccacaattacaaatgactaatattggaaataaaaacgagactaagtaagttttgtatgattgaaattatgcaaagcatattttctgatcacaattgagttgaaccagaaatcaataacaaaaagatatgtgaaaaaatccctaagtgtttgcaaattaaataatacatgtcaggatacattatggtccaaagaagaaatcataaagtaaactatcaaatactttaaataaattgaataaaagtcagtgttccaaatatgtggatgcagtgagaatggtgctctgaggaaaatctgtggtattcagtgcttacattttaaaagaagtaacatctcaagtcaattatgtaagtttccacgttaaaaaagtcaaaaaagagcaaaytaatcctttcgtagggaaataaagataagaacagaaataaataaatcgacactgccaaggtaaaagtcag

SEQ ID NO: 637548 - DNA, 412 bp, Homo sapiens
agagacaaccaaaggagaacacttaaaggtgaaatgcaacaggcagtttggttagggacccagggactggaggagcaatgtaggatcagggcgtcttagaacyttcccatccaaaagaagacgcgacccaagcccagtatttcccaacctcagcttagcaatagaaggccactcagagaggaaccttcttcttccaaatcaaatagaagtctttaagagaatgaaacaacaaactacagattggtagaaaacaatatatccctcaaaggatctgtatgtagaatctataaagaagtctcaaaactcaacagtccaaaacccccacaaataatctagttagaaaatgggcaaaacatgtgaagagacatttattgaagagggtacacagatggcaaataagcacataaaaaga

SEQ ID NO: 637549 - DNA, 410 bp, Homo sapiens
tgacactagctaattagtaatttctccagtttgttacattccattttttaaagcagaaattatatttgttgttyatctattttattaaaatgtatcaaacggttaaagttttgtctaagctacaacaaacagtaagttcacattaattattttaaaatgtagtgtatttgatttataatttacaaaatagaatcttccttttagtgtatggttttattagctgatttaatgcagccatataaccactactacaattaaaatatggtgcagaacgtttccttcactcccaaaagtctccttgtgcccctctgtggtgaacccttaccctggccccaccccctgacatgcactggtttgtttctataatttatctttttcagaatgtcatagaattaccatatggtatgtag

SEQ ID NO: 637550 - DNA, 410 bp, Homo sapiens
tgacactagctaattagtaatttctccagtttgttacattccattttttaaagcagaaattatatttgttgttcatctattttattaaaatgtatcaaacggttaaagttttgtctaagctacaacaaacagtaagttcacattaattattwtaaaatgtagtgtatttgatttataatttacaaaatagaatcttccttttagtgtatggttttattagctgatttaatgcagccatataaccactactacaattaaaatatggtgcagaacgtttccttcactcccaaaagtctccttgtgcccctctgtggtgaacccttaccctggccccaccccctgacatgcactggtttgtttctataatttatctttttcagaatgtcatagaattaccatatggtatgtag

SEQ ID NO: 637551 - DNA, 623 bp, Homo sapiens
tgtttcagtagttggttcctatttacaccgaggaatattttcttctacggatgctccacggtttgtttatccattcgccagttgaagaacatttggattggctccagatggagcrattgtgaataattctactctgaacatgtgtgcactggtatttgtaggaacataacttgcttttctctaggataatacctaggaggggattgctgggtcaaaaggtaagtgtacggttaacttcttgagaaactgtcaagctgttttcaggtggccatatcagtaatgttcccaccagcaacgaatgagaatttcaggagttcttgtcctcaccagcactccagcacttggcatttcaggtttctttttgaaatactctcatgagtgtgaagtggaatctcgttgtggttttacttcgctttctctgtttactaatggtgttagacatcatttcatgaatttattttccattcatatgtcttctttggtgaattatccattttttgttatgtatgctttcccttattattaaacttgggaattatttacgtatgctagacacaagttctttatcacatatgtattttgcaaatattcctctcagcctgtgactacagttttcattttgc

SEQ ID NO: 637552 - DNA, 607 bp, Homo sapiens
aatgacatcaattgattttcaaatgttgaaacaatcttacatttctagggtagactcctattggtcatgacacattctctttctatttattgctggattaagtgtgctaaattgttctttggaggatttttgtccatatgctcataagggatgttggactctagtgttcttgtgatctttgtctactttgggtatcggaataatttcggcctcataagatgagttgaaaagtatttcctatgcaaatcaaaaccacagtgagataccatctcagaccagtcagaatggccattattaaaaagtcaaaaataggycaggcgtggtggctcacacctgtaatcccagcactttgtgaggccgaggaggatggatcacgaggtcaggagttcaagatcaggctggccaagatggtggaagctggtctgtactaaaaatataaaaattagccaggcgtggtggtgggtgccagttatcccagctactcgggaggctaaggcagatagttgcttgaactcgggaggcagaggttgcagtgagctgagactgtgccactgcagtcagtccagcctgggcaacagagtgagactctgtctcaaaaaaaattaaa

SEQ ID NO: 637553 - DNA, 605 bp, Homo sapiens
ggaatttgtcgattgcatctaagttgctgaatttatgggcataaagttgttattcctctacacttattctttttcaaatgatgtttgatctgtagggaaatcccacccctcattcctgatactggtaatttgtgtcttttctccttttttcttggttatactgactagagatttatcaatattatagattttctaaaaaaaaamcaaaaaaaaaacagcttttggtgattttctttattgtttttctgttttcaatttcattgatttctgctcttatctttatatttgtcatttccccttgatttaggtaaactggctaacttcagaatattattcttcctgattggttttctgaagtatgaatacgacatatctaggtgtgatggtgttgcttttatttttaaaatgttctcatttttcttgcatttattataattatattgcttaggtatctctggatggcttggacttatggtttcatatattttataaatattggggaattctactcacaagccctaaagagtgtatgagtcctggtatgtctgcagccccaggggcttctcattctcacaccattctgctcccaacttccagcaacgggt

SEQ ID NO: 637554 - DNA, 605 bp, Homo sapiens
ggaatttgtcgattgcatctaagttgctgaatttatgggcataaagttgttattcctctacacttattctttttcaaatgatgtttgatctgtagggaaatcccacccctcattcctgatactggtaatttgtgtcttttctccttttttcttggttatactgactagagatttatcaatattatagattttctaaaaaaaaaamaaaaaaaaaacagcttttggtgattttctttattgtttttctgttttcaatttcattgatttctgctcttatctttatatttgtcatttccccttgatttaggtaaactggctaacttcagaatattattcttcctgattggttttctgaagtatgaatacgacatatctaggtgtgatggtgttgcttttatttttaaaatgttctcatttttcttgcatttattataattatattgcttaggtatctctggatggcttggacttatggtttcatatattttataaatattggggaattctactcacaagccctaaagagtgtatgagtcctggtatgtctgcagccccaggggcttctcattctcacaccattctgctcccaacttccagcaacgggt

SEQ ID NO: 637555 - DNA, 401 bp, Homo sapiens
gaattccctgctgaatggagcagagaaactgggctagaactggagaaactgcagcgttgggtggcaaggacatcagatggcccctgttgtggctgtcaccaagcacagtctgcatttctttaaaggcacaggtgaaaattcttctgaaaactggaaygaaaaatggcactgcaattagacctcagtagaccctctgctacctgggctctcaaagaaccaggcctcccacaaggggactggcacgtggaggcggcttgcccacacaccacctttgggtgtttaatgatggccctgccaggcagagtgctccagaaagcaaagtctttttcttcatttggagaactgtgctttgggctatgtcagacaaagctacttgctacttgaggattgtggatggaaat

SEQ ID NO: 637556 - DNA, 385 bp, Homo sapiens
tggagaaactgcagcgttgggtggcaaggacatcagatggcccctgttgtggctgtcaccaagcacagtctgcatttctttaaaggcacaggtgaaaattcttctgaaaactggaacgaaaaatggcactgcaattagacctcagtagaccctctgctacctgggctctcaaagaaccaggcctcccacaaggggactggcacgtggrggcggcttgcccacacaccacctttgggtgtttaatgatggccctgccaggcagagtgctccagaaagcaaagtctttttcttcatttggagaactgtgctttgggctatgtcagacaaagctacttgctacttgaggattgtggatggaaatattcctgagagctggtcagaattc

SEQ ID NO: 637557 - DNA, 401 bp, Homo sapiens
gaattccctgctgaatggagcagagaaactgggctagaactggagaaactgcagcgttgggtggcaaggacatcagatggcccctgttgtggctgtcaccaagcacagtctgcatttctttaaaggcacaggtgaaaattcttctgaaaactggaacgaaaaatggcactgcaattagacctcagtagaccctctgctacctgggctctcaaagaaccaggcctcccacaaggggactggcacgtggaggcggcttgcccacacaccaccttygggtgtttaatgatggccctgccaggcagagtgctccagaaagcaaagtctttttcttcatttggagaactgtgctttgggctatgtcagacaaagctacttgctacttgaggattgtggatggaaat

SEQ ID NO: 637558 - DNA, 401 bp, Homo sapiens
gaattccctgctgaatggagcagagaaactgggctagaactggagaaactgcagcgttgggtggcaaggacatcagatggcccctgttgtggctgtcaccaagcacagtctgcatttctttaaaggcacaggtgaaaattcttctgaaaactggaacgaaaaatggcactgcaattagacctcagtagaccctctgctacctgggctctcaaagaaccaggcctcccacaaggggactggcacgtggaggcggcttgcccacacaccacctttgggtgyttaatgatggccctgccaggcagagtgctccagaaagcaaagtctttttcttcatttggagaactgtgctttgggctatgtcagacaaagctacttgctacttgaggattgtggatggaaat

SEQ ID NO: 637559 - DNA, 396 bp, Homo sapiens
tggtcagaattccaccaaatttcaagctccaagaggagtatttgttcagcttaaaaatatcccagttgtgtgcttggtgattagtttttgaggataaaagtgcagtgtgtgttcttgcctaacgcttttccataacccctgtgtacctccaagtcaacaggacaactgtagggtttttatttcccctcttcctcatgaatcaagtcccttrtatgaaacaaatcgttacaacaacaaagagtgacagcctgacagcctagtcggttattaatgggagtgacagccagcaaatcagaagtcatggcaatgtatctgtatgaacagcaatctgtgcttagttgaataaccgggagactcaggaaatcctggagaaagagaaggaacaaaatcaaacag

SEQ ID NO: 637560 - DNA, 615 bp, Homo sapiens
cttgccagccaaaaccagtgagttttcctcgccctcagtcagacaaatgtggattaaagagacagtgagcttaaagggagataaacattacttagtgatggcttggaatcaaaataagtgaaatatgatgctgtccaaccctggcattttcaacatttgagctgaaaacaggattaaagttgagaggattaatttttcaaaaatgagttttgccaatagaggtaaatattttgcttgaagaacagcaaattckagaagaaggtgacttacccattttactttaaaaaaatgctcattaaaaaataaaaacaaatgatttttaaattacccctatcactgagtccctctactggcataaacaattaggaactgtctatagggctcaaataccaagtcaaatcaagccaacaagaatattaaatgccaaatgcatacccctctcacaaacctgcatgtttgtgacaaaaataggactatttttgtctctgaattttaagtcaaaaaaatgtgtatctgcataatgctgaagcactacaatgtgaatattatatcttaatttcaggatgtataactgataaactggcagtccccttagaagattacataccctcctcc

SEQ ID NO: 637561 - DNA, 594 bp, Homo sapiens
attttttctgagtagtgggtctcaatagtgggtttaaaatatttagtaaaccatgcaatagacagatgtgctgtaatccaggctttgttcttccatttacagagcacaagcagagtagatttaccatcattcttaagggacctagaatttttggaattgtaaacaagcattggcttcaacttagtgccaccagatgatttagccctaataagaaagccattctgtcactcgaagccaggcattgacttctctagctacggaagtcccaaatggcatcttctttcaatagaaggctgtttcaattacattgaaaatctattgtttactatagccactttcatcaatgaccttagctagagcttctggataactygctacagttaatttttacatcagcacttgctacttcaccttacacttttatattatgaagatggcttattttcttaaactttatgagctaagctctgctactttcatgcttttcttttgtagcttcattacatccgtcagcgttcacagaattgaagagagttaggaactttctctggattgggctttgtcttaagggaatgttgtggctggtttaagctt

SEQ ID NO: 637562 - DNA, 618 bp, Homo sapiens
tgtggctggtttaagcttctaaccagactgctaaaactttatatcagcactaaggctatttcacttcttatcattcatgtgttcactggagtagcacttttttttttttttttaaraaatttttatttgctttcacaacttggctagctggctcaagagacctagctttcagcctatctcagctttcatcatgccttcctcattagtattaatcatttctagcttttgatttaaagcaagagatgtgcgactcctcctttcagttgaacacttagaaagccattgtaggattgttcattgacctaatttcaatattattctgtctcagggaacagggaagcctgaggaaagggagagaggctggggagcagccaatctgtggagcaatcagaacacacacaacatttattgataatgtttcttgtcttatatgagcccaatttgtgggccctaaaagaattacattggtaacatcaaagagcattgatcacacatatcaacaaccaacataataataatggaaggttaaaatatttcaataattaccaaaaggtgacacagggacattaaatgaacgcatgctattggaaaatggtgccatagacttgcttgacacag

SEQ ID NO: 637563 - DNA, 618 bp, Homo sapiens
tgtggctggtttaagcttctaaccagactgctaaaactttatatcagcactaaggctatttcacttcttatcattcatgtgttcactggagtagcacttttttttttttttttaagaaatttttatttgctttcacaacttggctagctggctcaagagacctagctttcagcctatctcagctttcatcatgccttcctcattagtattaatcatttctagcttttgatttaaagcaagagatgtgcgactcctcctttcagttgaacacttaraaagccattgtaggattgttcattgacctaatttcaatattattctgtctcagggaacagggaagcctgaggaaagggagagaggctggggagcagccaatctgtggagcaatcagaacacacacaacatttattgataatgtttcttgtcttatatgagcccaatttgtgggccctaaaagaattacattggtaacatcaaagagcattgatcacacatatcaacaaccaacataataataatggaaggttaaaatatttcaataattaccaaaaggtgacacagggacattaaatgaacgcatgctattggaaaatggtgccatagacttgcttgacacag

SEQ ID NO: 637564 - DNA, 568 bp, Homo sapiens
cttttaaacatttttataggatgttagttgtcaaagctactgcagagctggtgagttkggaatgggaaaatatgtctagttaaaatgctgcaagtttcactcttcttacttcaatttagccattttcctgaataaatttaccttgggttatttgaagtattggtcaattttcagagttctgaaagtgttaatcctgacaagctttgcaagtgctctagttgttttaaccgatgagagaattttcaatcatcctgatgctctcatttccactctcatcttccatctattgccttttatctgaaaaaagattaaattatattagattcatctatggcaattttcttccttaacagactatctaataaatgatcaaatagttatttcatacttattctaaatcctatataaacattgcatataaaaacagaataaaagaactggttaaaaacttgaataaaataaaaatgttaatttagaaataataggtgaaattagtaataaagaacaaaattaattactcccttaaaatttttttcccataaaaatgttttatttatgaacaaaagga

SEQ ID NO: 637565 - DNA, 568 bp, Homo sapiens
cttttaaacatttttataggatgttagttgtcaaagctactgcagagctggtgagtttggaatgggaaaatatgtctagttaaaatgctgcaagtttcactcttcttacttcaatttagccattttcctgaataaatttaccttgggttatttgaagtattggtcaattttcagagttctgaaagtgttaatcctgacaagctttgcaagtgctctagttgttttaaccgatgagagaattttcaatcatcctgatgctctcatttccactctcatcttccatctattgccttttatctgaaaaaagaytaaattatattagattcatctatggcaattttcttccttaacagactatctaataaatgatcaaatagttatttcatacttattctaaatcctatataaacattgcatataaaaacagaataaaagaactggttaaaaacttgaataaaataaaaatgttaatttagaaataataggtgaaattagtaataaagaacaaaattaattactcccttaaaatttttttcccataaaaatgttttatttatgaacaaaagga

SEQ ID NO: 637566 - DNA, 638 bp, Homo sapiens
gtggctagccaattatcccagcaccatttgttgaaaagggtgtcctttccccactttgtttttgtttgctttgtcaaagatcagttggctgtaagtatccaggttagccttacaggtagtgtgaaatcaggtagtgtgatgcccccagatttgttctttttgcttagtcttgctttggccatgcgggctcttttttggctccctatgaattttagtattttctaattctgtgaagaatgatggtggtattcagatgcggattgtgttgaatttgtagattgcttttggcagtatgatcattttcacaatattgattctacccatccatgagcatgggatgtgtttccatttgtgtcatctataatttctttcascagcgttttgtatttttcttgcagaggtcttttgactcctttgttaggtatattcctaagtattttatttttattttttgcagctattgtaaaaggggttgagttcttgatttgattctctccttggttgctgttggtgtatagaagagctactgatttgtgtatattaatcttgtatctggaaatttgctgaattcttttatcagttctgggagctttctagaggagtccttagggttttcaaggtaaacgatcatatcctca

SEQ ID NO: 637567 - DNA, 638 bp, Homo sapiens
tttccactctcatcttccatctattgccttttatctgaaaaaagattaaattatattagattcatctatggcaattttcttccttaacagactatctaataaatgatcaaatagttatttcatacttattctaaatcctatataaacattgcatataaaaacagaataaaagaactggttaaaaacttgaataaaataaaaatgttaatttagaaataataggtgaaattagtaataaagaacaaaattaattactcccttaaaatttttttcccataaaaatgttttatttatgaacaaaaggatcacactgaagtcccagaaaattacataccctcaacatcaaaaatttaatcactgggtgtagatttataagatctttattgtaaggttaattgtgctgaaaagttgatctcgaatatggtattttatttgtcygccatggttcatatttctctacgagccagaagaaatacaaccagtaatattagacacattgatagtatttttgaaaatttatttcagatttcttttgtaatcctcacaaaattgaattagagcataatttatttctgttctgagagaaaaatcttgttttatattttataacaataaatgtgaaacattaatatagaaaa

SEQ ID NO: 637568 - DNA, 424 bp, Homo sapiens
ttagctttggtggtttaatgctctgtttttgtgctggttggcctcctgccaggaggtggcactttccaggaagcatcagctgcacagtgtggagagggaccagcggtgggtggggccctagaactctcaagattatatggcctttgtcttcctctaccagggtgaatactgaaggaccattaggtgggggcggggctaggcatgtctgagctcagattctccttgggtgggtcgtactgcagctgctgtggaggatggggatragattcccaggtcactggagttgtgtaccaaggagggttatggttgcctctgctgagacatgcaggtcatcagggaattgggggaaagccagcagtcataggccttacccagctcccacgcaaacagaagggccggtctcattcccactgtgcccgcagta

SEQ ID NO: 637569 - DNA, 373 bp, Homo sapiens
tttttactttgttttcatcatcccataattctccttgaaacagaaacttaaactccagtcactgcactttcactccaacattaaattagagagattctgaatgaagatcaggtgcatagagtctgacacaaatatctgtgattttttggatttacaatggagaaggaaaggaagaaaattggttcctacaaattcataaatcatcttgggaaaaaatagacaaggacatggacaggacatgattgatatggtttggtagtttttttttttttgagaatcctgcttaaaaatcaggtacagagaagtctggaatatacatataaattttgtagttgagtaygtacaaagatagtaggagataagtacagttaga

SEQ ID NO: 637570 - DNA, 534 bp, Homo sapiens
cttctattctcagcacagctagctcagagtggcactgtttaatcactttatactaaataacatgtaggttacaattagccacccagtgggctcatttgcttatatataaatggagtcttgtaatcaaaatctggagatgagtcctcctttgtaaggaacctgatgtggtctttgtaccaattagtcacttttgagaaaacctagttcttgctctttgatgaattttccttaaatatggggtgtgggaaaagaagagtaggatatttaaaatcttgtcttgccttggtagggaaagacattatggtagggtgccttgttttattaagtttcctccagtaaatattcaaaaaaactaatatrtacttaaagtcataagtttctatgtgcagtgaatacattctcaaagctttctcataaatctaaacttcaaaattttcatttgtttttaattgagtcttctgccattatctactacaacatttatgttaataatctgtgcttagacattataggtaaatctctacatagataaaa

SEQ ID NO: 637571 - DNA, 574 bp, Homo sapiens
gtaggacacccatggtgcccaagtttrttaatctcaccaaggtaaaatcttcaaatatccctcctaacacatttcaagaacctatgcaacctgaaagaaggcaactgctgcacagaaaccttcaagacagtccattgtaactcctctgaaccacactgtaccctaagccgcctcatatagaaattcctgggccaccagcagggttgggatatgtgtttaaagcccctgctcgtgggtacatgttttatggcattatttatttgtttgtttatgtttttcatcagttgaagtggaaagccaatccataacctggtaagcattcttctctttctctctctctccctctctctcttgcatttcgttctcttttcttcttaaccatgatgttcaggtagtcttttgttggttgaaaggtgacaagatgtcaatttgtggatttagtaggagagagggaggggcagtttggggcctgtaggctaagccatgtgctacagctcagtttccttggaggtacttcactgggttggggatggaatgtctcagacacaggatggtaccatgctttccatttagc

SEQ ID NO: 637572 - DNA, 570 bp, Homo sapiens
gttctatgtcttctttcaccccaagaagcaatatagttttgtgacaattttagattagtacattttataactccttccaaatatctgttaaagtgttaggacaatatgtcctttcgcttaaaatgtacattgcaaaaatttatcatagatacaatgttttccatgcagactcaattaaagtgtcttctattggtatatcatttgtttgcaaagatggaaaatgtggccaataatgatttggaaatgtaaactaaggcctaagatgtgggcagattggattctgagaaaatatgccgcaaacctgcttgaaatcttttagatgcagagtagattttccctctacccacacttaggatagtcatcttacaagcatttttaacagcttcttctctccatctgcaggagtctttctacttagtgcatgtatgtctttgaaacagatctgactggaaaagtaataatgaktgcacttctgaggagaatttccaggtacacagtgtctcaacattttagcagagtttcaaactatagcatcagaagtacaaagctacaaacatacaaaaaatcatt

SEQ ID NO: 637573 - DNA, 563 bp, Homo sapiens
gcctacaagtttaaaaaaaagctgtaggaataacatttgattaatggaataactttttgaaagatggaagagaagacaatactctttaccatgttccggtctccttccactcccttttcctcaccataaagaagcacttgtctgatgaagtcagattgtaggacacccatggtgcccaagtttattaatctcaccaaggtaaaatcttcaaatatccctcctaacacatttcaagaacctatgcaacctgaaagaaggcaactgctgcacagaaaccttcaagacagtccattgtaactcctctgaaccacactgtaccctaagccgcctcatatagaaattcctgggccaccagcagggttgggatatgtgtttaaagcccctgctcgtgggtacatgttttatggcattatttatttgtttgtttatgtttttcatcagttgaagtggaaagccaatccataacctggtaagcattcttctctttctctctctctccctctctctcttgcatttcgttctcktttcttcttaaccatgatgttcaggtagtcttttgttgg

SEQ ID NO: 637574 - DNA, 522 bp, Homo sapiens
gtggaagtcaatatgaaaagattatgtcaggacttataagcaaatcaatatttaatcccaataaggcatggccattgctagctctctagaaacttctaaatttattactgtttactggcagtataaactatagtaaaataagtttggagtcaatgtaaaatagtttattagggtaccttgatttttatttgcacatttgtaaggtgtcaggtatttgacagaacttgaaaatgtaaactgcagctttattaatgtgatatttcatttaaatgtgtttcattactaatgacaggtttacagtatctactgcaaatctgctatagtcacagagccaacatttctagttttggattttttgttgttgttgttcaatgaataagcatttacatattcaatataaaagtgctaatgaaatgtgaattttaagctaaagttcagatcttcatattttrtctatatttctataacccaattatagttttctatcataaactcacatatctatttatcattcataacatt

SEQ ID NO: 637575 - DNA, 463 bp, Homo sapiens
agaatttgtgaatttgtatcaactctggaataattgtctgtcaccagaagaataatgttcccttgatcaaagtgagaggcttaagtcttttgatcagtggtttgaggtaaaaatccttgattatgtctcaatatgcaatatgactttagtgaataactcggtgacctgatccatgattttataattcttcagttatttgttgacagaggataaattgggatggaaatcggaaatgactagctgtgaaagcactgaaaaaggagtatctctgttaaaattaaaagacatatttttctgttaccaagtaagttttaaagaacagtttcagttactgatgagtatgcacttatcttattttggtcagtgtactgggctgccctttggtcagaaraaatgaaataaaggaagttctccagggcttatttttcagatattggttttaagtaagcaaacttatagccta

SEQ ID NO: 637576 - DNA, 597 bp, Homo sapiens
aactataaaagctggaggattttcagagccagtggtctagtatctagaatatataaagaagtattacaatgcacaacaaaaagtcaaacaacccaattagaacattggcaaaaaatggaacagatattccaccaaaaakgttgtacatatggccaataaacatatgaaaagatggtcaatatcgttagtcatcagggaaatgaaagtccaaaccacaatgaaatagcacttccacttgaatgactatcataacaattaaaaaacagaaaataaatgttgtcaaatgtgtggataaatcattgttggtgagaatgtaaaatggtgcagcttctgtgaaaaacagtttggccattcctctaaaagggaaacatttaattatcatatgacccagaaattccactcctaactttacatccaagaaaattataaacatattgttaatcaaaaacgtgtatatgaatgttcatagcggtaccatttacagtagccaaaaagtagaaacaacctaagtgctcattaattaataaagagataaatgtggtaaattcatacaatgaaatattattcatctataaagaggaatattgcaaacattat

SEQ ID NO: 637577 - DNA, 485 bp, Homo sapiens
atgtttctataatgcaggagatcagggaacaagaaacyacccatattgagaatggaaaattagagtgaaacttctggattaaccaggggaaaatgcaacgaatagttcctttttcttaacagcaaaaaataacttaaaaatcactgtaaaacaaatattaaataataaaagatggagagactaaaagaatttgttttagtaattaagctaaatgtaaacagataagattttccttttgaaaattagggactgtaacagtacgttacaaaaagaaaatccaactttgttcactttatgagatattcatttaaaacacagcgatagggaaaggctgaccataaaggggtgaataaagggataccagataaatacaaacaaactaaagcaaaagaggaaacatcagtatcagactgattagaagaaacttaatgttaaaaacattgaaaatcaattgataaaaaggcaagtttaggaagaagatatag

SEQ ID NO: 637578 - DNA, 485 bp, Homo sapiens
atgtttctataatgcaggagatcagggaacaagaaaccacccatattgagaatggaaaattakagtgaaacttctggattaaccaggggaaaatgcaacgaatagttcctttttcttaacagcaaaaaataacttaaaaatcactgtaaaacaaatattaaataataaaagatggagagactaaaagaatttgttttagtaattaagctaaatgtaaacagataagattttccttttgaaaattagggactgtaacagtacgttacaaaaagaaaatccaactttgttcactttatgagatattcatttaaaacacagcgatagggaaaggctgaccataaaggggtgaataaagggataccagataaatacaaacaaactaaagcaaaagaggaaacatcagtatcagactgattagaagaaacttaatgttaaaaacattgaaaatcaattgataaaaaggcaagtttaggaagaagatatag

SEQ ID NO: 637579 - DNA, 485 bp, Homo sapiens
atgtttctataatgcaggagatcagggaacaagaaaccacccatattgagaatggaaaattagagtgaaacttctggattaaccaggggaaaatgcaacgaatagttcctttttcttaacagcaaaaaataacttaaaaatcactgtaaaacaaatattaaataataaaagatggagagactaaaagaatttgttttagtaattaagctaaatgtaaacagataagattttccttttgaaaattagggactgtaacagtacgttacaaaaagraaatccaactttgttcactttatgagatattcatttaaaacacagcgatagggaaaggctgaccataaaggggtgaataaagggataccagataaatacaaacaaactaaagcaaaagaggaaacatcagtatcagactgattagaagaaacttaatgttaaaaacattgaaaatcaattgataaaaaggcaagtttaggaagaagatatag

SEQ ID NO: 637580 - DNA, 653 bp, Homo sapiens
acacaaacttgggagcaaagaagagcaaataagactttttaaaaggatgaaaataataaaataaaactgaaattaatgaacttgaaaataaaaatagttgaaaggcttatccaaaaggtgtgtatgtaaaaatacagatgcaaatactttgtgagtcagattgtaaaaaagatgtaaaagtacaagacagtgagtgcttaaggatatataatggcaaagaagaagagatctggagaatcataaaagaagactttgtgcaactctrtgacaatataatcaaaatattagagaaaatgttttctgtcaaaatataacttatctaaattggcatatacagacattttaaaataggctgatcaccaaagaagatattagaaagatgattaaacccattaaagccagatagattatttcatagattaaatgactgactaaaaatactaactttcaccacagtgagataccacttattagagtgactactataaaaatagaaaaaccaagtctccataagaaggaaaaattggaacttttgtgcactgttagtgaaaatgtaaaatggtgcaacccctgtggaaaacagtatggcagttccttaaaaaactaggaataaaattactatataatccagcaattatactttggggtgtgta

SEQ ID NO: 637581 - DNA, 653 bp, Homo sapiens
acacaaacttgggagcaaagaagagcaaataagactttttaaaaggatgaaaataataaaataaaactgaaattaatgaacttgaaaataaaaatagttgaaaggcttatccaaaaggtgtgtatgtaaaaatacagatgcaaatactttgtgagtcagattgtaaaaaagatgtaaaagtacaagacagtgagtgcttaaggatatataatggcaaagaagaagagatctggagaatcataaaagaagactttgtgcaactctgtgacaatataatcaaaatattagagaaaatgttttctgtcaaaatataacttatctaaattggcatatacagacattttaaaataggctgatcaccaaagaagatattagaargatgattaaacccattaaagccagatagattatttcatagattaaatgactgactaaaaatactaactttcaccacagtgagataccacttattagagtgactactataaaaatagaaaaaccaagtctccataagaaggaaaaattggaacttttgtgcactgttagtgaaaatgtaaaatggtgcaacccctgtggaaaacagtatggcagttccttaaaaaactaggaataaaattactatataatccagcaattatactttggggtgtgta

SEQ ID NO: 637582 - DNA, 567 bp, Homo sapiens
gaagcaaaccaagtgtccatcgattaatgactggataaacaaaatgtgccatatatgtgcaatggaatattcagctgtgtaaaggaactgaaccctgatrcatggtgcatcatgaattaaccttgaaagtataatgctaagtgaaagaaaccagtcacaaaatgtccaatactgtatgattccacttatgtgagtttcctagagtagtcaaatttatagagacagaaaacagaatggtgattgccaagcactgagaaaaggaggagatgcagagttattgattaatgagtgcagagtttctgtttgtgctgatgaaaaagttctggaaagagacgatggtgatagctgcacatgtgaatgtacttaatgctactgaaactgtacacttaaaaatgattaaggtgataaattctacattacatgtgttgtacacaaagcattttactctcccctacttcagtaggtgaatacactcctcctacttggatttgagactcaacgatatgaatattttgtccaatgggatataagccaatatgccataagtagacacttaaaagtgcttgt

SEQ ID NO: 637583 - DNA, 537 bp, Homo sapiens
gttcattggtatactcaattaaaaaactgcaacttttaaaaagaagagctacagtagactttgggaactcaaagatattgttaattattttttctaacaaatatttattgaatacctgccttattccaggaactgttctggcactaagaacatacaaatttcttcaactcataaaatttttaaactttttgagagaaactagttcccctactcttgctggggaaaaaaaaaaagtcctgacaaattgggtgagtgctttgcaacgcatacattgcaatgcatacagaccaaaggtagttttcaagaatatataaagagttgctacaaataaacaagagaagactaataatgctttagataaatggataaaagacataatgagataattcatagaaaatgaaaccttaatatccgataaatatatgaaaaatatcctcacaagaagatggrtaaatgaaaatcaaaactacatgagacgttgtttttacacacatcacattggcaaagattaaaataaaatgtttgtgacagatgttg

SEQ ID NO: 637584 - DNA, 539 bp, Homo sapiens
ttttcttttaactgactggatgaaaaagtaaaatgttgtgatctttggaagcatctagcaacatctattatagttaaaaataaccatcatatctataaacctgyttctgaaatcctatttcacagatagcttaaaaagcacatgttgataaatatgtaagtacaaggatgtttgttgtagcattattcttagttctccacttggatacagtaaatatccatcggtagtatgggaacagctgaaaataattggcctatgaacacactatgacagtaatgcaagccttacaaaaaagtcatgccctctttatcctcctctccctagtacctttcccagccagtagtaaccatcattctactctctatttccatgatggttagtggatataaaaatgcagttagatataaggattaagatctactgttagatagcacaataggtcaactgtagctaataatgatttatttatttcaaaataactaaaacagtgggattggaacatttctaacacaaggaaattataaacactttaggtaatg

SEQ ID NO: 637585 - DNA, 539 bp, Homo sapiens
ttttcttttaactgactggatgaaaaagtaaaatgttgtgatctttggaagcatctagcaacatctattatagttaaaaataaccatcatatctataaacctgtttctgaaatcctatttcacagatagcttaaaaagcacatgttgataaatatgtaagtacaaggatgtttgttgtagcattattcttagttctccacttggatacagtaaatatccatcggtagtatgggaacagctgaaaataattggcctatgaacacactatgacagtaatgcaagccttacaaaaaagtcatgccctctttatcctcctctccctagtacctttcccagccagtagtaaccatcattctactctctatttccatgatggttagtggatataaaaatgcagttagatataaggattaagatctactgttagatagcacaataggtcaactgtagctaataatgatttatttatttcaaaataactaaaacagtgggattgraacatttctaacacaaggaaattataaacactttaggtaatg

SEQ ID NO: 637586 - DNA, 616 bp, Homo sapiens
tccagtttgccattctgtgtcttttaatcagggcatttagcccatttacatttaaggttattattatgtaagaatttgatcctgccatcattgtgctagctggttaattttcagacttgtttatgtgattacttcatagtgtcattggtctgtgtactttagtgtgcttttgcagtggctggtaagtgtttttactttccatattttgtggttctttcaggagttcttacaaggcaggcctggtggtgacatattcccttggcatttgtttatctgaaaaggatctcatttttcctttgcttatgaagcttagtttggccagatatgaaattctgggttgggatttctttttctgaagaatgttgaatacctaatctcttctggcttatagagtttccactgagaggtctgctgttagtctgatggacttacctttgtaggagacctggcctttttctctggctgcccttacattttttctttcatttcaaccttggagaatctgatgattatatgtcttggggttggtcttctcrtggagtatcttactggggttctttttatttcctgaatttgaatgttggcctgtgttgctaagttggggtagttctcctgg

SEQ ID NO: 637587 - DNA, 531 bp, Homo sapiens
cgtggcttcctgggcagggtggcacaaagactcaccaccacccttggctgtgtgtggggactccatggcttcctgatgctcccaggtaagccatcaccccaccctgtttttcctcagtctctgtgggtcaagccgtctgcctacttagtcccagtgtgagaatctggatacctcagtcaaaggtacagtgtacactcactgttttgtgaaagcggcagactacagctgcttctaattagccatcccctcccctgttatatttttcttattaggacaccagtcatgttggatgaggtcctactctaattgggtatgaccctttcttaacttgattacatctttaaagaccctatttctaaataagttcactgtgttagtatggggctgggtaatttatagagacaatgtgtttattttcctcatggttctgtagagtatataggaatcctggtgcmagcatctccttctagtgaggcctcaggaagcttatattcagcagaagggaaagggaagtagtgtatcacgtggcaa

SEQ ID NO: 637588 - DNA, 604 bp, Homo sapiens
agccacatcaatttttgaacactttgctgcttagaaatttcttctaccagatgctttaagtcatcactcttacgttcaaccctccacagatccctaggacatgtacacgtgtccaagctgtttgctaggacataaacatgtgacctttactccagttcccaataacttcccaatttccatctgakacttcagcctggacttcagtctccacatctctatcagcattttggtcacaaccatttaaccagtgtctaagaagttctaagatttcccttgtcttcctgtcttcttctgagcccttcaaactcttccagtctctgcccattacccagttccaaagttgcttccacatattcagttatgtttctatcaacatcccactactaggtatcaatattctgttagtttgttcttgtattgttataaagaaacacctgaagttgactaatttataaagaaaagatgtttattttggttcagagttctgcaggctgtacaagaattgtggtgccagcatctgcttcttgtgatggcctcacggagcttccaatcatggtagaaagtgaaggggagcagcgtatcacgtggcaagagagggagtaag

SEQ ID NO: 637589 - DNA, 604 bp, Homo sapiens
agccacatcaatttttgaacactttgctgcttagaaatttcttctaccagatgctttaagtcatcactcttacgttcaaccctccacagatccctaggacatgtacacgtgtccaagctgtttgctaggacataaacatgtgacctttactccagttcccaataacttcccaatttccatctgagacttcagcctggacttcagtctccacatctctatcagcattttggtcacaaccatttaaccagtgtctaagaagttctaagrtttcccttgtcttcctgtcttcttctgagcccttcaaactcttccagtctctgcccattacccagttccaaagttgcttccacatattcagttatgtttctatcaacatcccactactaggtatcaatattctgttagtttgttcttgtattgttataaagaaacacctgaagttgactaatttataaagaaaagatgtttattttggttcagagttctgcaggctgtacaagaattgtggtgccagcatctgcttcttgtgatggcctcacggagcttccaatcatggtagaaagtgaaggggagcagcgtatcacgtggcaagagagggagtaag

SEQ ID NO: 637590 - DNA, 514 bp, Homo sapiens
ttacccagttccaaagttgcttccacatattcagttatgtttctatcaacatcccactactaggtatcaatattctgttagtttgttcttgtattgttataaagaaacacctgaagttgactaatttataaagaaaagatgtttattttggttcagagttctgcaggctgtacaagaattgtggtgccagcatctgcttcttgtgatggcctcacggagcttccaatcatggtagaaagtgaaggggagcagcgtatcacgtggcaagagagggagtaagagagagaggaaggatgtctctaacagccagatctcgtgtgaactcagagtgagaattcagtcattaccaagggtatggcactaagctattcatgaaggatccttcccgtgatctaacacatccccctaggccccaccttyaacactggaggacacattttaacatgagatttggaggggaaaaacatcaaaagcatctcagtcatataaacaggaaatgaaggttggggctcca

SEQ ID NO: 637591 - DNA, 568 bp, Homo sapiens
tattgattttggtctattgagttattgtcataacactttcatttctaatgtaagtagtctgatttgatttgagacatcagtaaggaataacgctgattacaccaacatggtagataaaagattttggtagaaaatctaacaattatttgttaaacatgttaagtattaaataccacccttattcaaccttaacactaaacaatttcattktctatgttatttcttctggaattttttcctgaacaattaactaaaatgtatcttaggttatcatgagactgatttttgttttgatttcttaatatagctagaatccaatgcatgtatgtctatcaccaggttactagaactcagaatttgaatgtggtcaatagatttgtttgaatgttgtgttacagaaaacgtaaagtgcttgatgtagaataggggtaatatttaaaatacattcaccatgcatttatcaagggcttattgtctgctaatcactgtgccaagttttggagacataaatatgctaaggcaaaaatcccttctctcaagaaactcactgtctgtggaagatagaact

SEQ ID NO: 637592 - DNA, 568 bp, Homo sapiens
tattgattttggtctattgagttattgtcataacactttcatttctaatgtaagtagtctgatttgatttgagacatcagtaaggaataacgctgattacaccaacatggtagataaaagattttggtagaaaatctaacaattatttgttaaacatgttaagtattaaataccacccttattcaaccttaacactaaacaatttcattttctatgytatttcttctggaattttttcctgaacaattaactaaaatgtatcttaggttatcatgagactgatttttgttttgatttcttaatatagctagaatccaatgcatgtatgtctatcaccaggttactagaactcagaatttgaatgtggtcaatagatttgtttgaatgttgtgttacagaaaacgtaaagtgcttgatgtagaataggggtaatatttaaaatacattcaccatgcatttatcaagggcttattgtctgctaatcactgtgccaagttttggagacataaatatgctaaggcaaaaatcccttctctcaagaaactcactgtctgtggaagatagaact

SEQ ID NO: 637593 - DNA, 336 bp, Homo sapiens
cattcaccatgcatttatcaagggcttattgtctgctaatcactgtgccaagttttggagacataaatatgctaargcaaaaatcccttctctcaagaaactcactgtctgtggaagatagaactatgtaaacaggtgtgtaacactgtaataaatatcatagtaggaaaatagaatcagttacgagttcacacatttccttttggaacgtgagcctgctacctcttttgtttgtttgtttgttttacagcccacatactcagaggtaagaatggctttcatattttaattgtttaaaagaattcaaaagaagaataatagtttatgacaagtgaa

SEQ ID NO: 637594 - DNA, 478 bp, Homo sapiens
aataagacatacattatttgtcctgggacctttcaagtttaatctgagagatactgtgttaattttaatttttcatatgccccatcttcttactaatctttctttctatctaacacctatgatttatagagaattatttgaaaataactctccattcctgaggctattgtgtttcagtccactagaaccttccagcaaatcaactggaacctcgagaaaggcctataaactccactttcctaccattaccagggaggcagtgcagatttgggtttttagaaaagccaaccttaaatcctttctattgaggctaattgatcaataattagtcaccacagttactaatggtttaatgtaaacagttttttaatttaaaattttctgatatttcagttcaataattgagaattcatccagaatggttsatctgaatgtacaaaaagagtcacttagaaaaggaataactttccttatcctt

SEQ ID NO: 637595 - DNA, 424 bp, Homo sapiens
cttacgtggatggtggcaggcaaaaagagagctcgtgcagggaaactcccattttttaaaccatcagaccatgtgagacttattcactatcaagagaacagcacgggaaagatctgctgccatgattcaatttmctcccactggttctgtcccacaacacgtggaaattcaagatgagacttgggtagggacacagctaaaccatatcagggatgttgagttaaaataggagttgtaagtcaagggagcacacattgaatagaaaacgtgttatattaaaaactgagccaaattcgaaggtctatttggggtaggtgattatgaaagccttcatatataactactttaaatgttgctccatttctcaattgcatgtgtggaatatccatcaatggatggagttttgacctataaaaataattga

SEQ ID NO: 637596 - DNA, 628 bp, Homo sapiens
agactgtgtaacatggtgaaaccccatgtctacaaaaaataccaaaaaaattagccgggcatggtgacatgtgcctgtagtcccagctactcaggaggctgatgtgggaggatcccttgagctcaggaggtcgaggctgccataagcagagcgatggggctagatkctgtcttaaaagtatataaagtcagccgtaaaatatttatatattaatcacagttttatttgatttgctcaaaatgtaacaattgaaattatagagaactatgaaaatagagtcacatgctccaaacttctacctaccaaagaaaatatcttaatatacgaacacatacatttatgcctgtgtggatttgcacatacaaattcctacatatgaattatagtaatttatgcctctaaagctactacatatcacaaacatattttatacacacaaatgcacacatacagagatacaattatcttatatccttaaagtatgttctatgtgaaaacaaggcaacccgatctgaaatatctatttaataggtttttaaatattatttcatcttcagcaataaatgataaaatcactctggccaaattggtagctattagccgctactaagggccgcttggggttcct

SEQ ID NO: 637597 - DNA, 629 bp, Homo sapiens
ctgactagtcatcagaacctgttttaatgataaatcaatcacatatatgtatgtgtctgtgtgtatatgtgttagttttaaaaatcataaaactcatttttctctatttttgatgaaaaaaaatktgttttttccaggtcaaaaacagaaattgggacagggggagcaaaatgtctcttctagacaaagctttacctgtgatggtcagaaacaaagatgctacgggtataatttctacactgacacctgacccacaccatctcctccagtctcttgctctccgcaccatctgcataccaatgatgtccaaactcctacctccagcaactctgcctcctcctctggctccagccctggacagccaactctcacttggcattgcctcatgggtggtgtccaaaacagaactcttcattgattcccaacctgctcctttccatgtcaagacacgaaagctccctcttgcacaaatttaagtctcaggagtcacactggatttttctagtccatctccaaaagctgctggtcttactctgaaacacccccaaatgtggacatgtctctccaccctctagccaccattgcggcctcagaacgggttcggctctccagtgcactgcttccatagc

SEQ ID NO: 637598 - DNA, 629 bp, Homo sapiens
ctgactagtcatcagaacctgttttaatgataaatcaatcacatatatgtatgtgtctgtgtgtatatgtgttagttttaaaaatcataaaactcatttttctctatttttgatgaaaaaaaatttgttttttccaggtcaaaaacagaaattgggacagggggagcaaaatgtctcttctagacaaagctttacctgtgatggtcagaaacaaagatgctacgggtataatttctacactgacacctgacccacaccayctcctccagtctcttgctctccgcaccatctgcataccaatgatgtccaaactcctacctccagcaactctgcctcctcctctggctccagccctggacagccaactctcacttggcattgcctcatgggtggtgtccaaaacagaactcttcattgattcccaacctgctcctttccatgtcaagacacgaaagctccctcttgcacaaatttaagtctcaggagtcacactggatttttctagtccatctccaaaagctgctggtcttactctgaaacacccccaaatgtggacatgtctctccaccctctagccaccattgcggcctcagaacgggttcggctctccagtgcactgcttccatagc

SEQ ID NO: 637599 - DNA, 584 bp, Homo sapiens
ccattgtcaaacaatgaatctcaattatttaatgtggacctagttaagaatcatattgtgcrccatttcatgtgtttatcagcttttcttctgtgaattgtccccctcccctcccctcccctcccctctcctcttcttctcttctccttttttgtgagacagagtctcactctgctgcccaggctggagtgcagtggggtgatctcggctcactgcagcctctgcctcccgggttcaagcagttctcctgcctcagcctcctgagtagctagggactataggtgtgtcccaacacatccagctatttgtatgtgtatgtgtgtgtatgtgtgtgtttgtgtgtgtgtgtatttttagtagagagggggttttgccatgttgaccaggctgggcttgaactcctagcctcaagtgatctacctgccttggcctcccaaaatgctgggattacaagcgtgagccactgcgcctggccctgtgtgcattttcaaggtgtaggctgcttgggacctgctgagctgggagggagccactgtttggggtttcctgcaccctgattctgatttctctatgtcaataacttg

SEQ ID NO: 637600 - DNA, 572 bp, Homo sapiens
aatgaatctcaattatttaatgtggacctagttaagaatcatattgtgcaccatttcatgtgtttatcagcttttcttctgtgaattgtccccctcccctcccctcccctcccctctcctcttcttctcttctccttttttgtgagacagagtctcactctgctgcccaggctggagtgcagtggggtgatctcggctcactgcagcctctgcctcccgggtkcaagcagttctcctgcctcagcctcctgagtagctagggactataggtgtgtcccaacacatccagctatttgtatgtgtatgtgtgtgtatgtgtgtgtttgtgtgtgtgtgtatttttagtagagagggggttttgccatgttgaccaggctgggcttgaactcctagcctcaagtgatctacctgccttggcctcccaaaatgctgggattacaagcgtgagccactgcgcctggccctgtgtgcattttcaaggtgtaggctgcttgggacctgctgagctgggagggagccactgtttggggtttcctgcaccctgattctgatttctctatgtcaataacttg

SEQ ID NO: 637601 - DNA, 659 bp, Homo sapiens
gttttgttttacttttggtttgtttgttggttttggttctgagttaaatagctggcatgtgaaggaggcgtcattgatgtccatcatatttccttttgtttggtatcgccccaacgctatcctgaaaatgctttacaaattaagagtttgaagctctacattttatttcagtgattcagtcactgaggctcagagtttaagtgatctgcccaatataatagcaataaattgtggaagtctggctttcattatttaaccatttcacacattttgaaagaggaaaaaatagtagtaccataaattttatttcggaaaatagaagaaaaaggaggactctaaaaatgtctgttgtccttaatgagacctaactttgaggttttttacaatttgctatttcataaataataagtgggaaactgtttattcaacagagtagcttgcctactttttaaaatttgaattgaccccacactactctgcaatacaggaaaaataattagaattattctgaatgttatttkcaatgcaattaaagaaggatatagtttatgatttttatttattcagatttgatttcctgcaataggttgtatccatcaaaactagtttaatattgatatttactagataatttatttgtgctcttaacaataccactt

SEQ ID NO: 637602 - DNA, 372 bp, Homo sapiens
agttaggctatgagtggataattgttttagcctggtaataggtatgtgaaagttgagtctacttttgtctgtgttagaaattttccacaataataggcttaaaacaaatgaatacaggaaaaatttaggagaaataactctagcagaaaatttatatatttgtcaaataattttaaaggttaaaaatattcattagccagtaatataggcagtgttttgacatgtcctcaatrttattaatatctttgcttttaaataaaacaaaacaaaacaacaaaactcatcagcaaaacaactttgagattgatagaaaaaaccctgacgacgtgaaatagtttaaaaaagtcattataagttagtgtattataacag

SEQ ID NO: 637603 - DNA, 372 bp, Homo sapiens
agttaggctatgagtggataattgttttagcctggtaataggtatgtgaaagttgagtctacttttgtctgtgttagaaattttccacaataataggcttaaaacaaatgaatacaggaaaaatttaggagaaataactctagcagaaaatttatatatttgtcaaataattttaaaggttaaaaatattcattagccagtaatataggcagtgttttgacatgtcctcaatgttattaatatctttgcttttaaataaaacaaaacaaaacaacaaaactcatcagcaaaacaactttgagattgatagaaaaaaccctgacgacgtraaatagtttaaaaaagtcattataagttagtgtattataacag

SEQ ID NO: 637604 - DNA, 480 bp, Homo sapiens
gggcacaggctagacaggctgtcagtcagactgaaatggatcccaatgacaatggtcttgttttcatttgtaattttttaaaaataatgtcaagcatataataaaattacaataggaccagctactcctatatactctttacacagcatccccctactagtctaaatttacataactagctattgaacaagttggagacatcatgtccctttacccttcaaagtgtgtttcctaaggagggagatttttctcttacataaccacaaagcagttaactaaatcagaacatttagcactgcttcaatgccatcattgagtagtcaatgcatacacaaattcgctccttctgtctctccactgtcctttaatctagaatcgcttttcagtcttccttgtgtctttataatttaatactcttattattctggtgcttgtttttcttatgatgaaarctgtcagcagcactattttatgtctatt

SEQ ID NO: 637605 - DNA, 576 bp, Homo sapiens
gggctatatattttttcctcagaagaaatatttctgatttgaaaagaaataaatctgtcaagaggaaaatattaaaaataaaaagtgtgactgtaataatcacatcgatgtcacaggcaattttgctcattcggattggggaaggaaacttccctgcccccccaaaggaattgtcaaagtaagagaaatggaatttttatttcaataaccactttggtttaagggtaatttatgtataaggaagcacaacagcctcaagaatcaaatttccttaaaatatyattttgtattctctctgctacaaggcttagtgaaactgatggatcaaagtgaagaattactaaatttgtttctctaagttacagtttaacagacactgtacaccacacacagcactggcaaaagggcagtgttttgcattttgcaaagggttatacccagagaataatatttcttgaaattaaataatcctcataatgttaaaatgaaaaatggaagaaaagctagttttgtttgaccggatccagaaaagtagcaaatcttccgctgcccacacccacctcccgtcacacacac

SEQ ID NO: 637606 - DNA, 529 bp, Homo sapiens
tgaggtgtctccatgttggtcaggctggtcttgaactcctgacctcaggtgatccacccgcctgggcctcrtatcaagacagttaagtcttgaatgtatttgcacagtttaagttttgtcagtccagacagaggctctttggagggtctacagtgcctcctttggaaacctgcacacctaggtctttaccttcaactccgtctactgaactgtatcctgcagaggaaccgacttcagaatgagtgaactgcacccaacaagcaccattggattggaggtattcccctcaggcctgcaagaaagcaaaatatagtatgccactttatctctgagaaaattttcaagcaagatgtgagacatttttctcctgaatgagagaaagagttatctctaaattattagtttcacttacccatacattttttggcttagtaataaaactaaggcaatgacatggattgtttgttctcttaatataagtattcataaaggctttgcagggtgaaatctttttcttcactatgtgata

SEQ ID NO: 637607 - DNA, 529 bp, Homo sapiens
tgaggtgtctccatgttggtcaggctggtcttgaactcctgacctcaggtgatccacccgcctgggcctcgtatcaagacagttaagtcttgaatgtatttgcacagtttaagttttgtcagtccagacagaggctctttggagggtctacagtgcctcctttggaaacctgcacacctaggtctttaccttcaactccgtctactgaactgtatcctgcagaggaaccgacttcagaatgagtgaactgcacccaacaagcaccattggattggaggtattcccctcaggcctgcaagaaagcaaaatatagtatgccactttatctctgagaaaattttcaagcaagatgtgagacatttttctcctgaatgagagaaagagttatctctaaattattagtttcacttacccatacattttttggcttagtaataaaactaaggcaatgacrtggattgtttgttctcttaatataagtattcataaaggctttgcagggtgaaatctttttcttcactatgtgata

SEQ ID NO: 637608 - DNA, 560 bp, Homo sapiens
ggatttaaaatgggaatccatggatttactatatatattacctgtattgactgttagtgttagaaagggtttcaagagttttgagcggtatgcatactttacaaaatcctgtgtttaataaagtgaattggtagcattctagcatggaaattaccaacctgggttttgtgataagaaagatgtatctctaatttcagctctgacacgagccgtggatgtggttcctaaatgttgtagccctcattcgccccactagtgaaatagggaagatggtttctgctcctcacaaggagtcacttaggtaacaatagtggttagcagcaagcactcccgcggtactggcattgaggaggctctcctgattcttgtgacagctcagcggcagcagctggaatggcagaagcatcagtaacattccaggagctgttattgttctgcattttacacagcatctgagcttctttcatcccccctgtattatgtagccctttttctttctgaaagctatttttgtagtggaaaacaaaacaacragtcaagggaagtaaatacagacccat

SEQ ID NO: 637609 - DNA, 593 bp, Homo sapiens
acacatttctgaagggatttttatctgaaaagaaaaagaatggataaaaatgacccatacagtaattaaagctctaagacacattgggcctttaatattttccctttccaaagaaaaactcatagtatcacagagaatataacatatgtgagtaaataaaataactggatttaaaccaaagaatcacttgtctgcaattgaaatatttttacttgaaaaattattatatttactaataaatgaaaaatatttcctgattccaaatgagtaacaccaacattttaatgttcaaacttaggtttaaaactaatatattttctttacaatggatgggagatgggccttggagaaaatagcagcagggttgggtctgttaccttttttttgttgttgttgtagttatcttaacatttattagtattaagttatttcatgcaataatatctgatcatgtttgcattattatctgaaaaccmaattcattcaccctttttttctcaagtaactacctaagtttctttttttttttcttttattattattatactttaagttttagggtacatgtgcacaatgtgcaggttagttacaaa

SEQ ID NO: 637610 - DNA, 452 bp, Homo sapiens
tttaaatgtcttgcttttagaaaaaaaggcaatgttatcagtagcaagaggaagtgataaataaaatagctcaagcttcaaaagcaaaatgttagatttgaagcactagactctaaagcacagtctcagatgtggctaatgaactgctcagtccttgcaacaggctgcctggcttctatttccagattattacttaagaacagtgcrttcttgaaaaaattacagatcatctctgttcctcagtttcctcattagtaaaattggaatgaaaatgatggaatcaccctcatgtaggatttatgtgagttaatatttgcaatgcacttgaaacagattctggtcgaatatgcatgcaaaataaatactagtaatcctaggaccacatctgtgattgatttaagaaaagtgaggataatgagtcatacattagaaaatattaagtaattttgaca

SEQ ID NO: 637611 - DNA, 608 bp, Homo sapiens
tgtgcagaaacaatttaattcccaattaatagtatctattgcatgcctactctctattagtttacaacaattagtaaagtagaaaaaataaagcttaggttttaagtttgggggtgaaaactaccattaaatataaactgacaaaaatgtacggtgtttataaatactgtgctgaaaaataaagtattgcaatggaaacaggaggtatgaagtgtgcttttaaattgaatgttaattaratattttgagcattcaaaataagtttttgaaatactatgtcagtatagagaatttatctcatcacgctttattctcttggtgcttaaaaccttcctaaactatagttttataacttcagcattgctttaaatttattttagcagcaatttaatagtattgattgttgtcttagttatggagtttggagcaacattatatatattacatataacatattgtcattatatataatgcatataatattttagtctcgctctttcgcccaggctggaatgcagtggtgcaatcacagctcactgcaacatctgcctcctgggttcaagcgattctcatgcctcagcctactgagtagctggaattacaggcat

SEQ ID NO: 637612 - DNA, 608 bp, Homo sapiens
tgtgcagaaacaatttaattcccaattaatagtatctattgcatgcctactctctattagtttacaacaattagtaaagtagaaaaaataaagcttaggttttaagtttgggggtgaaaactaccattaaatataaactgacaaaaatgtacggtgtttataaatactgtgctgaaaaataaagtattgcaatggaaacaggaggtatgaagtgtgcttttaaattgaatgttaattaaatattttgagcattcaaaataagtttttgaaatactatgtcagtatagagaatttatctcatcacgctttattctcttggtgcttaaaaccttcctaaactatagttttataacttcagcattgctttaaatttattttagcagcaatttaatagtattgattgttgtcttagttatggagtttggarcaacattatatatattacatataacatattgtcattatatataatgcatataatattttagtctcgctctttcgcccaggctggaatgcagtggtgcaatcacagctcactgcaacatctgcctcctgggttcaagcgattctcatgcctcagcctactgagtagctggaattacaggcat

SEQ ID NO: 637613 - DNA, 559 bp, Homo sapiens
gtgccctttacagacttttttaagattaggaaacaaaaagaagtcagagggatgacaaatcagaactgtaaagcagatgcttaatgatttcccatcaaaactcttaacaaaatgtcccttgtttggcccgaggagagagcaggagtattgtcatggtgaagaaggactctgtggtaacgctttccaggtwtttttctgctaaagctttggctgactttctcaaaatagtctcgtaataagcagatgttaccattctgtggccatccagaaagttaacaaacaaaatgccttgagaatctctttgctcctgaccggttctctttttctgtgaatggaccacttttgcctcttggtagccattgctttggttgtgctttgttttcaggatagtactggtaaagtcacatttcatctgttacagttcttcaaataaatgattcaggatctttatcacgtttgtttggttttccaatgaaagttctgcttttcactgcagctgatctgattgcaacacttgctaccctcatcaagtggaaactttgctcagctttaatttttc

SEQ ID NO: 637614 - DNA, 419 bp, Homo sapiens
cttgaggagaggagatggaggagtggggaaaactttgtcttgcatctgggatgccagttaaaccacagcagacgggccactggtcagagttgtgagggtccctctctatattccctagatcctggatgacactactaggcacatactaggcacacccttggccagaagggaatatgctgctttgaagagaaagacccaatctttgcagaatrtatcacctgctaactgaagagcccttgggccctgaataactaacagcaatacccaggtactatgttgagggctttgggtaagattctgagactaactgcctttaggtgagactcagcatagttgcatctatggtagctacaggatgagattccctctgcttgagaaatgcagatggaaaaggaaagggagctttgttttgcacttta

SEQ ID NO: 637615 - DNA, 513 bp, Homo sapiens
aacaatctgactctgttgaaaaacttgacaccaaagtggaatcttgaagcttttacagaggaagaaaggggatgtttargtacttcatggagaggacaagtaatgccaaactgttctgggttggtgatgaggtttcaatgcctccagagaaatcaggaagtggtatatggttttagctagatcagggatttgggaaagtgtgggatccacaggacatgctttcttggctgggggcatccgagaacattttaaagctctgaagctctctgatgtgttctagtgctcttagagtctaaagaagagaaaatcagaaactttggctatactacaaagtaataggggactccttttattgctcctaaatattttctttgtctttctttcatcttttgttcaccatttttctaccccaaatttagctttcattatttgcttagtccctgctaatgcgttctctaaagtcatgtcctaaaacagtggttaagaaagacacctgccttcttccttcatcct

SEQ ID NO: 637616 - DNA, 513 bp, Homo sapiens
aacaatctgactctgttgaaaaacttgacaccaaagtggaatcttgaagcttttacagaggaagaaaggggatgtttaggtacttcatggagaggacaagtaatgccaaactgttctgggttggtgatgaggtttcaatgcctccagagaaatcaggaagtggtatatggttttagctagatcagggatttgggaaagtgtgggatccacaggacatgctttcttggctgggggcatccgagaacattttaaagctctgaagctctctgatgtgttctagtgctctkagagtctaaagaagagaaaatcagaaactttggctatactacaaagtaataggggactccttttattgctcctaaatattttctttgtctttctttcatcttttgttcaccatttttctaccccaaatttagctttcattatttgcttagtccctgctaatgcgttctctaaagtcatgtcctaaaacagtggttaagaaagacacctgccttcttccttcatcct

SEQ ID NO: 637617 - DNA, 516 bp, Homo sapiens
gactctgttgaaaaacttgacaccaaagtggaatcttgaagcttttacagaggaagaaaggggatgtttaggtacttcatggagaggacaagtaatgccaaactgttctgggttggtgatgaggtttcaatgcctccagagaaatcaggaagtggtatatggttttagctagatcagggatttgggaaagtgtgggatccacaggacatgctttcttggctgggggcatccgagaacattttaaagctctgaagctctctgatgtgttctagtgctcttagagtctaaagaagagaaaatcagaaactttggctatactacaaagtaataggggactccttttattgctcctaaatattttctttgtctttctttcatcttttgttcaccatttttctaccccaaatttagctttcattatttgcttagtccctgctaatgcrttctctaaagtcatgtcctaaaacagtggttaagaaagacacctgccttcttccttcatcctttgtgaccaaa

SEQ ID NO: 637618 - DNA, 570 bp, Homo sapiens
ggactttctaacacttatcctcagaaaaacatcaatttaaacaactatctatgcacaagaataccttaacaagaactaaggataccaggtgaaagataacagaatcttygtgtagcagagaaataagaaaagatgaattgaagagcataggaagaacaagtttacattacctgtgtcaccccacccacaggcatggaaccaggtaccagagcagcagagcacacagacaggcaacctttgtgttgaagaagaaaagggaagtgagcactgaactttggtttggaccaaaaacacagagcctgcttcagtgaaatacagtaataggtatgcccctatggccccacactccaggctggtacctgcagactgagccaaaccagatctcacaggacaggctccaggcttgcctggtggacttggtttctgggtacatcttaatttaatgccagatctaccccagtgccataggtgtcagatggtccctgggaccaggccagccctagtggcttcatgctccagactgctcccagaatcatgatggcctccacaactcaaggtttcagaccagcc

SEQ ID NO: 637619 - DNA, 570 bp, Homo sapiens
ggactttctaacacttatcctcagaaaaacatcaatttaaacaactatctatgcacaagaataccttaacaagaactaaggataccaggtgaaagataacagaatcttcgtgtagcagagaaataagaaaagatgaattgaagagcataggaagaacaagtttacattacctgtgtcaccccacccacaggcatggaaccaggtaccagagcagcagagcacacagacaggcaacctttgtgttgaagaagaaaagggaagtgrgcactgaactttggtttggaccaaaaacacagagcctgcttcagtgaaatacagtaataggtatgcccctatggccccacactccaggctggtacctgcagactgagccaaaccagatctcacaggacaggctccaggcttgcctggtggacttggtttctgggtacatcttaatttaatgccagatctaccccagtgccataggtgtcagatggtccctgggaccaggccagccctagtggcttcatgctccagactgctcccagaatcatgatggcctccacaactcaaggtttcagaccagcc

SEQ ID NO: 637620 - DNA, 586 bp, Homo sapiens
cggttccagagcagttcctacagtcctaggacccaggcaagcctttgtggacctagtctccatgccagccctgaagacctaggttctaggccagaactcatacacccaacctccaggccattccccagcttctaggccagcctctgtggctacaggcaccagtctaccacctatggtctcaggcyctagactggccccaccccatcccagccctaggccagcttcaggcttcaggctggtttttgtgacccaggatccaataaactcagggtccagctgtgctctagcaaacccagcatacaggctgagttcagtagatcctgatgctaggctggccatcatggatgaaggctctaggaccatctctgaagactcaggctcaaggtcagcccccatctaccaatatcctaggtccatttctccagttgcaggctctaatcctgcaccagttccaggccagtccccatggactcagattccaggctcatcccagtaggcccagacattagacccattccagaacctagctagcacctgcagacacaggatcaatgcccacatcagagctgtgtcagcccctgtggac

SEQ ID NO: 637621 - DNA, 586 bp, Homo sapiens
cggttccagagcagttcctacagtcctaggacccaggcaagcctttgtggacctagtctccatgccagccctgaagacctaggttctaggccagaactcatacacccaacctccaggccattccccagcttctaggccagcctctgtggctacaggcaccagtctaccacctatggtctcaggctctagactggccccaccccatcccagccctaggccagcttcaggcttcaggctggtttttgtgaccyaggatccaataaactcagggtccagctgtgctctagcaaacccagcatacaggctgagttcagtagatcctgatgctaggctggccatcatggatgaaggctctaggaccatctctgaagactcaggctcaaggtcagcccccatctaccaatatcctaggtccatttctccagttgcaggctctaatcctgcaccagttccaggccagtccccatggactcagattccaggctcatcccagtaggcccagacattagacccattccagaacctagctagcacctgcagacacaggatcaatgcccacatcagagctgtgtcagcccctgtggac

SEQ ID NO: 637622 - DNA, 586 bp, Homo sapiens
cggttccagagcagttcctacagtcctaggacccaggcaagcctttgtggacctagtctccatgccagccctgaagacctaggttctaggccagaactcatacacccaacctccaggccattccccagcttctaggccagcctctgtggctacaggcaccagtctaccacctatggtctcaggctctagactggccccaccccatcccagccctaggccagcttcaggcttcaggctggtttttgtgacccaggatccaataaactcagggtscagctgtgctctagcaaacccagcatacaggctgagttcagtagatcctgatgctaggctggccatcatggatgaaggctctaggaccatctctgaagactcaggctcaaggtcagcccccatctaccaatatcctaggtccatttctccagttgcaggctctaatcctgcaccagttccaggccagtccccatggactcagattccaggctcatcccagtaggcccagacattagacccattccagaacctagctagcacctgcagacacaggatcaatgcccacatcagagctgtgtcagcccctgtggac

SEQ ID NO: 637623 - DNA, 586 bp, Homo sapiens
cggttccagagcagttcctacagtcctaggacccaggcaagcctttgtggacctagtctccatgccagccctgaagacctaggttctaggccagaactcatacacccaacctccaggccattccccagcttctaggccagcctctgtggctacaggcaccagtctaccacctatggtctcaggctctagactggccccaccccatcccagccctaggccagcttcaggcttcaggctggtttttgtgacccaggatccaataaactcagggtccagctgtgctctagcaaacccagcatacaggctgagttcagtagatcctgatgctaggctggccatcatggatgaaggctctaggaccatctctgaagactcaggctcaaggtcagcccccatctaccaatatcctaggtccatttctccagttgcaggctctaatcctgcaccagttccaggccagtccccatggactcagattccaggctcatcccagtagrcccagacattagacccattccagaacctagctagcacctgcagacacaggatcaatgcccacatcagagctgtgtcagcccctgtggac

SEQ ID NO: 637624 - DNA, 594 bp, Homo sapiens
aggaacattaaaagtgtttgataagattcaatcccttcaagaatacaagatatattttaattaaactatcaaaaatcaaaggaaaggaagattctgaaaacaaaaggagaaaagaagcaaataacatataagggagttccaataaggctaacagcagatttatgagcagaarcttatcggctgagagcatggaatgatatattcaatgttctatacaaaaacagtgtcaaccaaaaatactgttcccaacaaaatctgtttttttttgtttgtttgtttgtttttgcaaataatggagagattaaaaactttgccaggcaaacaaaaattgagggagtttatcaccatcagagctgtcttacaggaaatgctagagaacaaatgttaggacacaaagcatgtcataataaatttaagaatactgaaatcatattatttatcattccagataacaatggcatgaaaatagaaattaataactggatacattttagaaaattcacaaatacatgaaaattaaacagcatgcttctgaacaacagatggattaaagaggaaattaaaatggaaattaaaatttatgctgagaccagc

SEQ ID NO: 637625 - DNA, 539 bp, Homo sapiens
atcggctgagagcatggaatgatatattcaatgttctatacaaaaacagtgtcaaccaaaaatactgttcccaacaaaatctgtttttttttgtttgtttgtttgtttttgcaaataatggagagattaaaaactttgccaggcaaacaaaaattgagggagtttatcaccatcagagctgtcttacaggaaatgctagagaacaaatgttaggacacaaagcatgtcataataaatttaagaakactgaaatcatattatttatcattccagataacaatggcatgaaaatagaaattaataactggatacattttagaaaattcacaaatacatgaaaattaaacagcatgcttctgaacaacagatggattaaagaggaaattaaaatggaaattaaaatttatgctgagaccagcaaaaatggaaactcaacataccaaaacttgtaagatgcttcaaaacatttacattgaaaaaaaagaaagatcttaaacaaccaaatgttacacttcacggaactataaaaagaacaaact

SEQ ID NO: 637626 - DNA, 539 bp, Homo sapiens
atcggctgagagcatggaatgatatattcaatgttctatacaaaaacagtgtcaaccaaaaatactgttcccaacaaaatctgtttttttttgtttgtttgtttgtttttgcaaataatggagagattaaaaactttgccaggcaaacaaaaattgagggagtttatcaccatcagagctgtcttacaggaaatgctagagaacaaatgttaggacacaaagcatgtcataataaatttaagaatactgaaatcatattatttatcattccagataacaatggcatgaaaatagaaattaataacwggatacattttagaaaattcacaaatacatgaaaattaaacagcatgcttctgaacaacagatggattaaagaggaaattaaaatggaaattaaaatttatgctgagaccagcaaaaatggaaactcaacataccaaaacttgtaagatgcttcaaaacatttacattgaaaaaaaagaaagatcttaaacaaccaaatgttacacttcacggaactataaaaagaacaaact

SEQ ID NO: 637627 - DNA, 564 bp, Homo sapiens
attctgccatatatcttgtatatatgcttaaaagttccctctcatagctcaattccatgagcctctatctaaagtcagctgtagtctccaactcatacctcaaactagttactcataggccactcatagtcataacattccaaacctgcccatgcccagacttctttccttcctaacacgctccaaaggaatcyaccctcctcatgcagttttacctcttttaaacagagcaagctatttacagtaaacagaggtacccaagatctgttctcacctctcagttttccatcatttgggctggatacatcagaataggttctaaacttggtttgtggtggggcgagggaggggggattcaattcctgagttgatttggttgccatctaataagaagtaggtcgctcatatatccacctgcgttaactttaaagtggaagtcctctttatcacctgatcccaatccccctaacaaccctgacagataataacaataaacgataatgtgtaccatttattgaccattaccatgttataggcactgtgagagaaacactttgtatgtgt

SEQ ID NO: 637628 - DNA, 310 bp, Homo sapiens
ttaaacaaccaaatgttacacttcacggaactataaaaagaacaaactaagcccatagttaatagaatgaaggaaaaaataaagatcagagcagttaaattaaatasaaactataaaaacattaaagaaaaaccctgaaatttgatcttttgaaaagataaagaagattgacaaacctttatccagacgaggggaaaaaaagaaaaaaagataaaaataaaatcatacataaaaaggagacattacaacttatatcacaaaggatcagaatagactattatgaccaattatatgccaacaaattggaata

SEQ ID NO: 637629 - DNA, 580 bp, Homo sapiens
aaggatgctcaccctcacgacttctattcaatgcattaatggaagttctactcagagcaattaggcaagagaaaaaaataaaaagcatccaaattggaaaggaagtagctaaatatattcctgtttgcatatagcatggtcctacatataaaacatcctaaagactgcagcaaactaggttaaaactagtaagcaattcagtaatgtggcaagatacaaaatgaacatacataaatcagtggtgattctatacactaacagtgaaagatctgacaaagaaaatcatcctgtttgcatagatacaaaayataaatacttaggagtaaacttaaacaaggtggtaaaagacttatatagtggaaattattaaacataaatgaaggaagtgaagaaaacacaaataaatagaaaaatattccttatttacagattgggagaattaatactgtcaaaatgacaataatggcccaagtgatttacagattcaatgcaattcctatctaaataccaatgacattcttcaaaggaatataaaacaccaaaaaatgtatgtgtaatcacaaaagatccctaagaacaa

SEQ ID NO: 637630 - DNA, 580 bp, Homo sapiens
aaggatgctcaccctcacgacttctattcaatgcattaatggaagttctactcagagcaattaggcaagagaaaaaaataaaaagcatccaaattggaaaggaagtagctaaatatattcctgtttgcatatagcatggtcctacatataaaacatcctaaagactgcagcaaactaggttaaaactagtaagcaattcagtaatgtggcaagatacaaaatgaacatacataaatcagtggtgattctatacactaacagtgaaagatctgacaaagaaaatcatcctgtttgcatagatacaaaacataaatacttaggagtaaacttaaacaaggtggtaaaagacttatatagtggaaattattaaacataaatgaaggaagtgaagaaaacacaaataaatagaaaaatattccttatttacagattgggagaawtaatactgtcaaaatgacaataatggcccaagtgatttacagattcaatgcaattcctatctaaataccaatgacattcttcaaaggaatataaaacaccaaaaaatgtatgtgtaatcacaaaagatccctaagaacaa

SEQ ID NO: 637631 - DNA, 527 bp, Homo sapiens
acaataatggcccaagtgatttacagattcaatgcaattcctatctaaataccaatgacattcttcaaaggaatataaaacaccaaaaaatgtatgtgtaatcacaaaagatccctaagaacaaaatcaatcataagcaacaagaacaaagctgcagatatcacactacctaacttcaaaatgtactatgaagcaatagtaatgaaaacaggatggtactagcataaaaacagaaacatgaagtaatggaacagaatagaacatccagaaataaatccatgcatttaaggtgattgatttttgacaaagttgccaagaacacatgaatgaggagtgaacagtctctttaataaatgctgttgaaaaaactscatatccacatttggaaaattgaaattagaccttatctcacaccatgtataaaaatcaaccaaaaatggtttaaggacttaaaggtaggacctgagactgcaaaaccactagaaaaaaacacaggagaaaagcttcctgatattagttggggcaat

SEQ ID NO: 637632 - DNA, 527 bp, Homo sapiens
acaataatggcccaagtgatttacagattcaatgcaattcctatctaaataccaatgacattcttcaaaggaatataaaacaccaaaaaatgtatgtgtaatcacaaaagatccctaagaacaaaatcaatcataagcaacaagaacaaagctgcagatatcacactacctaacttcaaaatgtactatgaagcaatagtaatgaaaacaggatggtactagcataaaaacagaaacatgaagtaatggaacagaatagaacatccagaaataaatccatgcatttaaggtgattgatttttgacaaagttgccaagaacacatgaatgaggagtgaacagtctctttaataaatgctgttgaaaaaactgcatatccacatttggaaaattgaaattagaccttatctcacamcatgtataaaaatcaaccaaaaatggtttaaggacttaaaggtaggacctgagactgcaaaaccactagaaaaaaacacaggagaaaagcttcctgatattagttggggcaat

SEQ ID NO: 637633 - DNA, 597 bp, Homo sapiens
gagtttttttttctttttgctagtttataataatcttaaaaactctatcacacccataaaccacacaggtgagaggatgagagagagagagaatgawtgctacaatatgtggacagagtggggaatccaggtattccctagggtagtgtggaatggaggcagggagtgtgaataggaggctgtagctaggatccttattgatggatgggggtaggctagcagaggagagagggactcaagttgaactaggaaatagggaacatctcacaccaaaggcagtggcagttgggggccagggggattgcagtacattttctccacagactacaggtgtgagtgagagcttcagagacttccacccctacacaggaagaaatgggttagaggtttttgacttaaagctcccaaattagtatctggtccaatttcctaaaatggcagctcaccattcagggagaggtactgagaaggaaagtatagcaagaatatctggtttggagatcaaatgagggataaggggagacagtgatgctctctaaatctgactcagaaaagcaagaattggaagaggaccttgggtgaaatggtggccaacac

SEQ ID NO: 637634 - DNA, 597 bp, Homo sapiens
gagtttttttttctttttgctagtttataataatcttaaaaactctatcacacccataaaccacacaggtgagaggatgagagagagagagaatgaatgctacaatatgtggacagagtggggaatccaggtattccctagggtagtgtggaatggaggcagggagtgtgaataggaggctgtagctaggatccttattgakggatgggggtaggctagcagaggagagagggactcaagttgaactaggaaatagggaacatctcacaccaaaggcagtggcagttgggggccagggggattgcagtacattttctccacagactacaggtgtgagtgagagcttcagagacttccacccctacacaggaagaaatgggttagaggtttttgacttaaagctcccaaattagtatctggtccaatttcctaaaatggcagctcaccattcagggagaggtactgagaaggaaagtatagcaagaatatctggtttggagatcaaatgagggataaggggagacagtgatgctctctaaatctgactcagaaaagcaagaattggaagaggaccttgggtgaaatggtggccaacac

SEQ ID NO: 637635 - DNA, 597 bp, Homo sapiens
gagtttttttttctttttgctagtttataataatcttaaaaactctatcacacccataaaccacacaggtgagaggatgagagagagagagaatgaatgctacaatatgtggacagagtggggaatccaggtattccctagggtagtgtggaatggaggcagggagtgtgaataggaggctgtagctaggatccttattgatggatgggggtaggctagcagaggagagagggactcaagttgaactaggaaatagggaacatctcacaccaaaggcagtggcagttgggggccagggggattgcagtacattttctccacagactacaggtgtgagtgagagcttcagagacttccacccctacacaggaagaaatgggttagaggtttttgacttaaagctcccaaattrgtatctggtccaatttcctaaaatggcagctcaccattcagggagaggtactgagaaggaaagtatagcaagaatatctggtttggagatcaaatgagggataaggggagacagtgatgctctctaaatctgactcagaaaagcaagaattggaagaggaccttgggtgaaatggtggccaacac

SEQ ID NO: 637636 - DNA, 597 bp, Homo sapiens
gagtttttttttctttttgctagtttataataatcttaaaaactctatcacacccataaaccacacaggtgagaggatgagagagagagagaatgaatgctacaatatgtggacagagtggggaatccaggtattccctagggtagtgtggaatggaggcagggagtgtgaataggaggctgtagctaggatccttattgatggatgggggtaggctagcagaggagagagggactcaagttgaactaggaaatagggaacatctcacaccaaaggcagtggcagttgggggccagggggattgcagtacattttctccacagactacaggtgtgagtgagagcttcagagacttccacccctacacaggaagaaatgggttagaggtttttgacttaaagctcccaaattagtatctggtccaatttcctaaaatggcagctcaccattcagggagaggtactgagaaggaaagtatagcaagaatatctggtttggagatcaaatgagggataaggggagacagtgrtgctctctaaatctgactcagaaaagcaagaattggaagaggaccttgggtgaaatggtggccaacac

SEQ ID NO: 637637 - DNA, 583 bp, Homo sapiens
caacatcttaagaaccatcagctcacattgcccagagacaagtggaaagggaagggcttatttgatccaatttttttttttttwaaaaaagcccaattcttcatctttaacagaagaaaggtgtaaaaatttataacaaagcattatctaaatttaaagttacagaaaagtgttaaatttctagctaacttatcatcagttgggagtgagaccattgggaatggagtgaataaaggggttccctaagaataaacacagggcaagaggggctgtttccaaagtaggctcatctccagttgtcagaaccatgctcattaggaaaaggaagcactcaaggaacttaaagctttgtggagtttttttcccccactttcttctttaaactgaggggctgcacttgaaggtacttgtggagccactcacacacaatgctactcaaacgcacgctacattcacacagacacatgacattaaaatttatactgtacagcaatattcttatccagtgtagagaaaacaagtgtgttttaaatgttttctttccttgtatgttttaaagcccaaactccaatgtgatccatca

SEQ ID NO: 637638 - DNA, 583 bp, Homo sapiens
caacatcttaagaaccatcagctcacattgcccagagacaagtggaaagggaagggcttatttgatccaattttttttttttttaaaaaagcccaattcttcatctttaacagaagaaaggtgtaaaaatttataacaaagcattatctaaatttaaagttacagaaaagtgttaaatttctagctaacttatcatcagttgggagtgagaccattgggaatggagtgaataaaggggttccctaagaataaacacagggcaagaggggctgtttccaaagtaggctcatctccagttgtcagaaccatgctcattaggaaaaggaagcactcaaggaacttaaagctttgtggagtttttttcccccactttcttctttaaactgaggggctgcacttgaaggtacttgtggagccactcacacacaatgctactcaaaygcacgctacattcacacagacacatgacattaaaatttatactgtacagcaatattcttatccagtgtagagaaaacaagtgtgttttaaatgttttctttccttgtatgttttaaagcccaaactccaatgtgatccatca

SEQ ID NO: 637639 - DNA, 617 bp, Homo sapiens
cagagacaagtggaaagggaagggcttatttgatccaattttttttttttttaaaaaagcccaattcttcatctttaacagaagaaaggtgtaaaaatttataacaaagcattatctaaatttaaagttacagaaaagtgttaaatttctagctaacttatcatcagttgggagtgagaccattgggaatggagtgaataaaggggttccctaagaataaacacagggcaagaggggctgtttccaaagtaggctcatctccagttgtcagaaccatgctcattaggaaaaggaagcactcaaggaacttaaagctttgtggagtttttttcccccactttcttctttaaactgaggggctgcacttgaaggtacttgtggagccactcacacacaatgctactcaaacgcacgctacattcacacagacacatgacattaaaatttatactgtacagcaatattcttatccagtgtagagaaaacaagtgtgttttaaatgttttctttccttgtrtgttttaaagcccaaactccaatgtgatccatcattccttgcctacctaattcctcaagtaagatattttttgtttgtttgttttgcttgtttttttttt

SEQ ID NO: 637640 - DNA, 617 bp, Homo sapiens
cagagacaagtggaaagggaagggcttatttgatccaattttttttttttttaaaaaagcccaattcttcatctttaacagaagaaaggtgtaaaaatttataacaaagcattatctaaatttaaagttacagaaaagtgttaaatttctagctaacttatcatcagttgggagtgagaccattgggaatggagtgaataaaggggttccctaagaataaacacagggcaagaggggctgtttccaaagtaggctcatctccagttgtcagaaccatgctcattaggaaaaggaagcactcaaggaacttaaagctttgtggagtttttttcccccactttcttctttaaactgaggggctgcacttgaaggtacttgtggagccactcacacacaatgctactcaaacgcacgctacattcacacagacacatgacattaaaatttatactgtacagcaatattcttatccagtgtagagaaaacaagtgtgttttaaatgttttctttccttgtatgttttwaagcccaaactccaatgtgatccatcattccttgcctacctaattcctcaagtaagatattttttgtttgtttgttttgcttgtttttttttt

SEQ ID NO: 637641 - DNA, 693 bp, Homo sapiens
ttgcatttaacgagttttttgaggaagaaaattatacaacattcatgcttttcatgatactgaaaatactgaattatatgtcaatttaatttatctcttagaagaaaaagtaacataattaaaatcactggttctctgatctttagttctctctccacaaataaaacctatcacttttcacaataaaaaagcaaaaaaaattatacaattaaaaggaggtaaactgaaactctttatcccctttgttaaaaggtaaattaattgtgaaagatcaacataacaatcatcactgatttttttttaccatttaactctcrttcagatgataaataataatctataatgcaccagtgtatacaaatttcttatcacattttcccttattttgtaaaaaaggaaaatggatttcatgcttaaaagaaggattagtgtgacattactgaaagacaattttgctattatcaaagttcaaaaagtacccacaggaatcttttaggaaacaggttactgtccatttcccaaaatgtgaaattaggtgatcataaatacacaagaaaaacaaaacattttttgtccttagttatattgctcccttccggcccaaaattcagacgaaaaagattaaacagcttttgtagatcatgtctatctattttagcaacttaatgaaaagcaaccttcattttaaaataa

SEQ ID NO: 637642 - DNA, 533 bp, Homo sapiens
cactgtgagagaaacactttgtatgtgttatctcttttagtcatcattgtaactctaagaaagattctcttattgtccattctaagatgtattaactcagacttaaaacagaagagccagaatccaaagcaaggtctaattccaaaacctggatgttaatccctgctggactgagtctcaaaatgaggaaaaaatgcaggttaggtattaattcaagactcttctctgtccacacccccccacacacacacctacagctattttataaaccaagagtttaattttaggatatctagaaacgtttaataataaagttcagcccaattgtcccagattactgtaagtgcttgccaccacccactccaacacacagctatttgctctttgccacttgccttgtcttaatactcaagacaaagttgaatataggtatakatagaaaggtgttcagtgaactgagaggactggcactagtcaaaaattcaaaatactttacttttctttgttatgttccctttcatttctgaaaaaac

SEQ ID NO: 637643 - DNA, 558 bp, Homo sapiens
tttttaaaatccccttttatcagagttatgattggggtcagctgaacactatttcatagggtgaatacccagttaatttaataggggtgcacctgactcagagcaggaccataggcagcacctgaacccactttagatgagtttctttgcaaaacttctttaacagctgtttcagtgtccagttcattctttcaacttttccataactctgttggcaataagctgtatgcagtttccatttgatttttaacatctgcgttagctgttgtactatttctgccacaaatgctgagccattgtctgataagaaagtgcagacaaatactagcatgtaccggtagcctctggcttgagacagcttgrtaaaatccacaagcaggttttcacagggtgtagctccagtttcttgaatccttgggggccgtgttggcccctgccatggattgttttgggcaccagccaagaattgctcagaaacagctccagtgatggcagttaggtgtggcacgtagaaatgccatcctacaagagtttctaatgcaatttttcccatatgtg

SEQ ID NO: 637644 - DNA, 516 bp, Homo sapiens
tgccttccacagcaggtgcagaaggttttcggtttttcccaggtgcagtagcccttggccagtggctttcttatacgatgattctgaccattttccttagtctcttgacattcatcctctcagtgtcctttccttttgcaccatacacattaatctttttctagcctcagccagctcttaaatccctgtccatactggcctctttcaccaccccacccatgcctctttgaaaagtcagcttcccttcccattagggctgctgctagcaaatctgcctttccttaagcttctgattagcttccttctttgtctcctgatcttggttaatrtacaccttggtagccacttcaataagctgagtagcactcacacctgcagagcttctaacttctgcaatttatgtctgatatttccctgggcctgacctacaaatgccctatttaccaggcactgtttttcagcagcctcagggtcaaatggcatataaagctggtaagccttgcagagcctctcaca

SEQ ID NO: 637645 - DNA, 516 bp, Homo sapiens
tgccttccacagcaggtgcagaaggttttcggtttttcccaggtgcagtagcccttggccagtggctttcttatacgatgattctgaccattttccttagtctcttgacattcatcctctcagtgtcctttccttttgcaccatacacattaatctttttctagcctcagccagctcttaaatccctgtccatactggcctctttcaccaccccacccatgcctctttgaaaagtcagcttcccttcccattagggctgctgctagcaaatctgcctttccttaagcttctgattagcttccttctttgtctcctgatcttggttaatatacaccttggtagccacttcaatargctgagtagcactcacacctgcagagcttctaacttctgcaatttatgtctgatatttccctgggcctgacctacaaatgccctatttaccaggcactgtttttcagcagcctcagggtcaaatggcatataaagctggtaagccttgcagagcctctcaca

SEQ ID NO: 637646 - DNA, 581 bp, Homo sapiens
tataatgtcagcctttatagtctagagcacacgcaatccattcacaatccacaaaaatttgaacaagggctgagactgagacagaggagattttttcatccatcttttcctagttacctaggatttagaaggtatattagggttttccagaaaacaaattatataattcacacacacacatacacacatctatacccatactttgtgttgagtattaagacaaggagagaggcaaagaacaaatagctgtgtgttggaggaggtagtggcaagcacttacagtaatctgaaataaggggctgaactttaaaagtttccatatatcctaaaattaaactcttgatccataaaatagctgaaagtgtgtgtgggatgggggcagagaaggattttgaattaatgcctaaccttcctcagtgtgtgtgtrtttgtatgtgtgtgtgaattatatattctcttttctggaaaaccccaacataatttccaagtttaaggtaactagggaaagacgggtgacaaaaaatctcctccatctcagtctcagcatttgttcaaatttttgtggattgtgagtagattgc

SEQ ID NO: 637647 - DNA, 581 bp, Homo sapiens
tataatgtcagcctttatagtctagagcacacgcaatccattcacaatccacaaaaatttgaacaagggctgagactgagacagaggagattttttcatccatcttttcctagttacctaggatttagaaggtatattagggttttccagaaaacaaattatataattcacacacacacatacacacatctatacccatactttgtgttgagtattaagacaaggagagaggcaaagaacaaatagctgtgtgttggaggaggtagtggcaagcacttacagtaatctgaaataaggggctgaactttaaaagtttccatatatcctaaaattaaactcttgatccataaaatagctgaaagtgtgtgtgggatgggggcagagaaggattttgaattaatgcctaaccttcctcagtgtgtgtgtgtttgtatgtgtgtgtgaattatatattctcttttctggaaaaccccaacataatttccaaktttaaggtaactagggaaagacgggtgacaaaaaatctcctccatctcagtctcagcatttgttcaaatttttgtggattgtgagtagattgc

SEQ ID NO: 637648 - DNA, 521 bp, Homo sapiens
cagttggtttcaattttgaatgttttcagcaggctaaggctttgtgcagggtcttatttgaggctgaattcttgaccttggtttcacagaggggtatattagcaaagtatatttggtattctagtttgggctgtaatctagcagatggtgcttaagtgtaatggctggtagataggctgttagcctggtgtctcctctgtacttcctcatgcttgcagccatgctcccacttagtgctctgaaggtatggactcctcttccacttgaatgctgtccgtagatcctggcttggaactcctaggctgcacaccctctttttgtttatttctgcctggagttcattgagtttattctaaaggtttagaatcctcaattttttagtctctctaaatagatacttaaccaatgtttaagaaaagagttgcagttctaaacatcaaatcttaacaatagctgatttttgcttctgctgcaggtrcctataaaagcagagggaagaaaattgatattgccttagagac

SEQ ID NO: 637649 - DNA, 589 bp, Homo sapiens
gtgcctagcaaggtgcatttctccccggggcagagatttaggtatggtaattagcaaagattcatgttagggtagcgctgctgagctctttcccatcttgtagcacggtggttactgacatccagcctttgtttctgtaagcaagcacagctgcaagcacaggttaccttcataggttctggagttttaggaaagcattgaggtcattctgtggccacatagacggttgtttaaacaacgcggtgctcatttgaggcgggggttgtgggatgaggcaggtaaaagtgcagattccatagctacaccccgacatactgaatcagagtctgtgaaggtgggatgtggaatccttttttaaaaagctcagaggagccaattcacaggaacaataaaaggttgatctgagccaaactccttaatttagaaatgaggaaatggggatccctaacagaggtacagggagagggttggaggaaagytacaccataatagttttagggtggttctttcctggccttggaaagttttctcagccggggctctgatcagtacacagttgaatactttaggggaaacctcttcatatatc

SEQ ID NO: 637650 - DNA, 517 bp, Homo sapiens
gtaacattccactgtgtgaatgtatcaaaatctgtttatccattcactcactgaagaacatttgaattgtatccagtttgggggctttgtaaataaagctgttgggaacatttgcatacaggtttttgtatgaaggttaattttcatttctcttgagttcacctagcagtggaattgctttcatggaaagtgtatgtttaactttataagaaattgtcaaaatcttcaaaatgttttcaaaatggctgtataattttgcatcctcgctaccaatgtgtgagagttccagttgtttcatatacttgtcaacacaaagcttttctgattctttcattctcataggtatgtaatggcatctttttgtrgtatttgcattacactaatgaccaataatttgagcatctttttatgttcttatatcatccacatatcttctttggtgaaatgtctattaaaatattttgcccatttttatactggttagttatatctgagttttgagagggctttacatatt

SEQ ID NO: 637651 - DNA, 601 bp, Homo sapiens
tttagcagaaaacccaccaccactaccacatactttcccacaaccttggaaaggaagagacatgttttagttggaatttgctgtccctagactctccttcctcttccagtcttttttggaatggggacttttctgtactgcctcctgtactgccactttcactcttttggcatggtgacttttctgtagtgcctccttaagatctcaggtcccatcaaactgtagaaagaagaattacatttgtttgacatgtttgcttctctgatagcttctgaggagattaggaggagkgcagatttttacatcctcctttagggctgaaagtacgattaccccatatggttctactgccttcacacttaccaagtctccccataagagcctggccttttacatatattatctcacttaccaagcacagctcagagatgttaaacaagtagcccaaggtcacacagtgggtggtaatagtagcagagcctggatgtgtgcttccaccctctggaccctgctacctcccacagaggcttcacagtgcaatctgggactggcactgaatcctcagtccacctcagaccctgtcctggccctcaaggaatct

SEQ ID NO: 637652 - DNA, 612 bp, Homo sapiens
gtataactcaggattacatgtgactcttgctatacagcctagatggctgttatccaggcttgctctagtgctttgcatgggcttatctcataacttttgctatggtgcctagatggctgcagtccaggcctgcctrctcaggcatctcatgaccttcacttgctgcatagataaaaacaggatacttgaagttactagttacagaaaacagaaatctataaactcataagtttactcatatcatgggggaaaggaaaatttgttttcttctccctttgtggagggaatgctggaagtctccagagcacattcctttcagtcctggcttcttagataatgttatcaagacttcacctgggtccaggttttgcctgttactgcctttgggatgattcagcctaatatagaaagcatgttttgctcttttaaattttatttttctttctttctttaatttcctgcctcatttcccccctttgatgcttcctataaatggaatttaatagaaagcttcactacaatttttttcttcactgacaaggcagatctactctctttggcaaatgctgatacttagttagagccattagttgagtggtggttgttttgtct

SEQ ID NO: 637653 - DNA, 671 bp, Homo sapiens
agtctgtggtacattattacccctaatagtctgtctagtctgaacttttctaacaaaatacataatgtagagccctcatgatctaatcattcaacaaagacccatctcttaatgccatcaccatggagattaggatttaaacatatgaattgtgggggatgcaaagattcacaccatagcacaaactaatacaaagatattttcttataattcgtgagtctgtctctactctctctgttctgttccaatggtatatttttctgtatattcaccaactactgtcttaattttgagatttcctactcattagtataccttgtcattgacttatgtcacatttttgtgtcttcaacaaaataattttctccataaaaggttaacaaatcatttttacatttatttctaggtaaataatatttttctaggcattataaaayaatttggggggtattacattttctgatattgttgactaagctaaatccaatgttttgtaaatatcattcttaaacctagcccgtttactactttaaactcattctaatattttatctataaatctttttagtttcaaaaataggtaatgatattatctgtggatatttcatgaatatgctttgttcccttcttttcaatcctcaaatattatcttttactaatttttcttatca

SEQ ID NO: 637654 - DNA, 570 bp, Homo sapiens
aaggcagccatttcttaccttagagcattaggtcatagggtaaatactagggacaacacaggcttccccagttagatctgtttaccctacctccattaagtaacctttgagacagatggccctyttgggggtagtttgaccaaggatattgccccctaatggtatttactttaaaccagggtacctgagttttaatcattcctagaactactctcttaaccatgttaattatccacaagtgtgtttactcaaatcttctgttgttaattctacactaaataaactcctagagtctgagctactcagggcaagctgcagtgacaaacctcttttggtttacaggcggtcagacactcagcatgactggcaaaacagattatctgtgtgtcagtgtacattttattcatccgtcgtttgggtcagggtctgcgggcagacacaggtagctactgccctgttgtgagaagcaatacctcaattggtgccccatgtgaggagagctgtgtgaggacagtcaggggtctgcagaaacagaccttccgcagttggagccccttgtaaggcaagcta

SEQ ID NO: 637655 - DNA, 570 bp, Homo sapiens
aaggcagccatttcttaccttagagcattaggtcatagggtaaatactagggacaacacaggcttccccagttagatctgtttaccctacctccattaagtaacctttgagacagatggccctcttgggggtagtttgaccaaggatattgccccctaatggtatttactttaaaccagggtacctgagttttaatcattcctagaactactctcttaaccatgttaattatccacaagtgtgtttactcaaatcttctgttgttaattctacactaaataaactcctagagtctgagctactcagggcaagctgcagtgacaaacctcttttggtttacaggcggtcagacactcagcakgactggcaaaacagattatctgtgtgtcagtgtacattttattcatccgtcgtttgggtcagggtctgcgggcagacacaggtagctactgccctgttgtgagaagcaatacctcaattggtgccccatgtgaggagagctgtgtgaggacagtcaggggtctgcagaaacagaccttccgcagttggagccccttgtaaggcaagcta

SEQ ID NO: 637656 - DNA, 573 bp, Homo sapiens
actatatgtgtacaaaacataccacattttctttatacatcatccattgatgggtacttagtttgattccacatstttgctattttgaataatgctgtaatgatcatgggagtacagataactctttaacatactaattacatttcctttgggtatataaccagtaatggtattctatattaaattattacatctgtttatatcaccagtctcccttatgagatcatcagctgttggactgttctgttcatctttgcatccccaagatcaatcatagtatctggcattagccagaatttgggacttatttattgaatgagaagaaatatggatgagtaaattacttaactgaggagaccctatgcttctgtaacctgagatggtcaagattccagcacccatcatggtaataaagaaaaatatctttggcccctcaaatcattaagcaaaagggaaaagtcaagctgggaactgcttagagcaaacctgcctcccattctattcaaagccacccctctggtcactgagataaatgcatatctgattgcctcctttggagagactcatcagaaa

SEQ ID NO: 637657 - DNA, 548 bp, Homo sapiens
acctgtggctatagaagcaaagtgaaaagatcctcctatccagcattctccacagtcataacccctgggttggggacggaaggaagatacaatgattttaggtcccacatccagagcacagtagtatgagggatgggctcccaaggccttgggaagctccacccttgtgactttgaagggtgtagcctccatggctgctctcatgggctggagtcaaaagtttgggctgcaagcctgaagccttctgwgtttgtgagccgatagtgagttcaccatctttgagtctggagggtagcagcccccttcccacagctactctaggcagtaccctgatggggactctgcgtggagtctccagtcccacatatccccttggtactgccctagaagagtttctctgtgaaggctctgcccctgtggcagaattctgtctgaatacccaggctttcccatacatcctctggaaactatgtgggagctatcaagcctttttcatttttgcattttgtgcacctgcaggcttaacaccatgtggaagccgccactgc

SEQ ID NO: 637658 - DNA, 548 bp, Homo sapiens
acctgtggctatagaagcaaagtgaaaagatcctcctatccagcattctccacagtcataacccctgggttggggacggaaggaagatacaatgattttaggtcccacatccagagcacagtagtatgagggatgggctcccaaggccttgggaagctccacccttgtgactttgaagggtgtagcctccatggctgctctcatgggctggagtcaaaagtttgggctgcaagcctgaagccttctgtgtttgtragccgatagtgagttcaccatctttgagtctggagggtagcagcccccttcccacagctactctaggcagtaccctgatggggactctgcgtggagtctccagtcccacatatccccttggtactgccctagaagagtttctctgtgaaggctctgcccctgtggcagaattctgtctgaatacccaggctttcccatacatcctctggaaactatgtgggagctatcaagcctttttcatttttgcattttgtgcacctgcaggcttaacaccatgtggaagccgccactgc

SEQ ID NO: 637659 - DNA, 584 bp, Homo sapiens
ttttgccattgtcttggatgttagcccctggctcccttttgtaatactaatctctctagtaasaggttgttctgcccactgcttggattctttctctgccaaagaaccaagctacaaattttccaaactttaatgctctgcttccttttaaaataaaagtttcagctgggcactatggctcacacctgtaatcccagcactttgggaggccgaggcaggcagatcacgaggtcaatcctggccaacatggtgaaagcctgtctctactaaaaatacaaaaattagccaggcatggtggcaggcacctgtaatcccagctacttgggaggctgaggcaggagaatcacttgaacccaggaggcggacattgcagtgagccatgatcacaccattgcactccagcttgggcaacaagagtgaaactccacctcaaaaaaatatgtatatatgtaaatatatgttcaaattttaagtcattcctttgcttctgcatctgatcataggcaattaaaagtagccacaccaattcttcaatgttttgctgctttaaaatttcttctactagataccataggtcatcactc

SEQ ID NO: 637660 - DNA, 584 bp, Homo sapiens
ttttgccattgtcttggatgttagcccctggctcccttttgtaatactaatctctctagtaacwggttgttctgcccactgcttggattctttctctgccaaagaaccaagctacaaattttccaaactttaatgctctgcttccttttaaaataaaagtttcagctgggcactatggctcacacctgtaatcccagcactttgggaggccgaggcaggcagatcacgaggtcaatcctggccaacatggtgaaagcctgtctctactaaaaatacaaaaattagccaggcatggtggcaggcacctgtaatcccagctacttgggaggctgaggcaggagaatcacttgaacccaggaggcggacattgcagtgagccatgatcacaccattgcactccagcttgggcaacaagagtgaaactccacctcaaaaaaatatgtatatatgtaaatatatgttcaaattttaagtcattcctttgcttctgcatctgatcataggcaattaaaagtagccacaccaattcttcaatgttttgctgctttaaaatttcttctactagataccataggtcatcactc

SEQ ID NO: 637661 - DNA, 584 bp, Homo sapiens
ttttgccattgtcttggatgttagcccctggctcccttttgtaatactaatctctctagtaacaggttgttctgcccactgcttggattctttctctgccaaagaaccaagctacaaattttccaaactttaatgctctgcttccttttaaaataaaagtttcagctgggcactatggctcacacctgtaatcccagcactttgggaggccgaggcaggcagatcrcgaggtcaatcctggccaacatggtgaaagcctgtctctactaaaaatacaaaaattagccaggcatggtggcaggcacctgtaatcccagctacttgggaggctgaggcaggagaatcacttgaacccaggaggcggacattgcagtgagccatgatcacaccattgcactccagcttgggcaacaagagtgaaactccacctcaaaaaaatatgtatatatgtaaatatatgttcaaattttaagtcattcctttgcttctgcatctgatcataggcaattaaaagtagccacaccaattcttcaatgttttgctgctttaaaatttcttctactagataccataggtcatcactc

SEQ ID NO: 637662 - DNA, 473 bp, Homo sapiens
atgtaaatatatgttcaaattttaagtcattcctttgcttctgcatctgatcataggcaattaaaagtagccacaccaattcttcaatgttttgctgctttaaaatttcttctactagataccataggtcatcactcttaacttcaaccttctgtaacacctaaggttcttgcctagccatgccaaagaattggggttgtggctgaccacagtgagtgatagagactcagactgagagagagtgagcagtaggttttattgagcagagcaagagtacaaagcttccacagcatggaaggggtcccraatgggtagccactggtggttttgggtgattgccttttaaactcttttaggcgggaaatacgagtggcgggaagatgttaccagagcaagaaacaaaggcagtaaattattttgtgccatgtcttagattttgaggaaaactggaattgcaacttaggttttatcta

SEQ ID NO: 637663 - DNA, 436 bp, Homo sapiens
tcattttggactgcactgtccgtatccctatgagcatcttggtcccaaccttttatcagggctctaagacgttccaaacttttctgccatttcctatctcttctgagccctgcaaactcttctaatttctgcctgttacctatctccaaagttgcttttacattttcaaatgtctttatagcaacaccctattctcagtaccaattttctttgtcaatacattctgatattgctattaaaaaaaaaaacacgaagctggataacttataaagagaagaggtttaattagttcatggttctacaggcagtacaagcatggccccagcatctccttctggcaaaggcctcrggaagattacaattatggtgaaagaaaagagaaggtgacatatcatatggtgagagtggaagcaagagagagaatggagtggtccca

SEQ ID NO: 637664 - DNA, 354 bp, Homo sapiens
cattgttctttgtattgtaagatgctggtttccactttgtgatgaattttgcacattgtgactccagatatctcatcaygaatctcttcctcttgagactttagttgaattagtttacacaaatatttgatctggaaactttctctcactctagcctggtactggcttgaatatgttgaacaataagtcctattatgttatgaaaaaatttgattgattcatcctcaaatcctgcatttttgtcttttctagcctaacatattatttctcttattatacttatcatcagaaaatctggaagttcagtaaccaccagaaacctgaaatagaagtcatacttcatggagaaagagg

SEQ ID NO: 637665 - DNA, 602 bp, Homo sapiens
atgcaaccatttgtctcatatacctgtgacttggaagttctctcccaactttgagttgtcccacctttccagacataatcaatgtttattttacatatgttgattaatgtctcatgtctccctaaaatgtataaaattaagctatgctctgaccactttgggcacatgttgtcaggtccttctgaagctgtgttacacatgtgcatccttggcaaaataaaatttctaaattaactgagacctgtctcaaattttcagggttcacattttggtaactatgaagggattctgagtggaggtgtcrctgaactttgagaaatctcctctcagtgccagataccagcatgagctaactttatgactcaaaccaacagaacaatttgctgaggtctgagagaacccccttcagagaatccttaatctcctcaaattttgtttagatctaaagtttattttgccgtacaactccctcttttattggagttttacttgattccaacaagaaagacaagtttttctacttccatgatgatggaaggtgggtaactcttttgtggagtttgagctcacttctgacaaggaagatgaggttttttttttct

SEQ ID NO: 637666 - DNA, 530 bp, Homo sapiens
attaactgactcctaaataaaggttgtaaaggttataaaagtgttatggaagttgtatcttatgatcaagattaaaattttatagattgtaaaattttgaaaawaaaacatttaattggcttcatgctgtttttattagggcttattatttggaaatttaagtctcctctctcaaaaaatgaaggtttttgccttctttattgaagtccttgagttatcactttggtcagatgaaagacttattttacaatgatccatgatatcaagtgttttaaacctttgatatatcacggactttccaaaatcaaatgctaaatcgttttcttctgatgtaattaatcctttaagatattaggtttcctaaagtccaaaaatgaaataatttggcttatttgctataaaaattatacagaaaacattgtcaaatatgaaatagtgtttgggttttttaggctgtatttgtataaatatattattggtatgtgttccaaaatcatgggaaactcatataattctgccatgacttagtg

SEQ ID NO: 637667 - DNA, 530 bp, Homo sapiens
attaactgactcctaaataaaggttgtaaaggttataaaagtgttatggaagttgtatcttatgatcaagattaaaattttatagattgtaaaattttgaaaaaaaaacatttaattggcttcatgctgtttttattagggcttattatttggaaatttaagtctcctctctcaaaaaatgaaggtttttgccttctttattgaagtccttgagttatcactttggtcagatgaaagacttattttacaatgatccatgatatcaagtgttttaaacctttgatatatcacggactttccaaaatcaaatgctaaatcgttttcttctgatgtaattaatcctttaagatattaggtttcctaaagtccaaaaatgaaataatttggcttatttgctataaaaattatacagaaaacattgtcaaatatgaartagtgtttgggttttttaggctgtatttgtataaatatattattggtatgtgttccaaaatcatgggaaactcatataattctgccatgacttagtg

SEQ ID NO: 637668 - DNA, 446 bp, Homo sapiens
cacacaaaaatacaaataactctaacctaaaaaaaattttaatctcactttttttctaagcaaaccaaaacttaataatagtggcataggaattattttgataaaatgtaaaatctgttagaccagttaccaaaaggcaaaacaaaagaccttttgccgtgtacagaatattatgttggaagaaaacatttccttgagatctttaagaaaatatggttaacttcaggccacaacaaacagaacttgaggggaaaaaatcttacatgagctgaaaataagttgaaggagagygctattatttcgtgccttttaaaagaagggagaagaaaatgaaaattggtgaaacgcaataaaagttgaactttgcagtaaaaaaattaaaatatcttaaaatttattaagagtaaataaataacttaaggaaatttatttttctaattaattct

SEQ ID NO: 637669 - DNA, 504 bp, Homo sapiens
gagctccttttaaaaaaatgttttaaatctcattactatatttcagctaggacaaattgctgctatttcagaagcaccaagtattaaagcagaaatggcttgatttagaaactgtgaatccccaaaatcagagacaggtcacagtttattaggaagtttattttgccaaggttgaggatgcacatccatgacatagcctcaggaggtcctgacaacatgtacccaaggtggtcagagaacaatttggtttatrcattctagggagacatgagacatcaatcaacatatgcaagatgaacattgattctgtctagaaaggcgggaaaactcaaagcaaatgtgggaagactcgaagtggtgagggggcttccaggtcataggtagatcagaggtaaatggttgcatttttttgagtctctgattagcctctccaaaggaggcaatcagatatgcatttatctcagtgagcagagtggtgaccttgaatagaatgggaggcaggtt

SEQ ID NO: 637670 - DNA, 493 bp, Homo sapiens
tctttcagtgaaaagtcagaaaaaaaattaggatggatgcagatgcaggtgtatgtatgtacgtatacagcaggtcatcaaataatgtcattttgttcaatatcttttcattacaatggtgaagagaaaaacatcaattcctggctggactactgtctatgtgcagtttgcctgttctcctcatgtctgcatggattttctctgtctaaattgtcccaggatgagtgagactctgtgtgtgtgtgtgtgtgtgtgtgtgtgtgtgtgtgtgtgtgtgcgccctgtgatggaaaggtgtccagtctggggtgggttcctgccttgtgctctgagctaccargacaggcttcagtcacttgctcccctgaactggaaaaagccagttgaaaaatgaatgaatgaatgaatgaatgaatgaaacattcataataaaacaaaaattcatgaagtctatgataatcatacaaatgaatgacaataaacaatgctgtgc

SEQ ID NO: 637671 - DNA, 585 bp, Homo sapiens
tacaagcatattgataacttataattcaaggaaagcatttggacattttacaaattcaaaaggataygcactggctttttctgaagtatttccagtttcaggtacctaaaaggttttgaagaattcattctcaacattgagaccctggggagtgctctttccaagggtttgcaggggaaaagaaataaattaacaaatacaaatgatttagaacaagaatccaaattaattgaactgccaagataaaaaggctgttctaaataattctgcttacctgaagtttctttgtagacctgtaggcacactgcctgctgcagtttctcagtatggcaatggaaaggtttctgtagctaatactctacggactgaaacacaataaaattcaactgactcacgttgtcactgttaagcataaagcttcaggaagttatgggttcctgtagattaaaccagacgttctgtccatagacaagaaatcacaggctttgtagaccagaggaggactgagaatatgttccatattgagcagcttctacaattctaagaagttttactcaagaagcttttgatttatatataacctct

SEQ ID NO: 637672 - DNA, 477 bp, Homo sapiens
acattttacaaattcaaaaggatacgcactggctttttctgaagtatttccagtttcaggtacctaaaaggttttgaagaattcattctcaacattgagaccctggggagtgctctttccaagggtttgcaggggaaaagaaataaattaacaaatacaaatgatttagaacaagaatccaaattaattgaactgccaagataaaaaggctgttctaaataattctgcttacctgaagtttctttgtagacctgtaggcacactgcctgctgcastttctcagtatggcaatggaaaggtttctgtagctaatactctacggactgaaacacaataaaattcaactgactcacgttgtcactgttaagcataaagcttcaggaagttatgggttcctgtagattaaaccagacgttctgtccatagacaagaaatcacaggctttgtagaccagaggaggactgagaatatgttcca

SEQ ID NO: 637673 - DNA, 477 bp, Homo sapiens
acattttacaaattcaaaaggatacgcactggctttttctgaagtatttccagtttcaggtacctaaaaggttttgaagaattcattctcaacattgagaccctggggagtgctctttccaagggtttgcaggggaaaagaaataaattaacaaatacaaatgatttagaacaagaatccaaattaattgaactgccaagataaaaaggctgttctaaataattctgcttacctgaagtttctttgtagacctgtaggcacactgcctgctgcagtttctcagtatggcaatggaaaggtttctgtagctaatactctayggactgaaacacaataaaattcaactgactcacgttgtcactgttaagcataaagcttcaggaagttatgggttcctgtagattaaaccagacgttctgtccatagacaagaaatcacaggctttgtagaccagaggaggactgagaatatgttcca

SEQ ID NO: 637674 - DNA, 540 bp, Homo sapiens
gttatacagtaaactaatcatcctttttaaaaaatggtccatttcaactagtcaatacatatgttttattccataattgacagcaaactgtggatagttgagagaacacatattttttttctatactgagtattacttaagtaatttcttgagccattaaattttttttatatagtttataatggggaggagaagcaaagcaagtggcagaatagaaggctccactaatcatttccccataccccacaaggcaccaacttaacaastacacagaaaaaaataccttcatgagagccaaaaatcaagtgagcactcatagtacctggttttgacttcatatccctgaaagaggcactgaagagacagtaaaaaacagtcttgaatcaccaatccccatccctcccaacctcagtagcagtagtgtggtgcacagtatatctctgggcacgggggtagaaagaacacagcaattatgaggcattgaactcattgctgtcatgttagacacaaaggaaaactagaccaaactcagctgacacc

SEQ ID NO: 637675 - DNA, 540 bp, Homo sapiens
gttatacagtaaactaatcatcctttttaaaaaatggtccatttcaactagtcaatacatatgttttattccataattgacagcaaactgtggatagttgagagaacacatattttttttctatactgagtattacttaagtaatttcttgagccattaaattttttttatatagtttataatggggaggagaagcaaagcaagtggcagaatagaaggctccactaatcatttccccataccccacaaggcaccaacttaacaactacacagaaaaaaataccttcatgagagccaaaaatcaagtgagcactcatagtacctggttttgacttcatatccctgaaagaggcactgaagagacagtaaaaaacagtcttgaatcaccaatccccatccctcccaacctcagtagcagtagtgtggtgcacagtrtatctctgggcacgggggtagaaagaacacagcaattatgaggcattgaactcattgctgtcatgttagacacaaaggaaaactagaccaaactcagctgacacc

SEQ ID NO: 637676 - DNA, 554 bp, Homo sapiens
agcgctattatttcgtgccttttaaaagaagggagaagaaaatgaaaattggtgaaacgcaataaaagttgaactttgcagtaaaaaaattaaaatatcttaaaatttattaagagtaaataaataacttaaggaaatttatttttctaattaattcttyagtgtataagtagtttttctttacatcaaacccaatctctagaaagaccattattatttcccttgaattatagacaactggatcatataaaaggttttgtttgcagaaataaattttatttgtaattttcagaagtaaagaaaagttataatactttaagtaaactgttaataagacttagttgacacccagttaacctaatccagtattgatgtttttattcttttcttgaaaatactcaaatacacctgcattgtgctcctttaaaaacatgttaaggatacttgcatttaacgagttttttgaggaagaaaattatacaacattcatgcttttcatgatactgaaaatactgaattatatgtcaatttaatttatctcttagaagaaaaag

SEQ ID NO: 637677 - DNA, 533 bp, Homo sapiens
cacctcttccctaaccccaggctgcatagctcacagctgctaaagagactccttccctctgcttgaggaatgaaaaagaaacagtaaggcgaacttcatcttgcatcttggatatcagctcagccacaacaggataaggcaccaaatagagttgtgaggcccccgttccaggccccagctcccagacaacatttctagacatttgctgggcyggaagggaactctctgcattgaaaaaaaggatccagtcctcacagcattcatcacctggtagaagataccctgagccctgaataacctacagcagtacccatgtactattagtacattgaggaccttgcgtgagcatctgaggatagcaggtttcaggtgagactcagcacatttccagctgtggcagctctggggcaagattccttctgcttcagaaatgtggaaggagaagtaaagagactttgttttgcaccttaggtgccagcacagccacagcatggtagagcagcaagtgggctcttgacatccccaattgcagg

SEQ ID NO: 637678 - DNA, 533 bp, Homo sapiens
cacctcttccctaaccccaggctgcatagctcacagctgctaaagagactccttccctctgcttgaggaatgaaaaagaaacagtaaggcgaacttcatcttgcatcttggatatcagctcagccacaacaggataaggcaccaaatagagttgtgaggcccccgttccaggccccagctcccagacaacatttctagacatttgctgggctggaagggaactctctgcattgaaaaaaaggatccagtcctcacagcattcatcacctggtagaagataccctgagccctgaataacctacagcagyacccatgtactattagtacattgaggaccttgcgtgagcatctgaggatagcaggtttcaggtgagactcagcacatttccagctgtggcagctctggggcaagattccttctgcttcagaaatgtggaaggagaagtaaagagactttgttttgcaccttaggtgccagcacagccacagcatggtagagcagcaagtgggctcttgacatccccaattgcagg

SEQ ID NO: 637679 - DNA, 533 bp, Homo sapiens
cacctcttccctaaccccaggctgcatagctcacagctgctaaagagactccttccctctgcttgaggaatgaaaaagaaacagtaaggcgaacttcatcttgcatcttggatatcagctcagccacaacaggataaggcaccaaatagagttgtgaggcccccgttccaggccccagctcccagacaacatttctagacatttgctgggctggaagggaactctctgcattgaaaaaaaggatccagtcctcacagcattcatcacctggtagaagataccctgagccctgaataacctacagcagtacccakgtactattagtacattgaggaccttgcgtgagcatctgaggatagcaggtttcaggtgagactcagcacatttccagctgtggcagctctggggcaagattccttctgcttcagaaatgtggaaggagaagtaaagagactttgttttgcaccttaggtgccagcacagccacagcatggtagagcagcaagtgggctcttgacatccccaattgcagg

SEQ ID NO: 637680 - DNA, 533 bp, Homo sapiens
cacctcttccctaaccccaggctgcatagctcacagctgctaaagagactccttccctctgcttgaggaatgaaaaagaaacagtaaggcgaacttcatcttgcatcttggatatcagctcagccacaacaggataaggcaccaaatagagttgtgaggcccccgttccaggccccagctcccagacaacatttctagacatttgctgggctggaagggaactctctgcattgaaaaaaaggatccagtcctcacagcattcatcacctggtagaagataccctgagccctgaataacctacagcagtacccatgtactattagtacattgaggaccttgcgtgagcatctgaggatagcaggtttcaggtgagactcagcacatttccagctgtggcagctctggggcaagattccttctgcttcagaaatgtggaaggagaagtaaagakactttgttttgcaccttaggtgccagcacagccacagcatggtagagcagcaagtgggctcttgacatccccaattgcagg

SEQ ID NO: 637681 - DNA, 608 bp, Homo sapiens
agactcagcacatttccagctgtggcagctctggggcaagattccttctgcttcagaaatgtggaaggagaagtaaagagactttgttttgcaccttaggtgccagcacagccacagcatggtagagcagcaagtgggctcttgacatccccaattgcaggacttagctcttgaacagcatttctggaccttccctgggccagaaggaagcccactgccckgaaaggtgagtcccaggccaggtagactttactacaagctgatttaagagcccttaggccttaagagaacactggttggtagtctggcaaccagtgggtaggggtgactatgtggtgagactcctctgtctttggaaagaaaaggcaaaagtgggaagaacttcatcttgtggtttgaacctcagctcaactgcaatataatagaacaccaggtagccctctaatgtttttgactctagtccttgacttctggacagcacatctgtatctcagggcctgaggaatctcactgccctgatgggaagcacacaggccttgctggctttgctaccttctgattgtagagttccagagccttaagtgaacataggcagtagccaaggagtg

SEQ ID NO: 637682 - DNA, 608 bp, Homo sapiens
agactcagcacatttccagctgtggcagctctggggcaagattccttctgcttcagaaatgtggaaggagaagtaaagagactttgttttgcaccttaggtgccagcacagccacagcatggtagagcagcaagtgggctcttgacatccccaattgcaggacttagctcttgaacagcatttctggaccttccctgggccagaaggaagcccactgcccggaaaggtgagtcccaggccaggtagactttactacaagctgatttaagagcccttaggccttaagagaacactggttggtagtctggcaaccagtgggtaggggtgactatgtggtgagactcctctgtctttggaaagaaaagrcaaaagtgggaagaacttcatcttgtggtttgaacctcagctcaactgcaatataatagaacaccaggtagccctctaatgtttttgactctagtccttgacttctggacagcacatctgtatctcagggcctgaggaatctcactgccctgatgggaagcacacaggccttgctggctttgctaccttctgattgtagagttccagagccttaagtgaacataggcagtagccaaggagtg

SEQ ID NO: 637683 - DNA, 501 bp, Homo sapiens
aatagaacaccaggtagccctctaatgtttttgactctagtccttgacttctggacagcacatctgtatctcagggcctgaggaatctcactgccctgatgggaagcacacaggccttgctggctttgctaccttctgattgtagagttccagagccttaagtgaacataggcagtagccaaggagtgattacagcaggccttggtcaagatgcagtgctgtgcggacctcaggcctgatctagcacagtcayaatggcggtggccacaggagtgcttatgtcactccacccccaattttagttggctcagaacagagagagaggcttttttttttttttttttttttgagaaagtaagggaagaaaacagaacagtctctgcctggtaatccagagaattctcccatatcttctccaagactattgaggcggtacctttatgagtcttcaaaaaccacagtattactgggcttgggatgctctctgaagtagagacagct

SEQ ID NO: 637684 - DNA, 501 bp, Homo sapiens
aatagaacaccaggtagccctctaatgtttttgactctagtccttgacttctggacagcacatctgtatctcagggcctgaggaatctcactgccctgatgggaagcacacaggccttgctggctttgctaccttctgattgtagagttccagagccttaagtgaacataggcagtagccaaggagtgattacagcaggccttggtcaagatgcagtgctgtgcggacctcaggcctgatctagcacagtcataatggcggtggccacaggagtgcttatgtcactccayccccaattttagttggctcagaacagagagagaggcttttttttttttttttttttttgagaaagtaagggaagaaaacagaacagtctctgcctggtaatccagagaattctcccatatcttctccaagactattgaggcggtacctttatgagtcttcaaaaaccacagtattactgggcttgggatgctctctgaagtagagacagct

SEQ ID NO: 637685 - DNA, 501 bp, Homo sapiens
aatagaacaccaggtagccctctaatgtttttgactctagtccttgacttctggacagcacatctgtatctcagggcctgaggaatctcactgccctgatgggaagcacacaggccttgctggctttgctaccttctgattgtagagttccagagccttaagtgaacataggcagtagccaaggagtgattacagcaggccttggtcaagatgcagtgctgtgcggacctcaggcctgatctagcacagtcataatggcggtggccacaggagtgcttatgtcactccacccccaattttagttggctcagaacagagagagaggcttttttttttttttttttttttgagaaagtaagggaagaaaacagaacagtctctgcctggtaatccagagaattctcccatatcttctccaagactattgaggcrgtacctttatgagtcttcaaaaaccacagtattactgggcttgggatgctctctgaagtagagacagct

SEQ ID NO: 637686 - DNA, 532 bp, Homo sapiens
gaagaaaacagaacagtctctgcctggtaatccagagaattctcccatatcttctccaagactattgaggcggtacctttatgagtcttcaaaaaccacagtattactgggcttgggatgctctctgaagtagagacagcttaaatcatgatacctacatcttttcaaatatctggaaagcctttccaacaaggatggctacaaataagcccagacagtgaagactagagcaaacacctaactcttcagtgctcagacactgaagaacatctactagcatctacagcattgagaaraatgggacctcaccaaatcaacttaataagacacctgggaccaatcctggagaaatggagatatgtgacccttcagagagagaattcagaatacctgtgttgaggaaactcaaagaaacttaagataacacagagaagaaatgcagaattctatcagatacatttaacagacagattgaaatagttaaaaagaatcagaaattctggagctgaaaaatgcaattgtcatactgaag

SEQ ID NO: 637687 - DNA, 532 bp, Homo sapiens
gaagaaaacagaacagtctctgcctggtaatccagagaattctcccatatcttctccaagactattgaggcggtacctttatgagtcttcaaaaaccacagtattactgggcttgggatgctctctgaagtagagacagcttaaatcatgatacctacatcttttcaaatatctggaaagcctttccaacaaggatggctacaaataagcccagacagtgaagactagagcaaacacctaactcttcagtgctcagacactgaagaacatctactagcatctacagcattgagaagaatkggacctcaccaaatcaacttaataagacacctgggaccaatcctggagaaatggagatatgtgacccttcagagagagaattcagaatacctgtgttgaggaaactcaaagaaacttaagataacacagagaagaaatgcagaattctatcagatacatttaacagacagattgaaatagttaaaaagaatcagaaattctggagctgaaaaatgcaattgtcatactgaag

SEQ ID NO: 637688 - DNA, 583 bp, Homo sapiens
aggcagcaaactaacacaagaacagaaaaccaaacaccgcatgttctcacttataagtgggagttgaacaatgagaacacatggacaaagggaggggaacatcatacactggagcctgctggtaggtgggggcctgggagagggatagtattaggagaaatacctaatgtagatgacaggttgatgggtgcagcaaactaccatagctcgcttatacctatggaacaaagctgcacgttcagcacatgtatcccagaacttaaagtataattaaaaaaagataaacaattccaatagaaaaacaggaaaagtgaaaaaaatagagaagggaatacttccaaactcrttctatgaggcaaatattatcctgataccaaaaccgaagacacatcaaaacacagaaaactacagtccaatatttctgatgaatattgatgcaaaaatcctcatcaaaatactagcaaaccctggtaaaagtgggcatctttgttgtgttccagctattggaaaaaaggctttcagcttttccccattcagtgtgatactagctgtaggtctgtcatatatagcttttaacctgttg

SEQ ID NO: 637689 - DNA, 599 bp, Homo sapiens
actagcaaaccctggtaaaagtgggcatctttgttgtgttccagctattggaaaaaaggctttcagcttttccccattcagtgtgatactagctgtaggtctgtcatatatagcttttaacctgttgaggcatgtttcttctattcccagtttgttcagaggttttattatgaagggatgttgaatcttatcaaatgcttttttgtgggcggtaagccacctgaggcaagagaccragggcacgagctgttccagtgtgataaatatataaaataacaagagttatactagatatagatcatagatatgattatatatgaatatcattaatcattaatttgtagcaattactctttattccaatattataataatcttcactctacaatcataacccaggaaaaaccaggccatacagagataggagctgaaggggcatggtgagaagtgaccagaagacgagagtgtgagccctctgtcatgcccagacagggccactagatggctccttggtctagcagtaatgccagcatctgggaagatgcccattaccaagtggacatggtctagcggtagcatcagtgccaaggaaaagcacc

SEQ ID NO: 637690 - DNA, 599 bp, Homo sapiens
actagcaaaccctggtaaaagtgggcatctttgttgtgttccagctattggaaaaaaggctttcagcttttccccattcagtgtgatactagctgtaggtctgtcatatatagcttttaacctgttgaggcatgtttcttctattcccagtttgttcagaggttttattatgaagggatgttgaatcttatcaaatgcttttttgtgggcggtaagccacctgaggcaagagaccgagggcacgagctgttccagtgtgataaatatataaaataacaagagttatactagatatagatcatagatatgattatatatgaatatcattaatcattaatttgtagcaattactctttattccaatattataataatcttcactctacaatcataacccaggaaaaaccaggccatacagagataggagctgaaggggcatggtgagaagtgaccagaagacgagagtgtgagccctctgtcatgcccagacagggccactagatggytccttggtctagcagtaatgccagcatctgggaagatgcccattaccaagtggacatggtctagcggtagcatcagtgccaaggaaaagcacc

SEQ ID NO: 637691 - DNA, 541 bp, Homo sapiens
tttttcctcatgcttcaggaagaagaatttgctattaccaggaaagtcttttaaagctgctatggacattcaattaaaggacactgagaatgtaastaacagaaattcagtgatgtttccaaattgcctgactatacgttttgaataacaatgacctacatttattgagaaattaacaatatgccaggtacattcaaacttcttagtatattgtttcatttggtcctcacaacaactctatgaggtaatcattactattatccacattttatggagcaggaaattgagatagagatagggtaaatagcttgctcaaaattacatgaaatgaaaatagccgatccaggattaaggccacagaacctttgccaagagctctcaagtgagatgtacagacaaatattcttcttctaattgccatcagctatttgagaccatattatctgccagtttccttgttgatctagaagtctctttaatcgttaactacttccctaaaggctctgtctccaaatacagtcacattgggggttaagccttc

SEQ ID NO: 637692 - DNA, 541 bp, Homo sapiens
tttttcctcatgcttcaggaagaagaatttgctattaccaggaaagtcttttaaagctgctatggacattcaattaaaggacactgagaatgtaactaasagaaattcagtgatgtttccaaattgcctgactatacgttttgaataacaatgacctacatttattgagaaattaacaatatgccaggtacattcaaacttcttagtatattgtttcatttggtcctcacaacaactctatgaggtaatcattactattatccacattttatggagcaggaaattgagatagagatagggtaaatagcttgctcaaaattacatgaaatgaaaatagccgatccaggattaaggccacagaacctttgccaagagctctcaagtgagatgtacagacaaatattcttcttctaattgccatcagctatttgagaccatattatctgccagtttccttgttgatctagaagtctctttaatcgttaactacttccctaaaggctctgtctccaaatacagtcacattgggggttaagccttc

SEQ ID NO: 637693 - DNA, 541 bp, Homo sapiens
tttttcctcatgcttcaggaagaagaatttgctattaccaggaaagtcttttaaagctgctatggacattcaattaaaggacactgagaatgtaactaacagaaattcagtgatgtttccaaattgcctgactatacgttttgaataacaatgacctacatttattgagaaattaacaatatgccaggtacattcaaacytcttagtatattgtttcatttggtcctcacaacaactctatgaggtaatcattactattatccacattttatggagcaggaaattgagatagagatagggtaaatagcttgctcaaaattacatgaaatgaaaatagccgatccaggattaaggccacagaacctttgccaagagctctcaagtgagatgtacagacaaatattcttcttctaattgccatcagctatttgagaccatattatctgccagtttccttgttgatctagaagtctctttaatcgttaactacttccctaaaggctctgtctccaaatacagtcacattgggggttaagccttc

SEQ ID NO: 637694 - DNA, 445 bp, Homo sapiens
aatcttcaccacgagtagtttctattttaagaggtcactttctttgctcatccataagaagcaatttcttatccattcaggttttatcatgagattgtagcaattcagtcagaacttcaggctctacttctaattttagttctcttgttatttccaccacatctgcagttacttcctccatttaaatcttgaacacttcaaagttatctgcarggattggaatcaccttcttccaaattcctgttgatgttgatagcttgatctcctcccatggatcatgaatgttttaaatggcatatggaatggaaaatccttccaagagattttcaatttactttgccctgatccatcagagaaatcacaatgtattgcagctatagccttagagaatgataaataataagacttgtaaagttgaaattactccttgatctatgagctgcag

SEQ ID NO: 637695 - DNA, 445 bp, Homo sapiens
aatcttcaccacgagtagtttctattttaagaggtcactttctttgctcatccataagaagcaatttcttatccattcaggttttatcatgagattgtagcaattcagtcagaacttcaggctctacttctaattttagttctcttgttatttccaccacatctgcagttacttcctccatttaaatcttgaacacttcaaagttatctgcaaggattggaatcaccttcttccaaattcctgttgatgttgatagcytgatctcctcccatggatcatgaatgttttaaatggcatatggaatggaaaatccttccaagagattttcaatttactttgccctgatccatcagagaaatcacaatgtattgcagctatagccttagagaatgataaataataagacttgtaaagttgaaattactccttgatctatgagctgcag

SEQ ID NO: 637696 - DNA, 545 bp, Homo sapiens
atatggaatggaaaatccttccaagagattttcaatttactttgccctgatccatcagagaaatcacaatgtattgcagctatagccttagagaatgataaataataagacttgtaaagttgaaattactccttgatctatgagctgcagaatggatgtatgttagyaagcatgaaaaaaaattaatgtccttgtacatctccatcagagctcttgaatgaataggtgctttttcaatgagcagtaatatttttataagaatatatttttcgtgagcattaggtctcaattgtaggcttaaaatattcagtaaaccacgctgtaaatagatggtgctgcaatctaggttttgttcttccatttgtagagaataggcaaactctatttagcataattcttaaggaccccaggatttttggaatggtaagtgagcattggcttcaacttaaaataaccagctgcataaactctaatgagaaagtcagcctgtcctttgcagctttgaagttaggcattgtcttcccctttccagctctgaaagtcct

SEQ ID NO: 637697 - DNA, 545 bp, Homo sapiens
atatggaatggaaaatccttccaagagattttcaatttactttgccctgatccatcagagaaatcacaatgtattgcagctatagccttagagaatgataaataataagacttgtaaagttgaaattactccttgatctatgagctgcagaatggatgtatgttagcaagcatgaaaaaaaattaatgtccttgtacatctccatcagagctcttgaatgaataggtgctttttcaatgagcagtaatatttttataagaatatatttttcgtgagcattaggtctcaattgtaggcttaaaatattcagtaaaccacgctgtaaatagatggtgctgyaatctaggttttgttcttccatttgtagagaataggcaaactctatttagcataattcttaaggaccccaggatttttggaatggtaagtgagcattggcttcaacttaaaataaccagctgcataaactctaatgagaaagtcagcctgtcctttgcagctttgaagttaggcattgtcttcccctttccagctctgaaagtcct

SEQ ID NO: 637698 - DNA, 545 bp, Homo sapiens
atatggaatggaaaatccttccaagagattttcaatttactttgccctgatccatcagagaaatcacaatgtattgcagctatagccttagagaatgataaataataagacttgtaaagttgaaattactccttgatctatgagctgcagaatggatgtatgttagcaagcatgaaaaaaaattaatgtccttgtacatctccatcagagctcttgaatgaataggtgctttttcaatgagcagtaatatttttataagaatatatttttcgtgagcattaggtctcaattgtaggcttaaaatattcagtaaaccacgctgtaaatagatggtgctgcaatctaggttttgttcttccatttgtagagaataggcaaactctatttagcataattcttaaggaccccaggatttttggaatggtaagtgagcattggcttcaacttaaartaaccagctgcataaactctaatgagaaagtcagcctgtcctttgcagctttgaagttaggcattgtcttcccctttccagctctgaaagtcct

SEQ ID NO: 637699 - DNA, 525 bp, Homo sapiens
taagcttttgtttatgaatgttgtggctagtttaattttctatccagagcactaaaacttgcttcaaaacagcaataagkccattttgctttcttatcattgatgtgctcactggattagcacttttaatttccttcaaagatttttccttgcattcacaacttggctaactgtttggtgcaaaagacctagcttttggactgtcttggattttgacctgccttcctccctatgcttaatcatttttcgctttttgtttaaaatgaaagactcatgactctttccttcacttgaatacttacagatcattgtatggtttataactggcgtaatttaaatgttgttgtgtctcagggaatagtgaggctagaggagagggagagagtctgggaacggtcattaggtgaggcagtcagaacacacacaacagttatcaattaagtttgctgtcttatatgggtgcagtttgtggtgctccagaacagctaaaatagcaccatcaaaactcactgatcacagatcacc

SEQ ID NO: 637700 - DNA, 525 bp, Homo sapiens
taagcttttgtttatgaatgttgtggctagtttaattttctatccagagcactaaaacttgcttcaaaacagcaataaggccattttgctttcttatcattgatgtgctcactggattagcacttttaatttccttcaaagatttttccttgcattcacaacttggctaactgtttggtgcaaaagacctagctttyggactgtcttggattttgacctgccttcctccctatgcttaatcatttttcgctttttgtttaaaatgaaagactcatgactctttccttcacttgaatacttacagatcattgtatggtttataactggcgtaatttaaatgttgttgtgtctcagggaatagtgaggctagaggagagggagagagtctgggaacggtcattaggtgaggcagtcagaacacacacaacagttatcaattaagtttgctgtcttatatgggtgcagtttgtggtgctccagaacagctaaaatagcaccatcaaaactcactgatcacagatcacc

SEQ ID NO: 637701 - DNA, 525 bp, Homo sapiens
taagcttttgtttatgaatgttgtggctagtttaattttctatccagagcactaaaacttgcttcaaaacagcaataaggccattttgctttcttatcattgatgtgctcactggattagcacttttaatttccttcaaagatttttccttgcattcacaacttggctaactgtttggtgcaaaagacctagcttttggactgtcttggattttgacctgccttcctcsctatgcttaatcatttttcgctttttgtttaaaatgaaagactcatgactctttccttcacttgaatacttacagatcattgtatggtttataactggcgtaatttaaatgttgttgtgtctcagggaatagtgaggctagaggagagggagagagtctgggaacggtcattaggtgaggcagtcagaacacacacaacagttatcaattaagtttgctgtcttatatgggtgcagtttgtggtgctccagaacagctaaaatagcaccatcaaaactcactgatcacagatcacc

SEQ ID NO: 637702 - DNA, 511 bp, Homo sapiens
aaatgaaagactcatgactctttccttcacttgaatacttacagatcattgtatggtttataactggcgtaatttaaatgttgttgtgtctcagggaatagtgaggctagaggagagggagagagtctgggaacggtcattaggtgaggcagtcagaacacacacaacagttatcaattaagtttgctgtcttatatgggtgcagtttgtggtgctccagaacagctaaaatagcaccatcaaaactcactgatcacagatcaccttaacagacacaataacaaagaaaaagtctgaatatattgggaatgactaaaatgtaatamagacaggaagggagcacatttgttggaaaaatggtgccagtagacttgcttgatgcagggttgacacaaactttttatatttgtaaaactacagtacctgtgaagtacaataaagtgaaatgcaataaaataaggtgtgcctgtactgatttaatttcctttaaacatatatgcagtagggattg

SEQ ID NO: 637703 - DNA, 410 bp, Homo sapiens
ttggaaaaatggtgccagtagacttgcttgatgcagggttgacacaaactttttatatttgtaaaactacagtacctgtgaagtacaataaagtgaaatgcaataaaatraggtgtgcctgtactgatttaatttcctttaaacatatatgcagtagggattgctggatcatatgatagctctatttttagctttttgaggaatctctgtactgttttgcataaggctacactgatttacattcccaccaacagtgcacaagggttctcctctcctcacatcctctccaacagttatctttcatcttcttgataatagcaattctaaaatgtgtgaggtgatactgtgactttaatttgccttttcttgataatgagtactgttgagcattaagaaaaaaacccattaat

SEQ ID NO: 637704 - DNA, 410 bp, Homo sapiens
ttggaaaaatggtgccagtagacttgcttgatgcagggttgacacaaactttttatatttgtaaaactacagtacctgtgaagtacaataaagtgaaatgcaataaaataaggtgtgcctgtactgatttaatttcctttaaacatatatgcagtagggattgctggatcatatgatagctctatttttagctttttgaggaatctctgtactgttttgcataaggctacactgatttacattcccaccaacagtgcacaagggttctcmtctcctcacatcctctccaacagttatctttcatcttcttgataatagcaattctaaaatgtgtgaggtgatactgtgactttaatttgccttttcttgataatgagtactgttgagcattaagaaaaaaacccattaat

SEQ ID NO: 637705 - DNA, 410 bp, Homo sapiens
ttggaaaaatggtgccagtagacttgcttgatgcagggttgacacaaactttttatatttgtaaaactacagtacctgtgaagtacaataaagtgaaatgcaataaaataaggtgtgcctgtactgatttaatttcctttaaacatatatgcagtagggattgctggatcatatgatagctctatttttagctttttgaggaatctctgtactgttttgcataaggctacactgatttacattcccaccaacagtgcacaagggttctcctctcctcacatcctctccaacagttatctttcatcttcttgataatagcaattctaaaatgtgtgaggtgatactgtgaytttaatttgccttttcttgataatgagtactgttgagcattaagaaaaaaacccattaat

SEQ ID NO: 637706 - DNA, 629 bp, Homo sapiens
aggataggtgttggttaatactggtagactttactcccaaagccaactccattaagatttcctttgtttttttaaatctagaytatcagaaagaatgaaaatgcttttttttttttttttgctatagctgcaatgttcacagtaatccaagttccaatggcagggtgacagagcagagccaaaggaagccacattttgttcgtgaagtgtaattcttttttaagatcagggattcagaattgtaatataagtatttaattagaaagttcttatgatagtgcttggcacgtgtcctttccatcatctgaattttctgctttttttatctggctcactcctactcactctccagtcctcaccttagtagtcacttctcccaggaatgcccctgaccccttaagatagcagtgctgcaaacaccaagcgctgaacttataaccatacttgcaggcaacaccttgccctgtgctgtgcttcactaatgacgaggaagtaagaaagagtaggagaaaggaggcacaacaagtgtcatttccatagcagaggccacaaggccagcccacttgattctctggagattcttttctgcataacaatgatgaaaggtagcctaggaaagccatttgtct

SEQ ID NO: 637707 - DNA, 591 bp, Homo sapiens
ggctcactcctactcactctccagtcctcaccttagtagtcacttctcccaggaatgcccctgaccccttaagatagcagtgctgcaaacaccaagcgctgaacttataaccatactygcaggcaacaccttgccctgtgctgtgcttcactaatgacgaggaagtaagaaagagtaggagaaaggaggcacaacaagtgtcatttccatagcagaggccacaaggccagcccacttgattctctggagattcttttctgcataacaatgatgaaaggtagcctaggaaagccatttgtcttaggctttaactttaatacctagctagtcactaaaataagaggctgattccatttatgagccattgcctcataaatccataaacaggggtatttatttaaaataaagtatccatatagattaggtgtactttattgacaattttattaaagtccttcatttatcttccagatagtagattctatcatccaagtttcataaagagttctgattcccagaggtaagaactgagcctggctttctagttacatgtttactggtaaccccttccttccctacaacacttatgca

SEQ ID NO: 637708 - DNA, 591 bp, Homo sapiens
ggctcactcctactcactctccagtcctcaccttagtagtcacttctcccaggaatgcccctgaccccttaagatagcagtgctgcaaacaccaagcgctgaacttataaccatacttgcaggcaacaccttgccctgtgctgtgcttcactaatgacgaggaagtaagaaagagtaggagaaaggaggcacaacaagtgwcatttccatagcagaggccacaaggccagcccacttgattctctggagattcttttctgcataacaatgatgaaaggtagcctaggaaagccatttgtcttaggctttaactttaatacctagctagtcactaaaataagaggctgattccatttatgagccattgcctcataaatccataaacaggggtatttatttaaaataaagtatccatatagattaggtgtactttattgacaattttattaaagtccttcatttatcttccagatagtagattctatcatccaagtttcataaagagttctgattcccagaggtaagaactgagcctggctttctagttacatgtttactggtaaccccttccttccctacaacacttatgca

SEQ ID NO: 637709 - DNA, 602 bp, Homo sapiens
tcaaaaccacaatgagacaccattccacaacagtcagaatgactattattaaaaagtcaaaaaacaactgatggtggcaagactgcatagaaaagggagcatgtacaccctatttgtgggaatgtaaattacttcagccaccatagaaaacagtttggagatttctcaaataacttgaaacagaactactgatatatgcccacagggaaatgaatcattctatgaaaaaagcacatgaacttatatgttcattgtgatactattcacratggaaaatacatgaaatcaacctaagtacccatcaatggtggattagataaaggaaatgtggtacatgtacatcacagaatactaggcagccataaaaaagaataaaatcgtgtcctttgcaacatcatggatgcagctggaggccattatcctaagcaaagtaacacaggaactaaaaacaaaatacctcatgttctcgcttatatgtggtagctaagcattgaatacttgtgaacataaaaaatagcaacaatagatattgcagactgctagagaggagaggaagagaggggggcaaaagttgaaaaacaaactattggcaactgttgggt

SEQ ID NO: 637710 - DNA, 635 bp, Homo sapiens
acagtgcagcaatgaacatacaacaggatgtgtcattttggtagattgagtcattttcttttggctatttacctagtaatggcattgctgggttaaatggtaactctgttttaagttctctaagaaatttccagactactttccacagtgcaataatcctaagcaaattaatgctgtaacagaaaactaaatatcacatgttctcactcataactgggaactaagctttgaccatacatggacataaatgtaggaacaatagacactgtggactactagagggtggagggaaaggggctgggttagaaaactaactattgggtatatgctcactaccagggtgatgagatctgtccgtactccaagactcatcaacgtgtaatattcccatgtaacaaatctgcacatgtaacccctgtatctaaaaggaaagttgaaattaaaaaataaaaagtagccaaaatcagattattttatatttaaattctacataagccaaaaacaaacacataaytttaatactagactttggtaacagatgaaaagctcctaatgccaaatctggcaaggaaataacaaaaagagaattattgcccatattcccttatgaatacagatacaaaaattctgaataa

SEQ ID NO: 637711 - DNA, 538 bp, Homo sapiens
tggtacatgtacatcacagaatactaggcagccataaaaaagaataaaatcgtgtcctttgcaacatcatggatgcagctggaggccattatcctaagcaaagtaacacaggaactaaaamcaaaatacctcatgttctcgcttatatgtggtagctaagcattgaatacttgtgaacataaaaaatagcaacaatagatattgcagactgctagagaggagaggaagagaggggggcaaaagttgaaaaacaaactattggcaactgttgggtattatgctcagtaccctcagtacctaggcgatgagattaattgtatcccaaacctcaccgtcatgcaatatacaaatataacaagcctacacatgtaccactaaataagttgattttttttaaaaaaaaaaagcaaaaaaaaaaagaaataaaggacatgaaaattggaaaagaagttaaactgttcttgtttacaaatgatatactctgatatttagaaaaccctaaagactctgtcaaaaaaatggaactgagaaacaaatt

SEQ ID NO: 637712 - DNA, 516 bp, Homo sapiens
ttaatactagactttggtaacagatgaaaagctcctaatgccaaatctggcaaggaaataacaaaaagagaattattgcccatattcccttatgaatacagatacaaaaattctgaataaaatattcggtagtatatcaaaaggatgtgaacatgaacagtttgttttagaaaggccagaatggctttgatcggaagatcttttagtgtaataaattaaaggaggaaaaatttcatgactatataaattgccaaaaaaaaagacaaaaatgaaataagataaaatttaccctccattctaaatataagttctatgaatgtaggaacaagaggaaaatgctctaaacctgtaaagacagaatcaaatgtaattcagatgtaagttgttayagctatttcattaaaatcaggaatgagacaagaatagaactattatttttgttagttgatattgttttcttaggttgtacattatgcaataaggcaagaaactaaaaacccatataaatattggcaa

SEQ ID NO: 637713 - DNA, 538 bp, Homo sapiens
tggtacatgtacatcacagaatactaggcagccataaaaaagaataaaatcgtgtcctttgcaacatcatggatgcagctggaggccattatcctaagcaaagtaacacaggaactaaaaacaaaatacctcatgttctcgcttatatgtggtagctaagcattgaatacttgtgaacataaaaaatagcaacaatagatattgcagactgctagagaggagaggaagagaggggggcaaargttgaaaaacaaactattggcaactgttgggtattatgctcagtaccctcagtacctaggcgatgagattaattgtatcccaaacctcaccgtcatgcaatatacaaatataacaagcctacacatgtaccactaaataagttgattttttttaaaaaaaaaaagcaaaaaaaaaaagaaataaaggacatgaaaattggaaaagaagttaaactgttcttgtttacaaatgatatactctgatatttagaaaaccctaaagactctgtcaaaaaaatggaactgagaaacaaatt

SEQ ID NO: 637714 - DNA, 615 bp, Homo sapiens
taaataaactaagcattaacctttgatcccaaattatcaggaagccaggagatcaaacaaacatccctagggaaggtgttaggctcagcctggttcccatcccctttacccctttgttcctcaagctagggtcattttgtcgctttctgcatcccaatcctgacccaatgtgcaaactagtcttgacctggggtggcttattattatttggaggctcagtgtctatacccacatgaagctgggctggccatgaggcttcagttcactaaccagatatgcataaaacacacacaaaaaagggggagtctttaggacaaaaaaatagacctaggtttgtattrctatttcagcttaatcatgtattccttgtatgtcctcagccaacaatggccaattctggtagatactatttaaaattatgtgctatgtactaagtgtttaacatacagtatctcatttaaaccttgtgtaatcctctgaagaagatcctcttatttttcccattttaacagatgatgaaactcagagaagggcctatggttatatagctaataaaactggcagagtgcaatgaacttgaattcagattggacaatgccttaatatctggtatcc

SEQ ID NO: 637715 - DNA, 615 bp, Homo sapiens
taaataaactaagcattaacctttgatcccaaattatcaggaagccaggagatcaaacaaacatccctagggaaggtgttaggctcagcctggttcccatcccctttacccctttgttcctcaagctagggtcattttgtcgctttctgcatcccaatcctgacccaatgtgcaaactagtcttgacctggggtggcttattattatttggaggctcagtgtctatacccacatgaagctgggctggccatgaggcttcagttcactaaccagatatgcataaaacacacacaaaaaagggggagtctttaggacaaaaaaatagacctaggtttgtattactmtttcagcttaatcatgtattccttgtatgtcctcagccaacaatggccaattctggtagatactatttaaaattatgtgctatgtactaagtgtttaacatacagtatctcatttaaaccttgtgtaatcctctgaagaagatcctcttatttttcccattttaacagatgatgaaactcagagaagggcctatggttatatagctaataaaactggcagagtgcaatgaacttgaattcagattggacaatgccttaatatctggtatcc

SEQ ID NO: 637716 - DNA, 615 bp, Homo sapiens
taaataaactaagcattaacctttgatcccaaattatcaggaagccaggagatcaaacaaacatccctagggaaggtgttaggctcagcctggttcccatcccctttacccctttgttcctcaagctagggtcattttgtcgctttctgcatcccaatcctgacccaatgtgcaaactagtcttgacctggggtggcttattattatttggaggctcagtgtctatacccacatgaagctgggctggccatgaggcttcagttcactaaccagatatgcataaaacacacacaaaaaagggggagtctttaggacaaaaaaatagacctaggtttgtattactatttcagcttaatcrtgtattccttgtatgtcctcagccaacaatggccaattctggtagatactatttaaaattatgtgctatgtactaagtgtttaacatacagtatctcatttaaaccttgtgtaatcctctgaagaagatcctcttatttttcccattttaacagatgatgaaactcagagaagggcctatggttatatagctaataaaactggcagagtgcaatgaacttgaattcagattggacaatgccttaatatctggtatcc

SEQ ID NO: 637717 - DNA, 620 bp, Homo sapiens
agtatacaaaataaacacaaaaatccatagcactttatataccaaaagtaaataacctgaaaaagaaattaggaaatcaataccatttataatagttacaaaaattaaaatacatgagaataaacttaaccaaagagttgagagagatctctataataaaagcataaaccactgatgasagaaattggagaggacaccaaaaatagaaagatattcagtgttcatgaattagaaaaatcaaaattgaattaatgggtacattgaatataaatagaagttaccagaggctgagaagggtaataaggaggggaggctaaagaaaatagagttattttccaaactctacttttgatggtgcaaaataaatctgggtaaaactctggtgttttaggaagccacaacaaattgtgctgatagtcatatatatatatatatatattttactgttacccagtcacaatattaaaaagtcaaattcacttaggaaggttcttaatgagctgaaaaatgattaatttcattacatcttaaatccttagtatttgtatttttaatactctttatgacaaattgagaaatacgtatatacccttcagtttcatactagagcacattgagcc

SEQ ID NO: 637718 - DNA, 605 bp, Homo sapiens
gggatttattttttcttaacattgttctaatattaattttcttgcttctgtgtttaactacacagacaagatttaaataaattcacaaaaatacagagtacctttttgaaatgagcattgagacaatgttagtatcattttttaaaatagacttcaccacatagtgtaaaatmtgccactaactctccatgttaactcctctatatggtactacagaggtgcttttggaatgaaaggggactgtttatagacactttgtggcttccttcttttttttttcctttttataaagaatctctcaaattagaagaaagataggtaatattctctaactacttccccattttaatattaccactccagtcccccagagccatgtgttcctatttgtttcacacgaaggctttatagtatttgcttgcttcatgtgttcacttcccaagaggagaggtaagatgtgttttttaaattgatgaagagaaactcttattcttattttttagtagcattttcaaaacctttaagtttttctgtttttctttgttttgggaaaggtttggactctctgatcaccacaaattctaagtctatgatatatcattttg

SEQ ID NO: 637719 - DNA, 589 bp, Homo sapiens
aatactaatttatactctcaccgacggtgtaagtgtatctttttcccttcaacctcaccagcatctgttatttttgagtttttcatastagccattcagagtggtgtaagatggtatctcgtacttttgattttcattcctctaataagtgagactgagctttttgtcatgtgcttgttggccaagtgtatgtcttctttagaaaagtgtctgttcatgtatttgcctactttttaatgaggttgttttgtcttgtaaatttttgttaagttcttgatagatgctggatatcagacctttgtcagatgcatagattgcaaatattttctctcattctgtagttttcctgtttagtctgttaatagtttattttgctgtgcagggattcttaagagcagttagattccacttgtcaatttttccttttgttgtgatcgcttttggtgtctttgtcataaaatctttgcctgttgctatgcccagaatggtattgcctagattgtcttccagggtttttatagttttgggtttcatgtttaagtctttaatccattttgaattgatttttgtatgtggtgtaaggaaaggg

SEQ ID NO: 637720 - DNA, 589 bp, Homo sapiens
aatactaatttatactctcaccgacggtgtaagtgtatctttttcccttcaacctcaccagcatctgttatttttgagtttttcatactagccattcagagtggtgtaagatggtatctcgtacttttgattttcattcctctaataagtgagactgagctttttgtcatktgcttgttggccaagtgtatgtcttctttagaaaagtgtctgttcatgtatttgcctactttttaatgaggttgttttgtcttgtaaatttttgttaagttcttgatagatgctggatatcagacctttgtcagatgcatagattgcaaatattttctctcattctgtagttttcctgtttagtctgttaatagtttattttgctgtgcagggattcttaagagcagttagattccacttgtcaatttttccttttgttgtgatcgcttttggtgtctttgtcataaaatctttgcctgttgctatgcccagaatggtattgcctagattgtcttccagggtttttatagttttgggtttcatgtttaagtctttaatccattttgaattgatttttgtatgtggtgtaaggaaaggg

SEQ ID NO: 637721 - DNA, 589 bp, Homo sapiens
aatactaatttatactctcaccgacggtgtaagtgtatctttttcccttcaacctcaccagcatctgttatttttgagtttttcatactagccattcagagtggtgtaagatggtatctcgtacttttgattttcattcctctaataagtgagactgagctttttgtcatgtgcttgttggccaagtgtatgtcttctttagaaaagtgtctgttcatgtatttgcctactttttaatgaggttgttttgtcttgtaaatttttgttaagttcttgatagatgctggatatcagacctttgtcagatgcatagattgcaaatattttctctcattctgtarttttcctgtttagtctgttaatagtttattttgctgtgcagggattcttaagagcagttagattccacttgtcaatttttccttttgttgtgatcgcttttggtgtctttgtcataaaatctttgcctgttgctatgcccagaatggtattgcctagattgtcttccagggtttttatagttttgggtttcatgtttaagtctttaatccattttgaattgatttttgtatgtggtgtaaggaaaggg

SEQ ID NO: 637722 - DNA, 557 bp, Homo sapiens
ttagtagcctgtaacccaatatctgacaataaaagggtcagtattcctcatataatgtccaaatctactttgtaatggataatatgcactggccaaagacagcctttccttttttaaattctgtcttctagacttctgtgaacttctcaaagtacaaaactatctttatttattcacttctatttaccactgcaaccaattcccacaagygatagcatgaagaaataattatgttcaatatcatcctctatctgttctcaacaaagctggggtataaatgaaatatcctgtttttccagttggttttgctgcataacaaatcactccaattcagtggcaacaaacaacctgttcacagatcatatgggccaggaactcagaatgggttcagcagggaaggctacaggtaactaggaggctgtgtactggacttattcaaatcctaactcacatacatattgacagttgatgctggctcacagcccaactcctaaaggttgactgtcacacttagacattgcttctccatattgtttctgtgcatgatctactttgga

SEQ ID NO: 637723 - DNA, 597 bp, Homo sapiens
tttcatacagttcacattgccagttgagtttgttaatgtaatatttgtcttttctaattgcattgaggtgatattttactttcttagttgattcatttttatttatgtggttcaggtgttgaatatatttaaggcaatatagaagcaaagttgcattcttctacacatgacatgcataattctaaactaagaatttatataaataggaaaattagaacccaccaatacttttcatttactgcaacattttaggaagattatcaatctgaactgcccattcccttcatttgcaaatattgcagagactctgaaactcctacataaaaagaggtttaaataaggcattctgagttggacagggttgggcatcttaacaatgctttaagaacttaaaacattatttgactagtaaatattayctgctattttgatagatatgtgcattttgagctggtttacagaactggaaaattctccaggctccttgatgctgccattgagcatagcacaaaatgtagaatattgaccttgtatgtgacccctaacctacttggtaaatcattattactattattattattatattttcattgcaat

SEQ ID NO: 637724 - DNA, 582 bp, Homo sapiens
atataaagtggtatgatataacttaaaatagattataataatggtacatgcgcatataataaacctaaagcaactactaaaataaaataacagagtttactacaggctacaaaatagataaaactgaagcctaaagaatactcaatctaaagaaaaaataaaagaaaaaagtgagcaaaggacaggtgaaaaaaacatacaagtagcaaagcagtatgtttaatattaaccataataataatcactctaaatattaatgggataaaaaaatcaaagtatgagatgaggattattagatttttaaaaagactcaactatatgtctttaaaatgatttaaaatataaaggtacagtaggtaagaatttaaagaatgaaaaacatatatcttgctcaactctagtcaaaagaaagctacaatggccataatattakataatgtagattttgggacaaagaatattagcagtgataaataatatcatttcataattataaatttcataattataagtgataaacatatcatttcataattataaatgataaacaatgtcatttcataatataaaacaatatcattt

SEQ ID NO: 637725 - DNA, 542 bp, Homo sapiens
ttgagctgctgaattgtccacttaggcacttcccattgttcatttctggatgctaatgtttgattcattatagcagcaaaactatgaaaaaacatgctttagctttgaagcttctcatcctgaaaagcttctgaatttggaaaaaggcctaaraaatggacaatgttttgagcccttcaagtcttctagtgaggtcctcacccaaccctgcaagattaacaagagttctgctattttttcctgccctctgaaaagcggttcttagccttttcctctttctctaaagaggaaggaactataaattacatatgaaatattatttaccaataaataaaaggtgtccaagacaaaaatttaattgttattttcttagattttttaaaaattctaatgtacttgtagtatgtttttcttctttgtaagaaaaccatcctatgtggtatgtgataatctcagactatagcagacatgtcgacagaaatagactctgtaaaacactgcaaaaaaaactcacaatagagtgaagattgacaaccaatttg

SEQ ID NO: 637726 - DNA, 542 bp, Homo sapiens
ttgagctgctgaattgtccacttaggcacttcccattgttcatttctggatgctaatgtttgattcattatagcagcaaaactatgaaaaaacatgctttagctttgaagcttctcatcctgaaaagcttctgaatttggaaaaaggcctaagaaatggacaatgttttgagcccttcaagtcttctagtgaggtcctcacccaaccctgcaagattaacaagagttctgctattttttcctgccctctgaaaagcggttcttarccttttcctctttctctaaagaggaaggaactataaattacatatgaaatattatttaccaataaataaaaggtgtccaagacaaaaatttaattgttattttcttagattttttaaaaattctaatgtacttgtagtatgtttttcttctttgtaagaaaaccatcctatgtggtatgtgataatctcagactatagcagacatgtcgacagaaatagactctgtaaaacactgcaaaaaaaactcacaatagagtgaagattgacaaccaatttg

SEQ ID NO: 637727 - DNA, 542 bp, Homo sapiens
ttgagctgctgaattgtccacttaggcacttcccattgttcatttctggatgctaatgtttgattcattatagcagcaaaactatgaaaaaacatgctttagctttgaagcttctcatcctgaaaagcttctgaatttggaaaaaggcctaagaaatggacaatgttttgagcccttcaagtcttctagtgaggtcctcacccaaccctgcaagattaacaagagttctgctattttttcctgccctctgaaaagcggttcttagccttttcctctttctctaaagaggaaggaactataaattacatatgaaatattatttaccaataaataaaaggtgtccaagacaaaaatttaattgttattttcttagattttttaaaaattctaatgtacttgtagtatgtttttcttctttgtaaraaaaccatcctatgtggtatgtgataatctcagactatagcagacatgtcgacagaaatagactctgtaaaacactgcaaaaaaaactcacaatagagtgaagattgacaaccaatttg

SEQ ID NO: 637728 - DNA, 592 bp, Homo sapiens
ttctcaacataccagagcagtagatccagtttagctgttttttaattctaagaagtttcatgataaatgaaatttgcaaatttgcaagatactgtattaaagtggggataattttggcacatcagtcatgtcttaaaataacctaggcagttttatctgtgtgcaaaatttagaaatgtcattcctgtggaaatgagcaaatcataaatacatcacagaaaagaagtcgctatttttttgwctttaagttgttttatagttaaattgtgtcagagagtttgccatctattttattcctaaaaaggcctggtggagaatatatgactttccttgatgtagagataatactactaaacataaagataaacataaaatgtaactagaataataataaaggcaaagagaaaaggtatagatgcatctctgaattttcaagagagtagtgtcatttgtcactaagcaaatacttcttgacagtgcttgaaattgctcttgaactggtaaagcaaaatgtaactcttcccccatagtatttgatgagaaataaatgggctataatgtcactcgtcaggtggatataattccccttctt

SEQ ID NO: 637729 - DNA, 592 bp, Homo sapiens
ttctcaacataccagagcagtagatccagtttagctgttttttaattctaagaagtttcatgataaatgaaatttgcaaatttgcaagatactgtattaaagtggggataattttggcacatcagtcatgtcttaaaataacctaggcagttttatctgtgtgcaaaatttagaaatgtcattcctgtggaaatgagcaaatcataaatacatcacagaaaagaagtcgctatttttttgactttaagttgttttatagttaaattgtgtcagagagtttgccatctattttattcctaaaaaggcctggtggagaatatatgactttccttgatgtagagataatactactaaacataaagataaacataaaatgtaactagaataataataaaggcaaagagaaaaggtatagatgcatctctgaattttcaagagagtagtgtcatttgtcactaagcaaatacttmttgacagtgcttgaaattgctcttgaactggtaaagcaaaatgtaactcttcccccatagtatttgatgagaaataaatgggctataatgtcactcgtcaggtggatataattccccttctt

SEQ ID NO: 637730 - DNA, 611 bp, Homo sapiens
atgtacacttcatatgtacatgaaatgaatgaaataatttactatactggtactagaaatatgaaatataattataataaatataaaccataattttatttataataattctagaaatatgttacatctaatatgtaaatttgatatatatttattagaaaattataaaattcatcatttcaaaaattatttgtattttaagaaaactggtgtgccacatttaaagtatcatttattagatttacatgttattatttaaaagttgcttgttatatttgtcaatgtgtctaagtaatcagatgtgtttgaaattcttgagaacattagctatgtccaatttctaaatatataatctacttatagtaccacgtttgaagaaaaatgtctaagctgaatttctgcaggagccatgggtccaagttcacgttcattctgtttttgtgatctcttctaccctatactgtacgyccatacatttctaaaatagttcaattttggttctagggaaagtgcaacacaatagagagcctctgaaatttttatatccaccttttactttcccaaatccttgggttctaacccattagaaatgagtgctttaaatttttaaa

SEQ ID NO: 637731 - DNA, 566 bp, Homo sapiens
tcccgtctttcttttactatcaaataccatagactataaaaaatcttsaagccaccttgtaggttttttgtagccctgagagctgtgtaatgcatctgttaccaagttgtattttaaaatgtgaagtaggattcttatgcatggcacatgatttcatatttcttacactttgtgaaaatgttttcatataagactttctacagccatcatttaataacctgttttgattgaacagtataacttcatcaactatctttcctccagatacatcaatgagttcaagcaagataaatgccaaagttatgtaatttttagaaagattctgaaaaatctttaccgtatccactaactactcagtactaacccattttgaaaaatactttaattccatattaatattctataaaaatagtcaatggaaaccaaaagaatttctacaagtcactaagtaaaatagattggattcattactacattaattccagaaatatttattggtcactttctgtgtgctagaaacattttttatacgatgataaatgaacaagactgacaatttcttgccc

SEQ ID NO: 637732 - DNA, 579 bp, Homo sapiens
ttctattcttgctgtaataaattgccactaacttcatggcttaaaacaaatgtattatgggtctcattgggttatgatcaaaggattcagggaggcatttcttgctgtaggatcctagttcatttaagggttagcagaattcagtttacatgtatatagagttaaggtctctgttttattgatggctgtaagctgggagacatccttaattcctgaaggcctctttatggctcttgatttagcccacacatcccagaagcagcaaggagtgtcacatacttcacacactgacaaccctctaacccacacatttgcctcttccacttttaagcactcatgtaattagaccgaacccagttggataaagcaggataatgttcccatctcaaggtcagctaattagcaacctgaattccatctgcaaacttaattctyttttgccactttcggtgacatatttatgcgttcaggggaatttggacacagatatctttgtggggtccttcttctgcaaaccatagataatcatttaaaaatgactttttgtatttctttttactttataagccagaataggcc

SEQ ID NO: 637733 - DNA, 554 bp, Homo sapiens
ctctggtttttaaatttcacttcagtatcccgtatgaaaatgcagccctcattttcaacatctggaaactttattgcgttatttttggtaatgaatctaagcagtcacagtgagacaaatatcatttaccaacagtatttarcccgattttctgttacgctaagtagctgttgatttacccctcgttcatttttaatgaagcaggttaataccatattctcctacagttaagtagcttcaggagcctacacacttaaattgattagtaaagttaaagtaaaaggaataattatgttcactttcttaaaagaatatattttaagaacaattccttaatgagacaaagcatctcctatttatgtttttggcttgtattttattatttggttttctttaaacaaaggtgattacaatatcatgtccttttccataaggctttttctctagataaatgaactgaaataagtttaaccgctaattaactggcactaaaatttaattgggcccaaagggtgaagcactcaaaatttattaactctcattttctagccctt

SEQ ID NO: 637734 - DNA, 554 bp, Homo sapiens
ctctggtttttaaatttcacttcagtatcccgtatgaaaatgcagccctcattttcaacatctggaaactttattgcgttatttttggtaatgaatctaagcagtcacagtgagacaaatatcatttaccaacagtatttagcccgattttctgttacgctaagtagctgttgatttacccctcgttcatttttaatgaagcaggttaataccatattctcctacagttaagtagcttcaggagcctacacacttaaattgattagtaaagttaaagtaaaaggaataattatgttcactttcttaaaagaatatattttaagaacaattccttaatgagacaaagcatctcctatttatgtttttggcttgtattttattatttggttttctttaaacaaaggtgattacaatatcatgtccttttccataaggctttttctctagataaatgaactgaaataagtttaaccgctaattaacyggcactaaaatttaattgggcccaaagggtgaagcactcaaaatttattaactctcattttctagccctt

SEQ ID NO: 637735 - DNA, 474 bp, Homo sapiens
aaatctcacttttcttctctatagaaaaattgatcatatcaataatatgtatttcataatattgatatgagaattacttgagaacactaatataaagcaatttatagattttatgacatgtaataaatacctaatgaacagtcaagattatcattatctttatgaaccctaattttcaycctaatattttcttgtttccatgtatattcatgcaagagatagaacatcagtgtttaaatgtcactaaattgtctttctatctatctcaaggacccaatctagtataaatatttgagagtatagttttagtgactgagaatttaattataaataaaaactgaaccaactatgttgtgcataacttacaaaagaagctttattatccaattatttttgtttctgtttagaataatgaaatgtgtatagttctttacactaaatattcactcttccttctccctggtgatagatttt

SEQ ID NO: 637736 - DNA, 595 bp, Homo sapiens
tgaaagcctgattaagaccttttggtgttcagctgcctcatttgtgaaatgaatataaattatctgcttataaaaacagtgatagcaatagaaaaaaacaagcaaacaaaaactaatagcgctcttttactgggatttctttctcttctgtacttggatttaaaaaagacgttctcttatacattcctcatttctaacatttactgtcctttttattcacaaaagacttttggattatttttagttttaattgacaaaaacatatacatttatggtatgcaatgtgatgtctgatatatgtatacattgtggaatgattaaatcaatttaattaatatattcatcaccttaaatacttataaataaaagtggtatgttgaagagatagccacacttccatgttcattacagcattattcatgatagccaagatatggaattgatggaagctaagtttccatcagtgaattaatggataaggaaaatrtggtatacagacagaacgaatgctatttagctttaaataagaaagaagttctgtcacttgccacaacatagataaaactagataacattatactaaatgaaagaagcc

SEQ ID NO: 637737 - DNA, 608 bp, Homo sapiens
ttgctgtttctttttcttacatatatttctgttgtattgaagtgaactgcctattattatatttgaatctgcacttgaactcagaatttggtttgaattactgaagggaatccatatttcattatgtcatgagataaaatcaagaaaattattaacttgttgcttattaaacacacatttctttacaagtaatgatgggcttttactgactgcatttatgtttgaaatgaaattaacttcaaactagaactttcaagtagagttgagataaaacattatgctttcccaattgtcactttggatttgcaaagttactatttttctgccatccaaaaatataagatttattagaccacaagtcatagagtgactgagatttggaaggattgaataaataaatgagtgagtacatgggtggacaaaaaaatgctaaataagtgattagaatagtttaggatataaatagaagatttcgggagatgtgaaawtcatggaaatcattctgaaattgtatctgaatagccagcctatcaaatatgtaatcttccatttcagtaatatttgctagttttacctaaaaccttataatgtcaaaaaaaaaaagaagg

SEQ ID NO: 637738 - DNA, 592 bp, Homo sapiens
aaatacgtgtagtatactacttaataagcaattaaaccaaagcagagtcgggtaacttatcttctgcaaatcagcacaaaatcctgctaaaagtgaaacatgctttagccagtcacattacgtggaaaacaaccataataaatagatattgatattgtacacattatgaatgatcattagtgttaatagactttgtttatatgtctgtgtatgtgcaaatgcaaaaggaaaatttaaaatctgacttccttaaaatttagtttcacatatttctgcctaataaaagcmaggagaatatattgtctagtaaaaagactatccactctctttggagcttttccaaataaatatcctccaccaaatttttcatatctgtagtcactgagggcatcatttttaatattatcaagtgtccaacattccttccacttgcaataaccatttccttttattttcaaaaccagatgcttttgaaaatgaatggggataactagtgagtaagactctgtttaccttactatttaaggaagcttattttggcatttcagattttaaattcaaatataatatgttataatgatctctgtaatta

SEQ ID NO: 637739 - DNA, 581 bp, Homo sapiens
attcattatcagattcagaaagtttccttttattcttaatttttaaaaagtttttattgcaaatgtaagttgatttttagatgtactttgttttttttatttttctcctttatataaaaaaattgaaatatattttccatggaaatacaattttaaaagtttcaagaggttacagatatggcctgtgtaaacaatggtccttatgtagaatagtagccataatattttagaacacaacagcaattcatagtgatgagtgggttgtttttaggaaatgggatgaccggggatgggagccgcatttctcataaacctcttcggagtgattctgacagtaaacaataatcaggacatgaacggaagtaattacataagcctagaaatcctccagtacttgaaaagagcattgtggtggtattcactatgactcaaacatgacacagttctgatattacagacaaatgctgaaatacttacatatgttcttataaaaaattatgtaggaattaaacattcgttgtctaaaccaacaagtgttagttaacctatrtttaactaggaaaggggcactataagacaat

SEQ ID NO: 637740 - DNA, 599 bp, Homo sapiens
tattcaggttctttgccaattatttaatctgattatttggctttttgctattgagttgtatgarttctcttaaataaatcccttatcagatagaggaataaagaaagaaactgtgtcatatatttacagtggaatattattaagtctcatcaaagaagaaaatcttaccatttgccacaacatggatgagcctgggggacattatgctaagtgaaataagccagacacagaataaaaatattgcatgatcttatttatatgtggaatctaaaaaaagttcaatatagaaagatagagaataaaataatgtgtcggggatatgaggagggagcgacaatggacgtatgtaggtccaagactcacaaagtatcagataagtgatataatctgttcttgagatctagtgtgcagcatgaggactatagtcaataatattgtgttatatctgatgatttgtgatgagtgagtagattacttgctctttccatgcacacacaaaaatgggtaactttgtgagatgatagatataatttgctttactatagtaatcatgttactatctatatgcataacatgttgcataccttaaatatatataa

SEQ ID NO: 637741 - DNA, 571 bp, Homo sapiens
ataaaaatattgcatgatcttatttatatgtggaatctaaaaaaagttcaatatagaaagatagagaataaaataatgtgtcggggatatgargagggagcgacaatggacgtatgtaggtccaagactcacaaagtatcagataagtgatataatctgttcttgagatctagtgtgcagcatgaggactatagtcaataatattgtgttatatctgatgatttgtgatgagtgagtagattacttgctctttccatgcacacacaaaaatgggtaactttgtgagatgatagatataatttgctttactatagtaatcatgttactatctatatgcataacatgttgcataccttaaatatatataataaaatttattttatagaaaaagcatgctaaaaaaactggactggaaaaaagaacctaactgtatgacatatttctatcatcaaagtgtgaggtcaccttttgtgagtcattgcattttctggacttcttggttctcatttgtatagtactagcttaggggctctaaagactgatattactaaaatttatttcagtcaactct

SEQ ID NO: 637742 - DNA, 600 bp, Homo sapiens
atgttattttaaataaatgagtatatgttcagttcagcaccacctaccaaatatgatcataatgcaaatgagaatagcaatgatgacttctacctaccaaatatgatcataatgcaaatgagaatagcaatgatgacttctgtcttgaatcccatggaaagcacaagctcctggtactggcaggtctgtgtgctcccactgtcaccacagtcacagacatggatggtaagkgtgtttgtacttgtaagtgacgggattccattgtcggcaattaagatggagatgtagaagacaggttcttcttgaaggttaaaaccagttctattagtcaaaatgacagctgtgttatctaaaacaaaaatccatgtgcataattttttcaactacgtaagagaaatttgtatgtaatagtcacatgtgctagggacaatagtatagagatatgatcaagtaagttcaaataaaaggaagacgaaatttctgacgagaagacaactaaaacatccacactaaattattagtgttttgacattacctaaaccctaattatgtaatcagatgaattatttaaattatgtagtaaaattactatttaatatt

SEQ ID NO: 637743 - DNA, 587 bp, Homo sapiens
cattcaactcataatttaatagagagaaaagtgagtgacacaatttgaggccaaagtcaaactcttaattccatcagctatggctaagcataggttttacacatcccaatcatggctgctgagagctaatatctgttgatgaaaagaatagtgatcaggtcctcccaaaaaattattcatggcaagacagaaaaataggaaaatataaaggaagtctaacttctctttacgtggtaacccttctacatcttcttacatctaaggaatttgagttcaatgtatttctattaatgcattttgctagcttcataagaccattgacatttataaaatagcttgctagaaaacgtatgttttctacatgaaccaatttcaagacagttctttatttctctctcataattttttctttatataaaatgagaaaatcacattttattatatgaaaattaatttttttgaggtatgatctactccaaaacactattacrttgttaggatttatccagatacaaggataatatgaaaatggttttaagtgaaaccaatctttataatgcctgtgtgggtcagctcaacactgggag

SEQ ID NO: 637744 - DNA, 610 bp, Homo sapiens
tgttcataaattattgattcctcctaatattcacaacctcataggatgtgcatttgtgcgtgtgtgtgcatatgtatgtgtgtgcacatgtatgtgtatgcatgtgtgcacatgtgcatgtgtgtatatgtgtgtgcttgagtgtcctactttactgcccatatagcttttgccatttctttcctcaaaagctaagaggatagtgaccaaaatatctatcagaattaacaggatgcttgaataatcctgccccacatagactttcttattatataggtataatttaagaaacttttaatattttaatgtttctctagtttggttcaaaaatggtttttaagtaaataacagcttgagtaaacagcatagaaaatacatatgtattttatgwtaaataataatagcttatatcaaaatctaattataaccatgaataaaataaaagattttacataataataaaccaaggaaaagaaaaggacttattaaagtttagacatttctctctcattatgtctttacttgatttctgaggagaaatgaccgaattaagaaacagccatgaggcatagacacacagtggaaaatcatttctcttttcagtaagttt

SEQ ID NO: 637745 - DNA, 553 bp, Homo sapiens
gtatatatgtatgtgatatattacatcacatgtatttattttatattatatatttttacatataatatatatgttttatatatatacacacatataaaacmaaagtaaaataccgtagttctaatgtgcttttagattgtgcatggaagaaagcccagttacaaatttctcccaaggaaaaaaaaaaactgaaaaatgatctccacctccacaatgaaagaagacttcgaaatactcagcatgtctcatctatgtggaaacaattaataataaaaattaaagagcaataataactagggttcaataatggcttctcattgcatgtatattcctgaagactttgatgagatatcaaggaagtttaccataattatatggcaaagatgagaatattttaattttgagttcaagtatttccaaaaacattatgctactttgtagctaggtattcagataaggactcaatagaaatcacgaggaattaagctttaggggagttcagttttaactgtactccatttaaaatatttataagtattttccctaaatatcc

SEQ ID NO: 637746 - DNA, 553 bp, Homo sapiens
gtatatatgtatgtgatatattacatcacatgtatttattttatattatatatttttacatataatatatatgttttatatatatacacacatataaaaccaaagtaaaatacmgtagttctaatgtgcttttagattgtgcatggaagaaagcccagttacaaatttctcccaaggaaaaaaaaaaactgaaaaatgatctccacctccacaatgaaagaagacttcgaaatactcagcatgtctcatctatgtggaaacaattaataataaaaattaaagagcaataataactagggttcaataatggcttctcattgcatgtatattcctgaagactttgatgagatatcaaggaagtttaccataattatatggcaaagatgagaatattttaattttgagttcaagtatttccaaaaacattatgctactttgtagctaggtattcagataaggactcaatagaaatcacgaggaattaagctttaggggagttcagttttaactgtactccatttaaaatatttataagtattttccctaaatatcc

SEQ ID NO: 637747 - DNA, 553 bp, Homo sapiens
gtatatatgtatgtgatatattacatcacatgtatttattttatattatatatttttacatataatatatatgttttatatatatacacacatataaaaccaaagtaaaataccgtagttctaatgtgcttttagattgtgcatggaagaaagccmagttacaaatttctcccaaggaaaaaaaaaaactgaaaaatgatctccacctccacaatgaaagaagacttcgaaatactcagcatgtctcatctatgtggaaacaattaataataaaaattaaagagcaataataactagggttcaataatggcttctcattgcatgtatattcctgaagactttgatgagatatcaaggaagtttaccataattatatggcaaagatgagaatattttaattttgagttcaagtatttccaaaaacattatgctactttgtagctaggtattcagataaggactcaatagaaatcacgaggaattaagctttaggggagttcagttttaactgtactccatttaaaatatttataagtattttccctaaatatcc

SEQ ID NO: 637748 - DNA, 553 bp, Homo sapiens
gtatatatgtatgtgatatattacatcacatgtatttattttatattatatatttttacatataatatatatgttttatatatatacacacatataaaaccaaagtaaaataccgtagttctaatgtgcttttagattgtgcatggaagaaagcccagttacaaatttctcccaaggraaaaaaaaaactgaaaaatgatctccacctccacaatgaaagaagacttcgaaatactcagcatgtctcatctatgtggaaacaattaataataaaaattaaagagcaataataactagggttcaataatggcttctcattgcatgtatattcctgaagactttgatgagatatcaaggaagtttaccataattatatggcaaagatgagaatattttaattttgagttcaagtatttccaaaaacattatgctactttgtagctaggtattcagataaggactcaatagaaatcacgaggaattaagctttaggggagttcagttttaactgtactccatttaaaatatttataagtattttccctaaatatcc

SEQ ID NO: 637749 - DNA, 583 bp, Homo sapiens
ctccaggatgatcttgtcgtttccttacaacagctctggattccagttatcagatgagttgcagcatctttgattggagagtagtattagaaagcaagatctaggtattaagagttcccattgcttcttgagtttcattgtttttaggtcctttgagcagacatcagcaggaaatatatgtatgtatacccatgcgtacaaacacatctatatttatttccatgtaattccttctgtctgtatatatattaagaaggcattcgtgcatcatacctcagatttcaatccagtgtgacaccttcatgtaacttttctcattttttatttgtaatcatttcttttgacaataatgcatcttagtcttactatctacagcatatttacttaygtgttcaatcccaatatacatgtagagtaacactgcaatccctaaatagtatccatgtaaaaaatatattcactatgtagagtacatttcttctgaacagctatttttttctctagatttagaattgaaatactctcttccaaaattacttagtttgtattttcctaattcctctccttttgattatgttatttg

SEQ ID NO: 637750 - DNA, 579 bp, Homo sapiens
tgggctcctctaatttttaccatacaaggctccttaaaacaattctatcatctcactttcaagtctaaatattaaatttttccattatttctgtgccccattttttaaaaatkgacatgtagtttgttattataattcatataaaggtagatcttgctcctcaagcttttatgacctcaactaaagcaagagtatttcgttacaccagtttatttaccccacccaagacgtgatgaaactgagtttgggaatttccatgctttacagaaacagcaggtgattcttacttagtaggaaaaactaatatgagttgaatgaattggggctaatttactatgtttaatatgtgttagtgtttctcccacaacaatgagacatccctaaggctaaaatacaatatcctaatattttttctggttttcatagctcttaccatgcagtgagtattaaagaagagatattatcaaattaaaactcaaattgaaatcattttgcattttatgttcaaatattttggggatcttttgcttacaaagaaaaaagagataaataaagaaaaccaaaaagaagcctcctgaa

SEQ ID NO: 637751 - DNA, 613 bp, Homo sapiens
caaattgcaggttctattttgtacaggcagcatgtgttttttcttattttcatcatattaaatccatggattttattcccactgtagggagaaagtacatgtatgagtcaaaaccacatgttttgcaccagtaytacgtaaacatttatgtataagtactggtttccatattggtagccatatcctccatgctgactggcttatcaatgaatttcttattaataaaaactgtttgttttctgaaaattgtaagcagtttctaactacacacattactcttagctgcaactccatgtaaacacattatatttccatttcctcttgcttctccatgagcatgtgccctgtgcagtcccaaaggggcctgttcttagaaggaccccacacttaatataatactttgctgtaggcatccttaaatttttaataatctttgaattttcattttccactgggttgcacaaattatgtagctcgtcctcagggtataagattatttttacaaaccacaattctgatactttcactatgtgtccaaatctgtcaaataaagtcctaaatgacatcttttctgtttccttatctgattctcatcttgaagagcaatttccct

SEQ ID NO: 637752 - DNA, 578 bp, Homo sapiens
aactacaatttaataagaacttacctatgggccaggatctgttctatacattatcttagataatcttcacaatggtctctggaataaatcctattattgttcccatgttataaatgtttatattaagcttcatataagctaagtgtcttaggtaagtaaattggctgggccagaattagaatgtaagctgatgtcataggcaatgtgaaatatgagtagtaagtgtagccctctaggacatattgttcatatcctagacttgttcttgtcctaccagatttacatacaaaatgataccgtaaaagacatgaaattccaaaagcaagtaaaaatatgtctcataaaagttagtgacagagaaataagtaatataattttgtagaataaggaccaaaaataatggttaaaaatagaagaaaataatgtgttttgatatgggagaaagggaagattttctagggtaagagtacagccaatgagctaatactcaaataaaaatatgaattgaggaaaaaagtgtgatccyaagcaaagaatatcaagaaaattaatgaaggcaaagatatcatacattaggt

SEQ ID NO: 637753 - DNA, 486 bp, Homo sapiens
caatgccgctgccaaacctggagagagaatctaattcattttttctcttctgcagtacctcggccatatctttggattgtaggacttaagccaatatttgttgaatgtgtgattcagtgtacctagcatgctaacttccctgaaggttcttgaaaatttcattatttctgtttacttagccaaaatcatagtctccaatatagcaatagggcttcaaaacaatcatttttttattacttccaccttaaaaagttttatgaaggaaatagaaaaaaaagtgttgaaagaaaacagaggagacactgtaatggaattatcttttttattttctgagaaattatggaatctatatgagaatattcaagtcatttttcaaatatargaaaataagtcagaatggtagataaaactaggttgaacagttagcttatgactcataagcataagttatagaggaagtaaaataggatgaagtagtaacttatg

SEQ ID NO: 637754 - DNA, 381 bp, Homo sapiens
gaattccttctccatcaagttcctcaaaaatggtggcactcctgaggctaaaagttcagctgttatcatgttcactcaggccattgtcagttctctgaaatcttctctttcccaccactcctacttattttccctctccttcccaccacccaaccagtttatgcgagagtgctgttttgtaaatgagactgggagctcataaatggaactatggggtggatgtgggtaaggggaaggtaaacagtagcttaattgcagtttaggagcaatatctagttttgtataatgrtagggatgtgtgtgtgtgtgtgtgtgtgtgtgtgtgtgtgtgtgtggagtagagcaaaaaaaattggtagaaagcttgaattatataattaa

SEQ ID NO: 637755 - DNA, 569 bp, Homo sapiens
tggagtcaaagatgacaatgacgttttcactctggatgacagggagaaggattgtactactaataaaaatagaggacgcataatggaaygagtggcagtgaaggagggagacaaattcagatttgaatatgaagtgacagcaggacaatcaggttgaatgtccttaaggaaagtggaaatatagagctatgaacgtggaacagagcccaggaatgaagacataagtttgagaagcagatgcctgaaggaagcagcgggagaaatgagagcaggaagtgcaattccaggtgaaacacttagctagggaaacggggcttaaaaaagaaaaactaaactaaaaggaggaagagtctagccagactagccagactgtcagatgaatagttgcattttgaatcagccagaccaagctaaccttcccttgtatctatgtaaacacaggagatctcaaatatttacatgcaaatggaatacacaaagtccccatgagcattcatgatggaaaaagcaggatactagataagcatttcacaaagggtgcaagtaactaagttcctaagttgcttggt

SEQ ID NO: 637756 - DNA, 643 bp, Homo sapiens
tataactgattgtggaatgttgacaaaatgatacacctactattttacattgaataagctaagccacctttaatagaaccaaatataatgaaacatcaagatctcaagctatttatttataatataatgtatcatgtagaaattgtatgtagatgtttaaacatataacatagctttattgggatgaggaaaactgtaggcagatgcttgtttttcccaaaagttctgcaacagcaaagtgtaatccatcaacaactttggaagtaaatggaaagagatcatgaaatccaattccctgccagcttagtacaaactttaaagatttcctggctcatgtttgtaaagaacaagcatcatttcttctcctgcgcaaggcagggtgctgtgagctgkctgggtgctgtcaacctccctgattctttgtgaaacttgagccctcacacctgaggctatagcttacaaagcatattagaataaaagggaacacgtacatattgaaaatgtgattgtgtgatttttctttgttatttagtcagtcacattatgattgacaaaataacaaaaaacgtcaaaaagttgagccccagaaaaagtaagttggtaaaaatacgaattcatggagatgaaagtgaactaaatttaa

SEQ ID NO: 637757 - DNA, 616 bp, Homo sapiens
caagatctcaagctatttatttataatataatgtatcatgtagaaattgtatgtagatgtttaaacatataacatagctttattgggatgaggaaaactgtaggcagatgcttgtttttcccaaaagttctgcaacagcaaagtgtaatccatcaacaactttggaagtaaatggaaagagatcatgaaatccaattccctgccagcttagtacaaactttaaagatttcctggctcatgtttgtaaagaacaagcatcatttcttctcctgcgcaaggcagggtgctgtgagctgtctgggtgctgtcaacctccctgattctttgtgaaacttgagccctcacacctgaggctatagcttacaaagcatattagaataaaagggaacacgtacatattgaaaatgtgattgtgtgatttttctttgttatttagtcagtcacattatgattgacaaaataacaaaaaacgtcaaaaagttgagccccagaaaaagtaagttggtaaaaatacgaattcatggagatgaaagtgaactaaatttaattgtgagytcaggatatcatgtccaaaaggagatgaccaactctgagcttcttacatatgtgagaacct

SEQ ID NO: 637758 - DNA, 688 bp, Homo sapiens
cgaattcatggagatgaaagtgaactaaatttaattgtgagctcaggatatcatgtccaaaaggagatgaccaactctgagcttcttacatatgtgagaacctttttagtattttattctggaataagaaaacaagaagcatgaagggtctgtccatggagaggcaggctggggcagtctggggtgtaaggacacactgaggggcagcacatggagctgatggagcttgctctccacggctgccccccctttatagatcactgatctccatgacctctgakcaggtgttgctagagacaggcactcagcacacaggccaggccatgaaaaaaaagatggacatttgaagcgtaaacagaataaatacgcactttgtgaccacaatgtttatcactctcagaaggaactgcaatttaaggaaatacttcagttcactaggaagcactaaaagatttgaatccaaggtacttcctaccactcaagctacagtcactaggactaagtcgttttgctttcaccctgttctactgaagcctttttgactcctccttattgaacatccaatacaggctatggcctgtatgaccgtttgctcagcctttctggaccttagtttttatctgtaaaaactcaagttttactttttgaacccagaaaaaaagatattttgcacagcactcctgatatg

SEQ ID NO: 637759 - DNA, 688 bp, Homo sapiens
cgaattcatggagatgaaagtgaactaaatttaattgtgagctcaggatatcatgtccaaaaggagatgaccaactctgagcttcttacatatgtgagaacctttttagtattttattctggaataagaaaacaagaagcatgaagggtctgtccatggagaggcaggctggggcagtctggggtgtaaggacacactgaggggcagcacatggagctgatggagcttgctctccacggctgccccccctttatagatcactgatctccatgacctctgatcaggtgttgctagagacaggcactcagcacacaggccaggccatgaaaaaaaagatggacatttgaagcgtaaacagaataaatacgcactttgtgaccacartgtttatcactctcagaaggaactgcaatttaaggaaatacttcagttcactaggaagcactaaaagatttgaatccaaggtacttcctaccactcaagctacagtcactaggactaagtcgttttgctttcaccctgttctactgaagcctttttgactcctccttattgaacatccaatacaggctatggcctgtatgaccgtttgctcagcctttctggaccttagtttttatctgtaaaaactcaagttttactttttgaacccagaaaaaaagatattttgcacagcactcctgatatg

SEQ ID NO: 637760 - DNA, 594 bp, Homo sapiens
aatgtttatcactctcagaaggaactgcaatttaaggaaatacttcagttcactaggaagcactaaaagatttgaatccaaggtacttcctaccactcaagctacagtcactaggactaagtcgttttgctttcaccctgttctactgaagcctttttgactcctccttattgaacatccaatacaggctatggcctgtatgaccgtttgctcagcctttctggaccttagtttttatctgtaaaaactcaagttttactttttgaacccagaaaaaaagatattttgcacagcactcctgatatgataatgatgaggcattttttatagtgacggattatcaagaatgcgtgtcctggcttttcttcgtagaacattaccagatgagtgtgttggaatcagctccaattagctccactgtcgggagagtgtttgccaaggacttggatgaaggcatcaatgcagagatgaaatatactattgtggatggagatggtgcagatgcctttgacattagcacagatcmcaatttccaagttggtatcataactgtgaagaaggtaatccaactcctttttctaaaccactttcatg

SEQ ID NO: 637761 - DNA, 633 bp, Homo sapiens
cattactattttgtgccataattttcatgactcaatttttaaggatataatggcttyttgtttttgtatcctctaacttgaagaagtttcttgaatttggaaattggattctcagatattattacttttttattttctattatgaatacagaaataaataattatttgatatttaaaataaaaaggacacaaactattcaagaggaaaaagccaaaactcattatcaagtgtgggcaatttaaatgttaagagctgagcagagtggttgcagcttcttaggatggaggtgggaggatctcttaagcctaggagtttgagaccagcctgggcaacataagcaagagtttgtgtcagtacataaataattaaataaataataaagtttagacaattgagggcaatgttttgtttccattttaaatgtggaagtgagggagacaataatcttagatagttttaaagtcttaagtaacttacttaaaaagaatttcagtaataattaaaaactcacgctagtgctttcaacagatgctggaacaattggataccatttgcaaaaaaaataaagaaataaacctcaattatacccccacaaaaaaactcaaaatgaatcatgcacctaaatgtaaaaa

SEQ ID NO: 637762 - DNA, 557 bp, Homo sapiens
tggctccccaactccctggtatgtaaggccatccttgcaattcttttctaattccacactcaaaaacagtgaaataaaaacacctaaaccaactcttgcaaaaaagaaagtatctgtacatatatccttgctcttcttattgaactaatctatagcatatatatcatgcttagagaaamacagatttagtagatactagtattattcaatacaaaagaagtccgagttttctgagggaaaaagccctgaggattgaaattagaatagaggtacagatattcacatacacccttgatcccaagttcacctctataccaagagacagaccaaagaaagaagttcctgtgtaaaatgtcaacacttgattttctaggtaggtccgtgcaatgtgcttctcaaaatacatttaaaaatacaacatgtggtttaattttgttgttttagttcagtcctacgtaaagagaggaagagtataaataagtaacctttctaagttcttggatccctgtgtcaagagaaaattgttacggtttctggtccctgactgcattgacaag

SEQ ID NO: 637763 - DNA, 459 bp, Homo sapiens
gaagtcaatctgagaactgcgtagggcaaccctgcctcccatcctattcgaagtcatccctctggtcactgagataaatgcatatatgagtccctcctttgaaaaagctaatgagaaactcagtgcaaccatttgtctctcacctacctgtgacctggaagtcctgtccctgcttcgagttgtcccacctttctggacagaaccaatgtacatcttacataaattgattgatgtctcatgtctccctaaaatgtataaaatcaagctgtgccctgaccatccygggcacatgtcgtcaggacctcctgaggctgtgtcacaggcatgagtcctcaaccttggcaaaataaactttctaaattaactaagacctgtctcagatattcgaggttcacacctaataatatgtaatattgttaagttaaagggatatgaccgtcagagttacctctgatggct

SEQ ID NO: 637764 - DNA, 577 bp, Homo sapiens
tctaactggcataacattacatgacaaagaagaaaatcaaaatatttatccccaaacatgtttctttgccatattttgaaatggccctacaaagctgtcctttgtggggaaaaaattgcatctgtaaagaatctctattaatatagctagatctttttcttccaggccctcccaatactgaagagattaactgagagtctagtaccttttaaaggtctgaataagaaacatttgtcatctattgtctctaagggcagcaactatgagacttcaaaagaactttggtctccgcaatctgaacatttcctttccattgatcacagatctttagacaagctcaaccaaytgtcaaccagaaaaatgtttaaatttacctatagcttagaaacaccccaccccacatcacccccgctttgcattatcctgcctttctggaccaaatcaatgtatttctcaaatgtatttcattgatgtcttatgcccccctaaaatgtataaaaccaagcttcatcccaaccaccaggggcacatgttaccaggaccttctgagggctttatcatgggccatagtcactca

SEQ ID NO: 637765 - DNA, 594 bp, Homo sapiens
aagatgctctgtgagctgtttatttttaccatgcataagatatgaatttccccagagagcaagcagcagatacggtttcatttaagaagagaggcctacaccaaatccgttgaaatgtgttgtgatcctgccaagcctgtacagtaatgttttrtctcccttttaaccctgcaacttaaaaaagttgacttctctacactgtaggcaaagattaaaggcttacttactacagctttacaacatgactcttggctagatagaccttttgcatgaaaatggaagggactgggaacaataatccgtccccagtttacccctataatgtatatattgcattgtagtataacattctccagtgatatatgcagcattttcttttttaaaaggccccccatgggcacagctataactctctgttcatgtatttttgaccttaacactacagatgccccccgggagctgtcaaaataatctaagactcttcttaggatataaaggacacattaccctcttcctccctgcatttttcctccctgtgggcacccttcctctcttcattctcccccttgcccttagtagaattgttaaagttac

SEQ ID NO: 637766 - DNA, 328 bp, Homo sapiens
atcaccttccctcccccaaattaagaaagttaaaatctaagccatcagaggtaactctgacggtcatatccctttaacttaacaatattacatattattaggtgtgaacctcraatatctgagacaggtcttagttaatttagaaagtttattttgccaaggttgaggactcatgcctgtgacacagcctcaggaggtcctgacgacatgtgcccaggatggtcagggcacagcttgattttatacattttagggagacatgagacatcaatcaatttatgtaagatgtacattggttctgtccagaaaggtgggacaactcgaagca

SEQ ID NO: 637767 - DNA, 433 bp, Homo sapiens
gaattcatagctagagggtcagcatgtatacaggtaacatatggcaagttttattatgggactgaccaagtttttcaaagccagggctcttaattatataattcaagctttctaccaattttttttgctctactccacacacacacacacacacacacacacacacacacacacatccctaycattatacaaaactagatattgctcctaaactgcaattaagctactgtttaccttccccttacccacatccaccccatagttccatttatgagctcccagtctcatttacaaaacagcactctcgcataaactggttgggtggtgggaaggagagggaaaataagtaggagtggtgggaaagagaagatttcagagaactgacaatggcctgagtgaacatgataacagctgaacttttagcctcaggagt

SEQ ID NO: 637768 - DNA, 434 bp, Homo sapiens
gaattcatagctagagggtcagcatgtatacaggtaacatatggcaagttttattatgggactgaccaagtttttcaaagccagggctcttaattatataattcaagctttctaccaattttttttgctctactccacacacacacacacacacacacacacacacacacacacatccctatcattatacaaaactagatattgctcctaaactgcaattaagctactgtttaccttccccttacccacatccaccccatagttccatttatgagctcccagtctcatttacaaaacakcactctcgcataaactggttgggtggtgggaaggagagggaaaataagtaggagtggtgggaaagagaagatttcagagaactgacaatggcctgagtgaacatgataacagctgaacttttagcctcaggagtg

SEQ ID NO: 637769 - DNA, 497 bp, Homo sapiens
cacctcccacaaggccctacctctaactatggggattatagttgaacatgagatttgtgcagacacacaggtccaaaccatatcaaggttgcaaatcaactgaccttaaaagtctcccagattaccctgctggtcctaatcactggagtccttaaaagcagagaacctttcccagttgtggtcagagaaagatgtgataaagaaagcagcatcagacacatgtgacattgttggctttgatgagggtaggaggggtcacgagccagggattgtgggcagcctctagaaattgacctcatttaactaaattacttcttcaaaggtcctaccttcaaacatggccacattctgagagggggttaggacttcaacatatgaattttggtgtgacacaaatcagtccatcataccaagactgtagacttttagactgttgcaattatgaaaatgcaagtcatgtttttgttmcatgagtttgaggtatattccagaattgt

SEQ ID NO: 637770 - DNA, 578 bp, Homo sapiens
aacccaaacacagttttctgtttcatgaacaaagagaaagccaaagaaagtcttcttgaaaaccacttaatgcctaggaggttctccagtcaactttgccatttgaaatcatactccttacaggcaaccaatggtgctcaaagcatctctttcagcatcaatcttcctacttygtgatatttgggggatgtcttaattagatcagttactttgccattcctttaagtattatatctcaagttacctgttggcttcttacaggtctcatgaagacagctccattttttagaggtagctaggaaatatatagctgctttcaaagttctatcgctttctgggacaagcagttcatcttatttcttctccatggctagtcattaaatgttgaaggtcttggctaattctgggtactctaatctgcagtgaatctgaaagaagagaaaatcaactaaaagccagactgtggatgttcatgtactcattttaggaatgggctggtcacaagggtagaataactgactgcattgggcttcagaaaaggtcttgaacttttcaacattttcccccacatgttatct

SEQ ID NO: 637771 - DNA, 596 bp, Homo sapiens
gaatgtctgttaaaggttttctgcccaatttttatcagatttttttttttkggctattgaactgagttccttatatattctgtattttaatctttagtttagatgtatagtttacaaatattttctctcattctgtagactgtctcttcacttggttgactgtttcctttgctctgaagaatctttttaattggatgtaattccatttttctattttggcttttgttgcctacacttttgaggttctatccaaaaaaatctttgcccagtcccatatcgtgaagcatttcccatgtattcttccagtagtttcatactttcaggtcttacatttaagtctttaatacttttagcagatttttgtgtttggtgaaaggagtgtggctttagtcttatccatgtggatatcctattttcccagcagcatttattgaaaagaatgtccttccaatttttgttctttgtatctttcttggaaatcaactggctatagatacacagatttatttctgggctctctattccacaccattggtctatgcatctctttttatgccaataccatgctgttttgattaccacagttttgtagcata

SEQ ID NO: 637772 - DNA, 581 bp, Homo sapiens
ccagtgatgacagagcaggcctcctgctcaatttccagaaacatttctctttgagccaaatttggtctttaagaacaagctctggcatctgtaaaacacgctacaggcttgttataaagcccatttatactatatattgagttacgtgactcagaacagcagcatgaagctgggattgtcatcagtccttccttttcagcaataaaaacaggctcaaacagatcaagtgctcacagccccaggatttgtgacttgagccaagacttaagctctgatctcctgacctcggatcctctatccatttcgctatagcccaaactatggaataccagggaagagaaatggcctggctagaggagacttttccccactgccataattcatcaacccatgttggaagctagttttccatgttgcatgcagccatgtgtgggaactkaacagcaagggctaaagggcctgagagagatgtctggcctgcctccaaagccagctgggaaaacattccctgacaagacactgtgcccacaggggaacacgagagaagaaggagcctgaggcagcagattagaagtgctgag

SEQ ID NO: 637773 - DNA, 520 bp, Homo sapiens
gaacttggagatctgttccttgcaaggactggactttaaagcatgtctataactttgctcactgttcccttcccctgagttgcccttctcaccttcctcattgacacacaaattttatccatcttctgctgcgcagccagatctaccctgtcttggaagccatttctaacacttattacttctcagtccttcctgtctcactgatcactttctaccaagtagtaaaggagtgctatgattkgaatggtttgtgtccttttcaaaattcatgttgaaatttaatccccaatgcatctgtatttagaggtgggaactttaggaggtaattaggccatgagcgctccatgcttatgaagggattagcaccttacaaaaagggcttgaaggggtgagttgtccttctgtgccttctaccatgtgaccacacatcctttggaggatgcaggaacaaggcaccatccaaagggcacaagagtagaaaagcagagagtatccttcagcagacaccaagcctgctggc

SEQ ID NO: 637774 - DNA, 520 bp, Homo sapiens
gaacttggagatctgttccttgcaaggactggactttaaagcatgtctataactttgctcactgttcccttcccctgagttgcccttctcaccttcctcattgacacacaaattttatccatcttctgctgcgcagccagatctaccctgtcttggaagccatttctaacacttattacttctcagtccttcctgtctcactgatcactttctaccaagtagtaaaggagtgctatgatttgaatggtttgtgtccttttcaaaattcatgttgaaatttaatccccaatgcatctgtatttagaggtgggaactttaggaggtaattaggccatgagcgctccatgcttatgaagggattagcaccttacaaaaagggcttgaaggggtgagttgtccttctgtgccttcyaccatgtgaccacacatcctttggaggatgcaggaacaaggcaccatccaaagggcacaagagtagaaaagcagagagtatccttcagcagacaccaagcctgctggc

SEQ ID NO: 637775 - DNA, 513 bp, Homo sapiens
acacttgcctctccacagaactgacagggctaagtgtgaaacagactctgcactttatcctgtgaaatgttttactagatggctcttgtttctagctccatttagactgctcagagcagaagctggcccccgcctgtttgccccctggaggattcccatcacatgtcagtgatgtatgtgtycccactagctctagtgacctgcctctgcgatgtgctgcaaacactacactcaacggcaaagcgtccagcctctggaaaaccggtattgagagactttccagagcattaagagctcttaaaggacactctaaagttactgggaattttctagaacagtgcttaaagcaacatttagtttcctgaatctgcaagaaaggcactcttttattggtctcccctaatttcccagcttctctgaaagcatgagtcagccaatggaagaacagtggggaggtgagtatatcaatttagactcaatctttgggcttagcaacttagaatctggcgaatt

SEQ ID NO: 637776 - DNA, 513 bp, Homo sapiens
acacttgcctctccacagaactgacagggctaagtgtgaaacagactctgcactttatcctgtgaaatgttttactagatggctcttgtttctagctccatttagactgctcagagcagaagctggcccccgcctgtttgccccctggaggattcccatcacatgtcagtgatgtatgtgttcccactagctctagtgacctgcctctgcgatgtgctgcaaacactacactcaacggcaaagcgtccagcctctggaaaaccggtattgagagactttccagagcattaagagctcttaaaggacactctaaagttactgggaattttctagaacagtgcttaaagsaacatttagtttcctgaatctgcaagaaaggcactcttttattggtctcccctaatttcccagcttctctgaaagcatgagtcagccaatggaagaacagtggggaggtgagtatatcaatttagactcaatctttgggcttagcaacttagaatctggcgaatt

SEQ ID NO: 637777 - DNA, 532 bp, Homo sapiens
ctgcagttgttcagtaagtacttgttaatcaaataaatggaggggtgagcacccaggagctctggtctggatgttcccagtcaggagctgcacccacrctcatttctgctcccatcgccctatcttcattgctacttcattcctcaccttaaagcttcaggaaaatccacagaaggtcttcattggaagatgagaggatgtaaacaaaaacctgagccttccttgagatgtcaaccctgaaaattatatccaaagttcaaaaaaattgagaaactgtggtagactattaaagttgggcactagaaagactgtaacattcctgtggatgagcaggtctcatgttgctttagaaagaaacatgtttaaagtctgaataaatcaatggttaagctttggagaccttagtttaaacaaacatatcttgacctacaacaggaatataaacatgaccctaaaaacacatttgcaaatgattttcttggccacagacatagaagagtacaaaactatgatccccaaaagaatccttaag

SEQ ID NO: 637778 - DNA, 542 bp, Homo sapiens
tgaacagaaatgacaaaattaaggaggccaggaagattatatctttctacacataaatgactttatactaagttattttgcttagcatctgagcttattcgacagtgaggtgcaggaaggcagaattttataagttcattaatagcaccactttgggagaaactaaaktttaggacttagaatttagctgaaatgactctgattcttgtgcagccggagtgtagtgatttagcaatttcttaggagcagtatggctcagaatcctgaacaataaggaagagaaacaattttttttcattctatttagagattatattataaagtctcaaaaaatactagtaagaaataatgggcaacttaaatcatggactttttcttttcattgtaatctcaatttatacattataagtgtacaatttaaatgtagtgttgagtaaatatatttattgaataaagcattatcttcttcagttgtttgcaatttcttgacaatctgcatgttctgcagtgttaacatgaacatttattttgtgttttaggca

SEQ ID NO: 637779 - DNA, 554 bp, Homo sapiens
gatattaaactgtccttattctatcatcttcaacaaatgtcagtgaagatctatgaaccaatatttgagtctatatattattaactatatattgccatatagttacttgtggtaaattgattataattaacaactccaatcctcttactgtatctacacacattgctacggaagcttggaaagcctctccagtttgacaggccctgtgacttgctttgaccattgagttttaggcatgaagagtgcttgtgtgattgggcttgccgtagtatacccaggctagctgtggagaattagacacaaaagctaatttacccactgtcccaagccaacgcccagccactccccacatatgtgagcgtattttttaaaaaaccagatcttccaagctgagaccagtctaaatcaatgacttacagacttgtgagctaacaaagattacttattttttgatcttttaagttcaagggttcaagtgcaggtttgttacacagtacacttgtgacattaaggtttgttgtacagattatytcatcacccagggattaagccta

SEQ ID NO: 637780 - DNA, 582 bp, Homo sapiens
ccttccataaagtctctccaatagaccctttaaggattggagagattagaaaaccctgattcaaaggataaacgagagaaaaataacaaatcaaagataggaaaaggaagtgaagcgtggatagagacaaaatctgaaggccagggtcctgagctagagctcactaggtgctaaagtcctacttaaagttgaaacgtttagaatagaccttcagtaccaaaacagtgttgagggcaaagacctggagacaaaagaaaagagacagtgaaagacaaacagtagtccccaattatctgcaggggatatgatccaagaccttgagtaggtgcctgaaacatagtacatataaccctgaaccctatatatactgttgtttctatccattcatacctatgataaagtttaatttataaattaagcacagtaataacatattaacaataactaataaaatggagcaacgataacaacatactttaataaaaactctttcaaaatatcttaatattctcagaccctgattgcccayaggaactgaaactgcagaaagtgaaactatggatgaaggcggacacctgtatg

SEQ ID NO: 637781 - DNA, 504 bp, Homo sapiens
tgtatctgtcccaagtatcctccaatgcagctacagtycctcaaaaatttataaccaatttttgtctttatggataatacagttttgttccccacatatccctgctgcttgggcagtactggggactatttaagttctagagacttagacctgctttccacaaaagggtccagcaagcagttagggttctgttgccagcttctgtccaatgacatgaaaacatcccctatgtgaggaagcaactcattgcttggtttgttaagcagggaacatggacttccagaatagacctcatttttaagttatttttcagtgaggacactgcttcacaatgttctgataaagaatttcaatatggcatggcagatcttaactttatgtgagacatgggacctagttatttatatgtgtttaagatttttcttagcccttggaataagcctgattacttttcctagttgattacattgaggcttagagatattaagtaagttcccactacca

SEQ ID NO: 637782 - DNA, 504 bp, Homo sapiens
tgtatctgtcccaagtatcctccaatgcagctacagtccctcaaaaatttataaccaatttttgtctttatggataatacagttttgttycccacatatccctgctgcttgggcagtactggggactatttaagttctagagacttagacctgctttccacaaaagggtccagcaagcagttagggttctgttgccagcttctgtccaatgacatgaaaacatcccctatgtgaggaagcaactcattgcttggtttgttaagcagggaacatggacttccagaatagacctcatttttaagttatttttcagtgaggacactgcttcacaatgttctgataaagaatttcaatatggcatggcagatcttaactttatgtgagacatgggacctagttatttatatgtgtttaagatttttcttagcccttggaataagcctgattacttttcctagttgattacattgaggcttagagatattaagtaagttcccactacca

SEQ ID NO: 637783 - DNA, 504 bp, Homo sapiens
tctgactggtgagagatggtatctcactgtggttttgatttgcttttatgtaatgatcaatgttgttgagcttttcgtcatatgcttaacagacacatgtatgtcactattcatgtgctttgtccactttttaatggggttgcctgtttccttttttttttttttgtaaatttgtttaagttccttataaatgttagatattagactttggcagatgcatagtttgcaaatattttctcccattctgtaggttgtctgtttattgacagtttcttttgttgtgcagaagctctttaaytagatcctgtgtgtcaattttttcatttgttgctattgcttttagtgtcttcatcattaaatctttgcccattcctatgtccagaatggtattgcctttttgttttccaacatttttgtagtttggggggttttacatttaagtctgtaatgaatcttgagttaattttgtatatggtgtaaggaaggggtttagtttcaatattc

SEQ ID NO: 637784 - DNA, 618 bp, Homo sapiens
tctaactacctgtacttgaaaccagtgggaatttattaatattcttgctatagctgaaaacattgytataaatagaaatatcatgcagacatcaggtaagataggcttctgctcaccatggcctttgcacattggcagtgccttacttctatggcctccttcttatcaattctgtacaaatacaaaggaagcatcaaggaaaaagagttcagagactgttgctccaatggtacagtgagacagacatatctgtagtctagtacttcctatggttgcttacaactccttcttttttcctttcatttgaggttgcatactattaaatgtacaaatcttaagtgtactattcaatgggttattacaaatacataataaagccttgtaaccactgaattatcaatatatagaaatttttgccatcacagaaagtcccctgtagttctttctctagatgctatgacttttgtaaaagtttctaaccgtatcttagttttgcttattccagaactccacataaatggaatcactgtgcttgatgtcattccctcactatagtcgcctatgatagtcattcatcatccatcttcttatgtaacttttttctttttaactgctaac

SEQ ID NO: 637785 - DNA, 548 bp, Homo sapiens
tcataatgtgtttttcaattttcctgttgttggacatgttgccagtttgaggttattataaataaagttgtaatgaatacagttctaaacatcttttggtggacatatatttttctttctcttggtaacacctagaaataaaaattgctaggtgcaagggtaggtgtatatttaatttttctttaaactgacaaacatttattgcgagcarttatacaattttagagtcccagcaacagagaggagagttttcgttgctcttccacagcatttggtgttgaagtggtatctttttgtggttttaatttgcattttctgggtgactaaagatgttaagcactttttaatgaaattattggtgttttgtagatcatcctctgtgaattgtgaagtcttgtgctctacctcatccattttcttacctggtaactgggctgtctgtgttcttagtattgaattatagcagtttgttgtacaatctcgatcaaagtacttttgagagttatgttttctatcccagtctatagtaattattctataccagctta

SEQ ID NO: 637786 - DNA, 573 bp, Homo sapiens
tatgctctgttaaatggatttttaaatgttatagttattgtcgcaagtacacagaaatacatttttatattaaacatgaagcttgaaacttattaaatttactttttaatactggtataggttttgcattccctcagggttttctacataaaaattatgtcacttgtgaatagataattttcctaattccttttcaatatttaagttttaytttgccttagtgtaatgacaaggcctcccagtacaatattgaataggactgatgaaagcagatatactcgccttaaaatgatctctggggaaaatgttcaatatttcactattaagtatgatgaatagttttgtttatagatgttccttaccagattgagaaagttttctgatattcctatattgtttagagttttcatcatgatggtcattgaattgcgctactctttctgtatttatcatcattttttctcccttttatagttaatacggtgaattattctgaataatttccaaacaataaaccagacttgcactcctgagataagtttccctttgctattctaggttattgaattcaag

SEQ ID NO: 637787 - DNA, 519 bp, Homo sapiens
attttcctaattccttttcaatatttaagttttattttgccttagtgtaatgacaaggcctcccagtacaatattgaataggactgatgaaagcagatatactcgccttaaaatgatctctggggaaaatgttcaatatttcactattaagtatgatgaatagttttgtttatagatgttccttaccagattgagaaagttttctgatattcctatattrtttagagttttcatcatgatggtcattgaattgcgctactctttctgtatttatcatcattttttctcccttttatagttaatacggtgaattattctgaataatttccaaacaataaaccagacttgcactcctgagataagtttccctttgctattctaggttattgaattcaagttattaacattctactatgagattttgcatctatgatcataaaagctattctttatgaatttctttttttaatgtcttatttaggttttggtaccaagattatgattactttataaaagtgc

SEQ ID NO: 637788 - DNA, 569 bp, Homo sapiens
cttttttgcctgtaattttgataataacttgttgaatgtgctgggagtgcatatgctgagacaggaggaactggctgaacagcccaggccttgttcctgaccctactagaaaacatagcatcttaaatcagggacaaacttcttargacagcctgggtttgttcttctctcctctggaagcaggatgtccttctaagcttctcccagtaaatcacacagcccctaatatacataatcctgcacaggctgccttttggggtccctcatccacggagcaatgagtcacacagagtcaatgttccatctaccccaggcaactttctcgaaccttagggactggctcaccgtgaatcttagggttcatttgttccttgttgcctatctgtaagtaatatatttacttcatgtaacttgtatatgagtgcatctgtctcactgacgcaagttggtaaccagtgcccagtaaatctgattcacatcctatcagcacaaattaagctgtactccataaatttttatattttcttcatcatttgcatgaaaatatcttctaatttttcttctgattt

SEQ ID NO: 637789 - DNA, 580 bp, Homo sapiens
cataatcctgcacaggctgccttttggggtccctcatccacggagcaatgagtcacacagagtcaatgttccatctaccccaggcaactttctygaaccttagggactggctcaccgtgaatcttagggttcatttgttccttgttgcctatctgtaagtaatatatttacttcatgtaacttgtatatgagtgcatctgtctcactgacgcaagttggtaaccagtgcccagtaaatctgattcacatcctatcagcacaaattaagctgtactccataaatttttatattttcttcatcatttgcatgaaaatatcttctaatttttcttctgatttttaaatttagcctgtaagttatttatgtgtgttgctaactttaaatatctagaacttctataagtatcttattttatgaaggtctaacaattcagttgtgctcaaggaacatactttgtatgctctcaatacttttacacttactaaaacgtattttatggccttttatatgatttaatttgtgaagattttgtgtgaacttgaaaagtttaggatgcagaatgtactctaaatcaataca

SEQ ID NO: 637790 - DNA, 578 bp, Homo sapiens
gcacctcccttgcaagcccagcagggtctttgtggttactcctgtaaatcttggctactctgggtttttttggttcggttttggttttggttttagttttttgggggaacttcggttttaacttctcccatccccagtttgggattcagaagggttgattttacgactgacatacccacatgacttgtgtgctgttgttaagaacacatgctaaggagacaaagccaagctagagcatggccaaggcaaaacaaaaacagaagtgagaggtctggagctcacgtcatatgaggaaaggytgaagcatacaaagatgtgtagactcagaagatttaagagagaatcacctgtcatggggaacacgtggttacccttgtcctaatcctgcaaacgtcttacccaattcaaactcttctcataattctctgtctaggagggcttttccctgtccctactcccaaatcttgctttgttagcttattcttcagatttcaacttaaaggccattcctcaggaagtgtttggtgcaccagcaccacctctatgactactgctgttatagaattggtcagtttgtt

SEQ ID NO: 637791 - DNA, 611 bp, Homo sapiens
gccaagcagatgctggtgccatgcttgtacactctgcagaactgtgaagcaaatttttcgttataaattacgcagcctcaggtactcctttgcagtgatgcaaaatggactaacacacttagaaatcagagagtaacgcttagaagacctggccatgtggtgtctaagactgggcaatatgctcagaggaaatacgagaatcaagagacaatcaccacttccaagggtgactgaaattgaatcatcatcccacatagcgaagacaaacagtagcagtaaagacccaagccaaatgagaggaggttcaaagcagatggtggggacaaagccagggctgattctggaggcaaagcacaggcagctgcaaggatttgacatgggttcctgaagccatagatatgcatatgtgggaaaggcaagagacrctcctgagtagtgttaggcagaggagttaaggcagaaggtaatttgcatggggtaggtgaggcaggacaattcatcagtggtttaggaaaatcaacttttcctgttgctctgatcttgtccatgggaacccatgacacaaaaaatatgggcaatattattaattgcatatttcaccacaagaaaag

SEQ ID NO: 637792 - DNA, 570 bp, Homo sapiens
tctgaagaatctccttaaatagtcaaacagaatcatttctcattgtgccatttctgtcatatgctatagctacctccactattgcatttacctcctactttttcactggttacatgtttggatttacaactcctatcagagcatgttctctaaaataatttgttttttgaatcttaaccccatcctcagaatctrttccataattaggtggccaataaatgtttttgcaataaatgaataaatgattgaaatgtgattcattaggtatatatttaagtaaatatttggtggcagagaaacatttagttatatatagcaattcttacaagttctattggattttggatatagcaaattctactgagctgccttatcttattcatacagctgcatctctctgataaagaaaatagtgtgtatttggaattatgctttgccctttataggtttatgccagcaaataaatgacattattgtcagtgtgtcccttaatgtaaaaagtaaaatataaagaaacttataaagtctcatcttgctttaataaggtaattttgtgatgttgtgactcac

SEQ ID NO: 637793 - DNA, 635 bp, Homo sapiens
atctgcatcaatttgcaaggaaaaaaattcatctcattcatgtcctaattgaaaaagactgaagattaacagaagaaacaataaccaacaccaaagacatctcaatttgttcagcttatacaattctgtctaagcatttaaacttgagcaaattttccastctatgggggtcagaactgtcatgtccagatcagatgcagataagagcaaaactttcaatggaaattttgaacaagtgggatcaaggtctggaagcatttctttgacgaatggtaatgtgaagtgaagcatggctttatcagtatgatcctgaggacaaagcacaatcgaagcattggctgcctaagggtaaaagtggtccagttgaagcaaaaatggactagtcaagagcaaaggtcatggcaacaatatttttgggaagctcaagtcgcttgttggctttctggagggctaaagaatgaaaatatttcattatgagggtgttttgagaaagttagttaaaggtttggcagaaaaaaaaaaatgcccaggaaagcttcaccagagtccttgtccacaatgacaatggtcctgctcatttcttccatcaaacaagggcaattttgcaagagtttcaatgggaaatcattagatac

SEQ ID NO: 637794 - DNA, 573 bp, Homo sapiens
ttaatatataatataacttcagatgataatgatgaaaagacaaatgctagattatttgcttgtaaatttattaaggaacattatcagtaaccaccaaattgtgtctttacctgtgatttagaatttatataaatattattttattttttatgtcatctcattcatgctacagcagctttcttaaatttattttatatttatttgtttttattttcttttttmtaaacattatgtaataaaaagtatatatttgttttctactgtagtgccatttctaatacagactgagcattcctaactcaaaaacctgaaatctgaagtgctccaatatccaaaactttttgagcaccaacatgatgtcacaagtggaaaattccacaccttatagcacttaacacaaactttgtttcatgcacaaaattatttaaaatattatgtaaaattaagtttaggctatgtttataagatacatatgaaacataaatgaattttatgtttagacttgggccccatccccaagatatctcactgcatatatgtaaatattcatagttggaaaaaaatctgaagtcc

SEQ ID NO: 637795 - DNA, 470 bp, Homo sapiens
cccagccgattaaatctattttcaacagctttcacatctagtctrcaaactgcaaattttgaagagacagcaaataagacctttgcaacaagaattttcaaagtaattcaacatttttaacatttcctttggcgtacgttacaaccattactacatgcccacattctggtgaacattttaggtattttatgggttctatcattgcatgaaactatggaaatatatcttttcacacttaagaaaaatctaacaatacagaaaacagtcacatcaaaggaatcaaatagcaagggaacacaaaccataccttacaaattgaagatactttatattgattttctgtaaaatcactaagacagttacttgtttgcttagaaaagacccaagcatgctgccaggtaaatttaaagtattttgaagagaaaaagtgagcatgatgggtttactgcaaattttatactcacaaggct

SEQ ID NO: 637796 - DNA, 511 bp, Homo sapiens
gttgagagttatgtaatacattggttaagagtatagaaccctagatccatatcacctgggttcttgtctagtctggctcctattctttctagatcttttactgtgagcatgttacttaacttctctgttgcaaagtttcctcacatataaaatgcgaatgacgagggcaccaatctcatagagtccttattgaatgactttgtttgaaagcacttaggaaagtggctggtacttagtaatttctatataacygcttattaattacctcagtattttaaatgatggcatcatatttcacagaattgataagccatttatttaaccattccgctactgacgatgtttgtctcatcttgaatttgttactattacaaataatttaattgtgaacatctttgtccatatatgctccagaaatttgtgtgaagattattgtagtatagattcatagaaattaaatggctaaataatagtgtatattctttcaaaattttgatagacatcatcaatt

SEQ ID NO: 637797 - DNA, 511 bp, Homo sapiens
gttgagagttatgtaatacattggttaagagtatagaaccctagatccatatcacctgggttcttgtctagtctggctcctattctttctagatcttttactgtgagcatgttacttaacttctctgttgcaaagtttcctcacatataaaatgcgaatgacgagggcaccaatctcatagagtccttattgaatgactttgtttgaaagcacttaggaaagtggctggtacttagtaatttctatataactgcttattaattayctcagtattttaaatgatggcatcatatttcacagaattgataagccatttatttaaccattccgctactgacgatgtttgtctcatcttgaatttgttactattacaaataatttaattgtgaacatctttgtccatatatgctccagaaatttgtgtgaagattattgtagtatagattcatagaaattaaatggctaaataatagtgtatattctttcaaaattttgatagacatcatcaatt

SEQ ID NO: 637798 - DNA, 635 bp, Homo sapiens
ctagctagcccttccatctgttctgccaactgaggacgccctgagaaaaataccatatatgggacaggtgctcataaaacattgaattggttgacactgatmttgtacttcccagcccctagaactgtgaggaataaatttctgttttttataaattacccagtctcaggtattttgatatagcagcaggaatggactaagacacgttttttattcacaataaacatttagttatacttctgaattttaagaagaatgttttatatgttccacattaacattttattttaaaatatgtacaatgttttctgatttattcattactgaatctcaactgttaaatcaagtttaacttaaagctgcctccttaaatattttaagttcagcctaaaggtttctctgtacatagtgaactataacctaaatggagttgtcaacagactgagtctactcttgtgccgatcaccaagttttggccaattaaaggggtcagttcaaactgttcaaataaggtaaattctgtgctgtaaccagtctggctgtttctgttactcatttccgttttctgtatgtcactttcctttttctgtctgtaactcttcatccatcacgtggctgcactggagtctctctga

SEQ ID NO: 637799 - DNA, 635 bp, Homo sapiens
ctagctagcccttccatctgttctgccaactgaggacgccctgagaaaaataccatatatgggacaggtgctcataaaacattgaattggttgacactgatcttgtacttcccagcccctagaactgtgaggaataaatttctgttttttataaattacccagtctcaggtattttgatatagcagcaggaatggactaagacacgttttttattcacaataaacatttagttatacttctgaattttaagaagaatgttttatatgttccacattaacattttattttaaaatatgtacaatgttttctgatttattcattactgaatctcaactgttaaatcaagtttaacttaaagctgcctccttaaatattttaagttcagcctaaaggtttctctgtacatagtgaactataacctaaatggagttgtcaacagactgagtctactcttgtgccgatcaccaagttttggccaattaaaggggtcagttcaaactgttcaaataaggtaaattctgtgctgtaaccartctggctgtttctgttactcatttccgttttctgtatgtcactttcctttttctgtctgtaactcttcatccatcacgtggctgcactggagtctctctga

SEQ ID NO: 637800 - DNA, 539 bp, Homo sapiens
ctgcaggctgaaaagtgtagggagaaaggagggatagtaagagatttgttaacggatacaaaattacagttaggtaggagtaataagttctagtgttctatagtactgtagatractatagttaacaatactatattatgtagtttaaaataccaaggagtagtttgaatgctcccgacacaaagaaataataaatgtttgagatgatagatatgctaattaccctgatctgatcaccatctacatgtattgaaacatccccatatagcaatgaatatgtataatttttgtcaatttaaaaagtaaaaaaaaattaatcttgaagaatgcatttgaagaacttgtactcaagaaatcagcttattttaagaacttgagtctccttggaatttgtgttttctagaccagtacttctccaaattaaagcaaatttaggctgggcatggtggctcatgcctataatctcagcactttggaaggccgaggccagcagctcacttgaggtcaggagttcaagaccagctgacccaacattgtga

SEQ ID NO: 637801 - DNA, 602 bp, Homo sapiens
  misc_feature 1, 2, 3, 4, 5, 6, 7, 8, 9, 10, 11, 12, 13, 14: n = A,T,C or G
nnnnnnnnnnnnnnatgtttcactgtattcttaaatttactactgtgtcacttaatayaaaatggagaaactcacatttctttatgtccatttactctctcccccaccatcctttataaagtagctgtcatatgtattatacatacatgaaatataaacctcaaaaaataatgttatattaatgttatattttttctttgaacatgtatatgtattgtaaaccaattaaagttaaaattagtatttcatgtttcttaggtatttatcgtttttgatgcttttcatttgtttctgaagatttaggttgccttgtgctatttctgttgagtctgaataacttccttaagtatttcctgtaatgtggagtctgatggtgacaaattcttagtttttcttcacccataaaattctttacttcaactttattctccaaacatatttttcctggacatagaattctgggttgactccgctaatacacatgaagtttttagaactttaaatgtttcactgtcttctagctgctatgtcatctgatgagaagtttacagtcattaaatcatgtaacgtcttatttttgtctttgattttcagcagtttta

SEQ ID NO: 637802 - DNA, 602 bp, Homo sapiens
  misc_feature 1, 2, 3, 4, 5, 6, 7, 8, 9, 10, 11, 12, 13, 14: n = A,T,C or G
nnnnnnnnnnnnnnatgtttcactgtattcttaaatttactactgtgtcacttaatacaaaatggagaaactcacatttctttatgtccatttactctctcccccaccatcctttataaagtagctgtcatatgtattatacatacatgaaatataaacctcaaaaaataatgttatattaatgttatattttttctttgaacatgtatatgtattgtaaaccaattaaagttaaaattagtatttcatgtttcttaggtatttatcrtttttgatgcttttcatttgtttctgaagatttaggttgccttgtgctatttctgttgagtctgaataacttccttaagtatttcctgtaatgtggagtctgatggtgacaaattcttagtttttcttcacccataaaattctttacttcaactttattctccaaacatatttttcctggacatagaattctgggttgactccgctaatacacatgaagtttttagaactttaaatgtttcactgtcttctagctgctatgtcatctgatgagaagtttacagtcattaaatcatgtaacgtcttatttttgtctttgattttcagcagtttta

SEQ ID NO: 637803 - DNA, 602 bp, Homo sapiens
  misc_feature 1, 2, 3, 4, 5, 6, 7, 8, 9, 10, 11, 12, 13, 14: n = A,T,C or G
nnnnnnnnnnnnnnatgtttcactgtattcttaaatttactactgtgtcacttaatacaaaatggagaaactcacatttctttatgtccatttactctctcccccaccatcctttataaagtagctgtcatatgtattatacatacatgaaatataaacctcaaaaaataatgttatattaatgttatattttttctttgaacatgtatatgtattgtaaaccaattaaagttaaaattagtatttcatgtttcttaggtatttatcgtttttgatgcttttcatttgtttctgaagatttaggttgccttgtgctatttctgttgagtctgaataacttccttaagtatttcctgtaatgtggagtctgatggtgacaaattcttagyttttcttcacccataaaattctttacttcaactttattctccaaacatatttttcctggacatagaattctgggttgactccgctaatacacatgaagtttttagaactttaaatgtttcactgtcttctagctgctatgtcatctgatgagaagtttacagtcattaaatcatgtaacgtcttatttttgtctttgattttcagcagtttta

SEQ ID NO: 637804 - DNA, 460 bp, Homo sapiens
cattaaaaaaaaaaaaaaacggaaaagaaagacaaggaggtcaaggaaacattcagagaaggtgctgaagatataagcgaatagttgattgcagagctaaagggttaatgaacacagcagaagagtttagaaggcaaaggagggcttgaagagtgggttaaagggcttaaatgtgggaacaattgtatttctcccagccactttctttttaacagagcctcaactttgagtgttctccctctctcaggagggtatgtgttcagtaaaggttaccttcctcccagcccaggaatctcttgattagtccataagccaatcattaccctccctctagcaatgrttgatttgagaaggggtaaatgaccctattttgcctaatgaaatgggagaaaaacttggctaagatcttctagaaaaatgttcctttgttaaacacaaaagaaggaatagttgttctagt

SEQ ID NO: 637805 - DNA, 344 bp, Homo sapiens
attgaattctgtagctgtttaataaagcaaacagcatcatccagggaaaaataaacagatgagcagactgtctactttaaaatgtgtttatgcttcccattcacacggattgtgaattctcaytgttaacctagagtcccagctagtcaggaggctgaggcaggagaaaagtgtgaacctgggaggcagaggctgcagtgagctgagatcgtgccactgcactccagtctggtgacacgatgagactccatctcaaaaaaaaaaaaaaaaaaaaaattagcttcaaattccaaaacacttaatgttgcaccctccttgaacaataactaaaaaaactcatttcc

SEQ ID NO: 637806 - DNA, 552 bp, Homo sapiens
gagcttataactggtatcagcagatcaatataaaaaatacagtaccaagctacactggtatatttccattttaagaactccacaatatcctcattgctgagagcatagtccttgcattagttttcagtatgctatgaacaattatctgctgcatgtaaacatgtctaaataactatagataaaatacatcaatcataaatttctgtaaaagataataaaatatcttctttaaaaaacaaaacaataagctattactgcattatttccaattttatgaaaatggaacaaatatatggttgttgctagtcttgagttcattgcaataaaaatggccctagttcctggttaaagtcagcaaycaatctattttcttcaatagatgtcttctagttgtgtaggcaagaatttgttttacatgctattctgtcagtttataaaattatacaccagaaactgaccagtaccacagtactctgttgcaaacagttttccatcaggagtgggatctgagaaagcaatttcttctttgctcaaatatgagatatatatata

SEQ ID NO: 637807 - DNA, 552 bp, Homo sapiens
gagcttataactggtatcagcagatcaatataaaaaatacagtaccaagctacactggtatatttccattttaagaactccacaatatcctcattgctgagagcatagtccttgcattagttttcagtatgctatgaacaattatctgctgcatgtaaacatgtctaaataactatagataaaatacatcaatcataaatttctgtaaaagataataaaatatcttctttaaaaaacaaaacaataagctattactgcattatttccaattttatgaaaatggaacaaatatatggttgttgctagtcttgagttcattgcaataaaaatggccctagttcctggttaaagtcagcaaccaatctattttcttcaatagatgtcttctagttgtgtaggcaagaatttgttttacatgctattctgtcagtttataaaattatacaccagaaactgaccagtaccacagtactctgttgcaaacagttttccatcaggagtgggatctgagaaagcaatttcttctttrctcaaatatgagatatatatata

SEQ ID NO: 637808 - DNA, 548 bp, Homo sapiens
ccatggtggtctcgaactcctgacctcaagcaactctcccgcctgaactgcccaaagcactaggattagaggcatgtgccackgtgtctggtcttttctttttttggtctcaaactcctgacctcaagcaacccaccctcctcaactgcccaaagcactgggattagaggcatgtgccaccggtgtctggccttttctttctttttctttttttctttgatttagaagagaaagaaaattaaatgacagcacagcagaagaaatgcccaagagcttgtgttcaatgaaaatcaggtgatcctttactgaagagttgcttttagttagaactgggaatgggtattcaggaataagtaaactctgcttttcaccactgtcgaagtgtccagtgtttccccattcagcaactggctaattaagggtcatatggcaagaaggatcttatgtgtcttttaatctcttaaactgatcactaactcaaggtgattatacaaattatgaaaatgcttattagcaatgcttccttattctttctgtctgtactacct

SEQ ID NO: 637809 - DNA, 628 bp, Homo sapiens
ggcgtggcagctcacgcctgtaatcccagcactttgagaggttgagagcagtggatcacctgaggtcagcagtaagaccagcctggccaacatagcgaaaccccatctctactaaaaacacaaacgttagcctgtaatcccagctactcgggaggctgaggcaggagaatcacttgaatccgggaggcagaggttgcagtgagctgaggttgagccagtgcacyccagcctggcaacagagtgagactccacctcaaaaaaaaaaaaaaatatctaatgtgtctaatgtgttcccattttctctaagccacagttttctgaggtgtggaaaaagaaacatgactaaaattccacatggaattgtcttcattgagtaaaattccttggcatatttagttttgaagctgtacatttgagtaggtgactatgaagtaatgacaacagtaacaacaagttgatagtattcctacatacaggaagcagcattttgcctttgtggaaatagaagaggcatttgcacagagaagggccaagcaccatctgatgagagatgggcaccaagattggaaatggttagggggaaagatatgaatagcaatagataataatcacatttaatttaatttat

SEQ ID NO: 637810 - DNA, 628 bp, Homo sapiens
ggcgtggcagctcacgcctgtaatcccagcactttgagaggttgagagcagtggatcacctgaggtcagcagtaagaccagcctggccaacatagcgaaaccccatctctactaaaaacacaaacgttagcctgtaatcccagctactcgggaggctgaggcaggagaatcacttgaatccgggaggcagaggttgcagtgagctgaggttgagccagtgcaccccagcctggcaacagagtgagactccacctcaaaaaaaaaaaaaaawatctaatgtgtctaatgtgttcccattttctctaagccacagttttctgaggtgtggaaaaagaaacatgactaaaattccacatggaattgtcttcattgagtaaaattccttggcatatttagttttgaagctgtacatttgagtaggtgactatgaagtaatgacaacagtaacaacaagttgatagtattcctacatacaggaagcagcattttgcctttgtggaaatagaagaggcatttgcacagagaagggccaagcaccatctgatgagagatgggcaccaagattggaaatggttagggggaaagatatgaatagcaatagataataatcacatttaatttaatttat

SEQ ID NO: 637811 - DNA, 600 bp, Homo sapiens
attttgcctttgtggaaatagaagaggcatttgcacagagaagggccaagcaccatctgatgagagatgggcaccaagattggaaatggttagggggaaagatatgaatagcaatagataataatcacatttaatttaatttatttaccaaccccacccaattcagtgaggtgtacttgtatgcaagatattgttttgtgattcttattgttgaaatcaaagaaagtgaatgattttgtatgtgaatttatgagaactggagcagttgcagctaacttgagtttgtaaaaatatccagaagctgaactgattctgytaaagcatgaggtcatattggagaggtccctagactctgtatacaatctggatggatgcttttgaaccacattttgtatttcttgacaagcagagttgccttaattaacatcagaggatctgaagatatctgttctgctttttgtcctgtgtgagatactgtggagtgaagtgaagcaaggaacagagaaagaccacagccatcagctaccatgataagtagcagacctgaaaacaaaattctcatgtatacagggcacagggctggtactcaacaatgaaata

SEQ ID NO: 637812 - DNA, 582 bp, Homo sapiens
agcagcattttgcctttgtggaaatagaagaggcatttgcacagagaagggccaagcaccatctgatgagagatgggcaccaagattggaaatggttagggggaaagatatgaatagcaatagataataatcacatttaatttaatttatttaccaaccccacccaattcagtgaggtgtacttgtatgcaagatattgttttgtgattcttattgttgaaatcaaagaaagtgaatgattttgtatgtgaatttatgagaactggagcagttgcagctaacttgagtttgtaaaaatatccagaagctgaactgattctgttaaagcatgaggtcatattggagaggtccctagactctgtatacaatctggatggatgcttttgaaccacattttgtatttcttgamaagcagagttgccttaattaacatcagaggatctgaagatatctgttctgctttttgtcctgtgtgagatactgtggagtgaagtgaagcaaggaacagagaaagaccacagccatcagctaccatgataagtagcagacctgaaaacaaaattctcatgtatacagggcaca

SEQ ID NO: 637813 - DNA, 538 bp, Homo sapiens
tagagatggtgtttcaccatgttgcccaggttggtctcaaactccaggcctcaagtgatccgcctgcctcagcctcccaaagtgctgggattacaggcatgagccactgggtctggccccagatactctatttctataaaactaatttttcaaaaaattagcagcatcatggcacacgtctatggttgcagctacttgggaggctgaggtgggatgatcacttgaaccttggaktttgaagctgcagtgagccatgactgttccactgcatcccattctgggcaacagaactagagcttttctcaaaacaaacaaacaaaaaggtattttatttcaccacaatgttttatttgcatatatttgcttgtgcacatatatgtgtgtgttgtggtgtagagtagaagacgagtttaaagtcacgacatgggtgacagtttgagcttatatcctcaaactctagcatgtgtcagaattatccacagggcttattattatagatattcctaaaccccaccatataaaactaattgtaactaca

SEQ ID NO: 637814 - DNA, 603 bp, Homo sapiens
attgtaactacaatgtcgaaataattatttatgtgagtaatataagagatacatgtctgagagtatattcttacaggagtaaaggtttctttttcagtagaagtttactctcattaacaaccrtaaaatataaagaaaaagatgataatttttaaaaataatatcagcaagtttttaccattaaaatcaccaaggagtttaatccttctaatatttttctatacttgtttttgtctatatccatctttgtctataatttttaaaaattttttcaaaataagttatatttattgtattttaaagctaaaaatgtatttaaacattttattaatttaggctttttcaaataatatcttgttatttgatacgttcagttaattactagttggtaactttagatataaaatgtttgaaaggcagaaacctgttttataaattatgaagcctcatattgtcaaaccctaatttgatcaatgcacaatttatacatgtatcaaaatactatattgtaccttataaaaatatgtgcaatttttatatattgattaaaaataaaaattttaaaatttgttcaaataagttgtcatttaaataaaggtatct

SEQ ID NO: 637815 - DNA, 603 bp, Homo sapiens
attgtaactacaatgtcgaaataattatttatgtgagtaatataagagatacatgtctgagagtatattcttacaggagtaaaggtttctttttcagtagaagtttactctcattaacaaccgtaaaatataaagaaaaagatgataatttttaaaaataatatcagcaagtttttaccattaaaatcaccaaggagtttartccttctaatatttttctatacttgtttttgtctatatccatctttgtctataatttttaaaaattttttcaaaataagttatatttattgtattttaaagctaaaaatgtatttaaacattttattaatttaggctttttcaaataatatcttgttatttgatacgttcagttaattactagttggtaactttagatataaaatgtttgaaaggcagaaacctgttttataaattatgaagcctcatattgtcaaaccctaatttgatcaatgcacaatttatacatgtatcaaaatactatattgtaccttataaaaatatgtgcaatttttatatattgattaaaaataaaaattttaaaatttgttcaaataagttgtcatttaaataaaggtatct

SEQ ID NO: 637816 - DNA, 637 bp, Homo sapiens
ctgaatatttcacacctcttttctaatgtcaattctatgttttttcccttttttctgagttagaatacatcttrtatttatttatttttattatttataatcaccacaatatatttggaagtctgacattttttatttctgaaccatttgagactatgttctgatcttaaacacaaagtatggaatccattattttttcttttttttaactttgatttgtgaaagttacttttttcttaattactctttttatttgttacattactaagtttgttttattttaattttcataggacattgatgaaatgacttttttatgatttttgagatgaaaaatttaataactttaaattttacattcttttaagtttttcacagtttattttaatgctttttttttgtaaattttaattatagttatttatatcttcatttattatggaacaacttcccaaaagtctttttcacataataaatttaatataatatataagctattatttattttctcttctgtctcaaatatggactttaattatattccaatatttcagaacattttaatctatgttttgagacatttgtgacttacgtgatattatgactattattctttacacttctagtgaatttttaa

SEQ ID NO: 637817 - DNA, 637 bp, Homo sapiens
ctgaatatttcacacctcttttctaatgtcaattctatgttttttcccttttttctgagttagaatacatcttgtatttatttatttttattatttataatcaccacaatatatttggaagtctgacattttttatttctgaaccatttgagactatgttctgatcttaaacacaaagtatggaatccattattttttcttttttttaactttgatttgtgaaagttacttttttcttaattactctttttatttgttacattactaagtttgttttattttaattttcataggacattgatgaaatgacttttttatgatttttgagatkaaaaatttaataactttaaattttacattcttttaagtttttcacagtttattttaatgctttttttttgtaaattttaattatagttatttatatcttcatttattatggaacaacttcccaaaagtctttttcacataataaatttaatataatatataagctattatttattttctcttctgtctcaaatatggactttaattatattccaatatttcagaacattttaatctatgttttgagacatttgtgacttacgtgatattatgactattattctttacacttctagtgaatttttaa

SEQ ID NO: 637818 - DNA, 637 bp, Homo sapiens
ctgaatatttcacacctcttttctaatgtcaattctatgttttttcccttttttctgagttagaatacatcttgtatttatttatttttattatttataatcaccacaatatatttggaagtctgacattttttatttctgaaccatttgagactatgttctgatcttaaacacaaagtatggaatccattattttttcttttttttaactttgatttgtgaaagttacttttttcttaattactctttttatttgttacattactaagtttgttttattttaattttcataggacattgatgaaatgacttttttatgatttttgagatgaaaaatttaataactttmaattttacattcttttaagtttttcacagtttattttaatgctttttttttgtaaattttaattatagttatttatatcttcatttattatggaacaacttcccaaaagtctttttcacataataaatttaatataatatataagctattatttattttctcttctgtctcaaatatggactttaattatattccaatatttcagaacattttaatctatgttttgagacatttgtgacttacgtgatattatgactattattctttacacttctagtgaatttttaa

SEQ ID NO: 637819 - DNA, 637 bp, Homo sapiens
ctgaatatttcacacctcttttctaatgtcaattctatgttttttcccttttttctgagttagaatacatcttgtatttatttatttttattatttataatcaccacaatatatttggaagtctgacattttttatttctgaaccatttgagactatgttctgatcttaaacacaaagtatggaatccattattttttcttttttttaactttgatttgtgaaagttacttttttcttaattactctttttatttgttacattactaagtttgttttattttaattttcataggacattgatgaaatgacttttttatgatttttgagatgaaaaatttaataactttaaattttacattcttttaagtttttcacagtttattttaatgctttttttttgtaaattttaattatagttatttatatcttcatttattatggaacaacttcccaaaagtctttttcacataataaatttaatataatatataagctattatttattttctcttctrtctcaaatatggactttaattatattccaatatttcagaacattttaatctatgttttgagacatttgtgacttacgtgatattatgactattattctttacacttctagtgaatttttaa

SEQ ID NO: 637820 - DNA, 490 bp, Homo sapiens
attatttattttctcttctgtctcaaatatggactttaattatattccaatatttcagaacattttaatctatgttttgagacatttgtgacttaygtgatattatgactattattctttacacttctagtgaatttttaatgtcattcaaaggctacatccttctatactctactgagaattaaaaatagttctcaaaaatattattctcagatattcagaactcattctcagaatttcaacttccaccagtatcttaactctgttctctttcccttctaatgcatattttccccctgaaggcccactgttacactccttattcaccctccatttaagattcggttttatttaatgttgtatgtattcgtacacaattttatttatgtgaggcttagtcttagaatagaagatcatcctaaaaagactagtgaaagagttatgagaatttcaagagtgaatccagaaatcacgtgccagaagaattact

SEQ ID NO: 637821 - DNA, 490 bp, Homo sapiens
attatttattttctcttctgtctcaaatatggactttaattatattccaatatttcagaacattttaatctatgttttgagacatttgtgacttacgtgatattatgactattattctttacacttctagtgaatttttaatgtcattcaaaggctacatccttctatactctactgagaattaaaaatagttctcaaaaatattattctcagatattcagaactcattctcagaatttcaacttccaccagtatcttaactctgttctctttcccttctaatgcatattttccccctgaaggcccactgttacactccttattcaccctccatttragattcggttttatttaatgttgtatgtattcgtacacaattttatttatgtgaggcttagtcttagaatagaagatcatcctaaaaagactagtgaaagagttatgagaatttcaagagtgaatccagaaatcacgtgccagaagaattact

SEQ ID NO: 637822 - DNA, 582 bp, Homo sapiens
ttaaatatgatggaccattaaccaaataaagttgaaatgttttataattgtcattaaatccttgatatttaaaaggagaagcagtatggttcttagaaagcattcattcccggcccaggagtggtggctcacgcctgtaatcctagcgctctgggaagccgaggcaggcggatcacctgaggttgggaattcgagaccagcctggccaacatggtgaaaccccatctctactaaaaaatacagaaaaattagccagtcgtggtggcacatgcctgtaatctcagctgcttgggaggctgaggcaggagaatcacttgaagcygaaaaacagaggttgcagtgagcccagattgccccactgcactctaacccgggcgacaagagtgaaactccgtctcaattaaaaaaaaaaaaaagaaataaaagaaagcaagaaagcattaattcccatgcactggtcctggagaatctataattcagtcttttatcacaggttcacattcccttataaaaaggtaacagttggatgcatgtctggaggagctcttgggcttgtccgattgtatctttaacttctcatct

SEQ ID NO: 637823 - DNA, 582 bp, Homo sapiens
ttaaatatgatggaccattaaccaaataaagttgaaatgttttataattgtcattaaatccttgatatttaaaaggagaagcagtatggttcttagaaagcattcattcccggcccaggagtggtggctcacgcctgtaatcctagcgctctgggaagccgaggcaggcggatcacctgaggttgggaattcgagaccagcctggccaacatggtgaaaccccatctctactaaaaaatacagaaaaattagccagtcgtggtggcacatgcctgtaatctcagctgcttgggaggctgaggcaggagaatcacttgaagctgaaaaacagaggttgcagtgagcccagattgccccactgcactctaacccgggcgacaagagtgaaactcygtctcaattaaaaaaaaaaaaaagaaataaaagaaagcaagaaagcattaattcccatgcactggtcctggagaatctataattcagtcttttatcacaggttcacattcccttataaaaaggtaacagttggatgcatgtctggaggagctcttgggcttgtccgattgtatctttaacttctcatct

SEQ ID NO: 637824 - DNA, 590 bp, Homo sapiens
atctagtgtctccaagaggactcaaaacaaagtgcaaaagaagtttcagaaaaatattgaagaagtgaggtctcttccaaaaacggatcgatttttcaagaaggtaaaatttcatggagagcctcagaaaccccccatgaatggataccacaagtttcaccaagattcctggtcaagtaaagagmtgcaacatttgtcagtgagggagcgcatggtagagattggcagacgctggcagcgcatcccgcagagccagaaggatcattttaagagccaggctgaggagctgcagaagcaatacaaggtgaaattggatctctggctcaagactttgtcacctgaaaattatgctgcatacaaagaatcgacctatgctaagggtaagaatatggccatgacaggaggcccggaccccaggttgaaacaagcagatccacagtcctcatcagcaaagggtctgcaagaagggtttggggaggggcaagggctccaggctgcagggacagattcatcacagactatttgggtaaactgtcatgtctccatggaaccagaagagaacaggaagaaagatagagaaaaggaagaaa

SEQ ID NO: 637825 - DNA, 590 bp, Homo sapiens
atctagtgtctccaagaggactcaaaacaaagtgcaaaagaagtttcagaaaaatattgaagaagtgaggtctcttccaaaaacggatcgatttttcaagaaggtaaaatttcatggagagcctcagaaaccccccatgaatggataccacaagtttcaccaagattcctggtcaagtaaagagatgcaacatttgtcagtgagggagcgcatggtagagattggcagacgctggcagcgcatcccgcagagccagaaggatcattttaagagccaggctgaggagctgcagaagcaatacaaggtgaaattggatctctggctcaagactttgtcacctgaaaattatgctgcatacaaagaatcgacctatgctaagggtaagaatatggccatgacaggaggcccggaccccaggttgaaacaagcagatccacagtcctcatcagcaaagggtctgcaagaagggtttggggaggggcaagggctccaggctgcaggracagattcatcacagactatttgggtaaactgtcatgtctccatggaaccagaagagaacaggaagaaagatagagaaaaggaagaaa

SEQ ID NO: 637826 - DNA, 562 bp, Homo sapiens
tttattattatttgcttttaatttttaatgcatatcgatttttaacaaatttattttatcatatatttatgtaattttttcttactgtattagtcatcatcctgcagagaaacagaaccaccaacatagatagagaaacaaagtgacagagagagtratagaatagtagagaggagagagacaaagagactaattttattatgaagaattggctcacaaaattgtggaggcaaaaaatatcatgatctgcaatctgcaagctggacacttaggaaagccagaggtgtaattcaatctgagtctgaaggcctgggaagcagggcagccaatggtgtaaaccctaattcaagtgtaggtgaagataagacgagatatactagttaagcagtgagacaggacagaaagggtcacactcctctatcatctgccctttgttctatgcaggccttaaatggggtggataatgcacatcccatactggggagggaagcctactttacagagaccagttcaagctgacacatacaatttaccatcatactttcattttcttacagattct

SEQ ID NO: 637827 - DNA, 562 bp, Homo sapiens
tttattattatttgcttttaatttttaatgcatatcgatttttaacaaatttattttatcatatatttatgtaattttttcttactgtattagtcatcatcctgcagagaaacagaaccaccaacatagatagagaaacaaagtgacagagagagtgatagaatagtagagaggagagagacaaagagactaattttattatgaagaattggctcacaaaattgtggaggcaaaaaatatcatgatctgcaatctgcaagctggacacttaggaaagccagaggtgtaattcaatctgagtctgaaggcctgggaagcagggcagccaatggtgtaaaccctaattcaagtgtaggtgaagataagaygagatatactagttaagcagtgagacaggacagaaagggtcacactcctctatcatctgccctttgttctatgcaggccttaaatggggtggataatgcacatcccatactggggagggaagcctactttacagagaccagttcaagctgacacatacaatttaccatcatactttcattttcttacagattct

SEQ ID NO: 637828 - DNA, 576 bp, Homo sapiens
tactagttaagcagtgagacaggacagaaagggtcacactcctctatcatctgccctttgttctatgcaggccttaaatgggktggataatgcacatcccatactggggagggaagcctactttacagagaccagttcaagctgacacatacaatttaccatcatactttcattttcttacagattctggagatttaggtatttttatacgaattctagatggctgatgggttgaatttttttttttttttttgagacagagtctggctctgttgcccaggctagagtgcagtggagagatctcggctcactgcaagctccacctcccgggttcatgccattctcctgcctcagcctcccgagtagctgggactacaggctcccgccaccactcctgactaattttttttgtatttttattagagacggggtttcaccattagccaggatggtctcgatctcctgaccttgtgatccacccgtcttggcgctgggattacaggcatgagccaccgagcccagccaatgggttgaacttatttagaaaatgtgtttgcatattatgtcctttgtttc

SEQ ID NO: 637829 - DNA, 576 bp, Homo sapiens
tactagttaagcagtgagacaggacagaaagggtcacactcctctatcatctgccctttgttctatgcaggccttaaatggggtggataatgcacatcccataytggggagggaagcctactttacagagaccagttcaagctgacacatacaatttaccatcatactttcattttcttacagattctggagatttaggtatttttatacgaattctagatggctgatgggttgaatttttttttttttttttgagacagagtctggctctgttgcccaggctagagtgcagtggagagatctcggctcactgcaagctccacctcccgggttcatgccattctcctgcctcagcctcccgagtagctgggactacaggctcccgccaccactcctgactaattttttttgtatttttattagagacggggtttcaccattagccaggatggtctcgatctcctgaccttgtgatccacccgtcttggcgctgggattacaggcatgagccaccgagcccagccaatgggttgaacttatttagaaaatgtgtttgcatattatgtcctttgtttc

SEQ ID NO: 637830 - DNA, 576 bp, Homo sapiens
tactagttaagcagtgagacaggacagaaagggtcacactcctctatcatctgccctttgttctatgcaggccttaaatggggtggataatgcacatcccatactggggagggaagcctactttacagagaccagttcaagctgacacatacaatttaccatcatactttcattttcttacagattctggagatttaggtatttttataygaattctagatggctgatgggttgaatttttttttttttttttgagacagagtctggctctgttgcccaggctagagtgcagtggagagatctcggctcactgcaagctccacctcccgggttcatgccattctcctgcctcagcctcccgagtagctgggactacaggctcccgccaccactcctgactaattttttttgtatttttattagagacggggtttcaccattagccaggatggtctcgatctcctgaccttgtgatccacccgtcttggcgctgggattacaggcatgagccaccgagcccagccaatgggttgaacttatttagaaaatgtgtttgcatattatgtcctttgtttc

SEQ ID NO: 637831 - DNA, 576 bp, Homo sapiens
tactagttaagcagtgagacaggacagaaagggtcacactcctctatcatctgccctttgttctatgcaggccttaaatggggtggataatgcacatcccatactggggagggaagcctactttacagagaccagttcaagctgacacatacaatttaccatcatactttcattttcttacagattctggagatttaggtatttttatacgaattctagatggctgatgggttgaatttttttttttttttttgagacagagtctggctctgttgcccaggctagagtgcagtggagagatctcggctcactgcaagctccacctcccgggttcatgccattctcctgcctcagcctcccgagtagctgggactacaggctcccgccaccackcctgactaattttttttgtatttttattagagacggggtttcaccattagccaggatggtctcgatctcctgaccttgtgatccacccgtcttggcgctgggattacaggcatgagccaccgagcccagccaatgggttgaacttatttagaaaatgtgtttgcatattatgtcctttgtttc

SEQ ID NO: 637832 - DNA, 551 bp, Homo sapiens
cgtcttctgcgtcgctcatgctgggagctgtagaccggagctgttcgtattcrgccatcttggctcctccccacaaaggtacaattcttgacagcatgacactcagagttaaagatggtattatttggcttaaaaaccacaaatactgacaaatataaactaaacttatgagtttgctattttactaaaatatcattggttaaaatactgatctctttgcttctctgttacctcatctatacattcatgaactggaaataaaattatggttagattaggccaggtgtggtgcctcatgcctataatcccagcattttgggaggctgagtaggccagatcacttgaggtcaggagttcaagaccagcctggccaacatggtgaaaccccatctctactaaaaatacaaaaattatccagatgtagtggtacatgcctgtaatcccagctactcaagaggctgaggcaggataattgcttgaacctgggaggcagaggttgcagtgagccctgattataccagtgcactccagcctaagtgacagagcaagac

SEQ ID NO: 637833 - DNA, 551 bp, Homo sapiens
cgtcttctgcgtcgctcatgctgggagctgtagaccggagctgttcgtattcagccatcttggctcctccccacaaaggtacaattcttgacagcatgacactcagagttaaagatggtattatttggcttaaaaaccacaaatactgacaaatataaactaaacttatgagtttgctattttastaaaatatcattggttaaaatactgatctctttgcttctctgttacctcatctatacattcatgaactggaaataaaattatggttagattaggccaggtgtggtgcctcatgcctataatcccagcattttgggaggctgagtaggccagatcacttgaggtcaggagttcaagaccagcctggccaacatggtgaaaccccatctctactaaaaatacaaaaattatccagatgtagtggtacatgcctgtaatcccagctactcaagaggctgaggcaggataattgcttgaacctgggaggcagaggttgcagtgagccctgattataccagtgcactccagcctaagtgacagagcaagac

SEQ ID NO: 637834 - DNA, 547 bp, Homo sapiens
ggcatttcttgtttacacatttttaaaaatttcaccttaaaaattctgaaaatatagagaggtacagtgtgctttcagactatttccaaacttctaaagaaaaacagagaaaaactaggttaacaaaattaaaattcatgaacaatatttacaacaacacwgggtaacaatgtgccctacaaaaaatccccagtgtaaatagtgacagacaaatcaggaagacctgcaatatccatgaggaatcagaatcctttcaagattaagcagagagggtgaacacaatatattatggatttgagaacccccaagtcagcaacaaggattcattagaaagtgggcaaggcaattaaaaaacagctacggaaactaagtagggtgggagtttgcacacatcaataagcaagagtccaggatgagataaaaaagaggctgggaccatatggcttctacaactcttaatataaccagaccaaattctcttccaggatcaagttccgtattgagaagaatttactgtaagtaaactacatattaaacaaggctgaca

SEQ ID NO: 637835 - DNA, 547 bp, Homo sapiens
ggcatttcttgtttacacatttttaaaaatttcaccttaaaaattctgaaaatatagagaggtacagtgtgctttcagactatttccaaacttctaaagaaaaacagagaaaaactaggttaacaaaattaaaattcatgaacaatatttacaacaacactgggtaacaatgtgccctacaaaaaatccccagtgtaaatagtgacagacaaatcaggaagacctgcaatatccatgaggaatcagaatcctttcaagattaagcagagagggtgaacacaatatattatggatttgagaacccccaagtcagcaacaaggattyattagaaagtgggcaaggcaattaaaaaacagctacggaaactaagtagggtgggagtttgcacacatcaataagcaagagtccaggatgagataaaaaagaggctgggaccatatggcttctacaactcttaatataaccagaccaaattctcttccaggatcaagttccgtattgagaagaatttactgtaagtaaactacatattaaacaaggctgaca

SEQ ID NO: 637836 - DNA, 569 bp, Homo sapiens
atcttaattatttatgccatgactttaatagagcctgctttgatagtcgtggaatcttaaagaacatatgctaaaatctaggtacacactcacctgtgtaatatgtctccmaaagcctggaaaaaaaaaaaagaagaaagatttagtgcatttcacaagatgcatctttcactaagttcagtgtgagatttgtactcagtttctgaagatattatttccctaccatcttctcttctggaaagtattttctatttcttctgtaatgaaaaacccagtcagttgtattgttattaattaacgtcctgggaaagtctgagtcttgaagacattctctaaagaagtgaagggagaagaggcccagaaggtctatggtctgtggtaaccatgaaaaacctactcagtcatctttaactgaacctgttacccaaatgagtggaccccaaaataatgttaatgcaaacctagattcccaaaacttctgatcttgccatgtttacaaattaacctaaatgtaaatgaatcactcactattctatacatgtttaacaacccaaagtatattattgaat

SEQ ID NO: 637837 - DNA, 559 bp, Homo sapiens
actccagcctgggcgacagagccagacagcgtctcaaaaaaaaacaaaaccaggaatcaaattgtttgttttagttcactcttcttttattcatttatttacttcgtggccttgtcttttaaggtgtgggaacgaaagtagatgcaaaaaaaagtggtatcaatatcttaattatttatgccatgactttaatagagcctgctttgatagtcgtggaatcttaaagaacatatgctaaaatctaggtacacactcacctgtgtaatatgtctcccaaagcctggaaaaaaaaaaaagaagaaagatttagtgcatttcacaagatgcatctttcactaagttcagtgtgagatttgtactcagtttctgaagatattatttccctaccatcttctcttctggaaagtattttctrtttcttctgtaatgaaaaacccagtcagttgtattgttattaattaacgtcctgggaaagtctgagtcttgaagacattctctaaagaagtgaagggagaagaggcccagaaggtctatggtctgtggtaaccatgaaaaacct

SEQ ID NO: 637838 - DNA, 559 bp, Homo sapiens
actccagcctgggcgacagagccagacagcgtctcaaaaaaaaacaaaaccaggaatcaaattgtttgttttagttcactcttcttttattcatttatttacttcgtggccttgtcttttaaggtgtgggaacgaaagtagatgcaaaaaaaagtggtatcaatatcttaattatttatgccatgactttaatagagcctgctttgatagtcgtggaatcttaaagaacatatgctaaaatctaggtacacactcacctgtgtaatatgtctcccaaagcctggaaaaaaaaaaaagaagaaagatttagtgcatttcacaagatgcatctttcactaagttcagtgtgagatttgtactcagtttctgaagatattatttccctaccatcttctcttctggaaagtattttctatttcttctgtaawgaaaaacccagtcagttgtattgttattaattaacgtcctgggaaagtctgagtcttgaagacattctctaaagaagtgaagggagaagaggcccagaaggtctatggtctgtggtaaccatgaaaaacct

SEQ ID NO: 637839 - DNA, 423 bp, Homo sapiens
attttcctgatgaattctgtcccatgtagaatcatgtatagcttgtggacagatgtatgttctgagaaatrtgtcaggtgtttttagttttttttttggtttttttttttgagacagagtatccttctgtcacgcaggctgaaatgcagtggcgtgatctcggctcactgtaacctccgcctccaggttcagagcgattctcctgcatcaggttcccaagtacctgggattacaggaacgtgacactaggcctggctaatttttgtatttttttagtagagatggggttttgccatcttggccaggctgcacttgaacttctggcctcaagtgatctgcctgccttggctttgcaaagtgctgggattataggcacgcgccacagtgcccagccaggcggtttcattgttttaatatgataga

SEQ ID NO: 637840 - DNA, 442 bp, Homo sapiens
tcaagcaaattaattttcctgatgaattctgtcccatgtagaatcatgtatagcttgtggacagatgtatgttctgagaaatatgtcaggtgtttttagttttttttttkgtttttttttttgagacagagtatccttctgtcacgcaggctgaaatgcagtggcgtgatctcggctcactgtaacctccgcctccaggttcagagcgattctcctgcatcaggttcccaagtacctgggattacaggaacgtgacactaggcctggctaatttttgtatttttttagtagagatggggttttgccatcttggccaggctgcacttgaacttctggcctcaagtgatctgcctgccttggctttgcaaagtgctgggattataggcacgcgccacagtgcccagccaggcggtttcattgttttaatatgatagaatatacc

SEQ ID NO: 637841 - DNA, 595 bp, Homo sapiens
tgtagaatcatgtatagcttgtggacagatgtatgttctgagaaatatgtcaggtgtttttagttttttttttggtttttttttttgagacagagtatccttctgtcacgcaggctgaaatgcagtggcgtgatctcggctcactgtaacctccgcctccaggttcagagcgattctcctgcatcaggttcccaagtacctgggattacaggaacgtgacactaggcctggctaatttttgtatttttttagtagagatggggttttgccatcttggccaggctgcacttgaacttckggcctcaagtgatctgcctgccttggctttgcaaagtgctgggattataggcacgcgccacagtgcccagccaggcggtttcattgttttaatatgatagaatataccacacaaatctagatggtatagcctactacacctatggtatacactatagcctattgttcctacaataggctacaaacctgtacagtatgttctgtactgcatactgtaggcaactgtaacacaatgataactatttgtgtatctaaacataattgaatacagaaagggtacagtaaacatattggtatt

SEQ ID NO: 637842 - DNA, 595 bp, Homo sapiens
tgtagaatcatgtatagcttgtggacagatgtatgttctgagaaatatgtcaggtgtttttagttttttttttggtttttttttttgagacagagtatccttctgtcacgcaggctgaaatgcagtggcgtgatctcggctcactgtaacctccgcctccaggttcagagcgattctcctgcatcaggttcccaagtacctgggattacaggaacgtgacactaggcctggctaatttttgtatttttttagtagagatggggttttgccatcttggccaggctgcacttgaacttctggcctcaagtgatctgcctgccttggctttgcaaagtgctgggattmtaggcacgcgccacagtgcccagccaggcggtttcattgttttaatatgatagaatataccacacaaatctagatggtatagcctactacacctatggtatacactatagcctattgttcctacaataggctacaaacctgtacagtatgttctgtactgcatactgtaggcaactgtaacacaatgataactatttgtgtatctaaacataattgaatacagaaagggtacagtaaacatattggtatt

SEQ ID NO: 637843 - DNA, 595 bp, Homo sapiens
tgtagaatcatgtatagcttgtggacagatgtatgttctgagaaatatgtcaggtgtttttagttttttttttggtttttttttttgagacagagtatccttctgtcacgcaggctgaaatgcagtggcgtgatctcggctcactgtaacctccgcctccaggttcagagcgattctcctgcatcaggttcccaagtacctgggattacaggaacgtgacactaggcctggctaatttttgtatttttttagtagagatggggttttgccatcttggccaggctgcacttgaacttctggcctcaagtgatctgcctgccttggctttgcaaagtgctgggattataggcacgcgccacagtgcccagccmggcggtttcattgttttaatatgatagaatataccacacaaatctagatggtatagcctactacacctatggtatacactatagcctattgttcctacaataggctacaaacctgtacagtatgttctgtactgcatactgtaggcaactgtaacacaatgataactatttgtgtatctaaacataattgaatacagaaagggtacagtaaacatattggtatt

SEQ ID NO: 637844 - DNA, 595 bp, Homo sapiens
tgtagaatcatgtatagcttgtggacagatgtatgttctgagaaatatgtcaggtgtttttagttttttttttggtttttttttttgagacagagtatccttctgtcacgcaggctgaaatgcagtggcgtgatctcggctcactgtaacctccgcctccaggttcagagcgattctcctgcatcaggttcccaagtacctgggattacaggaacgtgacactaggcctggctaatttttgtatttttttagtagagatggggttttgccatcttggccaggctgcacttgaacttctggcctcaagtgatctgcctgccttggctttgcaaagtgctgggattataggcacgcgccacagtgcccagccaggcggtttcattgttttaatatgatagaatataccacacaaatctagatggtatagcctactacacctatggtatacactatagcctattgttcctacaataggctacaaacctgtacagtatgttctgtactgcatactgtaggcaactgtaacacaatgataactatttgtgtatctaaacataattgaatacagaaarggtacagtaaacatattggtatt

SEQ ID NO: 637845 - DNA, 443 bp, Homo sapiens
tatactaccatctttgaaatcaacatagcagttttgctttggctgaaaaaactacttttggttagatacgtgaagccaatcataaattcctaaaatttttctctgagatgagatggttggatgaaggctatttacaatggccactattttgcaaacccatctttaaagagaaatgcttcatgaatgtagcatggtgaggacaggggaatgacagggaccattgctaatgtaggggtcaatggaaagcttccccttcaccctctgaagttttgctggaaaatcaactcacaaaaggcagactattagaaaaaaaaaaggcttacaaatttatgaataacatagcataagggaatcrtagtagaatgattacccaataaccaatgaggtacagatgataatatacccatctttttagaggaaaggaagatgagaatgtgtgtata

SEQ ID NO: 637846 - DNA, 511 bp, Homo sapiens
gtaaattctgtttggttatattttggttacagcatgttatgctatgatctatatgcacgtatcttcttttgctgccttgtttgtttttattgattttgttttgatgttgtgatatttggaagagttaaatttttattctgatggctaccttatgtaacttcataaaatcatctctttctttagacagtagctaatgtctctaaactaagaacaatggtattaactctttcttgtcttccctatgtgatctttcatctcccaatttgatataataatattaactttgtttcccctgatgccattaagtatgcctacatttctataaacagtatcctttgactcccaggcattacagaygagcagtcagtaaaatcattctgcagaataccttctttttccttttcttctatttttcttagttgtatcatttctatattgccagagcacctacagttgcatttctttctgtcagctttatccagcatttgtttttgtcttttatttgaagtta

SEQ ID NO: 637847 - DNA, 641 bp, Homo sapiens
catttaagtattttgcaaagttcgtagaggtcaccaatactgcaaatatgtatgagatgtaactgtaagatacgcagctaattttttttctctttgtttcytttttagacataccagggtctagagagtctagaagaagtctgtgtatatcattctggagtacctattttccatgaggggtaacttatgcatgacttattaaaatagtttatggtagaatttagaaagttaaacctttctgtctttaaacattgtttgccatgcagtgttattaggcattttacttacattgccattaacatcttcacaatagcctacacaaacacaggggtttgtatgttgtgtgtttatacatgagaaaacagaaacaaggttacagttcttaagtggtcattgtgatataaactgcctgtttttcttcatattctgtatttaaaagtgatgctatttgggctaaatgttttgtttgaaggactgtcctacacattgcagggcatttagaattttgggccctggggcactaagacaacattatcccaagacgacccatacttttccgcatcctgcagttgagagcctctcttctgtattatgctctagtttatagaaatgcagcactgtgtaaaaatcttccactctgt

SEQ ID NO: 637848 - DNA, 470 bp, Homo sapiens
gatggaaatgaaagttgggcttatcgcagcgggacaaaaacaggtcccaggtctgcaatatctatatacagacctatcgactatgggatctttgggaaagaacaacagttagctttcttagaaaatgtaaagaggtcacttacacaaggaagattatggaaaccaagttttcttaagaaccctggcttcctaaaagatgatttgaggaaccctcccaacccctcagagtcattaagctcaaattctcccagtagtcaggtgccagaagatggcttatctccaagtgaaccgcttaatatctatgaggatgacccagtggactcarattgtgacacagacacaaccacagatgatgaatactacctggatgaaaatgacaaagagtcagaactgtgaggctttttcaataaaatgctttacttttttcaccaaaagcttataatggaactaaggtgtacatgtgcatgtgc

SEQ ID NO: 637849 - DNA, 581 bp, Homo sapiens
atttctgcacatttataaagatgcacrtctaataatttcatttccccccattttctacttattgctctgaggtcaacactgaatagtccttatgaagatggtattgaatattctttcaacaaaaaagtctccggatctcaactactggagctcagaaaacgataccccaaagtaggaggctttggcatgctaagtactttgaactaaaggagattaggtctcagtagcagcctcagaaacaaagtctacccatgactttctcctgccctcctgtctccagcggtcttgcacccctgaagtaagtcacaggaaccagaattcttcttccccaaggagggttatggaaacttagaaccttcaaagtaatttataaacttggaaatcttactgtaacattttcttctacctctctctgtctttgagacagggtcttgctctatcacccaggctggagtgcagcagcatgatcatagacaactgtagcctcctgggctcaagcaatcctcctgcctcagcctccttagtagctgagactacaggtgtgtgccactatgcccagctaacttaaaaaaatttttttt

SEQ ID NO: 637850 - DNA, 579 bp, Homo sapiens
aataatcttgtctgagaggactttaaaaagtacataaaatctttctcactttttttttttttttgagtcggagtctggctttgttggccaggctggagtgcagtggtgggatctctgctcacygcaagctccgcctcccgggttctggccattctcctgcatcagcctcccaagtagctgggactacaggcgcctgccaccacgcctggctaattttttgtatttttagtagagacggggtttcaccatgttagccaggatggtctagatctcctgacctcgtgatccgcccgcctaggcctcccaaagcgctggggttacaggcatgagccacagcgcccagccctttctcgctttttatcaatcttctttcatcaatttaggtaggaccatatcacttagggcaggactattagagtcagtgctgggtactcattcagttgatttaatagaatattttgaaagtttttattaggacaaaagcaatatagtttcattcttggagaaattaaaaaatataagcaagcaaaaagaagaaaataaacaaacaaacaaaaaatcccctctctccatcctatc

SEQ ID NO: 637851 - DNA, 577 bp, Homo sapiens
gacccttggaagactgccaacctgattgtttctaatctttctcagctcaccactatggattctgttcctttcaggctgattctaaaacagggtaagctgagagtagatgctgggaaatcagttagaagactggtggactaatcatggggagagctgccatgggttccactacaatagtgcagtatcaagggggaggaggagccagactccagagataatacrgcacaagacataatgagtttactaaatggtaagtggggagggagagggaagtggagggatatggaagagaccgagagagatattgggtaaactggctcttggaaaggagcagccctgatttgtaacatttgctgatttccatagtgtaaatgctcccaccatggccaatatgaagctactgagctgatgtgccacttctagtcttgcccacacagacctcccacacagaatcttccatgctctttcctcattcgggctggttagaataaagatgacccacggggcaacattgggaacccatgtgttgaaaatggcagacccaattatggaaggagtttacgtctttgaaccactg

SEQ ID NO: 637852 - DNA, 577 bp, Homo sapiens
gacccttggaagactgccaacctgattgtttctaatctttctcagctcaccactatggattctgttcctttcaggctgattctaaaacagggtaagctgagagtagatgctgggaaatcagttagaagactggtggactaatcatggggagagctgccatgggttccactacaatagtgcagtatcaagggggaggaggagccagactccagagataatacagcacargacataatgagtttactaaatggtaagtggggagggagagggaagtggagggatatggaagagaccgagagagatattgggtaaactggctcttggaaaggagcagccctgatttgtaacatttgctgatttccatagtgtaaatgctcccaccatggccaatatgaagctactgagctgatgtgccacttctagtcttgcccacacagacctcccacacagaatcttccatgctctttcctcattcgggctggttagaataaagatgacccacggggcaacattgggaacccatgtgttgaaaatggcagacccaattatggaaggagtttacgtctttgaaccactg

SEQ ID NO: 637853 - DNA, 577 bp, Homo sapiens
gacccttggaagactgccaacctgattgtttctaatctttctcagctcaccactatggattctgttcctttcaggctgattctaaaacagggtaagctgagagtagatgctgggaaatcagttagaagactggtggactaatcatggggagagctgccatgggttccactacaatagtgcagtatcaagggggaggaggagccagactccagagataatacagcacaagacataatgagtttactaaatggtaagtggggagggagagggaagtggagggatatggaagagaccgagagagatattgggtaaactggctcttggaaaggagcagccctgatttgtaacatttgctgatttccatagtgtaaatgctcccaccatggccaatatgaagctactgagctgatgtgccacttctagtcttgcccacacaracctcccacacagaatcttccatgctctttcctcattcgggctggttagaataaagatgacccacggggcaacattgggaacccatgtgttgaaaatggcagacccaattatggaaggagtttacgtctttgaaccactg

SEQ ID NO: 637854 - DNA, 324 bp, Homo sapiens
acatccaaggtactgtggtgaacttaaaaacatgctgggggaagtcagaaagaaaaggaaacaatgaaatgcataaaacagaaggcaaccacaatagggaaagaggcacttcactgggaatcagaattggcagattacaagaagaaaagcctgtttagtgaaagaattcaagccaaccacttccatgaaaagatggagataatttagagcacaagtgggctgccatggatgtgggcgttatgtttcttctacaaggatgagaaaamaaaaattgaagcctcccccaggattttatcctttcattacctcttgaaaacataaata

SEQ ID NO: 637855 - DNA, 525 bp, Homo sapiens
gaggcatggccagaaccgggagagggcacggagaggtgagggcaggcctcccatctctgtgtcccagaggtgatggtgcaccttctgggcagcctttcaatcctggactcagtctcactaagcagccaaagcccatggttccagcacctttagttggcctgcttcacacccttctcccatggcctctctagccctagggtggcagtggcttcctgctctgaccaatctctgagtagtctccttgtctcaatttggtgttcttggcacttccattgcctgggtcaccaattccttgtgtgtaggacctagcatgggttctgccttggcactgactgggaggactttttggttagacaggtcttcactcagctttccttaaattgcaccatgtgccttccagtcatgcaagttagttctggggatgagttttgagaagtgaagaagacagatgcaaaatgaagacttgtcccwtgaccaccctcatagctacttaggtggagcaaagctggatgggcagagaggata

SEQ ID NO: 637856 - DNA, 504 bp, Homo sapiens
tggtgttcttggcacttccattgcctgggtcaccaattccttgtgtgtaggacctagcatgggttctgccttggcactgactgggaggactttttggttagacaggtcttcactcagctttccttaaattgcaccatgtgccttccagtcatgcaagttagttctggggatgagttttgagaagtgaagaagacagatgcaaaatgaagacttgtcccatgaccaccctcatagctacttaggtggagcaaagctggatgggcagagaggataaagtcacggtgctgacctcccaaggacagaagaaagaccattgmcttgatcctggaggaccctgtttacttgttggcattggcttttccaaagtcatcaccaaatacctgcatgtcttaatgagcagcacagcaccacgtgtgtacagcccctcttctatcaagaccagggctgttctgggatagtcctctggctggaagaggtataagcagtgagcagctgctgacggtc

SEQ ID NO: 637857 - DNA, 634 bp, Homo sapiens
atcaagaccagggctgttctgggatagtcctctggctggaagaggtataagcagtgagcagctgctgacggtcacaaatctcatgtctcctggtgtgcactagggctgaagacactagggctggccagtgaggaaagtttaggagcaaaggagccaatctcctccccacaccacatctttccctgctttagttttctccaaagtgcttagcaatctctgccatactgttgagttgattatttatgtgcttatctctgtgctcagggctacaagttccacagaggcaggcagtttggtctctgctcaccgaccgcatctttcccagagcacctagcagcacctggctcagagtagatacccrgtggatttcaaacggagagacgtgtccttgccttttcaatccaaagaggtgctttcaggacctgccttcttcatcaactctgagcagagatgctaatagagtccagggcatgtccattcttccagtgcaccctcttgcccacagcagccaagagtggtctctgtggtagccccaataccacatcaggtaggggcaggggcagggaggaggttgggagaaggacaaggaaggaaagttgcttctgtagcaggaaatgcctaaatcagagactga

SEQ ID NO: 637858 - DNA, 634 bp, Homo sapiens
atcaagaccagggctgttctgggatagtcctctggctggaagaggtataagcagtgagcagctgctgacggtcacaaatctcatgtctcctggtgtgcactagggctgaagacactagggctggccagtgaggaaagtttaggagcaaaggagccaatctcctccccacaccacatctttccctgctttagttttctccaaagtgcttagcaatctctgccatactgttgagttgattatttatgtgcttatctctgtgctcagggctacaagttccacagaggcaggcagtttggtctctgctcaccgaccgcatctttcccagagcacctagcagcacctggctcagagtagatacccagtggatttcaaacggagagacgtgtccttgccttttcaatccaaagaggtgctttcaggacctgccttcttcatcaactctgagcagagatgctaatagagtccagggcatgtccattcttccagtgcaccctcttgcccacagcagccmagagtggtctctgtggtagccccaataccacatcaggtaggggcaggggcagggaggaggttgggagaaggacaaggaaggaaagttgcttctgtagcaggaaatgcctaaatcagagactga

SEQ ID NO: 637859 - DNA, 634 bp, Homo sapiens
atcaagaccagggctgttctgggatagtcctctggctggaagaggtataagcagtgagcagctgctgacggtcacaaatctcatgtctcctggtgtgcactagggctgaagacactagggctggccagtgaggaaagtttaggagcaaaggagccaatctcctccccacaccacatctttccctgctttagttttctccaaagtgcttagcaatctctgccatactgttgagttgattatttatgtgcttatctctgtgctcagggctacaagttccacagaggcaggcagtttggtctctgctcaccgaccgcatctttcccagagcacctagcagcacctggctcagagtagatacccagtggatttcaaacggagagacgtgtccttgccttttcaatccaaagaggtgctttcaggacctgccttcttcatcaactctgagcagagatgctaatagagtccagggcatgtccattcttccagtgcaccctcttgcccacagcagccaagagtggtctctgtggtagccccartaccacatcaggtaggggcaggggcagggaggaggttgggagaaggacaaggaaggaaagttgcttctgtagcaggaaatgcctaaatcagagactga

SEQ ID NO: 637860 - DNA, 599 bp, Homo sapiens
actgaagtgcttcatagattccagtgaacagtttgcaaaataggtagatgcagccttcagcaaaaaatcaaagtgcagtccagaaaacaaagggagaaattgtcttttatagagaaagttcctacttgggttcccactctgatttgcttatgcaaatgaaggatgtagacttgcttagttctgactggttaatgctgagttgtgattggttgttgtaggtcactgaactacaacctactggttagttcaggtggtgttagcaggaacaggcagctataaaagtatcaaagttatgcaaatgtgggttttctgggaactcatggtatagaatagagcttgctctattttgaatttaagtgcagttaaccactcagaattcatctttttattattattattattaattttttagagatagggtctcactctgtcacccaggtgggagtacagtagtgcgtagttcacwgcagctttgaaatcctgggctcaagcaatcctactgcctcaccctcctgagcagctgggactacaaacatgcaccaccatgccaagctaatttttaaatttttcatagagatggggtctcactatgttgccca

SEQ ID NO: 637861 - DNA, 576 bp, Homo sapiens
tttcctccattctctcttgaatccaggataataaggcttttaccctccaayaatccaaaggtcttgctcttgtcaaggtgactgatgacttccatgttactgacaccaacaatccaccctcagtcctcattttatttgccacaacacctgcagtttattcagtttctccttcttttctctttgacatactttcttcacttgatgtcttggacactacacccttctggcttctgtcccacttcattgactgtactgccttagaatcctgctatctgccccatctcgccaacttccaaatgttggcatgagccacaggctcagtccttggaccttctatcttttctctcttcccttactcccttgatcatcttatctaagttcctggctttcaatatgctgatgactcaccagtttctatttctacactggttttcatcccaaactccagagtcggatccaacagtcaacttaatggctctactcaccatcattgaaactcaacttctgatcttcacctccaaactcccccatctcagcttctggatcccagttgcatccttccaggtgcccaggcca

SEQ ID NO: 637862 - DNA, 576 bp, Homo sapiens
tttcctccattctctcttgaatccaggataataaggcttttaccctccaacaatccaaaggtcttgctcttgtcaaggtgactgatgacttccatgttactgacaccaacaatccaccctcagtcctcattttatttgccacaacacctgcagtttattcagtttctccttcttttctctttgacatactttcttcacttgatgtcttggacactacacccttctggcttctgtcccacttcattgactgtactgccttagaatcctgctatctgccccatctcgccaacttccaaatgttggcatgagccacaggctcagtccttggacctyctatcttttctctcttcccttactcccttgatcatcttatctaagttcctggctttcaatatgctgatgactcaccagtttctatttctacactggttttcatcccaaactccagagtcggatccaacagtcaacttaatggctctactcaccatcattgaaactcaacttctgatcttcacctccaaactcccccatctcagcttctggatcccagttgcatccttccaggtgcccaggcca

SEQ ID NO: 637863 - DNA, 576 bp, Homo sapiens
tttcctccattctctcttgaatccaggataataaggcttttaccctccaacaatccaaaggtcttgctcttgtcaaggtgactgatgacttccatgttactgacaccaacaatccaccctcagtcctcattttatttgccacaacacctgcagtttattcagtttctccttcttttctctttgacatactttcttcacttgatgtcttggacactacacccttctggcttctgtcccacttcattgactgtactgccttagaatcctgctatctgccccatctcgccaacttccaaatgttggcatgagccacaggctcagtccttggaccttctatcttttctctcttcccttactcccttgatcatcttatctaagttcctggctttcaatatgctgatgactcaccagtttctatttctacactggttytcatcccaaactccagagtcggatccaacagtcaacttaatggctctactcaccatcattgaaactcaacttctgatcttcacctccaaactcccccatctcagcttctggatcccagttgcatccttccaggtgcccaggcca

SEQ ID NO: 637864 - DNA, 516 bp, Homo sapiens
ggcatactacatgcaaactgtcagatattttccttctatgttgggctacgaatcgaattggatcattatctctacccttccttgctcttcacacctttaaagctccccaaggagaaggatctatgagttttcttggttggtagcagagcatgtggacattggcaagttgccttgtaagaactgaattgaaagaatctgtaaagagggaaggaaccagaagagattatttaaacaaccctttccagtttagtattycctaattccatgatgcttttgaaaggaatgcctgtttaaagtctcctttaactggaggatttaagacttgggattcagatgctgcttctcaggaagtggatttggaaccaagacctaggcttctaaagttggtcaatgagcagaagaaccaagggcaactgacagacagtaaacatcttttagagtaatttaaagcaattatcataaaacttctgattcatcagagatccagcccaccaacaataagatttttaaaaggaa

SEQ ID NO: 637865 - DNA, 467 bp, Homo sapiens
tctcctgtaaatgcccagcaaataaaaagcgataaagccctttcactgaaattattcatgtgctaaaagcttttatccacatcactggtgtgactgacaatatcataccagcaagcttccagaattagttcttgttctggcattgtactcctgggctttctttctttaataaaagaaaaagagctacagtttgatttaagctttctatagtctggcattacagctcttcagtaccaatgattaagatgtcatgtctattccaggcacatttattcttctagtggctgtcaactttctagagaaactaccttttacatgattttttcycctttaaaaactttggtttgcccctaggactaatctgcaagagagaatttgaaagagttacttgtccattctgggagctttttaaggaaatctgaatggcatacaataccctcagcacagtttctcaaagtgtgtacaaa

SEQ ID NO: 637866 - DNA, 599 bp, Homo sapiens
tgcattgttaggttgtttattgaaatcttagaaagatttaatgtaggtgtttattgccataaacttccctcttagtgctgctttgacctataggttgtggttgtgtttctcttttcatttgtttcaagatattttagggctaggcgcggtgactcatgcctgtaatcccagcacttggggaggctgaggtgggcttttcacccgaggtcaagagttcgagaccaccctggccaacatggcaaaaccccatctctactataaatktacatgtatttgcacagttaccaaagttcctcttgttactgatttctagttttattccattgttgtctaaaaagctatgtgatataatttcaattttaaaaaatttgctaagacttgttttatggcctaacatatgtctattctggaagatattccatttgctaatgagaagaatgtatattctgtagctgttagatgaaatgctctgtaaatgcctgttaggtcaatttagtctatagtgcagtttaagactacagtttctttggtttctgtctaggtgatctgtctattgttgaaagagaagtgttgaagttctcaactattattgtactgga

SEQ ID NO: 637867 - DNA, 477 bp, Homo sapiens
tcaactattattgtactggaatatctctctctttttagatctaataatgtttactttatatatctgagtgaaccagtgtggggtacatatacatttaccattgttatgttctcctacagaatawatctctttattgttatataatgaccttctttgtctctttttacagtttttgacttaaagtgtattttatctgatacaagcatacctacttctgctcattcttggcttttgttgcatggaatatcttttttcattccttcactttcagtcataggtaaagtgaatttcttctaagcagtatatagttggggtttttaattcattcagtcagtctttatcttttaactgtgaaatgtaaacatttacattcaagctattaattgatgaggacttacttttgtcattttaataattgttttcttgttgttttatatattgtttgttcttttattccttttattatttatctctccc

SEQ ID NO: 637868 - DNA, 549 bp, Homo sapiens
aagctatgtgatataatttcaattttaaaaaatttgctaagacttgttttatggcctaacatatgtctattctggaagatattccatttgctaatgagaagaatgtatattctgtagctgttagatgaaatgctctgtaaatgcctgttaggtcaatttagtctatagtgcagtttaagactacagtttctttggtttctgtctaggtgatctgtctattgttgaaagagaagtgttgaagttctcaactattattgtactggaatatctctctctttttagatctaataatgtttactttatatatctgagtgaaccagtgtggggtacatatacatttaccattgttatgttctcctacagaataaatctctttattgttatataatgaccttctttgtctctttttacagtttttgacttaaagtgtattttatctgatacaagcatasctacttctgctcattcttggcttttgttgcatggaatatcttttttcattccttcactttcagtcataggtaaagtgaatttcttctaagcagtata

SEQ ID NO: 637869 - DNA, 395 bp, Homo sapiens
ataacctggcattttacacatagtatagaaaatgtccaacttgcgtttcaagcatttacagtttaraaatgccttacagaacctgtagggtattttattatagcaacggaagtagatttggtccttcatgatctaattttgatttagtacatgcagataacaacttacggccactcactgtgtcctaggaattaggcatattttttcccagcattgcctctccaaagatttaatgaagcccacctaagaatgacttctaccagaaaaatttgcaatttgcaaacaaagcttgttctgtggattaccagattacctgatttctaaacactcagttggaagtacactcacaactagtggtgagaaaggacagttgctctattgctcaatgccagggg

SEQ ID NO: 637870 - DNA, 571 bp, Homo sapiens
agaggccatgagcaatatatgacattcagttactgagcaatatatgacattcagttacttaactggatctgatgaaatgaggtgctagagtccttccygttacacaaagatatctcttaaaaaaaggacccagcattctgtagtattctatcagaaattaacaccatcaccagctctcatcaaaataacacatgaacagcacatctgaaagctatttagcagaaccactcaatattatacgtgagatttgaagatggccactttgaaattgccccttttaatcacagactggaagtagcagatgttgaaaaaattattcttgcctcaaattaattaggaattctctctggttgaaagctttttcagtgaaacaaaaggaaaaataattaatgctgcataaaagatggtgatgaaagagggcaacgtatgaacacaatgactatttaaaccactcgaagcttgcaaagacttggaggatttctttggggatgctggtcatggtgacccactcaggaagagaattccttttactcctaggctagtggctgcggggacctgttagaaggagaag

SEQ ID NO: 637871 - DNA, 539 bp, Homo sapiens
tggggtcatggctgcactactgggtgtttgtggaggcagctggggtcatagcactggagctttcctcagcatggtaagatgatagtgggttcaccacagggacagggagatgcaggggttactggggttcagggcagggtgctctgtggtartggttcccctctcaaaatggtgccatgccatagcctagatcccagggaatgtggaagacctgacataatttcgctctccggagcagtgcagatgcatggactccaggcagctcctcatactgtgctaaggggctgcaaggaccattgagctttgctgtagctaggattgtaggcatctgtgatagcattggggaccactggggatctcccacttagcttttccctgcaaagtggggtccctcttggctctgagttcatcctcaccaggtactttgcctccctctctatgctgccttctagagttctcatgtttctgagggtctttgtcacttttcttgctgaattccagtgctgctgctttagggaggagtgcttattggcagtaac

SEQ ID NO: 637872 - DNA, 581 bp, Homo sapiens
gagctttcctcagcatggtaagatgatagtgggttcaccacagggacagggagatgcaggggttactggggttcagggcagggtgctctgtggtagtggttcccctctcaaaatggtgccatgccatagcctagatcccagggaatgtggaagacctgacataatttcrctctccggagcagtgcagatgcatggactccaggcagctcctcatactgtgctaaggggctgcaaggaccattgagctttgctgtagctaggattgtaggcatctgtgatagcattggggaccactggggatctcccacttagcttttccctgcaaagtggggtccctcttggctctgagttcatcctcaccaggtactttgcctccctctctatgctgccttctagagttctcatgtttctgagggtctttgtcacttttcttgctgaattccagtgctgctgctttagggaggagtgcttattggcagtaacaattgattggaatcaagcatgggagaatttcagctgactggatgcctgccccttgacttggaagatgaatagcccttccagaaggcacctcccattgg

SEQ ID NO: 637873 - DNA, 597 bp, Homo sapiens
tttaaggatacattgctaagactgggtagctactgttcactgctgagccacatagtgtgctacaattacatttcatttttgtgtgtttatcttggagttaataattgtctcctttcattgctttaatttggattctggttggcttattgttctgtgtacctatcactagttcttcccaaactctctaatagagctgtaaattttctccctgcattacctctcacttggaaaacagaaaaaaatacatatatacttacttggttttcttcctgaagacctctgtcttcctgctcctagatgaatgggttgtttactaggcatgttgcccacctgtcattttgcagccaccatttccagtatttgttaatgtcytttcccctctgtattagtttgctaggtctgccattaaaaagtgccacacacgaacaacagaaatttattgcctcacagttctgaggctggaagacagagattaagatgtcagcagggccctgctcgctctgaaggcactaggagaggatctgtgctgacttcattcctagcttctggtggttcttttgttgtgacagcatcatttcaacattcacatgtcgttct

SEQ ID NO: 637874 - DNA, 598 bp, Homo sapiens
ctctctgtctttggaataggatggttctccctgtcttttcaggtaactttaaaccccaaaagagaagaaaaaatatggaagccagccccaggctgggcctgtatatggcaagttctttctgagaacaaagtgagttagaataaagaacaaatactctcccttttaaggggtaaacagatcccaccccagccttcttgcagactccaggagcttagtcctagagcttgggktgggagggaacccaatctctccttgacacagtggcaaactgtggacaatagggcacagattgtcgagtcagctaggcctggcctcaatggctgaagtccatccctgctatacagtaactatgtgaccttgaggaaggacctgaatcactctgagtttccagggttgcgatttttcatgatggggacaaggcagtgacatttgcaattttatcagggttggatcctaaagtcagtgcctaaggaaagaatccctgttggtgggagctacccttgaaaacctctgaaactggctgggtgcggtggctcacgcctgtcatctcagcactttggaaggccaaagcaggcatattgcttgagctcatgaattc

SEQ ID NO: 637875 - DNA, 561 bp, Homo sapiens
ttcattatgccactgcactccagcccggtaacagggtaaggacttctctcaaaaaaagagagaaaatttggcaacaatgcgagactctttctcaaaaaaataaataaagagagagagagagaaaatttaaacacagagacatgtacagygggagggtgagatgaagacacaagaagaggccatatacaagctaaggaacacctgaggctaccaaaagctaggagataagatataacacattctctctcacagccctcagaaaaatcaatcctgctgacaccttgactttgtcaagcctcagaactgtgagacaataagtttctgatgtttaaaccacacaggttgtggttatcttgtatggcaacctccaggaaggtaacacatagttggatgtgtacaagtcaaatgtacctttgatgagactcaccagaaataccttccttgtagagtttttgtgaggctcaaatgagctaatgtgtatgaagtgctcagttctacacctaggacttattaaatactctgtgagctcttacaccattcattcaggtaaagagccatgag

SEQ ID NO: 637876 - DNA, 551 bp, Homo sapiens
tgcagaagcgcacacctggctctcagaggtgtgagatatggaaacacacccacgggcaggatttggctgggccagctaaggaagggtgaaacacccctcccagggctcagcagtgcttgctattggaggaaggggaaaatgggaatgtagtcactatttcttacgwctataatttctgaaatatactttgagaattttattactaataatccattctgccataattatactgtcggcaataaatttcctactgaaataaaagacctttttttgtgaattccagggggaaaatgatagttcatttttttcactgtctgctttgcagattgagccttttaaagtgacttgaggaattttcctgtgcccttggaaaaggacacaatttaaaagtcccaaattctcatgctggctgcttggagttggaggtgatcaaaagggagtgagacaaatatctacaaaaggattgaaacttgaagatgtcaaggttcattttcatccttggcaatgagcttccagaactgaacagtgtgagtgtgtatatgtgtgtccta

SEQ ID NO: 637877 - DNA, 599 bp, Homo sapiens
cagacataggttgtcatgatcatttgactgcctttctcaacagatagcttttgtctctgggtccaagttggctacctcagctgccactatcacaactgcatcccacccacagggaacaaaggaaaggagagaggaatacacgcccatggctttcagggcatggcctggaaggggcacacatcacttctgatcacacccttttggccagacacatggctggttgtcacatggcaacaattagcttccagggagagtgagaaatggtctcatgttaggtggccatatttccatctaaaactcaggaattttttaattgaagaaaatagatatcagtaaaaagcagcaggctttgcacaatccacataatacagagtttacagaaatcagtctagctattgaaggagaaagagatttaataaagggaattgagtgtttttaaaatcacctagaggactgggctccaggattttatgctgagctcctaacaacttcagagacytacttgtcaagggactcctacctttgccatatccagaggggcagggagacaggaggttgtaacaggaagaattgagttcaagaacattttgtcaaagatg

SEQ ID NO: 637878 - DNA, 610 bp, Homo sapiens
ccctggctgcaaggaaatctgggaaatgtcccttttagctttccaggttttagagtacggcaagacagacttcgaggaggcagacatagaactgagggccaaccccacatgtccaagactctggcaattctgtcctattcattagtctttactagtagggcagaaacaacagatgaggtgggaaccctgctcttttacttgagggtgggttccccaaatgttattaaagattgtctattctctgggactttctccaagaagaaaccttcagtcttcagcctggggttataaactggttaaagcatttggagacctggaaaggtcaactcctggttacagcccagcctcgccctgccctccctctacatgaagtctttgaaataaaartctcggtctttcacctaaaaattcatgtaaattttgtaatcgactccataataaagatttgttttaatataaaaaaaatctctgccaaatttggaggtgagttaatgtttcaaaaagatgttccatgtttaatttatattttaaaaactatcctgtggcacaaggccacagacccttccccatccccacctctaggaatatatcttccagtttgagaaatgca

SEQ ID NO: 637879 - DNA, 621 bp, Homo sapiens
tgttggtttttttttttcatttkgttttgctttatagttttttcttgaaagccaagcatgctgctttgggtaatagaaactgagctaaataggcctttagtgtgagaatttacattaatttgactaagacttggattgtgtttaatatgtgctgtagttacaggtgccaaaggcttcagcttcttgtattatccttgtttttgtgtcctcttgactttgggctttcgtaagtcctccttctcagacagtgtctatgtttttgtggctctttcggctgtatgcccctgttttatactagtattcttttggtgtagtagtaaggtatatgtagaaagaacattctctaacctaaatctcagtcttttagtgggcctgtgtctcagagaggtgaacttcacaagtgtttcttcagtcatattcttttccctttagttctctttcctatccctggctgcaccactcccaatctattttcttgaagctctgagctctgtggattgcattttttttctctcttaggtaagacaggaaggctacagcaggctagagtgggaggaattctcttccccaagctggtataaggcgctggcaaaatattttcctctggagagtgggccttta

SEQ ID NO: 637880 - DNA, 425 bp, Homo sapiens
ctagtcttctccacctagatatcctgcaagtttaccaaagtcgattagattaattacacctcccagcacacttcaacactgcactcaccaggcttcaaaccagaccttcctcctatactcctaccttggttaatattgtcagcatacacccagccacccaagtaggaaaacatcctctaatcaactctccacatccaagtggccgtcaggccatcgtgggtctccattaaaagtgtatcttggatttagcccctctttctgtttcatcctttatatatgaggagactcaaaaggctcaaartcatacttccctatatactgacagttatctgaaatgcctccagtaggactttgttcctttaagcatcgaatgcaaatacccataaaagatagtgagaatactgggtccctggagtagacaaaat

SEQ ID NO: 637881 - DNA, 525 bp, Homo sapiens
gaggcatggccagaaccgggagagggcacggagaggtgagggcaggcctcccatctctgtgtcccagaggtgatggtgcaccttctgggcagcctttcaatcctggactcagtctcactaagcagccaaagcccatggttccagcacctttagttgkcctgcttcacacccttctcccatggcctctctagccctagggtggcagtggcttcctgctctgaccaatctctgagtagtctccttgtctcaatttggtgttcttggcacttccattgcctgggtcaccaattccttgtgtgtaggacctagcatgggttctgccttggcactgactgggaggactttttggttagacaggtcttcactcagctttccttaaattgcaccatgtgccttccagtcatgcaagttagttctggggatgagttttgagaagtgaagaagacagatgcaaaatgaagacttgtcccatgaccaccctcatagctacttaggtggagcaaagctggatgggcagagaggata

SEQ ID NO: 637882 - DNA, 525 bp, Homo sapiens
gaggcatggccagaaccgggagagggcacggagaggtgagggcaggcctcccatctctgtgtcccagaggtgatggtgcaccttctgggcagcctttcaatcctggactcagtctcactaagcagccaaagcccatggttccagcacctttagttggcctgcttcacacccttctcccatggcctctctagccctagggtggcagtggcttcctgctctgaccaatctctgagtagtctccttgtctcaatttggtgttcttggcacttccattgcctgggtcaccaattccttgtgtgtaggacctagcatgkgttctgccttggcactgactgggaggactttttggttagacaggtcttcactcagctttccttaaattgcaccatgtgccttccagtcatgcaagttagttctggggatgagttttgagaagtgaagaagacagatgcaaaatgaagacttgtcccatgaccaccctcatagctacttaggtggagcaaagctggatgggcagagaggata

SEQ ID NO: 637883 - DNA, 547 bp, Homo sapiens
tagagaaataaagaaaagttatccaattcttcagccattgcaaaaaaaaaaaatcctattttcagaaaatcaaaagaaggtgatactgtttcctctagcccaggaaaaaccatataaaaactccacactaaactgaaataagataatacaactttcctcaagtggcctttctaaattttaattctcaatttgcttctaatggtggtgagaygttttggagttgttacaattggctttttacctaaagcagtttggcagatgccagacagacccccgaggctgtgagcatgcccgccctgctgcccaccctctcacaccccgtgtgggccaccacctgccctgccagcctctgctcagagcctccaccctcacctgcagacacctccaattcccctacaagcgcagatttcaggaacacgtgaagaaagctaagaaaaaggaggcagggagtattccatttgtttagacctgaagccggtcaggttctcatttttgtggatgttttgacgcaagtaattcactatctggacacaatttccagggtact

SEQ ID NO: 637884 - DNA, 537 bp, Homo sapiens
cgatactggcctaaggacagatatttatgttactaggacagaactgaacttgcagaaataaattctcacattaatgtcaactaattttcaatgagtgtaccaagataatttaatggagaagaatattcctttttacaactagtgctgggaatctggatatccaaatgcaaaatcttaacttggatctcacatcacatacaaaaagtaactcaraatggatcatagacctaaatggaatagctaaaatgataaaactcttgaaagaaaaaaagaggagtacatcattgctcccttggatttttcaagccttcttagatataacaccaaaagcacatgcaacaaaagaaaaataatgaaattgtacttcatttaaatttaaaatatttataattcaaaggatgccattaaaaaagtgaagagacaatttataaacagaggagttttgcattataaatttaatttatatgtaattcttaaacaaaattaataataaaaacaaaataaaaattaaaacaaaattaataataaaaaacataa

SEQ ID NO: 637885 - DNA, 435 bp, Homo sapiens
tcctggatccgatatgatacaaccactaaacataatcctgtggaaactatgaaaaaagtgaattttttgaatggtgctacattaagtgaaaaaagtaggtacacttgttttaaaggatgccaatttaaaggtgaaggtagagggtagagaagtatttgaaaatcttcaacagtaattatgtatgattagtagagatctgagtgatttcagccccctctttyacatttacatttttgatcacattggctctgcaattgattagtgttgctgttatgtattggtactttgatttttgttaatgagaagagaacaaagactttaaatgagaaattcattttaaaaaaaggttgaagaacttctagcatattcctaggggaaggaagatttgcagtgggtcaaacctaaacttgcctttttattttgcacagagatgat

SEQ ID NO: 637886 - DNA, 585 bp, Homo sapiens
tccagccaaaccaaacctggaacatcaaattctaatatcattcatttctttcattatagaaagtatatctctttcccgagagaggtgatgaaatcagcttctaacgccctagtgtaaatcatgtgattaagtgaaaacctaggtattttcaagaggagaaaaattatgtgatttttgctattaataatatatatccattaactgatgactagataaataaaatgtggcatatccatacaataaaatgttatctggccataaaaaggaaggacatactgtttcatgctataacacagatgaactttcaaaacattatgcgaatttaaagcagccagtcacaaaggatcaygttatatgattccacatttatgaaatggacggaataggcaactctacagagacagaaaatagattactgtttgtgatggttaatactgagtgtcaacttgattggattgaagggtacaaagtattgatcctgggtgtgtctgtgagggtgttgccaaaagagattaaatttgagtcagtgggctggggaaggcagatccacccttagtctcatggacacaatctaatcagctgcca

SEQ ID NO: 637887 - DNA, 590 bp, Homo sapiens
gacacccatgtcactcccagtgtgtcattgacagtggtcagtggcatgagctttgatatgaaggattgcatgatatctagatcagtatggaatgtatgtcttcttggtataatattgcacaattatcaccattggcaagttaaatcctatctctaagagtgacaccaagagagcatattgcacttgctcaagtgggatatattaatcttgccagtgaataaggcagatgttcagtctagggtttggggaaagtaaggaaaaagaacttgttattagtgacaaacttgtgtcaaatccagctagaagtgatggaatgcaggcagatgggcatttccatgagtaggagatatggaaagatctttcagcagtcatcataaaatctgaagttgtacattaaagctatggaaggaaatcaataaagtagtcagctacaggggatgctactgtccctttctcctttaagaacagataatagatgctcagaagtcagcagcatgccagcagcaaactgatcagagagtaacttcttgagctgtttgaatataagttcagyattctgagctctatcaaaaggaacccttaattaccct

SEQ ID NO: 637888 - DNA, 608 bp, Homo sapiens
catcaagtttcctccatagtcccagaacaaaacagtagaatgtggtgctgtaaagcagggcttgtaataaaactgtgttcgagtcccactctaccacttactatctggaatcctcgattttctcatcagtaaaatggaaattatactgcttactgcatatggttgaattgaagcttaaataagctcacaatggaaagcagttagcacagagcctggcacacagttagccttcaataaagcatagttattctattattccaaacagttctctgacattcatttctatctaacaagattctaggagaaaaaggatgctaaatataaaaacagttcctcagattttagttcataaacagatatatggacccagtgtttttcttatatgatattcggttaagcaattatgccatccaaacattacttttgcacttagtgatattctccttgmagtgttgtgctagagaaatgagttctcccactagcagctcctggtcttgctctacaggagcaatgaatagggtgactttatgttcttttgctctatctggggcctgaatcaatagcaccaacaaacaaattattcaagcatgctatcagaataccacttc

SEQ ID NO: 637889 - DNA, 524 bp, Homo sapiens
ttttttttaaatcaggcaaaattaaagcaaaacaatcattttgcattttttacccccttaatttgcatccaaggcaagttcctcctttacatttcctgttttactgacttcattccagtatcagttttggaaatgattttcctttttttatgcctccccctctacatgctaatgctttgttgttgaaaccaatgctttactattgaaactctacagagtaagctgcccctcccttttttttttttttttttttacaggggccaraaatttactgaggtttgaaggcattcgttgtgtgctgatattaaaatatgttcacacattcttctcttcaaaaagtgtaacctgatatctttctcctagagtgtaggctgtacttactaactaccttctagttaatagaatgtgacagaagtgacaatgtatgatttctgggacaaagccataaaaggcattgaggcttcttccttgctcactcttggatcacttgctcaggagaaagccaactgccttgtcatgaagac

SEQ ID NO: 637890 - DNA, 524 bp, Homo sapiens
ttttttttaaatcaggcaaaattaaagcaaaacaatcattttgcattttttacccccttaatttgcatccaaggcaagttcctcctttacatttcctgttttactgacttcattccagtatcagttttggaaatgattttcctttttttatgcctccccctctacatgctaatgctttgttgttgaaaccaatgctttactattgaaactctacagagtaagctgcccctcccttttttttttttttttttttacaggggccagaaatttactgaggtttgaaggcattcgttgtgtgctgatattaaaatatgttcacacattcttctcttcaaaaagtgtaacctgatatctttctcctaragtgtaggctgtacttactaactaccttctagttaatagaatgtgacagaagtgacaatgtatgatttctgggacaaagccataaaaggcattgaggcttcttccttgctcactcttggatcacttgctcaggagaaagccaactgccttgtcatgaagac

SEQ ID NO: 637891 - DNA, 403 bp, Homo sapiens
tactgaatttcattgtaaactctaaataatatttttcaattcactaagtttttggagtagacggtgttataatttgtaagtaatgatattttgtcactttctttgtaatatttatatctgtttttattaccctgtttcatcagttagaactttagaaacttcttgaatagtagcagtgatggcgggtaactgttttgttccagaatttattgagaatgcctctagagtggtgtaatcaaacaaggtgtacayagttagttcagaaaagacttatcttttattcataatttattctgaaattcttttcactttaatctgttggttttaataagagaaatggatttcaacttgatgaaatgcattcacatctattaagtcgtactatttctctcctttgacctac

SEQ ID NO: 637892 - DNA, 568 bp, Homo sapiens
ttacgataatctaagaatcatcactagccaagcctttttttttttttttttgagacaggatttcactcctgtcgccaggctggagtgtagtggtggaatctcagctcattgcaaactctgcctcccgggatgaagtaattcttgtgcctcagtcacccaagtagctgggattacaggcgcataccaccatgctcaactaatatttgtacttttagtagatatggggtttcaccgtgttggccaggctggtcttgaacccctgacctcaagtgatctgcccgccttggcctcccaaagtgctaggattacaggcatragccactgtgcctggccaatcactagcccagctttctatagaatgccttcttggtctcatttctttggtactgagcagggaattctaagtgagggttgctgagccctaggtgctctggagctttcttccccatcagatacggaaaatattcacagtcaccctctaggcacatttctgagtcctataactgctcactatgggactagagggcaaagataagagccatgactccttttttgtatagggagattg

SEQ ID NO: 637893 - DNA, 526 bp, Homo sapiens
caggctggagtgtagtggtggaatctcagctcattgcaaactctgcctcccgggatgaagtaattcttgtgcctcagtcacccaagtagctgggattacaggcgcataccaccatgctcaactaatatttgtacttttagtagatatggggtttcaccgtgttggccaggctggtcttgaacccctgacctcaagtgatctgcccgccttggcctcccaaagtgctaggattacaggcataagccactgtgcctggccaatcactagcccagctttctatagaatgccttcttggtctcatttctttggtactgagcagggaattytaagtgagggttgctgagccctaggtgctctggagctttcttccccatcagatacggaaaatattcacagtcaccctctaggcacatttctgagtcctataactgctcactatgggactagagggcaaagataagagccatgactccttttttgtatagggagattgagtctagtctttttttttttttttttttttttt

SEQ ID NO: 637894 - DNA, 526 bp, Homo sapiens
caggctggagtgtagtggtggaatctcagctcattgcaaactctgcctcccgggatgaagtaattcttgtgcctcagtcacccaagtagctgggattacaggcgcataccaccatgctcaactaatatttgtacttttagtagatatggggtttcaccgtgttggccaggctggtcttgaacccctgacctcaagtgatctgcccgccttggcctcccaaagtgctaggattacaggcataagccactgtgcctggccaatcactagcccagctttctatagaatgccttcttggtctcatttctttggtactgagcagggaattctaagtgagggttgctgagccctaggtgctctggagctttcttccccatcagatacggaaaatattcacagtcaccctctaggcacatttytgagtcctataactgctcactatgggactagagggcaaagataagagccatgactccttttttgtatagggagattgagtctagtctttttttttttttttttttttttt

SEQ ID NO: 637895 - DNA, 654 bp, Homo sapiens
atcaatatctgcccctagacaaattggtcagatttatccaaycaggcactcaaaaagaaggacaaccataggctccacatagtgaccagcagaccagagtgtaccgtaggtgttggcagccagagctacatgagaaaaacccagaaaaggcaaagctgagcatgctcagttcctcatcccaatgctggcaatccgatcagtcagtgctcttcccatttgaagaagttgggcagagagaagtcaggagtaaatttctctcatactttttcatctgaggtgtggcatggaaacactcttacctgtgggagacatgaagcgtagaaaatgtttgccctaacatagatcctagattttccaaattgaaattatatatgaaaactatacaatttattgtccaaactgggacactcttggggattgactgggagccctattaatcattatcccagggctataagcatgtgctagagctgtccagggcaaccagtattaaaagttgccttactaaagtgaaatatggggcttcccaggggattcctgctaactttattataacattcatttcttcaagtagttacacttctatggtcctttctctctatatcccttactcataaggaaaacagaaagagagaaaaagaaaattgtgtttta

SEQ ID NO: 637896 - DNA, 654 bp, Homo sapiens
atcaatatctgcccctagacaaattggtcagatttatccaatcaggcactcaaaaagaaggacaaccataggctccacatagtgaccagcagaccagagtgtaccgtaggtgttggcagccagagctacatgagaaaaacccagaaaaggcaaagctgagcatgctcagttcctcrtcccaatgctggcaatccgatcagtcagtgctcttcccatttgaagaagttgggcagagagaagtcaggagtaaatttctctcatactttttcatctgaggtgtggcatggaaacactcttacctgtgggagacatgaagcgtagaaaatgtttgccctaacatagatcctagattttccaaattgaaattatatatgaaaactatacaatttattgtccaaactgggacactcttggggattgactgggagccctattaatcattatcccagggctataagcatgtgctagagctgtccagggcaaccagtattaaaagttgccttactaaagtgaaatatggggcttcccaggggattcctgctaactttattataacattcatttcttcaagtagttacacttctatggtcctttctctctatatcccttactcataaggaaaacagaaagagagaaaaagaaaattgtgtttta

SEQ ID NO: 637897 - DNA, 594 bp, Homo sapiens
ttttattagttgtatccttaccttttctaatctgtatcatgaggatgttaacatctagactgtaagtcacgggactattgtggggatagggatgtgaaaataagtaagttctaacatgctatgtaaatgtaagcatcttcatttctttaacggrggaaaaaatcagtcaaaatacgcttttgtcaatagcatatgccctgaagaaattcaatgattctctggagttaatcctcagagactattaacacccacacagtgttcccccatttgagatccagatggtatccctgaccccagagcctgttgcttagtgatcgctcatgggaccacacttaaaatcatagcctcccagccactctgacaaggcaagtccaatctttttctcaagagaatgaagagttcagtcccaaagatacttggaatctactgtacaaggaaacacaaactcaagtccacagagtgcaacgtacttgttgaaaacaaactaggcttccaaccaattcacaccgagtgctgagaaggaaagggaaggaagctatatgaagagagggacccttggtgtgatcctgccccagttttcattctagaaaaaca

SEQ ID NO: 637898 - DNA, 601 bp, Homo sapiens
aagcatgcattgcattttccttctacattgtggtcaatggaagcagccagaggaaggaggtagaaagagaagtgtacacaaaggggtggaacaagagctaaatgagattctaaccaaggcaaaacattcacagagagacctatagattagaggcaaagtagcacagacagcccaccatatatgtggttgaaaaygtgttaataaagatggtgctaccttcaatgggattgtgcacctcaagtttggcagattggatagtcatggccaacatgactgttaatgtattttcctcttttagaacaaagtgatgaaaagcaagggcttcaaatgagcaaaagtttgtccaattcgcaatcgagtgaacatgctatgggttcagagccagctaatagcttcagctgacttctcagtgccctttatttaatcagctggaatgttttataagtaccatccctgtaaccctttgaaatgaaggatttgacttttgtttggaaaatacatatctcatcatagaaatggaacacaatgtccttagtttagttattctctagagaaacagtctttattgaaatatatgccaggaatataataaaggaaaaaa

SEQ ID NO: 637899 - DNA, 565 bp, Homo sapiens
gctagggacctgcagcccgccatgcctgagcttcccacccactccatgggctcctgtgcggcccgagcctccccgacgagcaccaccccctgctccacggcgcccagtcccatcacccaagggctgaggagtgcgagcgcacggcgcgggactggcaggcagctccacctgcagccccggtgcgggatccactaggtgaagccagctgggctcctgagtctggtggggatgtggagagtctttatgtctagctcaggggttgtaaatacaccaatcagcaccctgtgtttagctcaaggtttgtgagtgcaccaattgacactctgtatctagctgytctggtggggccttggagaacctttgtgtccatactctgtatctaactaatctgatggggacgtggagaacctttgtatctagctcagggattgtaaatgcaccaatcagcaccctgtcaaaacaggccactcggctctaccaatcagcaggatgtgggtggggccagataagagaataaaagcatgctgcccaagccagcattggtaacctgctcgtgtccccttcc

SEQ ID NO: 637900 - DNA, 582 bp, Homo sapiens
gccaaggtcctctagtataaaggtgcaaacttggaagtagatatcatgtttatttttatattcacagcacttagcacaacatcttgcctataataggtgttcataaaaatgcttgttgacyaatgggtggtgaagaatggccatttcggcccaaaccatctttgtcacttgttatatttcccataactcccaacattcatattaataaacagacaaaatgtgtgctccaaactagtgcgatttattcccactgtttactcagagcttaatctcttgtcacatttttgagttggcattttaagcacaaggattacatgttaaggatggttttcttgcatgaaagccagtgctgtttgggaaggtcagttgtgaggaaatttgagactgtgaccgtatttgagcaaaggtttttaaaaatcacattatcaaagggtgactgtcatcccctgagataagaagcagctatctaagtctttgcaagtggatagttgaatattcttttgaaagttttctagagatacagaaacaacagaaactgctttggggatgaaaaaaattagcacaaatattaacagaaatgct

SEQ ID NO: 637901 - DNA, 604 bp, Homo sapiens
aatactgtaggcgtttttaataaaatcaggagtaatacaggatgttcagtattgttacttgttctggaagtttgggcattctatggccagtgattacaactgtgaaaatagagatggaggaaaaatgcatgaaaatgtggggacagagtgagaggctacttttgaatggaccatcatctactatggctttggatttatcttttaacttttcagtcttgtttatgtcttataaaagatgttaacattagagaattaattggactaaatcactttattacttttactactgcttttctgtttcttagcattgaacagtttccttcatattccttccttatttggtccttgaaaaaaatttattttttttgctcccggccactgtggttcacacttgcaatcccggctacttaggtgggtgagtcaggaggctcactcaggcccaggagttcgaggctgcagtgagctgtgtttgcaccacttcactgcagtctagatgacagagcaagaccccatytctaaaaaataaataggctgggtgtggtggctcacactggtaatcccagatctttgggaggccaaggtgggaggattgcttgagcccagg

SEQ ID NO: 637902 - DNA, 564 bp, Homo sapiens
tagcttgggcaacagagtgggactccatctcaagaaaaagaaaaaaaaagttctaagtgttggccttaaagtgaatttatctttagtatgatagttatatgaaaattatacagtttgtgtgcacagaatttttaaataaagtgttttgtaaaaaaaaaatggattctagcttttgcagtacatatgtataataactttaatattcagggcagataagtacaattatttcctcactcttaaaatgctgtttttgtgtctgttcctgcagatgttytcatgtctttgcaaagtgacacattttgatgccttcttgatacagtggtagacattttgtagctttctagaaactttgtattcatatagtatcattgaaaaataaataaaatgatagtgtgggtcaaaaaaatatattcagcaggcagggtggctcacgcctgtaatcccaggactttgggaggccaaggcccccgattacttgaggtcagcagttcgagataatcaagataagtcttggctagagagcttttgtgctcttgctgcactgtttctgtaggaaagagacat

SEQ ID NO: 637903 - DNA, 593 bp, Homo sapiens
cttaaaaactgagttgggtcaagccctcacccttggactccccaacttagaaaaaccatttatcttgtatatttgtgggagactaggaatagctttgggagtcttaatccaaaggttaagacctgttcagtggctggtggctcatttttcaaaacagtgggacccagttgcacaggggtggccttgctgcttgatggcagtgacagccactgccctactggttagtgaagcctctaagctgattctggggtaacatatataagttatgacatcctaccaggttcagactgtgttagaagtcaagagacacaattgtctcacttggtgggggggagactgaccaracactaacctctcttattagacaccccagacattactttgagtatatgtcagaccctgaagccagcaactttagtcccaaccacagatgatgagggcttatgacggtgcagagagaccataaaacagacattctccagcaggcctgacttatgagatcagccttttgagaacctggaggcagaatggcatactgatggcagtagctttgtggaggaaggaacctgaatggcaggatatacagtagtaag

SEQ ID NO: 637904 - DNA, 593 bp, Homo sapiens
cttaaaaactgagttgggtcaagccctcacccttggactccccaacttagaaaaaccatttatcttgtatatttgtgggagactaggaatagctttgggagtcttaatccaaaggttaagacctgttcagtggctggtggctcatttttcaaaacagtgggacccagttgcacaggggtggccttgctgcttgatggcagtgacagccactgccctactggttagtgaagcctctaagctgattctggggtaacatatataagttatgacatcctaccaggttcagactgtgttagaagtcaagagacacaattgtctcacttggtgggggggagactgaccaaacacyaacctctcttattagacaccccagacattactttgagtatatgtcagaccctgaagccagcaactttagtcccaaccacagatgatgagggcttatgacggtgcagagagaccataaaacagacattctccagcaggcctgacttatgagatcagccttttgagaacctggaggcagaatggcatactgatggcagtagctttgtggaggaaggaacctgaatggcaggatatacagtagtaag

SEQ ID NO: 637905 - DNA, 614 bp, Homo sapiens
ggcattgcagctttgggtaataatttgtccaactgctggatatgccaccatcatcagcaggctcaggggctgcctctttcattccctaaaagctcgactaccartttcacaaaggaggtatgggaacctaaagtaacccctgcacctctcatggtacacctaagtgcctcatttcctgtgaatgtataaacctcactggcctgctaaatgcttcagtcatcgaaagggtgggaaaaggggaagttgaaatgcctactttgacatctcacaggcttttccctcatcagtttttttttaaaaaaaagccctaatcaaacgtggactaggggagttcgtctttctctcccaatgcccaaaacagtcatacctctctgcaaagctcagtcagtcacctgcattcctcttgccccatgtaaattgcacacccctaggatatgtgtccttttgtggacaccaagaccatttggccaacagctatccactaaccaatttcacatgtccattactcataccagcatgcccttgtgtctataatgtataacacactgcacccttaggtactttgagccccaatggaataacagttcataacagcacacatccaaaatctaaaa

SEQ ID NO: 637906 - DNA, 614 bp, Homo sapiens
ggcattgcagctttgggtaataatttgtccaactgctggatatgccaccatcatcagcaggctcaggggctgcctctttcattccctaaaagctcgactaccaatttcacaaaggaggtatgggaacctaaagtaacccctgcacctctcatggtacacctaagtgcctcatttcctgtgaatgtataaacctcactggcctgctaaatgcttcagtcatcgaaagggtgggaaaaggggaagttgaaatgcctactttgacatctcacaggcttttccctcatcagtttttttttwaaaaaaagccctaatcaaacgtggactaggggagttcgtctttctctcccaatgcccaaaacagtcatacctctctgcaaagctcagtcagtcacctgcattcctcttgccccatgtaaattgcacacccctaggatatgtgtccttttgtggacaccaagaccatttggccaacagctatccactaaccaatttcacatgtccattactcataccagcatgcccttgtgtctataatgtataacacactgcacccttaggtactttgagccccaatggaataacagttcataacagcacacatccaaaatctaaaa

SEQ ID NO: 637907 - DNA, 574 bp, Homo sapiens
cttctgcagacttaaacgaccctgacagctctgaagagagcagtggttctccctgcatggtgtttgagctctgagaacagactgactgcctcctcaagtgggtccctgacccctgtgtagcataattgggagacacctcccagtagggaccaacagacacctcatacaggtgggtgcccctctggggcttccagaggaaggatcaggcagcaatatttgctggtgatacccaggcaaacagggtctggagtggacctccagcaagctccaacagatctgcagctgagggacctgactgttagaaggaaaactaacaaacatcaaggaatagcatcaacatcaacaaaaaggacatccacaccaaaactccatctgtaggtcaccaacatcaaagaccaaaggtagataaaaccacaaagatrgggggaaaccagagcagaaaagctgaaaattctaaaaaccagagcacctcttctcctccaaaggatcacagctcctcgccagcgacagaacaaagctggaggaagaatgactttgatgagttgacagaagtaggcttcagaaggttggtaat

SEQ ID NO: 637908 - DNA, 577 bp, Homo sapiens
catccccttatcactaggcatgagaataggtcattgaggacatcctgttctagttctgagtgcccttgtccctttctctatattcttgctttagagaatgaaactaggaactacacttgttacagacaataaataataataatttttcacacgcacacacccccacacttgtttcaaatacataattttattaataaaatagattacaatccttattaatttttaatgagcattcaatatgggtcaggccctgagctaaacactttccatgcattgtctctttaagaaaggkcaaggagcttactttctggatcagggtccattgccacaggtggagaaacgtgctctaagaaagttgatttactgggagaagttcttttatctcaaacacttcaaatgtattcagttggtcctgtcccaaagatgcaaccatctgagccagtatgttaaacaaaagtaacacagattccttttaatgactgaacaaaagactcttgtaaattgctgagactatgatcaattccttatagttatctggactcaccttgaaaatcactgacataaaatattactgttc

SEQ ID NO: 637909 - DNA, 598 bp, Homo sapiens
agtttaaaaaattaaagcaatttgtgttatgaaaatgttaattaacccagaaaattcctagtctaaatgccagcttaatcagtagatccttctttcatctatccatttttttttcttcttctttttgtaacctgcctaccagagaaatgggatgccaaggtcttccttcggggatacaaatatttcttcatcacacaaatctcttgatcacaatgacgtggcagaaagcttgttctgaagcattgctgtaaattatatgaaagcattatttaatgtgtttggccttatggcttcatcttcctaattatgtttattttgataagcatgctaatcagtctggggtaagagggtgaaggtggaaattaggattatagttaaaatatgcctggggsaggagagcctcttgtgagtaaacatctaatcgtaattcacatgaattgcacatgaagcccatcaagagttggcaccacctcagatctgaaattggctcattcttccttcatcatcttactttctaccctatctcagaaaagttatcgctttcctttttccaagggagcatctctgtccctaacatggcagaaagaaagaaaatgtg

SEQ ID NO: 637910 - DNA, 598 bp, Homo sapiens
agtttaaaaaattaaagcaatttgtgttatgaaaatgttaattaacccagaaaattcctagtctaaatgccagcttaatcagtagatccttctttcatctatccatttttttttcttcttctttttgtaacctgcctaccagagaaatgggatgccaaggtcttccttcggggatacaaatatttcttcatcacacaaatctcttgatcacaatgacgtggcagaaagcttgttctgaagcattgctgtaaattatatgaaagcattatttaatgtgtttggccttatggcttcatcttcctaattatgtttattttgataagcatgctaatcagtctggggtaagagggtgaaggtggaaattaggattatagttaaaatatgcctggggcaggagagcctcttgtgagtaaacatctaatcgtaattcacatgaattgcacatgaagcccatcaagagttggcaccacctcagatctgaaattrgctcattcttccttcatcatcttactttctaccctatctcagaaaagttatcgctttcctttttccaagggagcatctctgtccctaacatggcagaaagaaagaaaatgtg

SEQ ID NO: 637911 - DNA, 630 bp, Homo sapiens
ggctggtcatccagcaggtgtttgacaatggcagcatctacaatactgaagtgcttgacatcacagaggaaattctgaatcctcacttcctggagggtgtccgcaacattgccaatgtctgtctgcagattgrttatccagctgttgcctccgtaccccattctaccatcagtgggtacaaatgagtcctggctttgtctgtggagactgattacaccttcccacttgctggaaagttcaaggtgttcttggttgatccatatgcctttgcggctgctacccctgtggccactgccaccacagctgctccttctgctgctgcagcctcagctaagattgaagccaaggaagagttagaggaattggatgaggatacaggatttggtctctttgactaatcaccaaaaagcaactaaatcagccagctttatttgcaaaacaagaaaataaaggcttacttctttaaaaaaaaaagtatatttaaaaaaaaaaaaaatatatatatatatagccaattcgtgaaataattatatttcattttaatgaaaaaaattggggggatgttgttccactttatctattttttattttactttttattttagactcaagggcacatatgtaggtttg

SEQ ID NO: 637912 - DNA, 557 bp, Homo sapiens
gtctacaatctggagatcctgagatgtcagtagcatggctcagtctaacttggaaagcctcagaagcagggaaaccaatagtgtaattctcagtccaaggccaaaggcctgagaatgcaggaggccactggtgtaggttctagagttgaaaggctggagcagctggagttctgatgtccaaggacaggagargaagagtgtctcccagctccaggagacagacacattcgcctttcctttgttttggttctttctgggtcccctggcagagaggatggcacccattcacattgagggcagatctttcccactgaatccactcagactcatgtgctaatctctgcaggaaacatcctcacagacatacccagaaataatgcgttgccaggtttttaggcattccttaatccattcaaggagacccctgagggcaaccatcacaggccaggcacagtggctcacacctgtaatcccagccctttgggaggccaaggcgggaggattacttgagcccaggagtttgagaccagcctgggcaacatagggagacgcccatc

SEQ ID NO: 637913 - DNA, 557 bp, Homo sapiens
gtctacaatctggagatcctgagatgtcagtagcatggctcagtctaacttggaaagcctcagaagcagggaaaccaatagtgtaattctcagtccaaggccaaaggcctgagaatgcaggaggccactggtgtaggttctagagttgaaaggctggagcagctggagttctgatgtccaaggacaggagaagaagagtgtctcccagctccaggagacagacacattcgcctttcctttgttttggttctttctgggtcccctggcagagaggatgrcacccattcacattgagggcagatctttcccactgaatccactcagactcatgtgctaatctctgcaggaaacatcctcacagacatacccagaaataatgcgttgccaggtttttaggcattccttaatccattcaaggagacccctgagggcaaccatcacaggccaggcacagtggctcacacctgtaatcccagccctttgggaggccaaggcgggaggattacttgagcccaggagtttgagaccagcctgggcaacatagggagacgcccatc

SEQ ID NO: 637914 - DNA, 557 bp, Homo sapiens
gtctacaatctggagatcctgagatgtcagtagcatggctcagtctaacttggaaagcctcagaagcagggaaaccaatagtgtaattctcagtccaaggccaaaggcctgagaatgcaggaggccactggtgtaggttctagagttgaaaggctggagcagctggagttctgatgtccaaggacaggagaagaagagtgtctcccagctccaggagacagacacattcgcctttcctttgttttggttctttctgggtcccctggcagagaggatggcacccattcacattgagggcagatctttcccactgaatccactcagactcatgtgctaatctcygcaggaaacatcctcacagacatacccagaaataatgcgttgccaggtttttaggcattccttaatccattcaaggagacccctgagggcaaccatcacaggccaggcacagtggctcacacctgtaatcccagccctttgggaggccaaggcgggaggattacttgagcccaggagtttgagaccagcctgggcaacatagggagacgcccatc

SEQ ID NO: 637915 - DNA, 592 bp, Homo sapiens
gtcttatcatattcatcgtcttagtcatcactatcatcatcgtcgttgttgtagtaaggaagaccagctgctctgggtatgaaaactgagggttggtacccaacattccagatcagtgggtcactgccacacccaattcccctcagctgtgctggaggctgtagcataggtcagctgccttgctttgccttctgtttttgattttctggttctcttctattgacccagcttctgaaatcttcagaagctatagctggctttcctgagaaaaaaatgcaaatagcaggaggctgtctgggtgtgtagatgccctaagataaaagacttaacaaaaccacagagatagaaagaggtagcaagctaggcagaatactgaccccagccaggcaggagctgtgagagctggctcactgggtgggcagagtgctaagcagaagcatctgaagataagggctaatggtccagactgcagccagcgctaggatgagactctccrcaggaaacaccctcacagacatacccaggcttgggattctgtcccctctccatgaatctgggtcagtgctcatggctcagtcaatagttgattatt

SEQ ID NO: 637916 - DNA, 559 bp, Homo sapiens
ccagccaggcaggagctgtgagagctggctcactgggtgggcagagtgctaagcagaagcatctgaagataagggctaatggtccagactgcagccagcgctaggatgagactctccacaggaaacaccctcacagacatacccaggcttgggattctgtcccctctccatgaatctgggtcagtgctcatggctcagtcaatagttgattattcacatcatgaacagcttgtgggtttctagacccttagattccagctctccctgaaactcttcactgctcagttacctcactagaccttcccagtctaagggagggaaaggaaatagaattaaaaatccatcagaggctttycctattgtcacagtcctgccagaaggcggagtgggagaggaggttagaagcgatggtttaatgaggtgctgtgattgttggaggtggcctggtccccgctgggaagttgctgtaatcagagtgaggtctgccagaggcgatggggagcagagagcccaggactgggtgggaaggagatgtctgtgcgctcagcactgaacatgc

SEQ ID NO: 637917 - DNA, 563 bp, Homo sapiens
tgtacaattcagcaatagacagtgtctgtgtgtaactgacttattacgtgacagtcaataaatgagctttggggtatccataactgctttctgaaagctgctgtgggcaataactacttatcaaggagagcaataggaggaagcccatgattgacgctctctttggtgattcaggacattgctggttggcctgcagctgaaatacactggggcagacttttctaatcaagccatattctgggaaagatcttctcctttggctcatttgcaactgagatgggcttaattagccaaatctcagattgtaagaagagttagaaaaatctgtcccttctggccatatatcttcctatatcacacaatgctgttatcctgcatcatatcactaatgttgaaactcagagaaagttggaaaatacccagagaaaacagtaattaactcaggaggttaccttamgaatgttgtgaccatcctatgtagagatgccgtgctctcagaatgctaacagaacctctcagaatgacattctttaagtttgaaattaaaacagagtaagtgttgg

SEQ ID NO: 637918 - DNA, 647 bp, Homo sapiens
ttggaaaatacccagagaaaacagtaattaactcaggaggttaccttacgaatgttgtgaccatcctatgtagagatgccgtgctctcagaatgctaacagaacctctcagaatgacattctttaagtttgaaattaaaacagagtaagtgttggtaagtgaccaaaggggaactttccattgttctattaattaaagccattccacaattgcagaaacatgtttttattatttattcagtttccagctaagcaataagaacacatactcttatggggtatttcatttattcagaactttagcttcccatttcctggtgctgtgggttgaattctgtccttcaaaaggatactttgaagtcctaaccctcagtgcttcagaatgtgaccttatttggaaattgggtcattgtagatgggattaagataaagtcatactkgagtaggatgagcccttaacctaatatgactgatgtccctatagagaggagaaaagacacacaaggagagatggccatgtgatgacagattgtagtgatgcatccacaagccaaggaatgccagtgatttcagggaaacaccacaagctggatgcggcaaggaaggattctcccctacaggcttcaaagggaacatggccctgctgac

SEQ ID NO: 637919 - DNA, 585 bp, Homo sapiens
atccattgccaaaaaaggaacatgcacccttgtaacttccctgtttccatctgccacttctctgaggagaaaatagccctgggttggtggaagagcaaaagaaggtgctgttggagtggtttttcccattacttttaagggcaaaaaatgcaatttgcaattaatttttcaccaacctaatacttagaagacataaagaagattatagaagccaaagtcagagtgccagacagaggttcctaccagccgaaycaatcagccatttcaatccatcctgtatagatgtctattcaggctgagccgttgaagttaatgaaaagtgaaagcaggctgggcgcagtggctcatgcctgtaatcctagcactttgggaggccaaggcaggtggatcacctgaggtcaggagttcaagaccagcctggccaacatggtgagactccgtctctactaaaaatacaaaaattagccaggcatggtggtgggcacctataatcccagctactcgggagtctgagtcaggagaatcacttgaagccggtgggggcggggggaggcagcggagcttgcagtgagccaagattacacc

SEQ ID NO: 637920 - DNA, 610 bp, Homo sapiens
ttgcagtggtgctgagccaatggttcaggtggccgcccatcagccgtgaaggagatgtgtctggctgtttcactaactcacaagcctcccactcctgggaggaaaatgctccccacatatcatgctcctggctagctcatcagagaatctgttacagatcacaggccctttggttttccccatgtaataaaaattaacctggggccaagcaaatttcccagaccaggtttttatttcagggcttgtgctggagcacaagggagacagtagagatgcaaggactctctagctgactccctagaaaagccaggaaggatttattaggccaagtgtgggaattgacataaggggtaaagtatgcaggctggctgggcaaaccatctgagggatagggtatgcagtgagcatatctggttgtgatggctattattgttttgagacagggtctttctctgtcacccaagctgcagtgcagcrttgtgatcagggctcattgccgcctcaacctcccaggctcaagcaatcctcgtacctcagactcccaagtagacgggactacaggcacgtgccaccacactgggataattttttattttattgtttttgttat

SEQ ID NO: 637921 - DNA, 610 bp, Homo sapiens
ttgcagtggtgctgagccaatggttcaggtggccgcccatcagccgtgaaggagatgtgtctggctgtttcactaactcacaagcctcccactcctgggaggaaaatgctccccacatatcatgctcctggctagctcatcagagaatctgttacagatcacaggccctttggttttccccatgtaataaaaattaacctggggccaagcaaatttcccagaccaggtttttatttcagggcttgtgctggagcacaagggagacagtagagatgcaaggactctctagctgactccctagaaaagccaggaaggatttattaggccaagtgtgggaattgacataaggggtaaagtatgcaggctggctgggcaaaccatctgagggatagggtatgcagtgagcatatctggttgtgatggctattattgttttgagacagggtctttctctgtcacccaagctgcagtgcagcattgtgatcagggctcattgccgcctcaacctcccaggctcaagcaatcctcgtacctcagactcccaagtagacgggwctacaggcacgtgccaccacactgggataattttttattttattgtttttgttat

SEQ ID NO: 637922 - DNA, 557 bp, Homo sapiens
aaactaacctgctgaattgaatgttatgtcaatttttaagcaattgtgattaatcataattttggggcatcatttatcagcaaaaaaaataatgttcttagaattgtgccacagcactctctattatgtgcctgaacaaattagctagagctttatataatgggcagagatatttgttgttttcctatagagaaacctgaacactcattgaatttttacaaatgaataatcggatttattttaacatgataacgttaccatacataattactttggataatcctctttgtaattgtaatgccatcagtgagatatcagtttcttggggttttgtttgcttgcttttcccatgacccaaggaggaaatgctcccaagaaaactctatctaaataaatgtggcagctggattaaagaaacttggtcctcttggtgataagattattacgagtatgctcacttgtgtttctttgctctttcatgtcttctgttcattcatacattttaaaatgtayattgacatactatgtgctgtgttaagaaatgatgacagacaaga

SEQ ID NO: 637923 - DNA, 628 bp, Homo sapiens
agaaaaataattgggaaaagattaactttgctatttatttcaattttttctcttagagtgaattaatactaaaaaacagttctgaatcaaattaatcaaatttgtgaatatcccattgctaatgtatttggatttgtttccacaaaaataagaagaaacaccataygccatgcagaaaattagccagccagtagctcaatgtgatattgcataatccagctatgtgcattgagtatataaatttgaaatatttccctaaccaaaaagttctaaattaactgaaatattcattttggaaaggagaaactgaaggaaaatactcatatcttatgtttatcatactaaaagcaagtttaattacaatctcatttatttattaaataattatgcattacctactattgtcagaattctagaatacacacagttacagaagtggacaaatgatgcaaagctgttattttcttgaagcttgtgcattttgctgaatagagagacaaatctgagttaaaagcgtgaaatatcggaaatgattatgaaatataaaagaaaaaatattacttgagtattttatatggttatatgaaagattttgtaataaagtgcaataaataaaataaaaaataaa

SEQ ID NO: 637924 - DNA, 569 bp, Homo sapiens
atgatgcaaagctgttattttcttgaagcttgtgcattttgctgaatagagagacaaatctgagttaaaagcgtgaaatatcggaaatgattatgaaatataaaagaaaaaatattacttgagtattttatatggttatatgaaagattttgtaataaagtgcaataaataaaataaaaaataaagtaaataaagtgcaataaataaaataaataaagtaaagtagtacaaatccgaaggacatataagggtgaactatttgatgacttggggaaaaaaagcayttctagctaagagaacaaaacctataaaaactttgaggcaggactgtcctttctatctttaaggaacatcaagaaaacaacgtctgtggatgagtttaatgatgctgggaagaaattgggtaagaaaagttatacaggataactggggccaagatcaagtgttatcttgcacaacattgtatgaattttatcttttctttgaataaagtgagaagccattggagggtctcaaatgaggggagagacaagtgtgtgtagtagattaaggagggggtgcatgaagca

SEQ ID NO: 637925 - DNA, 571 bp, Homo sapiens
tggttaaacacagttaccatatgatccagtgaatccactccttggtttatatccagaagaatgaaacatgtattgtcttttaacttgggaatagataaataaaatgttatatgtataaatacacacacacacacacacacagtataatattattcagtcataaagaagaacgaagtactgaaatgccctataacatagatgaaccatggaaacattataagtgaaaaatgtcagtcacaaatagccacatattttgtgtatatgaaatgtccataatattaatattataaacacaatgtagatatgtttttttaggatctggttatagggcatagaaggatggagagtgattggtaataggtacaggatttcctttttagagaatgaaaatatcttaaaattaatagtaatggctgtgcagctctgtgaatatactaaaaatcacttaattgtacaattccaaagggtgaattatggtatgtccattatacctcaataacaccatcaytgaaaaattgtattagacagtattgatgacgtcaatgagacagtgcagcaagctcatgcatct

SEQ ID NO: 637926 - DNA, 675 bp, Homo sapiens
atgcttcattatacacttatcccttttgaaattcaggtcccactgaccagcatttacatcaacacagaacttcagactgatagactctttaagtcttacaagaaatgtttacaatctatcctgtctgaatcctgtaacctgaaggcttcatctacatgacaaaaccctggtctccacaaccttttatcataacccaggcattcctttctattgagtccaggcattagataataactccttcacccaattgtcaatcagataattgttgaatccacttttgrcttgtaagacctcacttccagttgtctgacctttccggacagaaccaacgtacatcataaatgtactaattgatgtcttatgtctacctaaaatgtataaaaccaaactttagcctgacaattttgggcacattttctgaggatctcctgagagctgtgtcacaagccactggtcacacatatttggctcagaataaatctcttcaaatattttacacagtttgactcttttggttgacctacgtatcaaaactaatggcaatccaacactagttataattaagatccttattaccttcttgggtaatctagttttgacctattaaccagatactgtttaaacaattttaagaaaagtatttgcctcattaaaattacttaattatttataaat

SEQ ID NO: 637927 - DNA, 388 bp, Homo sapiens
gatgaaaatagttgcagctagaaatattaacagacatgtttacatacatgggatgtcagctgagaagttattgaagcaatgacaccccagtagcaatgaacacacctagaagctaggtctttatttctaatatcattcttcaatagaaggacccaaagctccttgtaaaaatagctgatctaggacagaaccaaaacacaaacaagatgaaacctggagcaggttatactggcagagagtaagaaattrctaaacacaaagacacacacacacacacacacacacacacatacacacacaatgacaggggtatgtcaacgaaacaaggcagttacctaaagagttctcaatgtccaaaggtgaaatgatttgagcaataaaataaata

SEQ ID NO: 637928 - DNA, 426 bp, Homo sapiens
tctgcttttgcctgtatcacaactgttgtcccacacctctcaatggtcttccaaatctgtggctgtgctctcacttaagaatatattgagtttaccacttttcaaatggaaaaactttggtaaatcacttaatctacctgaaacttgttttctccctatgtaaaattggataacaattatactttaattcarattcctcccccatcaaataaatctaagaggaggatgaaggcgcaggaatttaatttgggacatgatcacaggaaacaggaatgagagagtgagaagagctgaatacggaataagaatgaaaaagagctgatagatataaacaatgaaagttcaaatccacaaggcctttgtaaaactgagagtcctcctagacctgttcatgtgaggaatgggcagctgagaattaatctacta

SEQ ID NO: 637929 - DNA, 620 bp, Homo sapiens
aaatacaaatacaaagacaaatagcaaacagataaatgaaaaaaaaatactcaacattaccaatcttcaaggacatagaaatcaaaaccaaaatgaagtatcatttcaacccagttagaatagctatcatcaagtagacaaaaaatgacaaatgctgatgaggatgtggaataaagtgaagcccttatgaaaactaatatagcagttcctcagaaaactaaaaatagaactatcatatgatctagtaatcccactgtcaagtatatatatattcaaaggaaaggaaatcaggatatcaaagagatgtctgcactcccgtgtttattgtagcattattcacaatagccaaaatgtagaatcaacagataaatggataaacaaaatgctgtatatatagaaaaaagaatattattcagycattaaaaaaatcctgtaattctaggcaacaagaatgagcctggagtatcttaagttaaatgagtcaggcacagaacatgcaagcatatgttctcattcataggtggaagctaaaaaagttgagctcatagcagtaaagagtagaatagtgtttattagaggctgggaaacaaaggggagaacgaaagatgaggagagggtgg

SEQ ID NO: 637930 - DNA, 617 bp, Homo sapiens
tataatatattcataacaacatgcatataaatatatggagtgtgttatacattgtgtttgagcatgtgcatgaatttgaaattagcaaaaattggaaatacagcatacatgagatcttccatttatcaaaccataatattgcaccagtactcttgtggactattttattttttctgttactcctattgctattgtgtaaattaccttttcattttcctagattctgcttttaaccatatttctggaattttaaatttgccattaaattttttaagcaattttaatcttcaattctgawtacatcacaaattataagtcagattatttaggtctctgtatgtaaagttgattcttaattggcaatattaataattcatagtagttgattaaaacaactacttaccctttttaaacttattttatatatgtaattacaatagaaagttatttgtttgcatcatggtaagtcacttttaaaattttctgaaagatttagtatttaatctacacattttagtttattttgtagacttttgaaatgtaatttaaatataagaatcaattttaaagtttataatttgattaattttggcatatatttcaatttgtgaagcctg

SEQ ID NO: 637931 - DNA, 392 bp, Homo sapiens
gtaggcctatgtcaaaatacctcatgtaatccataagtatatacacctactatatactcaaaaaaattaaaattaaaaaagaaagaaaaaaatcaagctagaatggagtgaaatagctgctaaaatcattgacaaatgaaagtatactaaaattaaaaaggattaaatatcagatcaaaatttttaaaaagcctcaaaaatcatctcctatrtttacaattactaagaaccagattccagtaatagataacatatatgtataaatttgataggtgagattatattttatttcttgcattttactttcaataggtcaaagcattttctttttcaaaaagtacacatcttaaaatgagacttttgatgcaatgtttgatcaagttgaatgaata

SEQ ID NO: 637932 - DNA, 660 bp, Homo sapiens
atcaaacaactccagaatttattaacaggttatattagttattaggtatattagttatcctattgctgctgcaaaaaattgcttcagatttggtggcctaaaacaacacaaaattattatcttacggttcttgaggttagaagtcaaaactggrtctcactgggctaaaatcttggtgttggcataaaggtgaattccggaggcttaatgggagaacctgtttccttgaactttctaagtactagaagttgtgggtattccttagcttacgaaccaaccagccttcacagcaccctgaactatctgcttctgtcttcacattgccttctcagactctgactcacatgtttctctatttcatttataaagacccttataattatatgagactcacccagataaaccagataatctccccatatcaagatccttaggtaatcagatttcaaagtactgttttccatgtaaagtaaagtattttcaggttccaaggattaggacatgtacatctttgggaaccattacctgtggtagaagtttgaatagattcctttatcattctgagatgtgaatatggggtgttagtataaacgtaaggttgtttttgggattgaatgaaataatgtgttaaaaagtgcctttaaattatgcaccagcaca

SEQ ID NO: 637933 - DNA, 660 bp, Homo sapiens
atcaaacaactccagaatttattaacaggttatattagttattaggtatattagttatcctattgctgctgcaaaaaattgcttcagatttggtggcctaaaacaacacaaaattattatcttacggttcttgaggttagaagtcaaaactggatctcactgggctaaaatcttggtgttggcataaaggtgaattccggaggcttaatgggagaacctgtttccttgaactttctargtactagaagttgtgggtattccttagcttacgaaccaaccagccttcacagcaccctgaactatctgcttctgtcttcacattgccttctcagactctgactcacatgtttctctatttcatttataaagacccttataattatatgagactcacccagataaaccagataatctccccatatcaagatccttaggtaatcagatttcaaagtactgttttccatgtaaagtaaagtattttcaggttccaaggattaggacatgtacatctttgggaaccattacctgtggtagaagtttgaatagattcctttatcattctgagatgtgaatatggggtgttagtataaacgtaaggttgtttttgggattgaatgaaataatgtgttaaaaagtgcctttaaattatgcaccagcaca

SEQ ID NO: 637934 - DNA, 310 bp, Homo sapiens
atctgaaaaagagaacaaaatatatcagagtcatgttagtaagtgacagagcagcagcatttggtaaaatttttctaaaagattaagaataaatgttttactatgcrataaaaattcatgtatgtccaagagtagttaaattaggaattaataatttaatattaaatatattttactgaccctaattctcaaataaaactcatatccagaaaaagaaatgatctggcatgtaaattttaaaaagtagtaattatattatgttataaagcacaggtctccccacctactttcaaaattataggcacctgga

SEQ ID NO: 637935 - DNA, 419 bp, Homo sapiens
cctcagcctcccaaggtgctgggactacaggcgcccaccaccacgtccggctaattttttgtatttttagtagagacagggtttcactgttaaccaggatggtctcaatctcctgacctcgtgatccgcccgcctcggcttcccaaagtgctgggattacaggmgtgagccactgcccccggcctatctgaacttttaaggcatggttatttttaaaatgcagatttaagtttaatcaaggcatgatttaaaaagtctgttatcctcttgagtggaaaaatatttcataaataacataaaacattgatctaacattaattagatttcaaaggaatgttttctattaattgttttcaaattacattaaaatgcatattaaaatcaatacaatttttacatgtagcaatatgcttaactca

SEQ ID NO: 637936 - DNA, 576 bp, Homo sapiens
tgtggctgccatttagaattgaagaagagagcccctgtaagaggcaaatcctctaatctgttcaaagataatagtgacttggagtagaattgtcatcaaaaaagttttatgaactcaatagatatttgctagatttctgaggaaaagacaaccccttgaaaaggatttgaatatatagagagaagagtcaaagatgtctccatagctttgttttaggcagctggaccagaagggtgtttacaacttttgaaatatagaaagttaggagacgaacttttcaagctatgcaaaaataagctagattttaggattttgagctttagatgtttctaatacatcagcatagacgtaatacattggacggaaaacctcaaattcagggatgagatctgggatagtgttattgggttgttgtagtaccacagatggctggattgtcaaagcagatgcacaaggataatggatcttgctcagcrtcaaacttccccaatgattagtgaaagatataaacaaaatgtagggacatttcagccttacaacattagtctttcaaatagcctcaaagccaacagatac

SEQ ID NO: 637937 - DNA, 596 bp, Homo sapiens
ttaagtataagtaatattgataatactaattcctaataaagaataaccataattttgtttacataacactccagaggtaaaattcagattattctaaacaaaacatggatgatggtaagtggggggaatcttaaggggagaaaagtcataagggcatggtgataggttctagatattgaaattttctcaacattaatttttaaaaatgtaagtttaagtgttattgcttaaaatatgagtaactactagcaaaagaaaaatatatacgactccaaaactagatttttttaaaaaaacataacaaatagaactcactataaggtatcagggaaataagcmaacatcagttatcacaaacaatgggatgtgttcaactttcctttttttttttgagacggagtctcactctgtcgccaggctagagtgcagtggcagcgatctcgactcactgtaacctccacctcctgggttcaagtgattcccctgtctcagcctcccaagtagctgagactacaggcacacgccaccacgcccagcttattttttgtattttactagagatggggttcaccatgttggccaggatggccttgatc

SEQ ID NO: 637938 - DNA, 594 bp, Homo sapiens
ttcttgagctgggctttaaaatgaagcatgtagaatttttaatttggtggtgtagggaagacaaggtaaattcaaaatcatccgcgagcaaggagttgggctgtracaaaaacaacctttgcgtctgctgaatgttgtttcccagcactgtgcctctggaccagaatggatttggtctttctctcccaggccaaaaatgtttgaaagttttggttttggctactatatgatagctgttttcagtagtaaagggattattctgagaggcatacaaatgtgattgtctcacagcagatggtgcgcactgcttcacctttgagaaaagttaattaagccaagcatattgtgcccatagagaggaaaatgtagatgaatattgagcaatcaaactcagtgtctccttttttcatgcctttgcaatgggacacagaatcccattgaaaaagaattatgtacagaatcaaattaattcacatccaactttactctcttcccacgttttaacaggggtgcacaccaggctcttcagaagttttgtccacaatcaatgagccacactgcggtgtccactaaattaaatgaaccagtgcagaa

SEQ ID NO: 637939 - DNA, 512 bp, Homo sapiens
atgaagcaggataacaatttagtaaaaagtagttattaaacattccttaggtactcactattgtgggccacactcatgtttactttatgatcatattcctctcttcatagggcaggagcccttggaggctgtttggaattgggcccataacagaagtggtcaaaacttgcctcgttgctgacttgaaggatgtaaagaacaaacatttaaaaattgcttaatagattttggaaacttgtttccgaagaggataatcctggcctgggagtaaggactattgtgttgcagtcctgactccaccaacaagcagtgtgtcaccttgggcaagtttccctgctcttttagaggttggaaaagtatagatttattgctcagatagagagtgggcaacatgagagaacaacatgagaagaatacattaatattwtaatagtgttcagaggcataagcatgaacaattgtagaaaatatgtacttgagggaaaaataagtttatcattgagaatgaattc

SEQ ID NO: 637940 - DNA, 550 bp, Homo sapiens
ttgtgcttttggggtcttagccatggccagaccagcatcctgaagagtttttctgttttcttctagtagttttatagttttggtttctacatttaagtctttaatctattttgagttgatttttgtatatggtgagagatagggctctagtttcattcttctgcatatggatattcagttttccaagcactctttattgaagactgtgtcctatycctaatataggttcttggtgcctttgtcgaaaattagttagccataaatccatgtgtttatttctgggttctctattttgtcccattgggctatgtgtctgtttttataccaatatcatattgtttggttactatagcctggaaatatattttgaagtcaggtagtgtgatacctccacttttgttctttttgctcagaattgctttggctatctgggctctttttggatccatataaattttaggattatttttcctatttctgttaaaaatgtcattggcattttgatagggattgcatttaatctatagattgctttgggtagtatggtcat

SEQ ID NO: 637941 - DNA, 559 bp, Homo sapiens
ggaaacgggtactggtgggcatttaggattaagaatacacaaaaggcttcaaacgagtggtagctggacaggggttaattatattattctttatacatttttatctttataccttttatatacctgaattatttcttaataaaaactactcacatcaatcagcaaaagtatcaaacgatattgatggcaggggagtttacacctctgtgaggttggaggtatataggaactctctgcactttacatttaatttttctgtgaacccaaaactgctctaaaaataaaattttattaatcaactaaaggaaaaactatttgtcattagcctttatatgttctgtatagcccatggatttcataataatttaatattaaagaaacgacggtaggagaatcagcctaaaaggcacaatatggagagttgaaagaaagggacwtgagaaagaaaactaagttgtaagttcagcacatcaaggccacacctccgtgatgtctgtatgtatggtgggagtctgtatgcacgtatgtgggcatggcatgtgtggaagcttgctttaat

SEQ ID NO: 637942 - DNA, 556 bp, Homo sapiens
ggttctagttcccactgtgccatttactaacttggtgtctttagcaaagacaccttatgtatctctgttcactcacttataaccctaggaagttggtagaaatattaatatttaccatttttgagtatctacttggttggcaagtactaaacaaaggcatctcacacatttatccctaaaccttacaaaaagctctaagacatgcattgcctagcccatttcacagatgaggaaactgagtctcagraaggttagtaaattgcctgatatgaaacagctagtcaagtgacgaaatgagttctgaattcagtattggtctctacgtgcacatggatcatatgtgtaaatgctcattattacataaaggatagtcactgcttcattctaggaaatcctgtatcatctttctataaagaatttaggtagttaagacttgccatccctccacccctctaaaacagagtttattagtgctcactaaatacccatgtgctcctttgctttcccaaatgcccttgtagtttacgtgcctatgtgctagccaggaagatgtggt

SEQ ID NO: 637943 - DNA, 598 bp, Homo sapiens
gaggggggaagtcctgctgagagacattttcacattaaaaggtgctaaaaatgggctagatctcctcacagccctgttggaagcctccgttcaatttttagtcatttcctccctgtccccagactcggtgagacagaggaaaaaggagaggctgtacttccacgctcatccacccagcaattcgaggaaagattggaaagggaagtaaatcttgtccctcccagacattttcagatgattgcagagagggaagttgagatagagaagggaacaataaaaaagattagaagccttcttaggactctccttaggcaaagacctaaaataagttaaaaatcacacgaagcaattctgcttccgaagagctatgtggattaggcctttgctgatgctcggatactagaaaaaaaattgaaattaagcatgcataaagatacagcattagatatatcctctcctacaaagctatcagtaccgtctttttagtctcataaatagacattcactaaacatgggaatatcggagtccacagtcaagagccttctattagtacttayggagtcagaacttcccatggaagtatcatggcctctgcat

SEQ ID NO: 637944 - DNA, 593 bp, Homo sapiens
atgatgtatttaagaataatgtgcaggaaactataactgtgtaatataaacaagagaacaaaataaaagtgaatggccactgtttacagaattaatataaatatgaaagaagaataaataggtatgttagagactttttcaagttttacagaactcaaaattatttttgcatacaggcatcacttagttatcagaacagccygataagatatttttacagatgagacacagacactcaataaatcagagacattgcataaaagtctgccccctcttctagggtgattttattatcagaggacgccccactcctatcttttcttcaggcccagcagtgaatcttgagatgcaagaatctgctctatcacccctttacagctgactgtatccaagagggtgagaaatactggttaatggttccccaggctcaacaattatagccttcaacaaagaaacactgagtattaacaaaaatcacacccgtttttgattggataacaaaataacaaaatatgcaaagcagttatgttacatttttggtatttaattgggcacaatattaaattttattttactgcatattagtaatacca

SEQ ID NO: 637945 - DNA, 610 bp, Homo sapiens
actttatactttagggtatttcccaacaatatttattttgtttctcaagttgttccaaaaatagttatgagagctctttcagttgactcctatattctttggttatacacccaatattgtgggtcttctttctttgggcttttgtctctctctctttctttctttgatgtacacccatcattgtgggtctttctttaggccttttttccctctctctttctctttcttttcttttctttctttctttctttctttctttctttctttctttctttctttctttctttctttctttcttttctgtctytctttctatctctatttctcttttcttttctttttctttttgtagctgttcttttccgtctggcattctaagatgctccaggttcatcttgcatatttactgcctccatctttatatcagctatctgctttgttgttgttgttgtttttggagacagggtctcactctgtcacccaggctggagggcagtggcataatcttggcccactgcaacctctgctgcctgggtgcaagctattcctttgcctgagcctcctgagtagctgggattacaggtgcacgccaccatgccaggctctttat

SEQ ID NO: 637946 - DNA, 574 bp, Homo sapiens
gaatttacaaaaaggaaatcaggaaccaacttaacattctgagcattttagttacaaatcaatccttgattactttctcatcatttacttagcatttattataagcaatataggattctaggcatggtggtgcttcaaagacgyacaaatcatagcctttgtcttagagggccttacaatttcccgatgaggcaccggtgtcatctctgtcccacaatactttctgtcaaatctcggattagacactttgcctctcagatttccatgttcttcctcagtaaaatgatggtgttggactagatgagcttttcttctctagcattctgcaattggatgaaacaagtggcccagtcattttccttcttaacatacttctgcccctctatgccccccaacatttgtttgctgtcatagacaaagcttttaacactaaaccaagtctgctaagatgagattttgacactcaccacacctagtgccaaagaaagaggaagcctccaagaagtctaactgggggacttgtcattctgcaggcttgagtgaataaaaaattagctgatacccagtggcagga

SEQ ID NO: 637947 - DNA, 578 bp, Homo sapiens
ttttgatattggaagagttaaaacttatgagttaatgccattaattacaggatagtgccaagttacatctctctggctcctgtccccaccgtaaattgtatcccatcaatataattgacattcaaaaaggtggcatataagaagattggctaaatcacgttcagagagaaaccttggtatgaattctagaagattatgtgattattcaaccttttcataaagtacacaacagaatagaggagtggacaagcatccaaaataagatgagtcaygtcatctaattagaagcatcctgccacaatcatgacaattctgaaatattgtgctttatctgtaacatttaggtacatttttaatgcaattcccactactttccattaaattaagctgacttcagggagataatctctgactgtctgtggcattctgcatccctcgcatatggttggatacccttgtttgagttattggtggtgaaattaccagacttttgattcaaatagcttaactgcaaaggtttcacttgggaaatgagtggtcttatgcaagtttctttcccactctaattttcagtttta

SEQ ID NO: 637948 - DNA, 488 bp, Homo sapiens
agaaaaaaaaaagcctcttaggtggagagcagggtatcagcattttcaaataaaacatggacgaatattaaaaccagcatgaccacgaaatgctgagaaggcttagctagtgaacaacaaaggtagccagattgctgattcattttcaggcagatctagtttggacctcactctgcttcagttcttatcagtctggctgggttagccctgtgctcaggcaggtgcataaaagmtcctaaagtaaacccatatacagtcattaggaaaatgaaccaggtccccagggaagcattgtgatatacagtgtctgagcttctccaatatccttatgtaataaggtgccttataaatgttattagctgcaggttttatggcaaattttatgctattttgattatgatgccgctggatgacagctagtttacgttgcttaaacatcctccgtatctaatgtcgagacgaaactaattagctataaccatgaaaat

SEQ ID NO: 637949 - DNA, 494 bp, Homo sapiens
ctcacgtgagatgggtgcactttccaacaaggaatttaatgaacagaatgcagacatgtatatacttgtctttcattgccttaaatagtctcccctatatttaattatttgaagtgaaagttctgctttaaataagtattagaattaacccaatgagaaacacagtttctccaaaaggagaacaagaatcccgattgcaatatatccattaaaatgtccccacaaactgttccaatctaaattatctcaggctgctgtgtctttccagccttattgatttgaaaaataacaracaagtataaatgacatttacagctcttaattggtgtcattagcggttcttattattctgcaggacaagcactaaccctttattgagaattcagtgatgcaggtctgcttgggactcatcagccttaaagacaagtaataaaacagctgagtgactgacttagagcgctattcatcaacaaaggccacaggcagctgggccc

SEQ ID NO: 637950 - DNA, 609 bp, Homo sapiens
tatttacgtacacatttactttatgaattctctaaggcatttgaaaagcttattctggtcctctctcccttgcttttttctaagtcctcttcctctgttgttacttagtacgtgctttgggaatgcaaattagtttctttgacattagaccaaagtgaaacataattagagagggagatcaaagatgcatcctgtaatacgtctcaaggccaaatatgaatgatttctgagtgatctgctattttaccaaattgtgtcacacagataatcaaaagttatgctgccacatttaatcttccattaaacccggcatcttgagaaggatagtgttaagtctgtcsaaaatagtattgatctcctttaactcattgcaagtggactctgggttgtcagattaagacttggtctgaaagctaaagagcatagggatactttaaaagacataaacagaaataaaaagtgaaaagcaataaaaaacaaagcactgactagaatcaccagctctcatgatgccttcggaatctctttggattggcaagagggggaggtattcatagcagtatcaggaaggaaggactattctgcataattttctccccggcttggcat

SEQ ID NO: 637951 - DNA, 540 bp, Homo sapiens
aacaaatggtgctgggataattggctagccacatgtaggagaatkaggctggatcctcatttctcatttatagaaaaatcaactcaagatggatcaaggacttaaatctaagacctgaaactataaaaattctagaaggtaacattgcaaaaacccttctagatattggcttagacaaagacttcatgactaagaacccaaaagcaaatgcaacaaaaacaaagataaataggtgagacttaataaactaaaaagcttctgcacagcaaaaggagcagtcagcagagtaaacagacaacccacagaatgggagaaaaaatcttcacaatctatacatccaacaaaggactaatatccagaatctacaaggaactcaaaaaaactagcaagaaaaaaacaaacaaccccatcagaaaatgggctaaggatatgaatagacaattttcaaaagatgatatacaaatgaccaacaaatatttgaaaaaaatgctcaacatcattaataatcagggaaatgcaaatcaaaaccccaatgtgatg

SEQ ID NO: 637952 - DNA, 350 bp, Homo sapiens
ctgcaggattgaatgagttttgtctttcataatcttaaccttccacgatcctattctgtctttgtccttaacatctggcactgtgatgatctctcaggcttaaaaaaaaaaaaaaaatgagctggcaatctactacttattaaataaatctaaaatatacttyccatggatgttttacaaatagaatgattgcaattcttcctctacctcccccacttcaaaccaaggttttacattattcaggtcttccctgcatatcagtattttttattcttttttttttttgtcttatgtgtctgactttgaagatctatagctcctttcaacattcaaggtctttgggcctctta

SEQ ID NO: 637953 - DNA, 350 bp, Homo sapiens
ctgcaggattgaatgagttttgtctttcataatcttaaccttccacgatcctattctgtctttgtccttaacatctggcactgtgatgatctctcaggcttaaaaaaaaaaaaaaaatgagctggcaatctactacttattaaataaatctaaaatatacttcccatggatgttttacaaatagaatgattgcaattcttcctctacctcccccacttcaaaccaaggttttacattattcaggtcttccytgcatatcagtattttttattcttttttttttttgtcttatgtgtctgactttgaagatctatagctcctttcaacattcaaggtctttgggcctctta

SEQ ID NO: 637954 - DNA, 589 bp, Homo sapiens
atctgaaaaaataatctgaagtgtttggtgaacaaaaaccaaactatgcttatttatgcacacaaaatggatgtgcgtatgtagaggcatgtggatatatgtgtaaagacagaactaggttgtatttattttacagcctgaaaaggctttgatgatgacaattttgagtaaattttgatagaatgggaggtggtctgttctgttctgttttagctatgaataacaatgtaccatttcaaacctttttattgaaaataatatttgcaactatagtaagtcagattctcaggtttgattttccctatcactattatcaccaccattctcctccatttggccagcaatacttgctgtctttctgattagatggaggctacaactgattagcaggttggatacataaatgcaaacagtagctttagctttcctataacaaataggcaggttctccatatgaagctaatggtaagcatgcaggtgtgcaaatgtacacaacttcactggcccacatgtrgtaagataacatacagatggcatattcattgcattataaacccagctgaagttcaggtacccagaattttacaaa

SEQ ID NO: 637955 - DNA, 527 bp, Homo sapiens
aaagaagggaagagtatagaaggctagaaggaaggaaagctgtctgatcagccagccatggtggctcacacccggaatcccagcactttgggaggctgaagcaggcagatcacttgaggccaggagttcaagaccagcctggccaacatggcaaactcctgtctctactaaaaatacaaacataaactgggcatggtggcgtgcacctataatcccagctagtcaggaggctgaggtgggagaattgcttgaaaccaggagatggaggttgcagtgagcgagatcgtgccgctgcactccagcctggggracagagcgagacttagtctcaaaaaaaaaaaaaaaagaaaaagaaaaagaaattgtctgagtgccttgacatttcatgaatccagggagtccaagtctgagaagcatggttctgtgtgaggagtggaaagccccatatggaactggcagagatttataggaaaatataggaggctgtatcactggaggtgagttataatttatgtgtaaccaaaata

SEQ ID NO: 637956 - DNA, 560 bp, Homo sapiens
tagaactagccttgtatcaaataaatctaaaatcaaaactggatgaacatgaaatttccagaatgtgtttattaatgtaaaattcagagaaaaaagatagacacaaaaataagagttaaagatcttataggaattcatgtttagtaacaaggaataaaatattatcaattttttaatattcagcttttactctttagtaaaggctaatcatttgttaatttgtgtaagcgccagtgtttaaaaattcagacatgaatgaaatgtgtggctggtttgtattgtttattgtaaattaaacagtctaaaatgtaaatactattggggaatataaaatctccttcattcagtgcaaataacactgaataaattaataaattgactagcctctctttaatatttacatgttataaaagtgtatttgtatgtgtgtgagtgtatctgtgcatatgtgaacacaagatattygaagcactagagggaaaataacttggttaaatagatgaagcaagtacagagcagaaacaaaagtggcacaagttaagaatacttttcaagtatca

SEQ ID NO: 637957 - DNA, 548 bp, Homo sapiens
tgggagaccagaaggtttaaaaagaattcattataacaactcaaatggaagatataaaataatctgtttcaaagagtagagactgttttccatcagcatttgtaacatgactcattatttcacaatttctcatccgcccttcctctattcctaccctcaaatgctctgtggtagaaaacttcgaccttgctgagagaaataataacacaacatagctgcaccatccatgagattaataccgcccaccgaaagaagcacctcaaccggcaaaatacaagtaaaatgcatgaacacactgaggaactctttgccttgttcaccttctttctaaataattcatcagtttaatgataatgacattcaaatatcataattacagctgactctttaaaaaatatcaattcygggacccaaaatggagcaaccagcccccactccttttcccaccattagctgttaatgccaaaatatgatctttattcatttcactgacataatataaaaccaatgtagatttcccattttttgtaaaattttcatctgcacta

SEQ ID NO: 637958 - DNA, 574 bp, Homo sapiens
aatttcttttgatcagagcggcttatctgcacactgtgtggggaaacacctattctgcctgcagataaggcctttgtgatgatgttttkgtgaataatatttttaaaataaaggggcctaggggctaaacatttttacttagcagacttagcagaaggaaactttaaattataatatttagataaaaattaaacatatcatttatgatatattgttctagcaacttcataagcaaacatggttttaaaatatatatttgggtatgaaattatccctaattactagagaaataactatcttttcttgttatttatgtgcacctgctgggcactatccttataataggggccattcaattacaacaggtggggtaaaaactgttcttgactctacctgaacagatcaataacaccatgttgggcctagaaggcattcaggtgagcccctagtcactagccatcattgaagatgacagaatttccatatacttcctccacgcagtccaatgtggtatatgtgtaatctctaataccttctactatatttgcattcatatcttgcatcaaatggaaag

SEQ ID NO: 637959 - DNA, 517 bp, Homo sapiens
taaacatatcatttatgatatattgttctagcaacttcataagcaaacatggttttaaaatatatatttgggtatgaaattatccctaattactagagaaataactatcttttcttgttatttatgtgcacctgctgggcactatccttataataggggccattcaattacaacaggtgggktaaaaactgttcttgactctacctgaacagatcaataacaccatgttgggcctagaaggcattcaggtgagcccctagtcactagccatcattgaagatgacagaatttccatatacttcctccacgcagtccaatgtggtatatgtgtaatctctaataccttctactatatttgcattcatatcttgcatcaaatggaaaggtcaatacaaaaacttaaggagaaagccacctgagtttctaaggtaaatcctaaaggtttatggtctttgttcagctggtaggcaacaagaactttgggacatcactgaagtcaatcactacaggctgacat

SEQ ID NO: 637960 - DNA, 517 bp, Homo sapiens
taaacatatcatttatgatatattgttctagcaacttcataagcaaacatggttttaaaatatatatttgggtatgaaattatccctaattactagagaaataactatcttttcttgttatttatgtgcacctgctgggcactatccttataataggggccattcaattacaacaggtggggtaaaaactgttcttgactctacctgaacagatcaataacaccatgttgggcctagaaggcattcaggtgagcccctagtcactagccatcattgaagatgacagaatttccatatacttcctccacgcagtccaatgtggtatatgtgtaatctctaataccttctactatatttgcattcatatcttgcatcaaatggaaagrtcaatacaaaaacttaaggagaaagccacctgagtttctaaggtaaatcctaaaggtttatggtctttgttcagctggtaggcaacaagaactttgggacatcactgaagtcaatcactacaggctgacat

SEQ ID NO: 637961 - DNA, 562 bp, Homo sapiens
aggaatgtcttgacttctgccagtatccatgaagatgtggcaggtaaagttgttagcctgcaaaaggggtaaaattacattcccttcagggttcctggtagcccctgatggaatagtgtagaatagacttcctttagcaaaccagtcatttggaggatcaattattagtatttcttrtaagttgtggctttcatacttgctatcaaggaatattcaatctgaatgtgatcttagaagctatccgtcattctacgtatgagaaaattgaagctctcgtttatttacctaaaacaacacacttagtggcagaatttgagcagatacttaatttttctgattttctgttggtgttcttctcagcatattccattgactataataaaaactaaactccatagtctactttagtctcaaaaaggtaactgatagataatttttagtgagtaaagtacaaaaatggggaatgaatattacctatcccctgtggtaacagggtaatgggttcacataacagtccaggttgacataggcctgggcttggatctagcagtgattttcaaat

SEQ ID NO: 637962 - DNA, 614 bp, Homo sapiens
atttaacctcatttctcattttcttttgagcctctacactcttatctctgaaagccaatagcttattttatgttttctcctcttggttactgtactcctcagaatagggtatgttatatacagtgtaacaaacaacctccaaatctcytaggcttaaaatgagtttcatttcttgcccatgctacatttccactccaagtcttctggaggttttctcctgctttatcctcacctgggactcaggctgactgagccccacaccttgaacactgtatattgtcatgacatcagttcttgcaacatttgtcttgaggtaattttgctaccactgacattttacctggcaaagtgtgtgccacggtcctaaccaacttaagaggagaaagaagtgtatatcatgtgccaggaaaaggcagaagaaatatgtggtgacccatgctaatgatagccacagttatattgacttagactcaaacttaaagttttggttgaatatttgctctcattccacagcttcacttcttatttgggatattctaattatttacattgatgatttttttccttactccaaatgattcaatgcattacagtggggaattattgcatggtgt

SEQ ID NO: 637963 - DNA, 398 bp, Homo sapiens
tatagcaccccccgcctccacccgcagtgcctagctcaggcttatgtatatagcagcttgtgatgagtatttgttgaaagaatgaaggaaagaatcaattcatcactcasataatcaggtctttagctgagtagcaatgggctactatttcaaagatataataattgtctttcacacaatcttttgtggagagaatatacaatctgtgtgattaggaaagtctttctcccacttgattacctattttaagtaaaatttacaccatttcttgaggttttctgctcagattagatcaaattcaattggcttcttgatttacacccctattagtttctgcctctgtgatgcatattatgtatacaaagaaaaatgtcaaagtctttgcccccaaagaattc

SEQ ID NO: 637964 - DNA, 574 bp, Homo sapiens
ccgtgcttcctatacagcttgcagaactgtgagccagttaaacctattttccttataagttactcagtctcagtaattctttatagcaatgtaagaacagactaacacacctttaaaggaaaaacatcttcacttaaaatatagcaggcaaaaaaagagaaaatattacttgggagtaaataacaacaacaraacaacaaacaaggcagtgtttctgtccatcttaattttaatttttcaacttatgaatattcagaaacatagaaaatgtttccaagtcagccacacaattctttcggtcgtgggccataactctgataaaaattgtacccctattttgggaaataattgttcttcatggcaacaacagctcaacatttggaggggtagtctttggagaggtttcttgatggtccactttagtgctatcagctacaattatcttattatatattcagtattttctttatatcacttcttggaattatgagatttgtccctctattttctaatgattgaatatatattttctccattttttttatttttaaacttgttaaggcctaaatatatg

SEQ ID NO: 637965 - DNA, 587 bp, Homo sapiens
ctgaagattggttgatcccaggatgcggaaccccagatacaagggccagctgtatcttctttagttggagaaacaactgcaaatcaacacataaagcaggtagacaaaagaattagaatatgattaagtctctgagtgargggtacaaatttacaaaggggagaaagattcctgaaggacatgggtcttgaactggtatgtgagagattgtcaacaaatgggtatgcagaaaggagagcatgagggaaagtaggaggagagggagagagaaaatatgtgaatttttcaggtgatggaaacttccaagtggctggaaatgtatatgttctcactgcaggaagcaaagcagttaagcctgactgtaatgggaggagtatagagggagacaaattggataagtaaagttagggtgacattgtagagggctttaaaagccaggctggtgaatttggagtaacttctccatgaaatataataactaacctcactttgcagatgaaagatgagaatttggggtcagtcaatctcctatctccaatgattggttctaatgttaaagttcccaatcacaccagtgaaatgcacag

SEQ ID NO: 637966 - DNA, 615 bp, Homo sapiens
gcactacatcctagtcgtgcatgttaggaccacacatacattttcataatttattacattatcgtaattttagcccttaattaggcttgcctttcaatttatagtttagcattattagttgtaaagacaattttgtattctgtattttgtttttgctttttttttttttttttgagatgaaatctcactctcgtccaggctggagtgcagtggcacaatcttggctaactgcaacctccgactccctggttcaagtgattctcctgcctcagcctcccgagtagctgggattacgggcacaggccaccacgcccggctaatttttgtgtttttagtagagacggggtttcgccatgttgrtcaggctggtctcaaactcctggcatcaggtgatccgcccgtctcggcctcccaaagtgttgggactacaggtgtgagccactgtgcctggttttctgtattttttaccttaatttactgatggtgacacaagatttactggactatttttgtcaagaaaagacttgtttttttccaaaaatagcagtgatagtcaaccaaatagtaacaacagatgttatttccaatagcataaaagcaaaatcatatatacta

SEQ ID NO: 637967 - DNA, 615 bp, Homo sapiens
gcactacatcctagtcgtgcatgttaggaccacacatacattttcataatttattacattatcgtaattttagcccttaattaggcttgcctttcaatttatagtttagcattattagttgtaaagacaattttgtattctgtattttgtttttgctttttttttttttttttgagatgaaatctcactctcgtccaggctggagtgcagtggcacaatcttggctaactgcaacctccgactccctggttcaagtgattctcctgcctcagcctcccgagtagctgggattacgggcacaggccaccacgcccggctaatttttgtgtttttagtagagacggggtttcgccatgttggkcaggctggtctcaaactcctggcatcaggtgatccgcccgtctcggcctcccaaagtgttgggactacaggtgtgagccactgtgcctggttttctgtattttttaccttaatttactgatggtgacacaagatttactggactatttttgtcaagaaaagacttgtttttttccaaaaatagcagtgatagtcaaccaaatagtaacaacagatgttatttccaatagcataaaagcaaaatcatatatacta

SEQ ID NO: 637968 - DNA, 588 bp, Homo sapiens
gtgctctgacaagatttgccatgagatgcttacataagtagccatagtgatcaaaccaggcaatccgggtactgtccacatgtcatagttacacatcattagcaaaaaatggagaaaatcagagaacagtccacggctatcataccagaagtgctataacaccatattcagcaacagaacacagggaaycgaatggtgagacacatttacaagtagatacactgacaaaagcaagttaagattatgtataaaatattagttccatgcatgtctatatcctgaggtaattttaaatttaaacattgttttatgtccaactataatttttttctttttaaatggttttattttatgtgcaaataatgagcagatgttgtatccataaattctactttccaaaaacaggagctttttaacagaaaaccacataataacttttaaaaggcactaggattcctctgcttctagatcattgctaggctagaaaaataaagttttttctaccaggaatcagaagttagaactgagtattctccaaagtggaaattctagagtgtagtgtcactccaggcaaagattattcagttc

SEQ ID NO: 637969 - DNA, 588 bp, Homo sapiens
gtgctctgacaagatttgccatgagatgcttacataagtagccatagtgatcaaaccaggcaatccgggtactgtccacatgtcatagttacacatcattagcaaaaaatggagaaaatcagagaacagtccacggctatcataccagaagtgctataacaccatattcagcaacagaacacagggaaccgaatggtgagacacatttacaagtagatacactgacaaaagcaagttaagattatgtataaaatattagttccatgcatgtstatatcctgaggtaattttaaatttaaacattgttttatgtccaactataatttttttctttttaaatggttttattttatgtgcaaataatgagcagatgttgtatccataaattctactttccaaaaacaggagctttttaacagaaaaccacataataacttttaaaaggcactaggattcctctgcttctagatcattgctaggctagaaaaataaagttttttctaccaggaatcagaagttagaactgagtattctccaaagtggaaattctagagtgtagtgtcactccaggcaaagattattcagttc

SEQ ID NO: 637970 - DNA, 588 bp, Homo sapiens
gtgctctgacaagatttgccatgagatgcttacataagtagccatagtgatcaaaccaggcaatccgggtactgtccacatgtcatagttacacatcattagcaaaaaatggagaaaatcagagaacagtccacggctatcataccagaagtgctataacaccatattcagcaacagaacacagggaaccgaatggtgagacacatttacaagtagatacactgacaaaagcaagttaagattatgtataaaatattagttccatgcatgtctatatcctgaggtaattttaaatttaaamattgttttatgtccaactataatttttttctttttaaatggttttattttatgtgcaaataatgagcagatgttgtatccataaattctactttccaaaaacaggagctttttaacagaaaaccacataataacttttaaaaggcactaggattcctctgcttctagatcattgctaggctagaaaaataaagttttttctaccaggaatcagaagttagaactgagtattctccaaagtggaaattctagagtgtagtgtcactccaggcaaagattattcagttc

SEQ ID NO: 637971 - DNA, 588 bp, Homo sapiens
gtgctctgacaagatttgccatgagatgcttacataagtagccatagtgatcaaaccaggcaatccgggtactgtccacatgtcatagttacacatcattagcaaaaaatggagaaaatcagagaacagtccacggctatcataccagaagtgctataacaccatattcagcaacagaacacagggaaccgaatggtgagacacatttacaagtagatacactgacaaaagcaagttaagattatgtataaaatattagttccatgcatgtctatatcctgaggtaattttaaatttaaacattgttttatgtccaactataatttttttctttttaaatggttttattttatgtgcaaataatgagcagatgttgtatccataaattctactttccaaaaacaggagctttttaacagaaaaccacataataacttttaaaaggcactaggattcctctgcttctagatcattgctargctagaaaaataaagttttttctaccaggaatcagaagttagaactgagtattctccaaagtggaaattctagagtgtagtgtcactccaggcaaagattattcagttc

SEQ ID NO: 637972 - DNA, 525 bp, Homo sapiens
cttcatgtccacatcctgttgtaactgctgtaccattttctcttccaactccttccctttgcctgcaagacgggcttgggtaagatggatgctttgcttgacttctttgatatcctgaactttctgtagctctttatttttcttcaatctgttcattataaatttagcttggtgtttctgtttgatctcttcaactctcttcattgcatcaatagttttattccatagctctcgctggtatttgataagttcatttctatgtttgtcaaattcaaatgaattatctactgtaagctctttaccagctgctttctggaatggtttggtccgcctaactttgcgaggattgcacttctttttaaagtgtttatgacatttagatttacaaaatccgaacactttgcaatcgttgtggatgaacawcatgtcatagccagggtagatgggccccgaacagaaataacacttctcgatgcgcatgttgaacccgtgtggttccccactgaccacacgctaagcttgaga

SEQ ID NO: 637973 - DNA, 593 bp, Homo sapiens
ctgtgtggacatctcacctgttccactcctgttttcttatctaaatgaactgggaatttgcagcaagagctgcagagccacagcatggatgatcctggaactctcaccactgaaattccttaccttgtctccataccatacctttagcttcaggcctagttcagggaagtcaaactcaccaggctctcatgctctcttcagaagcagtgtgcagggaatgagccccacaagaggtgtgggcaagttctagtcttcagcttcctcaagcacacaatagtacatttggtccgaatattctctaaggaaactccaagagctaaacttcatgggtcagtatgttttttaagtgattgtgcccaacaacattgtatagtatcaaaagcaaaacacttgcgtattctgccacaccttagaaaactgctggtgaaaatgtgtttcatttaaaatatcaccaaattgtatgcacactaatgacagttttgtaaaattatgtattatcgttcaagattataaaggaacrtggagctatcagaactttttgtgctggggacaggcacagtggctcacgcccgtaatcccagcactttgggagg

SEQ ID NO: 637974 - DNA, 520 bp, Homo sapiens
actactccagaattgtgtctarttttctatataagtcagaattgcacaggttgggatgagaagcctatattttttcctctctctctccagggaattcagaggcagagccatgcttgggaactcctggtgtaacttttcatttcacaggcgaggacatggaaagacttgcccacgatggtcaaggctgcaagctgttcttgacccttgctcttctagcagactcactagatccttcagccagtttatcatttgaatgcacgtttccaccctgcttcttgtactttcctgtgattttgtccccagcgctgttgtagaaagtctgtactaagaaggcgagacagtcctcctagcacaaaggccaccagcgtcattcattttgggctggtctttgggtcatgcaaatcctgccattggctcctagccaatagttaaattctacaaagacaagccagcacctacacactggcccaggaagctgggctaatcctttccctctgcccatgcaaactggagctgtggg

SEQ ID NO: 637975 - DNA, 520 bp, Homo sapiens
actactccagaattgtgtctagttttctatataagtcagaattgcacaggttgggatgagaagcctatattttttcctctctctctccagggaattcagaggcagagccaygcttgggaactcctggtgtaacttttcatttcacaggcgaggacatggaaagacttgcccacgatggtcaaggctgcaagctgttcttgacccttgctcttctagcagactcactagatccttcagccagtttatcatttgaatgcacgtttccaccctgcttcttgtactttcctgtgattttgtccccagcgctgttgtagaaagtctgtactaagaaggcgagacagtcctcctagcacaaaggccaccagcgtcattcattttgggctggtctttgggtcatgcaaatcctgccattggctcctagccaatagttaaattctacaaagacaagccagcacctacacactggcccaggaagctgggctaatcctttccctctgcccatgcaaactggagctgtggg

SEQ ID NO: 637976 - DNA, 520 bp, Homo sapiens
actactccagaattgtgtctagttttctatataagtcagaattgcacaggttgggatgagaagcctatattttttcctctctctctccagggaattcagaggcagagccatgcttgggaactcctggtgtaacttttcatttcacaggcgaggacatggaaagacttgcccacgatggtcaaggctgcaagctgttcttgacccttgctcttctagcagactcactagatccttcagccagtttatcatttgaatgcacgtttccaccctgcttcttgtactttcctgtgattttgtccccagcgctgttgtagaaagtctgtactaagaaggcgagacagtcctcctagcacaaaggccaccagcgtcattcattttgggctggtctttgggtcatgcaaatcctgccattggctcctagccaatagttaaattctacaaagacaagccagcacctrcacactggcccaggaagctgggctaatcctttccctctgcccatgcaaactggagctgtggg

SEQ ID NO: 637977 - DNA, 580 bp, Homo sapiens
tattgttggattctatttgtaaatattttgcataggatttttacaactattttcatgagtgagattagcctgaaataatcctttcttgtagtgggtcttttttgtagttttcagatctctgctgaaattatgtcttgcttttaatcttgaatatcataagcaagtcttgtctgctaactccagtatctggagttcctttaggtctgtttcaatttttgctagttctgctcttttttgctcatatagtattttgtctccacatgtggcctggctgtcttttttcttctcttttattttctttttttagatggagtctcactctgtagcccaggctggagtgcagtggtgggatcttggctcactgcaatctccacctcccaggtttaagcaattcgcctgcctcagtctcycgagtaactgggattataagcctgcgccagcacgcctattttttgtatttttaatagaggcagggtttcaccatgttggccaggctggtctcgaactcctgacatcaagtgatcacctgcctcggccccccaaagcgctgggattacaggcatgagccactgtgcctggc

SEQ ID NO: 637978 - DNA, 651 bp, Homo sapiens
tgtctgtgaccatgttggaaaaagtgttttagctgtaccatcacttagttacaactattctgattctgtttaatcatccacctaacttcatagaagttaggctcaagcttctattttcttaatgtttacatttttccaatataaaataatagaaaaaaattgctcattatactggggtaagtagtatcccctcaaaatttatgtgtacccagaacctcggaatgtgaccttatttggtgaaaggatctttgcagaataatgagttaagatgaggttatactgggttagatttgaacccaaatccaatgacttactccttacaagaaggccatatgaagatgctcagggaagaagggcgtgtgaagacagcagcagagaktgcaggaacacaactacaagccaggaaaccccaaggatgacagccaccaccagaagctaagagaggcaagaacagattctccccaacagcctccagaaggaaccaatcctatccaaacttcaatttcagatttctgggctcctgtgagagaataaatttctgttgttttaagtcacccagtttgtggaactttgttacagcagcagtagcaaactaataggctgattaaaggaaaatggaaattaacagtgaaaaggagagatgaatgaatg

SEQ ID NO: 637979 - DNA, 578 bp, Homo sapiens
ggaatccttgaccagctctatgaaatgtgagtatttagctggtagaaacaatccctggaatattagagcccattaaaataaattatccttgtttcaacctaggttagtgtctattatcaattcaagttaaacccaacatacaggacagaaggattacaatgttaaccattcacagtccccagtaagcaatgaactagcagtatccaccaaatgatatcaaaataaatcttcttggttttaggttacatyttcttgcctcttcacaatttagtagttttgattagttgttgggcactatgattttacacttttgagtattgaatttgttgaatgtatttgaagggtgatacaatttgtcctgacaggcaataaaattgcagatcaaaaagcaaaaaaggaatcttctaggcatcctcaaagcatttattaagtatctatttggtgaatcctagagtatataaaattacatataagtcataacatgtccttgttcttttcttttgctcactgcagcctcaacctcctgggttcaagtgatcttcccaagtagttggcactacgggcatgcgccaccaggc

SEQ ID NO: 637980 - DNA, 563 bp, Homo sapiens
gcactccagctggggagacagaatgagattctgtctcaaaaaaattaaaaaataaaaataaataaaaagagcctggtacctcccccaccccttgcttcctcctgccttgcatgtgawctctgcacacgccaactccccttcaccttccgccatgactggaagcagcttgaagccaggccaactccccttcaccttctgccatgactggcagcagcctgaggccacgccaactccccttcaccttccgccatgactggaagcagcctgaggccctcacctcatgcagctgccaagtcatgagattttcaaccataagaattgtcagccaaataaaactttttttcttcataaattatccagcctcaggtattcctttacagcaactcaaaatgggctaagagaaatatacttaatagtttcagaataataatactaatattattagtaatattataactactgaaaacagtttaagatttatttacaatcctatttatcctttggataaattcctctaagattgtacagtccaattcctctgttttaaagcaattaaagttcac

SEQ ID NO: 637981 - DNA, 591 bp, Homo sapiens
agcctcaggtattcctttacagcaactcaaaatgggctaagagaaatatacttaatagtttcagaataataatactaatattattagtaatattataactactgaaaacagtttaagatttatttacaatcctatttatcctttggataaattcctctaagattgtacagtccaattcctctgttttaaagcaattaaagttcacctcattcctgtcaagatggctaccattaaaaaaaaaacaaacgcaagtgttggcaggatacgtagaaatcaggatccttgcatagtgcttgtgggaatttagggagtgcaaagtggtgcagtctctatggaaaacagtgtggaggtttctcaaacaattaaaaatagaactaccttatcattcagcaatctcacttctggatatttctcaaaaaaaatgaaatcaggatctcgaagagatatcagcacttccatgttcattgcaacactattcacaatagccaagatgtggaaacaacytaaatatccattgacagatgaatgggaagccaaaatgtggtctatacatgcaatgaaataatattcagccttaagaaagaaggaaac

SEQ ID NO: 637982 - DNA, 513 bp, Homo sapiens
tggtttgggagaagcctgacagggtggttttagcctaggctctctcaggaggttgtgcttagatggcaaccgtggctrcagtcatttgaagcattgactggggctggaggatccagttccaagatggcacactcacagagatggctaatgcatgctggcaatgataggtctcagtttctcaccgcgtgcatctttccttgggctgtttgagaaccctaagaacatgttagctgccttctcccagaatgaatgatctgagagattgagaaagccacggtggtttttgtttgttttgtttattgtttttacaagctccccacagaagtcacatcctgttgtctttgtaatcccctgttggttacccaggtccaccctcttcaatgtggaaggggactgactacacaggcttgaacaccagaaggtggggtttgctggggctgtctcatggtctgtctaccacatttggccagcacctcgactggggctctttttatctttgaatagagtaaacct

SEQ ID NO: 637983 - DNA, 655 bp, Homo sapiens
cacatcctgttgtctttgtaatcccctgttggttacccaggtccaccctcttcaatgtggaaggggactgactacacaggcttgaacaccagaaggtggggtttgctggggctgtctcatggtctgtctaccacatttggccagcacctcgactggggctctttttatctttgaatagagtaaacctataacctctgaatgatcttcccatctctmttcaatttcattctctttccactgcaaatcccttacaactgcctgatgaatcttggtaaaatgcaactctgaaaaggtcatccttattctactcttttgcactctgatttttaaaaaatagtttaaaggtttcttgttactaagatgatcatataatttattatccaaaccagagcaattttgagaatgaaatgagatgctattagcaattacgcatgaaccagacatgtaaattagtactgccttgagaaatccaggacatatggtcattcttttgcctgctattaaaaataagaacattattctgtccatttttttatattggcaacagctttctagtttataattttctctcttactatcagcattgagattccttctgctctatccaatgataccattttgtgtctctcaaacatggccaggctttaacatattc

SEQ ID NO: 637984 - DNA, 560 bp, Homo sapiens
ggttttacttatccaagcagtcacgtatgcttgagtagtggttttcaatcttagctttccattacaaccagttaaatcgtgtttagaaattccaacatccaggctgcacctcagaccaaagagatgagaatctttgtgggtgagacccaggcatcagtattttttaaagctcttcaagtgattccaatgaatagccaaggatgaaaacccctgtgctcaaccaaagagccctggttaggtaataaagagacctaagttactcagtgaccttagagaagtttctttttctcttctgtgaaataggatctccttttaaaaatattttctgtcttgcagaactgttgggaaactcaaaggaggtatcagagataaaaggcaactaggataaagactagaagactgtaatctatttattagtagcttatatttagtagtagtaataacttggtcattctttgaaaaactgaggctggggtcgatgaatggacccagctgtggtacagaggaaagttcctttcmccctccttgctactccttggcttccctgacccaccagactc

SEQ ID NO: 637985 - DNA, 599 bp, Homo sapiens
ttcatctacatagctgcaaataacagyagcttgttcctttttattaatgaagagtattccattgtttgggtataccataatttatctattcacctgtagacggacttttggattttttctaattctgggctattaaaaattaaactgctaagaacatttaggtacaaatctttgcatagacatgaatttgttcctctagagaaaatactcaggagtgaaattgctcagtcgtatagtaaatgtatgtttgaaaaactatgagttttccaaagtgctttatcttagttaattttctcttaccatgacagaataccacagactggataatttataaagaaaagtttaaaaactatatttcttacagttctggaggctggaaagttaacttcaagaaggcactggtgagggccttcttgctgtgtcattgcatggcaagagagcaagagcatgccagctaaggtctctcttcttcttataaagctgccaattgcatcataagagctcaccctaataaccttatctaatcctaaatacctcccaaagagcccaccttcaaatagatcgacatattaattttgggattaatttttgaacacatg

SEQ ID NO: 637986 - DNA, 337 bp, Homo sapiens
caaatgtggagggaggaacatccatcccggtgtttagagcttctttcattgcttctatgagcagggcaaggattaatacatttctcagtgraggaagatcttacagacccaacctagactttttcctgaattaggagactattccccacactcctccctgtcctgctccaggacatcccatggaaggcacacgtgtgatgagtgaggccctgagccctcatttatttttcattccccagtccctgtgccagccctgactgtggtggtgagtgaaaacacagatgaattttggaaacatggtaagaagcaattatgaattccttgcctttaggagctt

SEQ ID NO: 637987 - DNA, 576 bp, Homo sapiens
cacaacactcagcatgtttgacctaatgggctgggcctttcttgttttactctgtgattatgcatggggcatgctattaattatagcttaattgtgtatttaaaaaacccaagtttattaacccattcacctactggagaacatctttgttgcttccagttttgatgattgcaagtaaaggtactataaaccttctcgtggaggtttttgtgtgcacgtaagttttcaaatcagctgggtaaatatctaggactgcagttacttgatcatgtggtaaaactatgtttagcatggtaagaaactctcaaaactattttccaaagtggctgtaccactttgcattcccagcagcaatgaatgagagcycctgttgctccatatccttgccagtattgtcagcttttctggattttagccatgctaagaggtgtgtagaggtatgttgtaattttaatttgcatttccctaatgacagatgctatagatcatcttttgatatgtttctttgccatctgtgtatcttctttggtgaagtgtctgttcagatctcttgcccattttttaagttggaccatt

SEQ ID NO: 637988 - DNA, 562 bp, Homo sapiens
caatagcttagtgtctgtgatttggtgagtcatctttctatggcaatttttcatttccgtgcagcctcttggagttgggttccgcaacttgcacctgcatgcagctaggatcttcaaagagctgcttcccactgagtgagcccagccagggagcccctgcccctccctcagagccatagcacagaagaggtgggtgtctggctgcagttctgggtgggcccgcctgcctgagcctgaggcagagggcagaaatgtggctgcaggagatggaagggtgtgagagagcccagagctgggatgcaagccctcctctcagcgcaaattcyggtgatgctaccttgcccaggtaggagatcattgaatctcttacccagaaagacaaagctcttgtcatgaggcaagggatattttaacttctatccatgaacctcccaatgaaaaaatgtagagttctgtcaaaacaggttagcatattagcaatcacggctcactaccatctgtatttgttccatttgtgccgtttatgatggttatccacattaattatttcactgctaaagtc

SEQ ID NO: 637989 - DNA, 561 bp, Homo sapiens
attcacgtaggctcacagctatgatgataaaaagataatttgtaaaaccagcatgtttgtaattactcattgacccatagacataaagatcaagctatgaataactccacaatagcagcaataacaatactagtgaataatactagtaactatttacaatagcaaagacttggaaccaacccaaatgcccatcaatgayagactggataaagaaaatgtggcacatacacaccatggaatactatgcagccataaaaaagaatgagttcatgtcctttgcagggacatgaatgaagctggaaaccatcattctcagcaaactaacacaggaaaagaaaaccaaacacagcatgttctcactcataagtgggagttgaacaatgaggacacatggacagagggaggggaacatcacacactggggcctggtggggggtggagggcaaggggtgggagagcattaggacaaatacctaatgtatgcagagcttaaaaccttgatgatgggttgataggtgcagcaaaccaccatgtcacatgtatacctatgtaacaaaccgg

SEQ ID NO: 637990 - DNA, 531 bp, Homo sapiens
tcccagtctcttggagaattaaggcctcggcctctccacctagttcagtgttttgagctacacattctcttctgacatgtggttacacygcactgtaataatacatgttatgacactgatatagaaaaagaaatgttcttgtctaattattttctgtttgggtggtgcagaagtaaaaccaagagacgttgaatcatcctcagtattattcatcactcttcctcaagcatgtcactctgtaaagacaacatatgaaaggggaaatgttaccctgttttattaaggaaaattatggactagaaaaagactgcttttttttttttttttttttaataagctgacgttgatagagaaaagttgagccaaatctctggaggcaggaatctcattgctgagcacccagcgccaccttgtggcttctcgcaggacagcgattccagcttccactcatttctctacccaccactaaaaacatttattgagcatttcttatgttccctttcacctgtttctctgctgagcctcttatct

SEQ ID NO: 637991 - DNA, 531 bp, Homo sapiens
tcccagtctcttggagaattaaggcctcggcctctccacctagttcagtgttttgagctacacattctcttctgacatgtggttacaccgcactgtaataatacatgttatgacactgatatagaaaaagaaatgttcttgtctaattattttctgtttgggtggtgcagaagtaaaaccaagagacgttgaatcatcctcagtattattcatcactcttcctcaagcatgtcactctgtaaagacaacatatgaaagggraaatgttaccctgttttattaaggaaaattatggactagaaaaagactgcttttttttttttttttttttaataagctgacgttgatagagaaaagttgagccaaatctctggaggcaggaatctcattgctgagcacccagcgccaccttgtggcttctcgcaggacagcgattccagcttccactcatttctctacccaccactaaaaacatttattgagcatttcttatgttccctttcacctgtttctctgctgagcctcttatct

SEQ ID NO: 637992 - DNA, 531 bp, Homo sapiens
tcccagtctcttggagaattaaggcctcggcctctccacctagttcagtgttttgagctacacattctcttctgacatgtggttacaccgcactgtaataatacatgttatgacactgatatagaaaaagaaatgttcttgtctaattattttctgtttgggtggtgcagaagtaaaaccaagagacgttgaatcatcctcagtattattcatcactcttcctcaagcatgtcactctgtaaagacaacatatgaaaggggaaatgttaccctgttttattaaggaaaattatggactagaaaaagactgcttttttttttttttttttttaataagctgacgttgatagagaaaagttgagccaaatctctggaggcaggaatctcattgctgagcacccagcgccaccttgtggcttctcgcaggacagcgattccagcttccactcatttctctacccmccactaaaaacatttattgagcatttcttatgttccctttcacctgtttctctgctgagcctcttatct

SEQ ID NO: 637993 - DNA, 620 bp, Homo sapiens
agtggtatggtttaaatgtgtcccgcaaaatttatgtgttggaaacttaatgcccgatgctacagtgttgagaagtgggaactttaagaagtgattaggtcattagggctcatgaattgattaatggatggattaataccgttggatagaccaatgctaataaatggattaattccatgacctcaaagtgggttagtcatcatggcagtgggtttccaataaaagagtaagttcagcccccttcgtttctcttgctctcttgtgttctcttgcccttccaccttctgccatgggatgacacagtaagatgtccctggccagttgctaccactttgccactggacttcccagtctccatagccatgagccaataaatttctattcrtgtaaaatacccagtccatgccattctgttataacaacacaaaacaaactaggacactagactaaggtagtaacataatatccaagttttagctgggaacacactacccagctatagactagatgttccacctccccttacaactacctgaagccttatcaaagtgatatgaacaaagtaatgtgtgcttcttctgggtcacattctttaaaaaaggaaattgcttactctttat

SEQ ID NO: 637994 - DNA, 558 bp, Homo sapiens
aatgtaagtgaaatatcaattgatcagttaggcacaagtccagatatcagaggagaggtctggactgaaaatrcaagtttgtgaatagtctccctttcacgtgtggttggtaattaaagtctctgtgtgtgtgagatggtctaaggagaaggaagagagtgagaagagaaggatgcctgtggtaggcagcttctaaggtgaccccaattatctgcacctcctggtatttttgcccatttgcaatcctctccactggaatgtgggctgaacctagcgactcatttcaaaaatatataatatggcaaaagtaatgggatgtcacatccaagactagatgacaaaaacactggcttccatcttgaatgccccctctcagtcactttttttgagagaagtcaacttcatattgttagctgccctggggacagatctatgtagcaagggcctgaggaaggcttccacccaacagccagtgagggattgaggcccttagtccaacatcttgtaaagaaaggaattctgccaactacctgtgaaagagcttggaagcagattcta

SEQ ID NO: 637995 - DNA, 558 bp, Homo sapiens
aatgtaagtgaaatatcaattgatcagttaggcacaagtccagatatcagaggagaggtctggactgaaaatgcaagtttgtgaatagtctccctttcacgtgtggttggtaattaaagtctctgtgtgtgtgagatggtctaaggagaaggaagagagtgagaagagaaggatgcctgtggtaggcagcttctaaggtgaccccaattatctgcacctcctggtatttttgyccatttgcaatcctctccactggaatgtgggctgaacctagcgactcatttcaaaaatatataatatggcaaaagtaatgggatgtcacatccaagactagatgacaaaaacactggcttccatcttgaatgccccctctcagtcactttttttgagagaagtcaacttcatattgttagctgccctggggacagatctatgtagcaagggcctgaggaaggcttccacccaacagccagtgagggattgaggcccttagtccaacatcttgtaaagaaaggaattctgccaactacctgtgaaagagcttggaagcagattcta

SEQ ID NO: 637996 - DNA, 538 bp, Homo sapiens
tgtgtgtgagatggtctaaggagaaggaagagagtgagaagagaaggatgcctgtggtaggcagcttctaaggtgaccccaattatctgcacctcctggtatttttgcccatttgcaatcctctccactggaatgtgggctgaacctagcractcatttcaaaaatatataatatggcaaaagtaatgggatgtcacatccaagactagatgacaaaaacactggcttccatcttgaatgccccctctcagtcactttttttgagagaagtcaacttcatattgttagctgccctggggacagatctatgtagcaagggcctgaggaaggcttccacccaacagccagtgagggattgaggcccttagtccaacatcttgtaaagaaaggaattctgccaactacctgtgaaagagcttggaagcagattctacaatccctctcaagctttcagatgactgagccccagctaacaccttgcaacaccttgactgcagctgtatgagactctaagtcggaaacatctagctaagccaca

SEQ ID NO: 637997 - DNA, 530 bp, Homo sapiens
caacagaggaagcaaaagagaaaggggtgggataccaggctctttttagcaaccagctcttacgggaattaattgactgagaagccactcgcctctgagaaagggcattaatgtattcatgagaaatcttccctcatgaaaaaaacacatccattgggccccaactccaacactggagatcaaacttcaacatgagtgtcggaggggacaaacatccaaatcatagcaccaagtcatagaatccaagagaataggactggtcaataaggagggaatagtcaagagtgttgagatgctgctgacagatcaaataagatgagagaagaatacttgatggacattgagatgcagaagtcactggtgaccttaggacagaagccaatatctcaggactgatagccctggaaaacccaaccatttaaagtctctagaaaatatcctaagggtatatagcaastgaaagatttactcaaaaactaaagttcaataaaacagcaagagtctgtggaacttgagctatgacatgtgtg

SEQ ID NO: 637998 - DNA, 627 bp, Homo sapiens
gcaagataaaccaaagtccagatcatttaccagagataattatggtaagagtgaactaagaagaggcttcctggagtcaggtaaaatctattgttgagttccttcaaagtcttgcctttaaaactacctccgcaaaagtcctgcatttaatttgatcaaactgcaaagcaatttatgttccagtgcattgtttaaaacaatagagaaatcagatgacaattagtgaagggtaaaatctcaatgttatactagcagtcagacagtttaacaaagagatctaagaaagagacagtcaaagacagtccagctgagactagtcatgcaggatgactgtatgcatgcccgtggctaaactctctgaggagtgacattagaggcttcatattaaaggggaaataggcttcactaaaatagttcagccaagtcactagacaaataaacacacaaagaacmacaagaacaaaccatggagggaagacagactcactctccagcattcctaaaatatatgacctaaaatgtctgggtttcaacaatgaaaaaatgcaaagacatgcaaagaaatggtaaaatgtgccccatacctgggggggtagtagacaacagaaaatgcctgtgagatggcac

SEQ ID NO: 637999 - DNA, 565 bp, Homo sapiens
tttcatacccagtgggatgactataatcagaactacagacaataagaagtgttgatgaggatggagaaaaacgaaccctcataacactgctcgtggaaacatacaatggtgcagttgctttggaaaacaatctggcagttcccccaaatgagttaccatatgacccagcaattygtctcctaggtatatacccaactcctattatctggatgtttatgtcccctcaaaattcatatgttgaaatcctaacccctaagatgatagtattaggaggtggggcctttgggtggtgattagatcatgaggtaggagctcttgttaatgggattagtactcttacaaaataagccccaaagagctgccttgccccttccactgtaaaaggacatagcaagtgacaccatctgtgaggaacaagccctcagcacacaccaaatctgccagttcccttgatcctggactttcaagcccccagaactgtggcaaataaatgttttctgcttataagccacctagcctatagtatttttgttatagcagcccaacagactatgacaccaagaaa

SEQ ID NO: 638000 - DNA, 602 bp, Homo sapiens
gggctttctttttaatgaaggcagatgagaaatggcaagagcaatgatacttaatccagctaaatcatggtcacactcgtgacacagggcctccttcatgtccagcctccctcagtgcctttaagaagctacgtccacccacactgacaaagaggaaaaagaaaaaaacctcctgatgcatctcccaccttgtctaatcactgggacacaagcacccttttgagcatatttaggttaaaaaaaaaaaatgataaccctacagcaagatctctcaaccacatcacttttggggctggataattctatgctgtgggcactttcctgtgcattgtaggattcttggcaacatctttacctctacccactaaaagtcattagcaccaccctctgcatgcacacacacaattaaaaaaagcctccagatattgccaagtgccccatggcaggcaaaatcaccccaatttgagaaccactggtctaagccatacattctcagtgggggcaaaaatkggttctcggaggacaaaaaaaaaaaatcttatcttctctatgtataaagcatagatatatgtatagtacacaaacaggtatacagtatattt

SEQ ID NO: 638001 - DNA, 580 bp, Homo sapiens
ttatgatcctgtggacaagagcctccaatgactctccggggatgcctaatcacccctttataagaaaggctccaagagcaagatgccggactctcccatggggagagcacctgtagcctgttgtgttgcctgcccaccagctggagaggctgaccctactcagtactgagattaatgaagaatccaacctcagttccagcaggaggtgagcacacgatggcaatccctcccttctctgcacgcagaaagttcatcttccaggaaatggagagttatggttccttcccaccccctacccccagttgatgctttctgagagtcaaccagcatttattaaatgtgccgtctcattcggtcattcaaccccagaccataagtttcttgaagtcaggaaagtatcttaagtttggatcacagaatatattgttctaaagggcctttaggattcaccaggttcyagcttctctgtttacacctaggaaatggggtccagagggtgaaagagacttgccatgtgaatgactgcagagccaaggtctgggtcctgctccctggtgtcccacactgatctctctgctcc

SEQ ID NO: 638002 - DNA, 580 bp, Homo sapiens
ttatgatcctgtggacaagagcctccaatgactctccggggatgcctaatcacccctttataagaaaggctccaagagcaagatgccggactctcccatggggagagcacctgtagcctgttgtgttgcctgcccaccagctggagaggctgaccctactcagtactgagattaatgaagaatccaacctcagttccagcaggaggtgagcacacgatggcaatccctcccttctctgcacgcagaaagttcatcttccaggaaatggagagttatggttccttcccaccccctacccccagttgatgctttctgagagtcaaccagcatttattaaatgtgccgtctcattcggtcattcaaccccagaccataagtttcttgaagtcaggaaagtatcttaagtttggatcacagaatatattgttctaaagggcctttaggattcaccaggttccagcttctctgtttacacctaggaaatggggtccagagggtgaaagagacttgccrtgtgaatgactgcagagccaaggtctgggtcctgctccctggtgtcccacactgatctctctgctcc

SEQ ID NO: 638003 - DNA, 607 bp, Homo sapiens
gagtgagcttagttctgtcttcgtggaaagtaggtcaggaacggcttcatggtgttggcgacatttgagttagatcagaaataggggagaggtcttttgaaagaggctgttccaggtggagggaacagtgtggacagaggcacagacgagagcctggatggggaagagagactggcgtgagtaccagcatgtggaggaaagcaggctggggctaggccacagtggatattaagcacyagtccaaggaaatgatcaaggactgagaactttcatggagttttgcttgtcaagggcctgttataagattgaaaggactggattcatggattaaaggtatgtcctagagggagacctcttatattaaagcacgttttgataaattggttgtagaaaatgcccctcccttttctcgcacttgtgttatctgggtccattccctcttttgtctgccctcaatcacctgctccaaggtgtccaggctgaggctgaccatgagctcacactgcctccctgtgccaggttcatgcatagcacttggcataactgctgccctgaggctggaagggatgggatcagtctttattctgtgttgctcactgatgctcac

SEQ ID NO: 638004 - DNA, 574 bp, Homo sapiens
tgaatccaatgactccatgtctatgaaagtgccttataaaatgaagcatacaacccctgcctcagatttgctgaaaagattaaacacattgatacataaagcacttagcacagtgcctggaattcaagtgctctataaatcaatggcagctgctactttgtcacaaagtaatcatttctattaatgcatttattgttctgctgaagttgtatttgcagtcctgcagcacagcagactctgggtaaggaggcagattgggcctacctggtcaacagcaagaaccctcctgacttccacactcaacacctagagccatgcgccatgaaagagcaaaaccagcacctccctaccacctaataaaacagagagacaggccaggcacagtggctcacatgtgtaatcccaacactttgggaggctgaggcagaaggatcacctgagcccaggagttcaagaccagcctgggcaatacagtgagatcctttctttacaaaaaataaaaaattagccaggcayatgcttatagtcccagctactcaagaggctgaggcaggagggtcacttgaggccagga

SEQ ID NO: 638005 - DNA, 574 bp, Homo sapiens
ctattagacaagcagagatgtagagtaggccgttgggtattaagatgtagactagccgggtgcagtggctcacgcctgtaatcccagcactttgggaggcagaggcgggcagatcacctgaggtygggagtttgagaccatcctgaccaacaaggagaaaccccatctccattaaaaatacaaaattagccaggcatggtggcgcatgcctgtaatcccagctactcgggaggctgaggcgggagaatcatcacttgaacccgggaggcagaggttgtggtgagccgagatggtgccattgcactcaagcctgggcaacgagcgaaactctgtctcaattagaaaaaaaaatctagactaaagggaaggaaagggaagtggtcaaggctagttatataaattatataaatttggaagtcatggacatctaaatggtattaaagccagcaatgtagatgggtaaaatagaggtcaaacgactaactctcaggactctccttcatttagaggtcagggtcatatggaggatatcagctattcaagattagtaagagcagccacagaggtcagagga

SEQ ID NO: 638006 - DNA, 442 bp, Homo sapiens
ctttactttgtgccatttcttctattgccrtattaagccatcattgtctctagcccagaccactgtaacaatggcaaaacaattctctcagtatctgttctatcttttacttctcatccattctccacacaaatggccagaaccatattttaaacttcatgtgaacatgctatccctctcttcctcaccttttgggttagtcaattccaatagaatgaaaatcatttggcagcttctcatcgattcccactgtggcccacaaggggctgctcctgcctattcactcctctttatcctatcttcattttgagctactcttccttgctatcttgatgcttcagccacactcattgtccatctcctagactgtgtcgtgccccctcctatcacactgcatttaaatatgccagtccttctccttagagtgctttttatttcttag

SEQ ID NO: 638007 - DNA, 647 bp, Homo sapiens
gagcatttactaagggataggtactctgctaggtgctgtasaggcagtatttcatttaattctttcaaactccttgagaggtaagtattattgcctttattctgtaaaagaaaatactgagttttagcaaggttagttagcttgcccaaagtcaagatcacccaactagagtgtttcagaggtggatttgaacccagttggcttacatcaaagccaaagctttcagccaacatactatccttgaggagactatagactgatgtgagaggaaggcaggcaaactagcaattatgttgagcagggctttaaaaaaacccagtgggaagtcaatagaaggggacaagaaaactccagattgaggaagtccagatgtgcaaagagtgagaacatggtgtgcacaagagaaggtggaaactctgtgtggctggagaagggaaggtgggagaaggttggaatggagattggaaaaatgctctagaacaaaattgtaaaagatttcaaatgccatgtcagggaatctggattttattttatggaatgatagtgacagctttgtataccgactccctccataacaatttataattaactactgtcttgaaataaaatttacagatagcataacatacctgcaaatgtacttttaa

SEQ ID NO: 638008 - DNA, 441 bp, Homo sapiens
tttaccattcagttaggagcaaagtaaaggaaataaattaagaataatttaaaaagccctctcctaaaggaggtccaaatataatgaggaagattgacaagaaaacagttattaggaaactccgctaagtgctaacacastattgggagatagaagagggagacccaattctgcctagcgccaggaaaggtcccataaagggagtgataccaaagctgataaatgataacttggactctgctgaacatggtagaaggaggaccttccagaaggaggtcacagcatgtgcaaagacatcaggggacgccaggagaacctggcacaaagacatcaggggaagccaggaaaacctggcacagccagggtactgtgtgaatagcccagcacagggagttcaggaaggaggggaaaggatgctggaaagactgaccagggtcagcc

SEQ ID NO: 638009 - DNA, 441 bp, Homo sapiens
tttaccattcagttaggagcaaagtaaaggaaataaattaagaataatttaaaaagccctctcctaaaggaggtccaaatataatgaggaagattgacaagaaaacagttattaggaaactccgctaagtgctaacacactattgggagatagaagagggagacccaattctgcctagcgccaggaaaggtcccataaagggagtgataccaaagctgataaatgataacttggactctgctgaacatggtagaaggaggaccttccagaaggaggtcacagcatgtgcaaagacatcaggggacgccaggagaacctggcacaaagacatcaggggaagccaggaaaacctggcacagccagggtactgtgtgaatagccyagcacagggagttcaggaaggaggggaaaggatgctggaaagactgaccagggtcagcc

SEQ ID NO: 638010 - DNA, 437 bp, Homo sapiens
gaattcatcccaaatgaacagtgctagcaaacaactagtgattattaggtgcctgatgtgacaagactatgatgtcttaatttagttcccagtgggaggatacatgtcacacaaactgcctcgcaccacgaagggaaaagagagctgtacacagagacagtaggtgacagcctggaggaggggaacagccctggaggcagagaggggccctgtataatatggaggaaaaggaaatgatctaaataaaaaggaaagttaaaggaaaagagtgaaataaaaaggaaaatacttatcagcttaaggaggataagtccctatcacagagtataagctcaaactctctggtttagagaaataacattcataaargattgtgtgaaacttatgtcatccacttaattaaaaaatatatattttaggtattaatttttaggtct

SEQ ID NO: 638011 - DNA, 622 bp, Homo sapiens
tcatttctccatcttgtctaagaagctaatgtgatggaccttttaaaatgccttattgaagtccccaggcgctattttgtgtttcatttttttcttagttaacatgaggtcatacagacatttccagtatcagctcagtctgcaagctcaccattgtctctctttatgaagtattccatctgarttaatcgaccactgtttgtttagccattcccctattgttgcccatttgggttctttccaattgctaattattataaatgggcttggaaaaatggtaagtgctagacagatgtaaggcttgatcatcattcttttgttatcacactcccaggatgcaggcgttttctgtcttcctgaccttcttcttcctaatggcatttttataaaagaaccaacgatttgaaaacatatgctttagtacgtcatccaaggctgtgttcttcatttctttttctcttcaagggtgatagagtagtttagaaattctaggtctatctctataattctttacagagtggctaatcaagcacatttttccttcctatctttactttggttcacttccaagtaaatttatttaatttcccccacttatctccttttttaaaagtaaggagcc

SEQ ID NO: 638012 - DNA, 409 bp, Homo sapiens
cagacccagaagaaagactgccaaatcttcctcgatgcccttaaacrtggcccagattttctcagggaacggaagagaagttttccttgagtatttttatacagggggaaatccaagatcttattttctattcaatcggtacatcccccaccctcaccacaaaagtccttcctccatgaacagtggatgtccagacatggattcccagaaactgtttgactcagtgtcggctccacttggctcatccataacttccccaggaagccaaccagctttgcaaaccatcatccatccaaagagacctgaagacctagtttccagtatgaacactgaactggttgccacaatgccataatttgagaaattctgctgagaagatcagaagagcccatgtaccatggtccagcca

SEQ ID NO: 638013 - DNA, 666 bp, Homo sapiens
caccagccgactgcgagcccactggaggccgctcaccatttggtcctgcgtccagcatagcgcttggcacatacgtgataaataaggacttgtggaacaaacagatgaatgaatgggtgaataaatgaaggcatgtgtgaaccagtgaattagtaagtgctgtcacaaccaagggaaggctaaaaccgtatcatgttttggatagcttacctcagatttcccaggagacttgctgrggttttttacagcatctgtaaaaataatgataatagtggctccaatagcctgttgttgccgtcgtaaattcccaaagggctttccctggtgtgtttcagaagagggagagcaggcactgattccctgccctcagtctccctccctgcctccccgtttcttcttcccacctatgttctcactctctgtctctctctgtctctatttctctctcctcactctgcctctctttcacggtctctgtctctgtctttgtctctgtttctttctcttcccactgtccctgtctctctctctctctctctctttcactctctctgcctgtttctctctcttccctctctctcaatctctctctcctctctcttctctccctctccttctttctgtctttttctttcactatttctgcctctgtttctctttcctctc

SEQ ID NO: 638014 - DNA, 666 bp, Homo sapiens
caccagccgactgcgagcccactggaggccgctcaccatttggtcctgcgtccagcatagcgcttggcacatacgtgataaataaggacttgtggaacaaacagatgaatgaatgggtgaataaatgaaggcatgtgtgaaccagtgaattagtaagtgctgtcacaaccaagggaaggctaaaaccgtatcatgttttggatagcttacctcagatttcccaggagacttgctgaggttttttacagcatctgtaaaaataatgataatagtggctccaatagcctgttgttgccgtcgtaaattcccaaagggctttccctggtgtgtttcagaagagggagagcaggcactgattccctgccctcagtctccctccctgcctccccgtttcttcttcccacctatgttctcactctctgtctctctctgtctctatttctctctcctcactctgcctctctttcacggtctctgtctctgtctttgtctctgtttctttctctycccactgtccctgtctctctctctctctctctctttcactctctctgcctgtttctctctcttccctctctctcaatctctctctcctctctcttctctccctctccttctttctgtctttttctttcactatttctgcctctgtttctctttcctctc

SEQ ID NO: 638015 - DNA, 540 bp, Homo sapiens
ggccaatggaatatgcgggaattaaagtacaatgcttctatttttgactcctgcaaatgtccttgagatcctccatgctgtagagaattcccatggcctcagagatggcagagccactagatggaagaatcctgggtccctgaataaccatgtgaggcagagcctctgacatgctttgggacatgacatgagcaggaaataagaattaattgtrtcaaataacctagcaaacacatctctactttgttgagattttggaatcacctattatcacaattagtctaccttgtccaatgcaaccattaaagctacttgcaatgaaacagataggatacttgttggttttacctattactctccaatttttttcaccaaataatcacagaagactgatatggtttggctgtgtcctcactcaaacctcaacttcaattgtatctcctagaattcccacgtgttgtgggatggacctagggggaggtaattgaatcatgggggctggtctttcccatgcagttctcgtgatagtgaataacaaga

SEQ ID NO: 638016 - DNA, 562 bp, Homo sapiens
gatgggtttatcagggattttcccttttgcttcttccttattctstcttgctgctgccatgtaagaagtgtctttcaccctccgccatgattatgagacctccccagccatgtggaactgtaagtcaaattaaacctccttttcttcccagtctcaggtatgtctttatcagcagtgtgaaaataaactgatataaagacctctgtggctaaaaccctacttttgactgagactgaattttctcttatggcccacattgttcttgtcttctgaagttagtcagtcaccaagtattactgagtgtctaaactcagatcaactacttactagctatgtgaccttaagcacgttagcttgtttgtgcctcagttgcctcatctgtaaaatagaaataataatagtacttaccttgggtttttgtgaaaattaagtaaattaatccatatatagtgcttagcagagcagctggcacacagtaagtgatgagtaaatatatcatcatcatcaacatcatcatcatcaccatcatcagtccttggcactatgaacagcattgaatggg

SEQ ID NO: 638017 - DNA, 569 bp, Homo sapiens
ggacagccaatatacaaggaacctcgcagacagacatacagatgcagagataccccatcacatacatgttaaccagtttggacaatttgaatgaagcctgtggtcaccagggatatgggagcaattctaatcaggattgttagattatctctagaaggttgcttctgatagcttggacaagatgatggcggtgggggagaagcagggaattccttggcagtagggaggttgaatactttcctcattgtgctctagtaaactgaggaacttctagcagcaggagaaacatctgtcctttaaaagccatgtatcctgttcagaaaggyttggcattaatggagaccaaattgtcccactagaaaggacattgatgtcaagggggcatttggtgtcttttctggttctagtcctatgcaaaaaagcatatatcttaaaatatattaactacattttggcaaacaatagttcctgggaggttattatagtattatggtatgcccctatgggaaacttttctattttgtcaggattatagtttctaaaagttcctctccaagtatttaggttgc

SEQ ID NO: 638018 - DNA, 569 bp, Homo sapiens
ggacagccaatatacaaggaacctcgcagacagacatacagatgcagagataccccatcacatacatgttaaccagtttggacaatttgaatgaagcctgtggtcaccagggatatgggagcaattctaatcaggattgttagattatctctagaaggttgcttctgatagcttggacaagatgatggcggtgggggagaagcagggaattccttggcagtagggaggttgaatactttcctcattgtgctctagtaaactgaggaacttctagcagcaggagaaacatctgtcctttaaaagccatgtatcctgttcagaaaggcttggcattaatggagaccaaattgtcccactagaaargacattgatgtcaagggggcatttggtgtcttttctggttctagtcctatgcaaaaaagcatatatcttaaaatatattaactacattttggcaaacaatagttcctgggaggttattatagtattatggtatgcccctatgggaaacttttctattttgtcaggattatagtttctaaaagttcctctccaagtatttaggttgc

SEQ ID NO: 638019 - DNA, 645 bp, Homo sapiens
ttaactacattttggcaaacaatagttcctgggaggttattatagtattatggtatgcccctatgggaaacttttctattttgtcaggattatagtttctaaaagttcctctccaagtatttaggttgctggcctggcttgtagagaacaacttgagttcaccatccttggtcatcacagaaggagagagcagggcacagttctgcttcggatgtcacagggccagggatttgtcccagatgytgtaagaaagattcaggggacacaggttcaagtacttcaggtctagcaaagtttctgaagactcttttggttgactagctcagggaagcacgagtgagggatgccttcctggaagatgacttattagcctccttcattcctttcaggctttccaggaggatgggctgatagaataccgctggagcttggggcaagggaggtgtggaaagcccctgttttaattctcctcctggccagacttatcagcatgttggactgtgccttgatgttcttctcctaaactgcagaggttctcacctatagctttcttgctctcttagtatctcttgcaacacacgcagcagggcttgagcaggagtggttaacacagcttcctttcttgattcccaaagatcttacttt

SEQ ID NO: 638020 - DNA, 526 bp, Homo sapiens
gagtgtcccctcttgaagcggggaagggatgcttttgcatttgtccctttgggagggaacttcttccctcgatctctgcacagctcagctccccacttcctttgggacttggctcaatgccacattattagtgaggcctttccttaagactctgaataaaatagcaccccacttcacctccccctgggctccctatcttccctgctctgctgtgtttttctatgtagtgttgatcactgcctgaaagtttattggtttattttctgtcttctcccctttcaatataagcccctcccatggtatctttagcatgagaacagtgtcytgtccatagtaagtgcttgacgaatctttacaacatgaatataagagtctgtccaactccaaatcactgggcctttccactacttatgttgcatttccagatacacagggtatagagttaagagtatgggttccagagctattggcctagtttcaaatcccctcttcaccccttgctagttgcatgattacaggtaagata

SEQ ID NO: 638021 - DNA, 412 bp, Homo sapiens
gaattcatccctggtgacccattttaggcttctggcctccagagaaatgagttaatcagtgggtgtggctgtaagccactatgtttgtggtgatttgctatagcggcaataggaaaccagtatagccctcaagctgaccacttcctggttgaatctgtgaatacaatgggatraaacgcctatgattaggttagttcacgttaatcgaaaggcaggctatctaggtgggccttacctaatcaggtgagccattaaaagttccccgcccttcctgaaagggtatttgactccagggatattctccattgctagctctgagaatagaggggaacatgtgggaagaacttgagagtggactccagttgctatgattgatcactgccaacagtcagcaagaaaatgggaacctcaa

SEQ ID NO: 638022 - DNA, 506 bp, Homo sapiens
atgataggaggctatgtagcatagtgttaggaataaaagctttggtgtaattaataataataataataataataataataatacctgactcatggttattaatgaaatgactcatgtaaaatgtgtagcatagtatctgtcaactctcaacaaaccataactatgactattattttattattttggtagggagttggtggaggtgaatatggagccacacctcaaataacagcacttagtctttagataacaattgcagcctatccttttacttgtgaccagttcgcatgtcctttctgcttcttgktttctgcatccttggtccagtttttgagcttttatgatatattcttcatgctcctgccttagtgatcctccacatcatccctttgtaatttgatgttgacgtgattcaacatctgcatgattcctgaccaccacggaggtgtgtgtgtgtgcatgcatgcctgtgtgttcccgagtgtgtgcatacatgggtatgtgca

SEQ ID NO: 638023 - DNA, 569 bp, Homo sapiens
ggctgtgggagcagctggtcacaaacctcactgtagtcctacctgagcaaatgtcagaaagagagatcttttcataagcgatcatcaaatatttattgagcccctagctgtatcaggcaacttgctaagcactggagatacagcagccgacaaaccagaaaagatccatgctcagggaggggtgaagcagaggagatgaatcttaaatcattgaaaaataaaaagagataaaaagtgtttcaaaagaagacagaatggtacagggagataaaaagcagagctatcctaaggaaaatgaaagccagcttgtaaaagacttacctgcattcccatgtttattgcagcattattcataatagccaagatatgaaatcaacctaagtgtccattgatggatgagtagatgtaagaagtgccttttgcctcccaccrtgattctgaggcctccccagccgtgtggatcagtaagtccaattaaacctctttttgttcccagtttcaggtatgtctttatcagcagcaagaaaacagactaatacagtaaatcagtaccagtagagttgggcata

SEQ ID NO: 638024 - DNA, 396 bp, Homo sapiens
caggcacagaaaactgccacatgggagtgatttattcctgcctgtgtttgtgaggcccctattgcttatttcttcttttctttaccattatcaaccttgctcaggtgctgctgggttggaaccagaagatcctggttggaactttagccctccttttctggctctctgatctggggacatcaacacagagctaacaggtgttgagcacctttcctgtgacaggcaagagrttaagtgctttatgtcaactattttatattgttcttatagcaggcttatgaagggaggtgctttttttttcccttgaaaagaatcacaaaacaaccgaggccgagataaattaggtagtttgctaaaagtaacacagttaggtggtagaaaagcttatgactgtca

SEQ ID NO: 638025 - DNA, 354 bp, Homo sapiens
cctgcctcaccctcccgagtagctgggattataggcatctgccaccacgcccggctgatttttgtatttttagtagagacaggtttgccatgattatttttgtaatctggtcatttaataaacagtgactgctctcaaactgaaaaagtgtgtgtggggggatcatttagcccaagaaactactcccaactggggtgttctcggttttatttttattattattatttttttgagatagaatcttgctctgtcgcccaggcaagagtgcagtggtgtgatctcggctcactgcaacctctgcctcccarattccagcaattctcttgcctcagtctcccgagtagctgggactac

SEQ ID NO: 638026 - DNA, 354 bp, Homo sapiens
cctgcctcaccctcccgagtagctgggattataggcatctgccaccacgcccggctgatttttgtatttttagtagagacaggtttgccatgattatttttgtaatctggtcatttaataaacagtgactgctctcaaactgaaaaagtgtgtgtggggggatcatttagcccaagaaactactcccaactggggtgttctcggttttatttttattattattatttttttgagatagaatcttgctctgtcgcccaggcaagagtgcagtggtgtgatctcggctcactgcaacctctgcctcccagattccarcaattctcttgcctcagtctcccgagtagctgggactac

SEQ ID NO: 638027 - DNA, 551 bp, Homo sapiens
taagggacccatgccaggtgcagtggctcacacctgtaatcctagcactttgggaggctgaggggggtggatcacttgaggtcaggagtttgagaccagcctggccaaaatggtgaaacctcatctctacaaaaaatacaaaaatgagctggatgtggtggtgcatgtctgtaatcccagctactagggaggctgagggaggagaactgcttgaaccaggaggcggaggttgcagtgagctgcgattgcaccatggcactccagcctggcaatagagcaagaccccatctcaaaaaaaaagaaaaaaaaaaaaagaagaagargggaagggaccctgtattaggccgatctcacactgctgtaaacaactacctgagactgggtaatttatgaaggaaagaggtttaaatgactcacagttccacaggcttaacaggaagcatgactgagaggcctcaggaaacttacagtcatggtggaaggtgaaggggaagcaggcacatctttgcaaggtggcaggagagagagagggcaaagggggaagtgccaca

SEQ ID NO: 638028 - DNA, 550 bp, Homo sapiens
taagggacccatgccaggtgcagtggctcacacctgtaatcctagcactttgggaggctgaggggggtggatcacttgaggtcaggagtttgagaccagcctggccaaaatggtgaaacctcatctctacaaaaaatacaaaaatgagctggatgtggtggtgcatgtctgtaatcccagctactagggaggctgagggaggagaactgcttgaaccaggaggcggaggttgcagtgagctgcgattgcaccatggcactccagcctggcaatagagcaagaccccatctcaaaaaaaaagaaaaaaaaaaaaagaagaagaagggaagggaccctgtattaggccgakctcacactgctgtaaacaactacctgagactgggtaatttatgaaggaaagaggtttaaatgactcacagttccacaggcttaacaggaagcatgactgagaggcctcaggaaacttacagtcatggtggaaggtgaaggggaagcaggcacatctttgcaaggtggcaggagagagagagggcaaagggggaagtgccac

SEQ ID NO: 638029 - DNA, 528 bp, Homo sapiens
aggggcccttctccggggctgagtgtcaccccctgccctctgtggggactgagtcccagggcctgctgagaccctgacttggcatcacggccctgcaggggcgtcgaccgtcagctttggggagccaccccgtgtccctcatgtgcatggtgtcaacttttggcggggaggattgggctcagccagagggtggaagggacgagagccatgggcccctggcacagcagactccccatggctgcctcgggttttcatgtctaggatgcagccttgggcttgaagtatgtactggggacagctgggcacagctaaaccyggggagatccaggccatgggcagagtcagacagaccccgatggggaaggctgagggccgggccatcctagcctgcaggcctggggataggagaggctggaaggggctgccatgctggggaggaggctgaggggcctggagccctgatccttagcagagccgtgtgtaaggctgatgagtgctcccttctcgccccatttcagcatctcccaa

SEQ ID NO: 638030 - DNA, 363 bp, Homo sapiens
aaatgtaagttgtaaactataaaattcctagaagattggccaggtgcagtgactcacacgtgtaatcctagcactttgggaggccaaggtgggaggattgcttgaggtcaggagttcgagaccagcctggccaacatggtgaaaccccgtctctactaaaaatacaaaacttagccaggtgtggtagcaggcgcctgtaatcccagctactcaggaggctgaggcaggagggtcgcctcacttgaactcaggaggcggargttgcagtgagctgagattgccccactgcactccatcctgggggacagagagagactccatctcaaaaataaaataaaataaaataaaatccctagaagataa

SEQ ID NO: 638031 - DNA, 382 bp, Homo sapiens
cagcccaagaactgcgagaaataaatttctattgtttataaagtactcaggctaaggtattttgttagcagcctgaatagacaagatatcgtaattgcttctaactagtagaatacagcaaatgtgatgagatatcatgcccatgattacattaagatttgggctasaggagaccttagcctcatcaaaggattacattctgtgtgtttgaggccatatttacctgctctagcaaagataccacgtctggtgcaacagcgccaccagggctatgagctagttaagtcggctctaaactctagttaaattcagtgtcatctggcttctgcaggccagaccggagaattaaatggagacgtgataggaaccacccatcctttag

SEQ ID NO: 638032 - DNA, 469 bp, Homo sapiens
tctggtgatctgcccacctcagcctcccaaaatgctgggagccaccacgcctggctggatcgaccactttttatctatgcatcagctcatcaacacttgagttgcttccccctttggcatttatgaagactgctgctatgaacatttgtgttcaaggatctgtttggacatctgttctcaattcctatacctgggaagtcagttgctgggtgatacagtagttctatgtttaaggaacattatttaaatgtttgataatttgttcattatggatatttcacattaatttggacttacaaatattgcactgaaatattatttatcctgatcactgagtttttttggcaccctgcacgttttgtacccaaggcaagwgcctcactcacccaacccaacccaactccccaatgcccctctgcaagggaagagaggacagagtcaagctgtttctaggaggcaaagacacctg

SEQ ID NO: 638033 - DNA, 553 bp, Homo sapiens
tgcaagtaattgctattctttattttgccactcaaaataattaccaaaaaaaaaaaatcttaaatgataacaacacaacatcaaggcaaagagaacaggaatggctgactctgcataaattggccgaagattatccattatcttaaggtttgacttcaggttacagcacacagacaaacrtgcccaggaggctctcaggaccgctcgatgtcttctgaggaggctgcggcggggagatccaggaggcggtcgagggcaccggcctctgcaaagggaagagccacatctgagcagcaacttcttaatatgcacatgagagaattacaaccacgacacatgctacaggaagcggcgtgtggtcgtcctctgtaaagattcttaccagattaaacccagaatcagggacaacactctgtattcctcacttcgtaatgatttaactcccacagttagtaagcatttaaaactgtcagacttttaaattcaggctttaaagaggtataattcctagctgagtaatgagagctggtatatcctaaggaaagagtttcca

SEQ ID NO: 638034 - DNA, 575 bp, Homo sapiens
ggatgaatttgaaaagcagttcaggaagggaggaggttttcctagcagaaggatcaggagagaggctctggactacaacaactataagtgaagagagaggaggrggagactaaaggagacctcacggttcccgatcactttttagacagcagtgttgagctgcgggtgagctacccagcaactccctactaatggtgttcacttcagagtacaccaggaggcggaggagagatgagcgctgcttcacatttgttgttgttgttgttgttgttgttctcaaggtgacaatggcaagggagtctgtttgtttatttatttattttttttggacacactttgtcactgaaattggaactacattattccttagtaaaagaagtggctttgattttatgaattatagttaaaacactaccaatgggaagaataaaatatatttcagacagatggaagaaacaaactgcttagatgtgtagatgtgagcaaaatatttattcatttgttcttaaagaatttcatataaaataattgagattttaaaacatgtagcggtggggcacagtggttcatgcctg

SEQ ID NO: 638035 - DNA, 535 bp, Homo sapiens
ttccattagcctttgtttcatagacatccttgcactgttatacatctactctttcattatgtgcgtgtatcataatttacccaatcatttccatgttgatagtcatttatgtaggctggattgccttcaaaaatcaccctttttaaggcaaattgtrtgaaagagaaatagagtctacatgcatggaattttggccatgttaatcactgatgctctattctgtataacttacaacatttattttcccttgaaaaatgcactaaatctaagctatgtttgttgctctgagcctagttcccagatagatgtgcagatatgtttcttcttagatgtgcaaagaattttgagttaatgagtccaattagagaatacctagaagtgacattaaatattaacaactttgtttttctgtagttgtagtaaaatacacattccatataatgtaccatcttaaccagttttaagtgaacagtggagtagtattaagtatattcacgttattacgctaccaatctctagaacttgtcatcttgca

SEQ ID NO: 638036 - DNA, 640 bp, Homo sapiens
ctcttgtcagtgtagaatcatagataaaagctgcaaatatttggatttacttgttgagttattgacagttaataccaaaggrgtttttccagatttttttttttgctgttactttttggtttgttcaggagttgagttcaatttaggggcagaacttcccctcaactctcagtggatttcactcttctttgcagtgacagtggctttaaaaacctcagaagtataacacttttatgaatagcaatggcatgtagtacaaaatgtggaatcagttgagttagaatataattttcatcctttattgttataatcacattctgcatttctgtggtagtcagcagagaattaaatctaaatttcataccatggttctcaagaccttcggtgctctgtacccagtcttcatctctattttccattgccttcactaggctttcatcatgctagccttcttttcatttcatcaatatgtcttacggcattggcacttgctcttctctctgcctgaaagccttcttccagatctttgagtaggggttggaggcggttgaggagttcttgtaagtaatgctggagttccaaggtatctcctcactgaggctttgcctatccagtttaattcagtgccccctactgccgt

SEQ ID NO: 638037 - DNA, 611 bp, Homo sapiens
aatgatatatataatttggtatttttttctttggaaagaggattatagcaaatactcctgggtttccacagatgatataattttaatggcttcatgagtttatttcatcaggttcatatacatgaatttatgaaatagtccctatagtatgttcaggttacttctggttgaccctttacctgttattgttaagagtacagaaaacatctttctgtatgtttccatttccattaagcttcttacttaaaagacatcttgaagtcacacatacatgtagtaactgcagacgtagggtttttaatcactatgctacgcagccttctaggcagatgttaggtaatttccccaagttgtagtgaacttgatatctcaacagtggtttgtttgactctttccactttggctaattgaacattgttgtgcagctgttgcagattagattcgagaggtgtgaattgatcagtaggtgaaggcttacaagcaatgattattacattaaattttaatgctatrtgggctttgtgaagttaaatctcaggttggagatcaggagatgaagaatctacacaagcagatgtaatgttgcttgctaattttaaatcaggagactt

SEQ ID NO: 638038 - DNA, 545 bp, Homo sapiens
atatatcgagacagattgctcctgtgagtcttccttagatccaatcctagagaagctggattttaggaagaactamcttaaactaatggactgactggttgtacttgttctgacataaatatatatagcccacttccataactaacattgtaaaagcaattccattaacacttccaaaataaaagggagacctcagttcttaagtctatgtgcaagaaaagttttaagtaaatatttatttaattataggtattttgtattcctctaatgaaatgaagttttagtgtttcattagcatcatctaatcatggaagctggaggttaactcttccgtatgaaaacactgttgactaattaaagcccagtgtaacttcttttgagttatgatgtgaatgcatgtgaagacacttgatgcttaactttcaagttaggcaaatgggaaggatgtggggtgtgtgtgtgtgtgtgtgtggtgtggggggcatgtgaagtatctttaccttgcacaacttgctcaccaataagtgaatattgggtagtaatag

SEQ ID NO: 638039 - DNA, 545 bp, Homo sapiens
atatatcgagacagattgctcctgtgagtcttccttagatccaatcctagagaagctggattttaggaagaactaccttaaactaatggactgactggttgtacttgttctgacataaatatatatagcccacttccataactaacattgtaaaagcaattccattaacacttccaaaataaaagggagacctcagttcttaagtctatgtgcaagaaaagttttaagtaaatatttatttaattataggtattttgtattcctctaatgaaatgaagttttagtgtttcattagcatcatctaatcatggaagctggaggttaactcttccrtatgaaaacactgttgactaattaaagcccagtgtaacttcttttgagttatgatgtgaatgcatgtgaagacacttgatgcttaactttcaagttaggcaaatgggaaggatgtggggtgtgtgtgtgtgtgtgtgtggtgtggggggcatgtgaagtatctttaccttgcacaacttgctcaccaataagtgaatattgggtagtaatag

SEQ ID NO: 638040 - DNA, 456 bp, Homo sapiens
aggaccagtcatagttacaaacygggttggagatgtattttaactggacacactggcagctctagtagtgctgaccagggcatgcaaagaatcttcttagcttcaaaggcattacccactttactatgatacagacagctcctcctcagtgactcctcctctgccccctagggtggccagtgactgccatattgttcagtgatagaaattaccctttttcatattgtgcatgcatataataaacttcaattttggcattttccaatggttaatgattcctttatctgtttacggttgtatgttattttcccccttgttgtctgattggtgattattataaattgtttctaaaatcttctaattacccaggtattccttgattataaatcacatgagcaaaatcggctagttctttactctgaagtttatttttaacaaaattcatccattcattta

SEQ ID NO: 638041 - DNA, 461 bp, Homo sapiens
ttcttcccttcttaaaataccatgagtaatgtacggggtgagggaaagatgggaaggggtcaaagttgaaaaaaaagtaagataatttgactcaatttaatcaagtatttgcaagttatattagttgaaattttctgtgcttggatttttggattcatatctgctgtgctggaatcctgtttccactatgttctaatcacgtgagcttgggcatattaccaaagtgcctggagcctgaatttccatgtgtgtgaacrggggccagtaacacctactccagccagctgttgtgatgattatacagaggagtggaccttgtaaagggtagctcagtttactgtcatcagtatcctcataaacatcatcattaggttattaaacaaggttttcattatactgggtatttctgagttcctgaagggaacaaaactgttcaagagaatgaataaaagtaaaatttt

SEQ ID NO: 638042 - DNA, 599 bp, Homo sapiens
gatcaaataggactttagtaaataacgaatttttgtggactggcaggttggtctcttgaatccactgggtctctttccccttgtgcagcacgtgtgtgctggatgattggctcagtggctctatgtctatcagataatctggcctctcttgccagagatggctttgtgagcccacgccaggctgttgagcaatggcatcccagttaggcacatgactttagctgacatattgggcagatgacaaggattcaggcttattgtgtggggataggctttttctttactctgcagaactgaacgaggatgggcatagtttcctgactgctgtsctacagcaagccacgggatgtagctgatattctaggcagcagagcagagacatgcaaagaatctggatctctgatgatctctctaagtttctggattagccagacctgaagcttctcttacccttgtttctccagttatataaactgatgtatttgttttatttaaaacaattcaaataggattttctactccttgagatcaaaagcttcctaacttatacacaaatctaaaagtcttcctaacacgatgtatgaacaaagtatttcagg

SEQ ID NO: 638043 - DNA, 568 bp, Homo sapiens
ctgccttgcattgtaacttttctaaacatcactgtttctttgtggccaagctcatttcatagaagttttgaactgattaacttagattctcagacacaccaaaggtgtttgttgggaaactcagggtagcagtggttatcacatcgtaactatattatttatatcttaagaggcaatattccagaaggggtacactttagatcattttcatcttaatgatattcctattgccatacactttttttcatcctaattatttagtcttcatttggttataagtaatatggtatatatgtatatatatattccattggatccccccttatacaattggtaattgttctttccagaaattatcttcttccctggtttaagccagtatttgccaggaataaatctgactttgaatttcaccagtgtgtttgaatatttcttatcacatgattaaccatggaattccaactcactctactcctgtaattatctagttaatgtgataatgaagccagccgaacaaggaamtctcttgagatttttgggtcatttttcaaaatcaagacaaaaatag

SEQ ID NO: 638044 - DNA, 431 bp, Homo sapiens
gaacaatcagcccttttgctagatgaaatgtcaatttctaggtctgaaattgaccatgcaatatttatggcattggaagaactctgagttataggagaaatatgaagtgtagttggaaaataccaagtttgaatcagtaggaatctatgtttcattgttccctctgcttttcctaataattcaaaattagataaattctgttataaaatgatgactgtaaaattrttcatgtatccaagcttttgttgtttgctgaagagtggttaggtttctcttttaaatgtaaaacctaatttgagatgtgtaaggttttttgtttttttttgttgttgtttttttttttttttttttggttaactaaatgaaagacctcaaaatatacatgcattaaaaaaacagtaagcatatataatgtctgggacttgaacacc

SEQ ID NO: 638045 - DNA, 458 bp, Homo sapiens
tattttaaattaattattctaactaaaatatggataatgaatagggagaaggaacaagaccttgaggragatcaggtgggtgttaattaaaatagtttagctattttaaagccctaaattattgcagtcattttgaaatatagagaagtctgttgttctgaagtccagatgctttggtagctcttgatgggatcaaattataatcaatagcagtcttcttcttgaatattgtatttactaaaaaatccattgtgttagactaagtcaatttctaaaaagtgacactctggtcttatctttaattcatgctgtaaaatctggtgggttaggcctgtgtttagagagtttgatataaagaaaccattcttataaatacaaatggaactgatcacatatgatatctgtctagagccaaatgaagatagtggcattcgtgaagatgacattatagatgcttc

SEQ ID NO: 638046 - DNA, 458 bp, Homo sapiens
tattttaaattaattattctaactaaaatatggataatgaatagggagaaggaacaagaccttgagggagatcaggtgggtgttaattaaaatagtttagctattttaaagccctaaattattgcagtcattttgaaatatagagaagtctgttgttctgaagtccagatgctttggtagctcttgatgggatcaaattataatcaatagcagtcttcttcttgaatattgtatttactaaaaaatccattgtgttagactaagtcaatttctaaaaagtgacactctggtcttatctttaattcatgctgtaaaatctggtgkgttaggcctgtgtttagagagtttgatataaagaaaccattcttataaatacaaatggaactgatcacatatgatatctgtctagagccaaatgaagatagtggcattcgtgaagatgacattatagatgcttc

SEQ ID NO: 638047 - DNA, 542 bp, Homo sapiens
gtcttatctttaattcatgctgtaaaatctggtgggttaggyctgtgtttagagagtttgatataaagaaaccattcttataaatacaaatggaactgatcacatatgatatctgtctagagccaaatgaagatagtggcattcgtgaagatgacattatagatgcttctagaaaactcttaaagaaaatatcaggtttctagtcagtaaccataatttccaaatacattagctattgagtgctgcctgcccttaaaataaaagcacattttctttctggttttccatgtacagcatgactgagctctcaggaagaagacccttggctcacttggtcacattcattaattgttattacctcatgactacaagtataacccgatatactaaagagttgaaaaattcttctctctgattaacctaaatatctcagcttcagtccattttcttctgttgtatcctcactggagatggagaacaggtggtcaccatgtgacacacttcgattttataacaactaaaagaacttgtaagttatttcc

SEQ ID NO: 638048 - DNA, 542 bp, Homo sapiens
gtcttatctttaattcatgctgtaaaatctggtgggttaggcctgtgtttagagagtttgrtataaagaaaccattcttataaatacaaatggaactgatcacatatgatatctgtctagagccaaatgaagatagtggcattcgtgaagatgacattatagatgcttctagaaaactcttaaagaaaatatcaggtttctagtcagtaaccataatttccaaatacattagctattgagtgctgcctgcccttaaaataaaagcacattttctttctggttttccatgtacagcatgactgagctctcaggaagaagacccttggctcacttggtcacattcattaattgttattacctcatgactacaagtataacccgatatactaaagagttgaaaaattcttctctctgattaacctaaatatctcagcttcagtccattttcttctgttgtatcctcactggagatggagaacaggtggtcaccatgtgacacacttcgattttataacaactaaaagaacttgtaagttatttcc

SEQ ID NO: 638049 - DNA, 542 bp, Homo sapiens
gtcttatctttaattcatgctgtaaaatctggtgggttaggcctgtgtttagagagtttgatataaagaaaccattcttataaatacaaatggaactgatyacatatgatatctgtctagagccaaatgaagatagtggcattcgtgaagatgacattatagatgcttctagaaaactcttaaagaaaatatcaggtttctagtcagtaaccataatttccaaatacattagctattgagtgctgcctgcccttaaaataaaagcacattttctttctggttttccatgtacagcatgactgagctctcaggaagaagacccttggctcacttggtcacattcattaattgttattacctcatgactacaagtataacccgatatactaaagagttgaaaaattcttctctctgattaacctaaatatctcagcttcagtccattttcttctgttgtatcctcactggagatggagaacaggtggtcaccatgtgacacacttcgattttataacaactaaaagaacttgtaagttatttcc

SEQ ID NO: 638050 - DNA, 555 bp, Homo sapiens
ttccagtttgttgtaggttgatgttggacctcatgatatggagagaaaatatttgaagtataggaaagaacaaatagataatgcttcttcttagcctttgcattaaaatgaactttctaattatttttcaagtattgttagtaataaaatygattaagttaggataaaatttttctttgtatttattttggcaacaatgaatagctgaaaagccataaataagactgaaggtgaggcgaaacttaaaatcacaaataattgacaaacgggacagattgtcaccttattcagttcaactgaaaggaaaatttcttcaacataaaactgaattgcatttgaagatttttaaaaatctatataaattataatacctaaaacttaatatgtatcaatcggtgtattaagagttggaagaaagaatgataaattattagtaataattaattttgaatttttggtaaccacagaactaagcttttaggaattttcctaattctaattgataaattccttcataaagaagaaccctatttctcaagtcaagcagtaaacaga

SEQ ID NO: 638051 - DNA, 660 bp, Homo sapiens
ttgtaagttatttccttcaccttggatttccctttcagtgctcatcatgtattcatcagaatgtcagaagtatttgaatactgtcatttccatggagagttgagggatcattttatgagaaatgacagcatccttactcagagaaacatttaggggtgtgtgtgtgtgtgtgtgtgtgtgtgtgtgtgtttctttttgaaattgaatttgggcttttttgagtctcagtgttttaaatttcagcattatgttattgtaagttaatttcattaaatgtttccagtttgttgtaggttgatgttggacctcatgatatggagagaaaatatttgaagtataggaaagaacaaatagataatgcttcttcttagcctttgcattaaaatgaactttctaattatttttcaagtattgttagtaataaaatcgattaagttaggataaaatttttctttrtatttattttggcaacaatgaatagctgaaaagccataaataagactgaaggtgaggcgaaacttaaaatcacaaataattgacaaacgggacagattgtcaccttattcagttcaactgaaaggaaaatttcttcaacataaaactgaattgcatttgaagatttttaaaaatctatataaattataatacctaaaacttaat

SEQ ID NO: 638052 - DNA, 555 bp, Homo sapiens
ttccagtttgttgtaggttgatgttggacctcatgatatggagagaaaatatttgaagtataggaaagaacaaatagataatgcttcttcttagcctttgcattaaaatgaactttctaattatttttcaagtattgttagtaataaaatcgattaagttaggataaaatttttctttgtatttattttggcaacaatgaatagctgaaaagccataaataagactgaaggtgaggcgaaacttaaaatcacaaataattgrcaaacgggacagattgtcaccttattcagttcaactgaaaggaaaatttcttcaacataaaactgaattgcatttgaagatttttaaaaatctatataaattataatacctaaaacttaatatgtatcaatcggtgtattaagagttggaagaaagaatgataaattattagtaataattaattttgaatttttggtaaccacagaactaagcttttaggaattttcctaattctaattgataaattccttcataaagaagaaccctatttctcaagtcaagcagtaaacaga

SEQ ID NO: 638053 - DNA, 589 bp, Homo sapiens
tcttgagatcttttgctaaggaaaaaaggttccttwaaatatagtactactcattgccaatttacctgatcaccctgatggatatgtacaagtagattaatgttctctcatgcctgctaacataaaatctgttctgcagcccagggatcaagaagtaattttgactttcaagtcttatgattaaaaaaaggcatttcataactgatatggtttggctctgtgttcccacccaaatctcatgtcaaactgtaattcccactgttggaggaggggcctgctggaaggtgactggatcatgggggcagatttcccccttgctagtctcatgagagtgagctctcatgggatctggttgtttgaaagtgtgcagcacttccccttttgttctctctcttcctcctgctctgcaatgtgaagaaggtgatagcttccccttcccccatgattgtaagtttcctgaggcctccacaaccatgtttcctgtacatggctgtgagtcaattaaacctcttttcttcataaattacccagtctcaggtagttactcatagcagtgggagaatagactaatacaataaggctatcattg

SEQ ID NO: 638054 - DNA, 632 bp, Homo sapiens
ctgcaagaagtgttaggtagagacctacgtcatgaggaagaaaaaggggacacaatggtgggaagggaaaaaaacttacaaatattccagaaaagggaatggaatatgggaatgaatgaaggttttcttggtcggggagggaagagcctggcattttagtggaagaaagtccagtatgtttggagcacagtggaccctggaggtagaggccacgtgtgcagctttataaatgactcacagtattttactccctagcctaagggcagtgataagcaatagaaacgtaagcgggagagtgatatcatatttgtattttaaatgtcattctagatgcrtatcatgcatggataggaggccagactacctgggcaaaccagttttggggctggcagttagtggctttagataaggagggtgaaagtaactggggacaaggagatgtatgaaagctattttagaggtgaaatgacaacagtaagaagtgggttacatactggaaagttagtaggagaaggtttcgggaatgtccctctggatttcaggttgcataactgggtggttgttgaaccacctactgatataggccacatttatgttggatgacaatgatggtaagttgagtttttagtcat

SEQ ID NO: 638055 - DNA, 591 bp, Homo sapiens
ttaaacaactttgtaattactcaaataatgtctagtaagctcctccaacttggtatgtctcatatttgcctaaacttaactcatctgattgcatggcttcattgggattccttggcgataggatataattaaataatttaaatgcaagatttcagagcgtgttctcaagatgactctgtttttgatttgtgtttggcaattaaaaagcaaaatctgaccacaaggaggacattgtggagarccagacttagatacctcaatgataactaaatttccatgtgtttttcatgtgagcctttagattacaaggggctgtgaagtatcagaaggatgtatgcctccaagtactaggtcgtatttacagtgacatgccagtattcgtcagtagggctgtgacttttttttctgttgatttatttaataggaagcaatttattgactttgcaagtgagcatccgtggagcttgaagccagaaatggagtggaaaaatcttatttgatgttgtggctcctagaaaataataactagaatttgtggttgcagataaaaccaatattgcagagtggatggcctatcagtgagggtattaa

SEQ ID NO: 638056 - DNA, 496 bp, Homo sapiens
agtccatctgtttaataattaccattaactgtacctaattttatggtgtaaaactcatrttgcaggcaagcaggtagcatatctacaaaggttgtgtccatatgttgtactgttggggtgtgcgggtggtggtcaggaagggaatgttgaactttagtgtcagatagccctgatagaaatcaggccgttgatatcttgtgactgtgtgttgttcctttgagttgatctctgggaccagtgccagaaaaataaatgagaaccagagaccaaattaaatgttgcctgatcattatgtcaaagacaaaagcaggaagataaaaatctcaaagccaaatagatccaggacaaaggggaaataatggcagctgtagccgcagtttggaactaagatgtggaacaaatgaggctgaacttactgaccatctgttcagaagcagggggagcctcagaaaatacactgggctggaggtctggtgatgagcttccactttcttgc

SEQ ID NO: 638057 - DNA, 590 bp, Homo sapiens
gcatagaactttgcatgcagtagttgtaggcttaccacatatcgtcatggactgctgacttgtgtagcacgagtgacacagtataagtgcacctcgacttttatcaggaacatcttacattagtgttgtgtaagctgtacacattattattattctgttgctgctattttattctgcacactacttttattgatatgtagataatcctttgtcataggaggttgtgtggttgtgctatgcattacaggacggtctctgtctactagatgccagtacaccctctagttgtgarattcaaaaatgtctccagaaatagccaaatgtcctctgggaggcaaaatcaatcctagttgagaaacagtaatgtgtagcatacaaatagaaatatgcataaatctcaagtgtgcagcttgactaatttttatgaatacacgtcacattcaattcaagaaaaaggacattactagcatctaagatcctctccttttaactcctgttattttccaaccaaggataaccactgttcagacttctaataccatagttttgcctgtttttagacttgaagtgaatgtaaatatgtggtacag

SEQ ID NO: 638058 - DNA, 590 bp, Homo sapiens
gcatagaactttgcatgcagtagttgtaggcttaccacatatcgtcatggactgctgacttgtgtagcacgagtgacacagtataagtgcacctcgacttttatcaggaacatcttacattagtgttgtgtaagctgtacacattattattattctgttgctgctattttattctgcacactacttttattgatatgtagataatcctttgtcataggaggttgtgtggttgtgctatgcattacaggacggtctctgtctactagatgccagtacaccctctagttgtgaaattcaaaaatgtctccagaartagccaaatgtcctctgggaggcaaaatcaatcctagttgagaaacagtaatgtgtagcatacaaatagaaatatgcataaatctcaagtgtgcagcttgactaatttttatgaatacacgtcacattcaattcaagaaaaaggacattactagcatctaagatcctctccttttaactcctgttattttccaaccaaggataaccactgttcagacttctaataccatagttttgcctgtttttagacttgaagtgaatgtaaatatgtggtacag

SEQ ID NO: 638059 - DNA, 499 bp, Homo sapiens
tctgcctttgctgatgagggtgaggctgtgtgctttctctacrgtgtttgactaggagaggatggattttgtctaaaagttttctgtctagctaggctgttcctttagctagaaacggcatgcttttcttggggcttttgttgttgctcacattggcatttccaggctgctagcttcttggtttcatgtccaggatatatgagacaaaaagaaaacccaagaaactcgccatgttagatctccagtttcaggtccctagccagtctgctatctttgccccacctttgagccttcgcatgtttattttatacataatgtccggagtttttgcttgtatttaacaggaggaatatagagaagtatatatatccactcacttggttttatccttagtattttcagagctaataataacaataacgactgctatgtttttagtgctgtttacatggccagtatcatgctaatttatttacttatgacagtaatcttatgagga

SEQ ID NO: 638060 - DNA, 456 bp, Homo sapiens
ccaacaaacagtgctgtgtgtgtgtgtgtgtgtgtgtgtgtgtgtgtgtgtgtgtgtktgtgtgtatttgaaagagaaagtagaagaggggtcattaataacagtgatgctgccaggtttctgatttgaaaaaccggataggtcattttgtttacaatcaaggttaaggaaaaaaaagtttcagggaggatggagtagtgcatggtagaatgctaaagagcaaacaaaaaaaaaaagattgtatcagtgtaattggatttgaaaattagaaggtaattaatggctttggaaaaatagctgtcacagatagagagagaggtgagcggaatagtggagtgggatggctaagctgataaattatttggaaatgagaagtagagagaccatttatgcagtgacactgtggaaaagtcatggaatatgaagaaccaattccaaaacctggtactgcttact

SEQ ID NO: 638061 - DNA, 490 bp, Homo sapiens
ctgtattctgtccccagactttttccctgcctcgtattccctggtactttcctacttgccttcatacacagtggaccctaggtcttagccatattgttcactgaacttgccacatacctctggaactctgtgcctttgcttacattgtatcttcagcccaagatgaatgtactgcatgccctttgaaggcaggaatgatgtcctattcacacatgtccttggtgcctagaacaccttggtgcctagacacataatggaatcttaatraatgttggtagaatgggtgaaataatgaatgcctttactgcttcattcacctgttgatattctgcccatgtttaaaaggcctaactgcacatttaccgcttctgtaaaatcttaccttattctctaagttggaataaattggttctatcttgctgctaccataggtcattgtttctattggttgtatcactattttaacaattatgtcctgtatgaaagaaca

SEQ ID NO: 638062 - DNA, 578 bp, Homo sapiens
tctcaggcccaagaaaggaaatacaatataaaaaatgtagagagaggtcaacattgtttcccatataaagttacttctcagaggcggttcttagagattccacagctttggattttctaaagtcagcctttccctgggccatatttctctatcttgctaaaacacacttctgtgtgttaggacaatttccatgagatataccacttaatgctcactggaacattgtaggatagctgtgactatactgttttatagacagagaagagactgagtcccagagagtgtagaaaacagcgagggccctcggcaagtaagtgcagaggtgcaatttgagctggratctgtatctgtgtgggtacaaaacccagcctcttcctgccacttattttttgtttgttcgtttgtatgttttttgatacagagtcttgctctgtcacccaggctggagtgtagtggcatgatctcagctcactgcaaccttcacctcccaggttcaagcaattctcctgcctcagcctcctgagtagctaggattacaggcgtctgccaccacgccaggctaatttttgtatttttag

SEQ ID NO: 638063 - DNA, 489 bp, Homo sapiens
ctgtgccaaagtttgcctccttggagcttggcacactggtgccagttctcctctctgaagcctccttagaaaagtctgattcccatttcacatagaggcttacaaatatttgagccaaagtctatttgacttttttcaggtacaatgaatgtgtctacttcagagcaagtaatcaacacttaagctattatcgtattccttggtgctcaggtctctccactttcttccttaactttactagctttgtctcacatactcctttgcaaatggttcctattttctagcttcctgtgacctacttcrtccttatcctggcctctgactaattatttcttgtatatgaaggtattatttttcttcccattagtgttaaactctacagtggctcttgtccatttacacatttccatttatcaacaggaacatttcattgaatacacaagaagcaagacctgacagtagcagaacaatattcacaaaaaccagttt

SEQ ID NO: 638064 - DNA, 606 bp, Homo sapiens
caaggcaggctcctttcatgtgttggcccctgcccagggcatcagggctactgcctgtgtgatatyactaaaaatggggcaggataaccccacctgtctctaaatacatcactcactggacttgtctctttataactcattactcaaatgagataatgacataatgcatgcaatatccatgacataatttatataaaatgttagcagtgtctgacacatagtgagaaatcaatacatttaactcttaggaatattatgtatagttgcttatatgaggtgaggcattgaagctacttcaaacaaggagcaacatattgtgccataaacactactggctctttagattcaatattaagcttggataggaccactaggaataggacatggaggaaaagggaggtggtctgattagaaagatgaagggagttgataagtgctggcaagatcagtagggcattgtaataaggaccagataaggacatcagggtcctgttggagaaatatctaaaagcaaaagaaaaagatgaaaaccacacagggcaatagaaagattcctgcttaaagaaccaagaaacatagtcctcatccaagctcaggccttagctg

SEQ ID NO: 638065 - DNA, 483 bp, Homo sapiens
ggcactaggcttagtacctcggtgactaaataatctgaagaaaaraaaaaaaccatgacacaagtttacctataaaacaaatctgcacgtgtagccctgaacctaaaataaaagttaaaagagaaaatttaaaaataaattttagtatagcctaagtggacagtgtttataaagtctgcagtagtatacagtaatgtcctagatattcacattcactcactacttattcactgactcacccagggcaacttccagtcatgcaaactccattcatgataactaccctgtgtaagtgtaccatttttgaatattttatactgtattgtaattgaacctttctatatttagatatgtttagatacacaaatacttaccacggtgttacaatcgcctgtagtactcagcacagtaacatactatacaggtttgtagcctaggagcaataagttataccatgtagcctagctgtgtagtaggctgtac

SEQ ID NO: 638066 - DNA, 665 bp, Homo sapiens
taactaccctgtgtaagtgtaccatttttgaatattttatactgtattgtaattgaacctttctatatttagatatgtttagatacacaaatacttaccacggtgttacaatcgcctgtagtactcagcacagtaacatactatacaggtttgtagcctaggagcaataagttataccatgtagcctagctgtgtagtaggctgtactatctaggtttgtgtaagcaccctctaagatgttcacacaatgatgaaatcacctaacaatgcatttctcagaacgtgtccctgtttttaargaatgcatgactatagatagatagatagatgatagactatgataaagatgataggtagatagatagatgatagatagatagatagatagatagatagatagatagatagatagaaagtagataaatgaatgaacctatctgaaataaaaggactgtaaattagtgtagtttattaattggtttactcctctagacacagaacagggtaggcaggcacagaagcagagcccctccaagcccagcagcggtctttcctgggcacatggctaaggcagcttggagccacatcacatgcctttctcctgaactttcacaggagattagcttttgcttcttgggtaactgaataagtggaaagaaaagatg

SEQ ID NO: 638067 - DNA, 665 bp, Homo sapiens
taactaccctgtgtaagtgtaccatttttgaatattttatactgtattgtaattgaacctttctatatttagatatgtttagatacacaaatacttaccacggtgttacaatcgcctgtagtactcagcacagtaacatactatacaggtttgtagcctaggagcaataagttataccatgtagcctagctgtgtagtaggctgtactatctaggtttgtgtaagcaccctctaagatgttcacacaatgatgaaatcacctaacaatgcatttctcagaacgtgtccctgtttttaaagaaygcatgactatagatagatagatagatgatagactatgataaagatgataggtagatagatagatgatagatagatagatagatagatagatagatagatagatagatagaaagtagataaatgaatgaacctatctgaaataaaaggactgtaaattagtgtagtttattaattggtttactcctctagacacagaacagggtaggcaggcacagaagcagagcccctccaagcccagcagcggtctttcctgggcacatggctaaggcagcttggagccacatcacatgcctttctcctgaactttcacaggagattagcttttgcttcttgggtaactgaataagtggaaagaaaagatg

SEQ ID NO: 638068 - DNA, 665 bp, Homo sapiens
taactaccctgtgtaagtgtaccatttttgaatattttatactgtattgtaattgaacctttctatatttagatatgtttagatacacaaatacttaccacggtgttacaatcgcctgtagtactcagcacagtaacatactatacaggtttgtagcctaggagcaataagttataccatgtagcctagctgtgtagtaggctgtactatctaggtttgtgtaagcaccctctaagatgttcacacaatgatgaaatcacctaacaatgcatttctcagaacgtgtccctgtttttaaagaatgcatgactatagatagatagatagatgatagactatgataragatgataggtagatagatagatgatagatagatagatagatagatagatagatagatagatagatagaaagtagataaatgaatgaacctatctgaaataaaaggactgtaaattagtgtagtttattaattggtttactcctctagacacagaacagggtaggcaggcacagaagcagagcccctccaagcccagcagcggtctttcctgggcacatggctaaggcagcttggagccacatcacatgcctttctcctgaactttcacaggagattagcttttgcttcttgggtaactgaataagtggaaagaaaagatg

SEQ ID NO: 638069 - DNA, 665 bp, Homo sapiens
taactaccctgtgtaagtgtaccatttttgaatattttatactgtattgtaattgaacctttctatatttagatatgtttagatacacaaatacttaccacggtgttacaatcgcctgtagtactcagcacagtaacatactatacaggtttgtagcctaggagcaataagttataccatgtagcctagctgtgtagtaggctgtactatctaggtttgtgtaagcaccctctaagatgttcacacaatgatgaaatcacctaacaatgcatttctcagaacgtgtccctgtttttaaagaatgcatgactatagatagatagatagatgatagactatgataaagatgataggtagatagatagatgatagatagatagatagatagatagatagatagatagatagatagaaagtagataaatgaatgaacctatctgaaataaaargactgtaaattagtgtagtttattaattggtttactcctctagacacagaacagggtaggcaggcacagaagcagagcccctccaagcccagcagcggtctttcctgggcacatggctaaggcagcttggagccacatcacatgcctttctcctgaactttcacaggagattagcttttgcttcttgggtaactgaataagtggaaagaaaagatg

SEQ ID NO: 638070 - DNA, 546 bp, Homo sapiens
cttgattatgggagaaagtctgcggagctttgcggtggagctgggttagatggaatgggatcttgagctgaaagggaggagttggacagaatcctagacaattcgtctagagtaaccaacagagtctatacacccatagggagatgtggtctggagctcattgaaattcttttctaattgcttctctttccacagtgaaatatgaagccaggtctccagctaagagtgaggatggagtaggagaagttggtggttttttgagggacaagaagctatggcgtagtcatgtaggagaaagggagggtaaatcaagcagggcatacaatggggtggggacaggactaaaacctgcttgaggttaatattcatgagactaaagtaaagctgatcactacgattytgtgtttttctctagcaatgtggagctgcatgagtgctggtgtgtaggaggtagagtgttggatttaaacaaaattgtgtttattccaagtgggtgtgaagtagaagctaagcctgatgctatagaattatctatagtgtttcagt

SEQ ID NO: 638071 - DNA, 508 bp, Homo sapiens
aatactaaaattgtttaaatatgcagtttgaatgaactccatggtctaagtcaaattacctctgataacycacctaaattgaagaaacaactggtattcaagaggacataagcctagtgttaagcatgcactcatgaagaaccaggacagccaccttgtccttcctgattccttaaagcttttgttattaaaggttctgcattccatgacttgtcatggaaaagataaaataacccaaattgagtatattgatgtggtgacataaattgtggaaatagtttaaaaccaatgtttggttccatagtcctgggaagacaatcaaagcttcaggtacatttggctacctgatggaccatttaacatttataaagggatttcattcaattgtcattttcaatgcatgttttctgtttgtataaaagctttcccatgcaagagggctgatgttacaacagtagattattgtgcaacagtgtattttcacctagtaaaaaaatcttttcatggt

SEQ ID NO: 638072 - DNA, 508 bp, Homo sapiens
aatactaaaattgtttaaatatgcagtttgaatgaactccatggtctaagtcaaattacctctgataacccacctaaattgaagaaacaactggtattcaagaggacataagcctagtgttaagcatgcactcatgaagaaccaggacagccaccttgtccttcctgawtccttaaagcttttgttattaaaggttctgcattccatgacttgtcatggaaaagataaaataacccaaattgagtatattgatgtggtgacataaattgtggaaatagtttaaaaccaatgtttggttccatagtcctgggaagacaatcaaagcttcaggtacatttggctacctgatggaccatttaacatttataaagggatttcattcaattgtcattttcaatgcatgttttctgtttgtataaaagctttcccatgcaagagggctgatgttacaacagtagattattgtgcaacagtgtattttcacctagtaaaaaaatcttttcatggt

SEQ ID NO: 638073 - DNA, 384 bp, Homo sapiens
gctggggcatatcaaagggaatttggaatggtttatgtggtttgaaaattcttgggggcaaaactgccttcctgttgcttttggaaactatcatccagaattggaaaggaggtaaacaacaggaactcctccaccatttggtttgcttcccctttgtacttagctaattattttatgctaacaagagagcatgtttctccatagttacttttttttttttttttttttgaggcttgctgcaaccttgggacccttggaagatgaaagccaaatcagctcactttcagtttaggcacaaatgaagctgggtgtcttctgccmtacaaaccaatgaaagtgctttctcaccagcttccttccactcactgctccattgttcctaga

SEQ ID NO: 638074 - DNA, 557 bp, Homo sapiens
actcatttaattcttatgtcttccttacaagagagttaaaaatactattttcatgttacagatgaaaaagcagtctcaaaagtaagctctacctaatattacacaggtaggaactaaccgctggatctgggatttgaacccaggtagtgaaacttcacaagcctatggtccttctcattataactccataaacataattttccccgatttatagatggaaaaagtaaggctcagagttgttaagtaagtggtgaaaatgcaatggacctctgtctctaactacagtgctaattgcctcagctactgtattccacagctcacgatggtgacgtgttcagaactagtttctgcctctacgggactctttcctgattagaacaatgcatagacctgaattgtgtgaggaaactgggctgtgtggggagacctaccagaccctttaaggactagatacatgtaccctccaggggccaarcgtaagtgtttgtgccacacagaggatgccagccacatggtcagtatgagtgaaataattcatccatcaggcagggaccacc

SEQ ID NO: 638075 - DNA, 590 bp, Homo sapiens
ccagctattccctagaggaaaaagagaacttggggaatagaagagaacttacagaacataattaatttagtgtactcagaagtactgaagaatctgtggcatggataaaacaagaagagaatgttttattttttaaaaagtataattgaagaacaaaaaggattgttttagaaattaaaaataccctgacaasattgaatattcagagtagatggagtacaaagctgagttgaggaaagcttctagaaaatagaacaacggggagttaggaagaaaatataaacaaaaaaataagaggcattaaagatcaatcctaggagatctgacatgttattaactacaattttagagataacagagggtgggaaatgatcaaaaacaaaataaaaaagaatttcctgaagatgatgggagggtatctttaaatataaagaggttgcacagtgcccagcatgataaacaaagtattattcacacagtattttacaatttcagaacaccaaagattaagagaataacttacaccttgtcagagacagagagatggaggaaaacaggagctaagtcctcatagatcataatgtgaagct

SEQ ID NO: 638076 - DNA, 442 bp, Homo sapiens
aggacttagggacgtgagtgggccgtatggtgggattgtgaatttttatcgtcagtgtgcaagcattacttcggataaatatctatgtctatatcatctatagctatatccacacatataaaataaataaaaaatatgtacatcaatacatattagagtcaatacataatataacctatatattacatgaaataccatatgtagttattatatatattacatattatctgtgtatgtgtctttaaaagtagtatttgcaggttgtatgtttattacccaytgagaataaacccatcaagcaatgtctcttacgtcaaacacttaaacaaggtttagtcttgccaatacctattgcactacacacataattattgatgaatttaatacagagttataaaattatatcctacaaaggtcttccagtgggtgagaaaataagcct

SEQ ID NO: 638077 - DNA, 608 bp, Homo sapiens
ccaggggtggggacgtgtttatgtgcaaaatgccttgacccctgactgaccttcctctaccaccactatcaatgccccaccatagttacatcttctctgagttgttctctgagggtgcctgccagcctgaactcctggctcaggcagttgagtaggagaagaggtgggtgtttcagtaatttatttttgcgtgcctgatttaaaccatccccttctcaccaaatgggagctttcagctattagagaagacaagcagccccttttgtctctgtacctttcaagctgcaaagatgcctttcaccagattaaaagattaaggcttcttccagaattccaaaccagctggttctgagaattttaaatgtgcctgaaaaaaagcatctgttctttccatgttacttttatcttccctttatactaaccaactattcatttatgtccactaagcctgataaatggagaatctatagtttataaactcaaagaagaaccctattccatgcatttattattttcctaattttgctgatttcataaagactasaaaatcaggctttctatccttgtttttgagaggctgccagcctgacatgctcaatgttactgca

SEQ ID NO: 638078 - DNA, 575 bp, Homo sapiens
ccctggtttctttatctgcaaaatgtaaaacaatagtgtgtgacctggtatccacagttttccagtagaccccctactgaaggtcttgacrcataagatcagaactaaataggcttgctaattatcctacttatgtctttccttgtcttgcatctctctctgcattaagaatgtaagtttcatgagggtattaaattatataagcagtacaccattagcctgaggctgtctctgttctttgagctcctacataatgaactgcaatctaacttgtacataaacaaaccaaaagctaacttaggagtataaaaaacagccaagcttcatccagtcacaggcagctaactcagcacatcatgcccaaataaggcagatgctagctgcaaataatcaggtgatttctctactgtgtttctgtgtctggcctatgaaagctcatcactcatactgctgggtggagctttctgaacctcttctggttctgagtgttgcccaattcatcgattgttctccacagaaataaactcttctaaatttaatttatctgaagtttctcttttaacaagggcaaggac

SEQ ID NO: 638079 - DNA, 644 bp, Homo sapiens
ttgacactcagtagatgttagccagtggggatatagatatgttgagggagtggaagaagggagaaacttttgaacatggatcaattaaagaggaaaggtaagactttaagcatcagtttcttagatgacaaaagagaggatgactcagaacacaggataggggcactgaaagagatagatggagcccaaagattcaccttctctcctttgctatgttactggaggtcctgataaggttacatggatgccaactaaatcatcccatgtgcttccttcaaaagtgtggctcctcctttgtcattcttaggtgtgtgatagctatttattaaattatttgtggttggagggaaaagctaactggagcatcagcacttataagccacatgcccaagatcaaattgyatgtgggggaaaatccatttattcattcaacaagcatttttagagcacctactctgttctaagcaatgtgctcaacataaggcatgagtaaataaagcccagtcccagcttttaaggaactcagagtctggagaggggaaaatgatagataaaatgagtcattgcaatggtagtacacactcctcttcaacaccttgttcttgggcagatttatcacatcctgtaaacatcctactcaacat

SEQ ID NO: 638080 - DNA, 593 bp, Homo sapiens
aagcctctgagacagcccaagccatccgcatttagaaggtattttgtagtcagggaattgaggaaacaatgggaggagggcagtgggcagagcatgctgatctgggatctgaagaatgcagcacagctgggggcagtgggatctcaggcatcaggagtgcagattgacaagcagcttcaggaggcagggagaatacatcatgggacaatgcggacaacctggagaccaggggctcagcttcaatagcaatcaacatgggctaggtgctggcaatagaaaggtaaggaagaccctgcccaagttcaccagctccttgttcactgggaatgatgagcacatatacaggtttgtttacatagtatgttaagtgtagtgatacagtgtacacaagtttactcaactcattttttaatgcctgcaaaatgagtaatgataataccacttaccctagagggtttttgtgagaactaaataagagwtataatgcatacaaatatgtgtgcataatacatatacacatacatacacacatataaatgcaattcataaattatgcagtgctgaagaaacattagtttatttcataattaatc

SEQ ID NO: 638081 - DNA, 608 bp, Homo sapiens
agatcttttgagactgacctttccatctccaggatatctctactctctcgttcttcaacttgattatcatggagccatctgtaatccatggtatcacacccagtttcaaacatccttgttcttctgagagaatctgatcaagtggacttgtttcgtatcacacasgacactggctagtttattggttggcggcctttgggtcaggtgctcatccctgaagacagagatatagtggtcaaaacatggtaagcaaactcagttacatggtcaaaggttgccttttcaggaaggactatatacaggtttctcagaaagtttcagtgggattgagccccacatgccccaagaagcaatacactcatttacttgcactgtagtgatttctttcctttccctcttttactttccccacttcctcacttatgctttctgaggtcacctccaaaataaacagtctaaaattatgtctttgtctcagaatctgcttttgggggaactcaaactaaaacaaaaagactctaaatatgggagacaatctgccctaaactagcttgtctttggcttcactgtaagagcttcaaaaaagtacagaatcctggcctccacaa

SEQ ID NO: 638082 - DNA, 545 bp, Homo sapiens
cagtgaacttgaagacaaatcactagaaattacccaagtgaaatacaaatggaaaaaatatttttaaaaaatagagtgttcaggagctgtggtacaataacagtctatgtaactggaatcctagaaggaaaggaaaaaaagaaaaagcaatatttgaagatatattgataattttcaaaaattaataaaagataccaaaccacaaatccaagaagttcagagaacaccaagcaagatacattaaacacacacatacacacacatacacatacatgcaygcacacacacacacacacagctctagacatatcatattaaaatttctaaaaacaaagaaaaaggattggccttgaaatcagccagaaaataaacatgagtgcacgtgcacacacacgcatgcacacacgcgcacacacacactaacatattacatacagaggaataaatttaaaaattgcagattttttgtcagatctattcaagccagaagacagtggaatggcatctttaaagtgtatttaaaaattgacagcctggacaatttc

SEQ ID NO: 638083 - DNA, 598 bp, Homo sapiens
caatgacctgggaagactacctgacctgatgtgtgtcacacatacatctgtcaaccaatcactgtagctatgagcatgggggattctgacccaccagttcttggtcgaacactcattcctagggactgagtaggtagggagaaaggaatcagctccccttgaactataggaccgaacagaattactatgaaataagactatttactcaaaaaaagggaccctggatagtaaaaaatgtttcaattgccccatatatgcactcccctcacatgatgccaattcctcccatctatgacaggaaagaaaggacatgcctcttctaccaaaggagatacttagctgcccatgtttcctgcatctagctgtaaattgaggatctccaaatgacaagcattcttttagtgcagaaccagatgtgactcctatggactttaacccattactaagtgatgatttattaaagcattcctccacaggaaaagtgtgttcaatataaaggggaaatasaatatgactaattcaaactcccagttggaaaaagagagaagttaaggcaacatgcagagatctacatcatatctcacatgcatggacagaa

SEQ ID NO: 638084 - DNA, 523 bp, Homo sapiens
aatgctacttcttttctggtttttaataagaattaaatgagttcatgcaagtagcacatttggtacagtatctgatgtatttcaaatacacaatcatatcttctaaaaatctgtttgtacaaatacaaagtctctttgtttgaccaaaagagagattaatttacacakctgctcttcagaatggagtttttcatagcaaatgtgaatatggttcctttcttgacctaaccctaggcaggaaacagtttccttaggttgggcacattgtaattgtggtaaaactgtgtaaccttattcataacatgtcgtgttttgtttgatggtttacaaatattctaaagagcttgacccatcaaagaagctagaggttgccagttagaggaaacagtctgtaactgagaaactttcgagtgaatagcttaaaagaaagaaaatacaaataatttcttcacacctccattaaaggagaggctcaactcatccgggaaagatggcagcagggttcaaggtgcctttggagaga

SEQ ID NO: 638085 - DNA, 608 bp, Homo sapiens
agtacgtgggttttccttttgccttttctgatttgtttagcacttggcatttagcacttggcattttgttctggaatctgagacattattgcctctaatatttgagagatatcattccaagctacaaattctggctggcaaagtcactgtaaacataaagttggcagtagtcacagtctgaatgcaaaggctgccagtcttgtcctaagtgcaggcatgtatggcaaagactagtcaatttgaaaaataataatattgtcatcaccaaaatatttactgtgtgtgaaccactgtatccatcattcttaatagtagcaataataatgcaaaccacaataataattgctaccatagtaaaatgcatttttaaaagtagtttgagtatatcatgtcatttaattctcacatctaccacttttatatgcatgcttttctgtacctgtgtgatcatttagttatctatcaggctctgttctaggaaatactagacataaagcagaacaggatagcctaggtctctgttctcatgaagaagtcagaaakcaacatttcagatagagaaacatgccttaaggacaataaaaacttaagatgtggcagagaatgct

SEQ ID NO: 638086 - DNA, 583 bp, Homo sapiens
ttaatttagtaatccttagactcttaattttcaagtaattttcttcttaatgaaggatatctctagctgtctctaggatccaggaaacaattctcaagatgtcattcttttaaatttactttaaactagcgattcatatagcatatgaataatattgatttacctactgcttatggaacatctacaatataccaggtgctaggatagcttcggtgatgcagcaggtaaagattccccaggttggtgatggaagcagaaacgtttcatgtaattatgtaagccagatattactgacaccttctgccccttggagatgtcatcaaattttgactaaaccaggattccatgtcctgggacagtcaaaaactctcctcacaatttcttcyagtttctctaagttactttctattcctttattcctctagtgttttctgtatccatatggctgttttcctctctcctagtgagtgcagatataaagcaaagcctctttcttagtttattccttaaatcgtatttcctacaaacagtttgagagttgagtgactttgtgaactaaatagtcacagtgaggaggaggcaa

SEQ ID NO: 638087 - DNA, 532 bp, Homo sapiens
attcaacaaatcctaatttgaatgttacgatgcaccarcctgtttataagcaatggggtcgtaacaatgaacaaaacagacaacaatccctacctcatggagcttacattgtattgcagaaaagagatagtacaaaagataaatagaaaaatgtagtctcttcaatagtgatacaagctaaagagaaaaataaagcagataaatggaataaaaggtgttgggaatggttaaatttttctgataagttgattaaggtaaagctcagtaagattaaggaagtgacagcaagccaggaagatatctggggaaagagtatgtgaaggccttaagaagggactgtttgaactcacagatctatcacattctagatatggttttttgaaaaagtagatgaatctagatgaatgaatagaggtatattcatgtgaaatatggtgaatggtcattttcatcttcaagtaaaattgtaattgttcctgtattaaataaactgaaaggttaacaaaaaaaaaaagaaggaagaaggaggagg

SEQ ID NO: 638088 - DNA, 532 bp, Homo sapiens
attcaacaaatcctaatttgaatgttacgatgcaccaacctgtttataagcaatggggtcgtaacaatgaacaaaacagacaacaatccctacctcatggagcttacattgtattgyagaaaagagatagtacaaaagataaatagaaaaatgtagtctcttcaatagtgatacaagctaaagagaaaaataaagcagataaatggaataaaaggtgttgggaatggttaaatttttctgataagttgattaaggtaaagctcagtaagattaaggaagtgacagcaagccaggaagatatctggggaaagagtatgtgaaggccttaagaagggactgtttgaactcacagatctatcacattctagatatggttttttgaaaaagtagatgaatctagatgaatgaatagaggtatattcatgtgaaatatggtgaatggtcattttcatcttcaagtaaaattgtaattgttcctgtattaaataaactgaaaggttaacaaaaaaaaaaagaaggaagaaggaggagg

SEQ ID NO: 638089 - DNA, 443 bp, Homo sapiens
gagtgaggattgacaagggatcgttttagggtgatgaaaatgttctaatactggattgtgggggtggttgcacaactctataaatttattaaaaataattgagttgtacacttaaaatggatgaatttaatgataatgtagagtttacccaaataaagctgttaaaaaataaggggaaagaaaaaggccacttccccatgaggtctattccaacctctcaacacctcctttccctaggaaacccaacccctcacactctgctctactttttttgaatagcattgatcaccttctaatacactataaagttttcttgttatgtttttcgtctaactccctccgctacaatatgkttcgcggaggtaggagtttcaagtctgttttcatcgctaatgtatattctcagggtctagaacagtacctggcatgtggaaggcacatat

SEQ ID NO: 638090 - DNA, 435 bp, Homo sapiens
cggccacaagtgacaggaaagagggaaggtggggagagaaggctggttacgtgtctgcatgcctggcacccagcggcaagctgggatgccattagcattcctgcttccagggtgaggaccgtattggccaggacagcacttgctggttgcctggttgccctgttcagacattaatgtgccctcaagtaactgcagatggagccggtgacaacggataggcaccagcctctgctacctcaccatttctgaggccatcaagtgcatctggatggctgcatgtagaaggccttcctgtcctgtccccaagttgcccagtcacaacagttcaggtgtgcttgctgaagactaaccccttcccacctgaagctagtagactcgagcacrtctctggaagcctatcaaacaagaaacagaaattaatggcaggcagtttgg

SEQ ID NO: 638091 - DNA, 591 bp, Homo sapiens
ctcgtgatatctcacatactcactatcatgagaacaacactgaagggatggtgctaacccattcatgagaacaccaaccacattatccaatcacctcccaccaggccccacctccaacaytgaggatcacaactgaacataagacttgggtggggacacagatccaaaccatatccaactctgctttttacctctgagattcacatgttcatagcctcatgtcacagagtagaaagagcacctgattttgaagtcagacagatctgagttcaaatcttagttttgctacttatatacagtgggactttgagcaagtcagttaacctctgtgaacctcagtttcctcatctgaaaaatggggataaaaatgcctatcttgctgggttgtggggaatgtttataaagctaatatgtgcaatgtacctaaaacagagtcaaatccctagtaggaactcaataaatggcagctctaggtcagcattcgtgatttgctctacaaccatcaatattcaatgagatggctgatttgctggcaatattcaaggaagaaaactatttagagggcatatatttcttttcctgagaaaatag

SEQ ID NO: 638092 - DNA, 538 bp, Homo sapiens
cctctgcctcatattaagaggaataacttcacttttctcaatcattggcttaatatctttgacaaaagatcaccagctccatggaaatttttctctsagtatttctgtgatactctgattcttcacatatgcttagcaatgcatctgtttgatccagcaccatgtttttcaggcaggggtggcactacagggtctaccagtgtgccatcaaatacttctgtggtccctacaacttacggttttctgagagcagcatgtgataaagtgggagaatgagttatagatttgttttcagctttattaatggagactcatggtagtgttgactctgcccccataataatggtcttgggccaaacaattcaatatcaaaaatgatgtacttgtaaagtgtagtcttctcattaaattatatgcaatgatgatggctacttctttcttccaattgaataaatttcccttagagataactcattcctgacgtagctggaacactggcaacaaaccaagtgttaaaagaaaacttcagccaaaataa

SEQ ID NO: 638093 - DNA, 514 bp, Homo sapiens
caggcaaaatcaaatttctatactattgttccaayttttaaagaaactctaaaaaatgatatcttttagcaattctaaatcaaatacattttaccgtcaaagagctatcatgctttcaacttatttttcatgccagatgtctttataggcccatttccaattttaactaaatctcagacacatcaatggatatcaattaatctggttccactcacaaaggttagtatccatgcagtataaaatttaaaaattcaacaaatgaaactgaagtataaatacttagaatgaataaaaaagactatggaaattaaagaaagtaatcctgcaatattaccttaaatcctaaatcagcaaagcatgaaatgttaagtcctggaaaggctttgaaaatgtacttaccccaacaacagttcttgagctccattcagatctacttttactttatagtttataccgtgctcatcacacaatttcatttaaccttcacagtaacccatggaggtagatactataa

SEQ ID NO: 638094 - DNA, 533 bp, Homo sapiens
cccttccctttccaggtcttttccctgctccagtagagtattaactaagagtctggcacctttttagatctgagaagagttttgaaacctgctacctggaggcttcatttgcatcataaaaagcttggtctctgccaggcccagtggctcatgcctgtaatcccagcactttgggaggccaaggcgggcggatcacgaggtcagaagatcgagaccatcctggctaacgcagtgaaatcccatctctactaaaaatacaaaaaattagccaggcatggtggcrggcacctgtagtcccagctactcgggaggctgaggcaggagaatggtgtgaacccaggaggcagaggttgcagtgagctgagatcatgccactgcactctagcccgggcgagagtgcgagactccatctcaaaaaaaaaaaaaaatcttggtctccacaacctcttatattaacacagataatcctttctattgattcctgatctttagataataactttgctctttcaaccaattgccaatccgaaaat

SEQ ID NO: 638095 - DNA, 592 bp, Homo sapiens
ctttgcaaaaaacatctaataaaggactgttatccaaaaaatacatataatttttaaactcaacaatgagaaaacwacctgcttaaaaaattggcaaaagaccttaacagatatctcatgaaagaaggtaaacaaatgaaaagtaagtatatgaaatgatgtttaacatcttatattaagtaattgaaaatttaaaaaaataatggaggggccaagatgactgagtagaagcttctgaggtccttggctttcatggagaagaatgaaaattatgagtgaattcaacactttcaactgaaatgtccaggttctcacattgagactgactagacagatggtgcgactcacaaagaaaagtatggtggggtgatggcaacccaggagtggtgttgggccaaaggaaccctcatccccagccaagggaagtggtgagggattgtgcaacccgcccccctacctcgggaaaccgtgcttctcccttggatctttgcaacccatggatcaggagaacccttatgagcccacaacatcaggaccttgggttcgatacacaaagctgggtggggtctcagcagagtggtcactcaggctc

SEQ ID NO: 638096 - DNA, 592 bp, Homo sapiens
ctttgcaaaaaacatctaataaaggactgttatccaaaaaatacatataatttttaaactcaacaatgagaaaacaacctgcttaaaaaattggcaaaagaccttaacagatatctcatgaaagaaggtaaacaaatgaaaagtaagtatatgaaatgatgtttaacatcttatattaagtaattgaaaatttaaaaaaataatggaggggccaagatgactgagtagaagcttctgaggtccttggctttcatggagaagaatgaaaattatgagtgaattcaacactttcaactgaaatgtccaggttctcacattgagactgactagacagatggtgcgactcacaaagaaaagtatggtggggtgatggcaacccaggagtggtgttgggccaaaggaaccctcatccccagccaagggaagtggtgagggattgtgcaacccgccccccyacctcgggaaaccgtgcttctcccttggatctttgcaacccatggatcaggagaacccttatgagcccacaacatcaggaccttgggttcgatacacaaagctgggtggggtctcagcagagtggtcactcaggctc

SEQ ID NO: 638097 - DNA, 556 bp, Homo sapiens
atggtacattgagaattgcttagaaaaaaaatagagaagtacttttgaaagaaaattctttcaaaatgtaagtataacctcattcccctggtctcactcccttcctgctataactgagatatcaacctgctgcctcattcttttccatccttgacacctggcattgcagggctctcaatggagacagctgatgtygccctgctcctcctgagcctcctccatcgtgaaaatataaactgtagcctgtcagacagaagttcaggtgccattatgtgattgtgtgtatgtgtttgtgtgtttgtgtgtctgtgcaaatagagaaagagagagggaaagaaagagaagtcttctcttgctagaaaataaaatctatattttatttaatttttttttgtggcggagaattctaagattttctttctctaactcagtaatgtctaacctgttacagtctacaatagatttgagcttttataatttatttttcacaatggtaacaggaatgcagtccctaagtcttatatatggcatattgctatgagttgggaatttaaaa

SEQ ID NO: 638098 - DNA, 543 bp, Homo sapiens
cttgggtggccaggaaaaagtttgctgcaggaacagggacctcatggagaacctctgctagggcagttcagaaaggaaatgtgggttggtgctcccacatagagtcactactgaggcactgcctagtggagctgtgagaagarggccaccatcctccagaccctggaatggtagatccacctgcagcttgcactgtgcacctggaaaagccgcagacactcaatgccagcccttgagagcagtcacaaggtgtgccataccctgcaaagccacaggggcggagctgcccaagaccatgggaacccatctcttgcatcaatgtgacctagatgtgagacatagagttaaaggagatcattttagagctttagaatttgattaccgcccccctcccccagatttcagatttgcatggagcctgtagccccttcattttggccaatgtctcccatttggaatgactatatttacccaatgtctgtacctccattgtgtctaggaagtaactaacttgcttttgattttccaggttcatagctggaa

SEQ ID NO: 638099 - DNA, 543 bp, Homo sapiens
cttgggtggccaggaaaaagtttgctgcaggaacagggacctcatggagaacctctgctagggcagttcagaaaggaaatgtgggttggtgctcccacatagagtcactactgaggcactgcctagtggagctgtgagaagaaggccaccatcctccagaccctggaatggtagatccacctgcagcttgcactgtgcacctggaaaagccgcagacactcaatgccagcccttgagagcagtcacaaggtgtgccataccctgcaaagccacaggggcggagctgcccaagaccatgggaacccatctcttgcatcaatgtgacctagatgtgagacatagagttaaaggagatcattttagagctttagaatttgattaccgcccccctcccccagatttcagatttgcatggagcctgtagccccttcattttggccaatgtctcccatttggaatgactatatttacccaatgtctgtacctccattgtrtctaggaagtaactaacttgcttttgattttccaggttcatagctggaa

SEQ ID NO: 638100 - DNA, 513 bp, Homo sapiens
aggcctcccactgcatctatgttgctgcaaaggacatgacttcattcctttttatgcctgtgtagtattccatggcgtacatgttcaacattttctttatccaatccactgttgatgggtacctaggttgattccacatctttactattgggaatagggctgtgatgaacatacaagtgcatgtttctttttgatagtgaaatttttkggggggtatatactcagtaatgaaattgctgggtcaaatggtagtttaagttctttgagaaatctccagactgctttccacaggagccaaactaatttacattcccaccaacagtgtataagcattccctcttctccacagcctcaacagcatctgttgttttttgacttttagtaatagccattatgactggtgtgagatgatatctccttgtggttttgatttgcatttctctgatgattcctgatgttaagcttctcttcatgtttattggcgacttggatgtcttcttttgagaagtgtct

SEQ ID NO: 638101 - DNA, 607 bp, Homo sapiens
aaggtgttttaagaaatccaaaattgtggattacccatctggttggctcatgacccaattcctgatccatggagctcaaataagttaaattgatctcatcctcaatcactatcagaaaggcagtagaagctcaataaatatttgttgaataagagtaagtatagaccctgaaaataggcagactcggagcatctacatrtcaaaatggacacagcagactcttctacttttcaaagcacctcagattctatgtcaacaaaatgacaattttcagagtgctctgctaaatggcaattctcctattttgggatgagaagcatctataataagcaatggaaacagaaactacattttgtacatgacagaaaatatttgatttggggaaagagttgagagatgacagcgtgctggcagtcctcagagccctcgcttgctctccccacctcctctgcctgggctcccactttggcggcacttgaggagcccttcagcccaccactgcactgtgggagcccctttctgggctggccaaggctggagcccactccctcagcttgcagggaggtgtggagggagaggcgccagcgggaaccagggctgcgtgcgg

SEQ ID NO: 638102 - DNA, 563 bp, Homo sapiens
ggacacagcagactcttctacttttcaaagcacctcagattctatgtcaacaaaatgacaattttcagagtgctctgctaaatggcaattctcctattttgggatgagaagcatctataataagcaatggaaacagaaactacattttgtacatgacagaaaatatttgatttgrggaaagagttgagagatgacagcgtgctggcagtcctcagagccctcgcttgctctccccacctcctctgcctgggctcccactttggcggcacttgaggagcccttcagcccaccactgcactgtgggagcccctttctgggctggccaaggctggagcccactccctcagcttgcagggaggtgtggagggagaggcgccagcgggaaccagggctgcgtgcggtgcttgcgggccagctggagttccggttgggcatgggcttggtgggccccgcactcggagcagtcggccagacctgctggccccgggtaatgagggacttagcacccgggccagcagctgtggagggtgtattgggtcccccagcagtgccagcccaccggc

SEQ ID NO: 638103 - DNA, 563 bp, Homo sapiens
ggacacagcagactcttctacttttcaaagcacctcagattctatgtcaacaaaatgacaattttcagagtgctctgctaaatggcaattctcctattttgggatgagaagcatctataataagcaatggaaacagaaactacattttgtacatgacagaaaatatttgatttggggaaagagttgagagatgacagcgtgctggcagtcctcagagccctcgcttgctctccccacctcctctgcctgggctcccactttggcggcacttgaggagcccttcagcccaccactgcactgtggragcccctttctgggctggccaaggctggagcccactccctcagcttgcagggaggtgtggagggagaggcgccagcgggaaccagggctgcgtgcggtgcttgcgggccagctggagttccggttgggcatgggcttggtgggccccgcactcggagcagtcggccagacctgctggccccgggtaatgagggacttagcacccgggccagcagctgtggagggtgtattgggtcccccagcagtgccagcccaccggc

SEQ ID NO: 638104 - DNA, 607 bp, Homo sapiens
aaggtgttttaagaaatccaaaattgtggattacccatctggttggctcatgacccaattcctgatccatggagctcaaataagttaaattgatctcatcctcaatcactatcagaaaggcagtagaagctcaataaatatttgttgaataagagtaagtatagaccctgaaaataggcagactcggagcatctacatgtcaaaatggacacagcagactcttctacttttcaaagcacctcagattctatgtcaacaaaatgacaattttcagagtgctctgctaaatggcaattctcctattttgggatgagaagcatctataataagcaatggaaacagaaactacattttgtacatgacagaaaatatttgatttggggaaagagttgagagatgacagcgtgctggcagtcctcagagccctcgcttgctctccccacctcctctgcctgggctcccactttggcggcacttgaggagcccttcagcccaccactgcactgtgggagcccctttctgggctggccaaggctggagcccactccctcagcttgcagggaggtgtggagggagaggcgccagcrggaaccagggctgcgtgcgg

SEQ ID NO: 638105 - DNA, 521 bp, Homo sapiens
cagaattgggtcacatggtacattatagcaatgtagcaaatgatagaacatttagtgcttttcatggggcaactacccctgaaaaaatgtatgtgaaaagtttaaaattagtaaaatatcagggtgctatcttgcagtgagcctctactttaaagaattttaactgtggtaaggaagataagcatatcaggcagttattttactgcttagcctattacaatagcaccaatggccttaagaaatgcacaaaattgttttcaaagttggctgtagtgatttctgccctgctccaccaattacaaggtaaagtcatcatttccatcyctggaatacaggctagccgtatgatttctgcaccaagttttttattaggcttctaatataggccatgctgatggaacaaagtttataagtattattttattatctttttatcaaggcattcggagcaggaatgtattccttgatgaattcccatttctgtccatctcaaccactgtaaaatacttaatgttaaatgc

SEQ ID NO: 638106 - DNA, 582 bp, Homo sapiens
ataagtattattttattatctttttatcaaggcattcggagcaggaatgtattccttgatgaattcccatttctgtccatctcaaccactgtaaaatacttaatgttaaatgcccatgcaacaaatttttaattatataagtggattgcacttgtgactaaaacatctagtttcttactcaatgtttatttctccatatctctttacaaacagagctctgattttgttgaatatataaaagtgaccaccttgaaaaaaatacatttcccagcgtcccttgtaaacatgtgatatagttctacccattgagatctaagagaaagtatacaatgtgcctaactcgttacaaggaagccaactcaaccagaataatccttttacattttcttcttcccatctttcttcctggagtatggtttggatactggagctccaactgttacctgcaaccatacagtaagaagaacatgctaaggatagttgagcagagaaacaggaagaacctgggcccctgatggtrtcatggaactgttaggcctgccttaaattgctaaccatagaattctcattacttgaagggaa

SEQ ID NO: 638107 - DNA, 641 bp, Homo sapiens
aagtaatcttctttatgagtgcaaagatagataagcacatgatgagttttccaaactgtgattaaataattccttacctctcattcataaccaaatcacgaaccctgggtcttaaaaccatttggcttctgtgacagataaactacctaggatgcttatattgccacaccatttgccaacagagataaacagagaataataagggaatcatttcctactggttgccagacaaatgtcagctggaaaatcttgtctactagaatgtggaaaccctaaattcagatgtttgytcttgctctgtgatgcccaagttgtaatagaaatgtacatttttttcccctaaggtgtaaggtgaatgataagctcctcatttccattcttcccttcaaggaactggaaaagatatgtctgaaattcaaaaacagattttgattgtagcaagtggatagtgaatttactgattagataacatagagttaggtggtttccagggatgcaggacgtaagtgttaccttatgcatccctatttagttttatcagcatttataaaggttgaatttcttttatttgaaacaacaaattttacaaacatttaaatgtaaagtgacaatgtcaacttacttttactcaaaaaattgta

SEQ ID NO: 638108 - DNA, 543 bp, Homo sapiens
tgttaccttatgcatccctatttagttttatcagcatttataaaggttgaatttcttttatttgaaacaacaaattttacaaacatttaaatgtaaagtgacaatgtcaacttacttttactcaaaaaattgtaacattaacactaaaattacctttaaaaagctcatttaaagatgccacatatctttaatacatatatgtgatatgcataaggtatacctaaatgtatatgcatataaatgtaatgataaccaagataaaagtaatataatgggtacctgagaagcagtacaattaaaatgaaattagatactaaatttttaagaaagctttcagagttcaagcagagatgctggcttaggtgtagtggtgtgtgaaaatgattttctcaaattagtctcatctggtttctgcatttagggaactgccttccttgttcacacactttccaccttcaaccacactcaccttctgcytatcctgcttagtgttgaaattgacagtttaaaaagtctaaaaacaacagatgctggcaaggtttt

SEQ ID NO: 638109 - DNA, 619 bp, Homo sapiens
cagctgttggaaatttcctagaagtggacttgcttgtgtgttaatttgctgtaaaaaatttgtatctatacttctaggtcgctttttgaaaacaaatatataccaccaacaatggctgacaatatccattccatcgcagtctcatgagcataggattttacaaaatgctttatcttgtcattttgacactttagattgggcattactgctrctttacagtgtatttcctttccctgaataaatctgatgactaattttaaaatttattttatttattttaattatttccctttttttgaattcttgttcatataataatatgatatgtttatatcataatttatcataaatgtggcattttaaatcggcagtgatagtatggacgatgtaacaactgatcttaaaaagctatattcaaaatgtattgctacttgcagcagaattctatataaaggtacatgtataaaataaacaataggcatgctagaataaaacataaatattttctatgttttgagtgttgagtatcactttaagaaggctataaagccaaaaaacattataagatataataacagaaaacaaactccactagtatttgtaacacataaacattttt

SEQ ID NO: 638110 - DNA, 313 bp, Homo sapiens
agctcttaatcaactttgaattaatttttatatatggtgagagataaggatctagtttcctcttttgcatatggatatcctgttttcccatgcaatttaatttattgatgaggatgttctttcccctcttggtgcattcctggtgagtttattgtacattcttggtgcytttgtggaaaatcaagtagctatgaatatgttcgttgatttctgagttctatattctgttccacttttctactttttttatatcaataccatagtgtttggttaccatagttttttagtatattttgaagcctggtagtgtgat

SEQ ID NO: 638111 - DNA, 509 bp, Homo sapiens
tgtttcttttgtctgattggtctagctagaatttccagtgctttgttgaatcagagtgataacagtgatcattcttgtcttgttccagttcttagagaaaagatgttcagattttccacattcaatatgatgtttgttatgagtttgtcatatgtggtctttattatgttgaggtttgttttttccatgcctaaaatatagagaatttttatcatgaagcaatgttgactcttatcaaatgctttttctgygtgtactgagagtatcatggtttttgtccttcattgtgttgatgtactgtatcacatttattgatttgtgtatgttgaatcatcttttcattcttggataaaagtctacttgagcatgatgtattgtctttttgatatgttgttggattcagtttgctagtactatgttgaaaatttttgcatctatgttcattagggatattagcctgtagtgttctttttgtgttgtatccttgtctggtgggttttgttattaag

SEQ ID NO: 638112 - DNA, 410 bp, Homo sapiens
gagttaagttccatagcttatttaagttccatagattattttattattccatagattatttatttaacaccaatgttaatttcctggtttcaataactgtatacattaaaaaaatgttaactatgagaagatgaatgamggaatataaaaagtccctgtactatttttttaggttttctttaaatctaaaattatgtcaaaaaaaaatttgaaaaagtgaaatgttggaatacctcatgatcttctgcagaataaaagccaaattgcttagtcaaacaatccagatctcaggttatctgggccctacccattttgacacactcatctactctcaagcagtctaggcacatgtcaaactccagataccccaagttgtttgcaatttcctcagcgctcgacaccttctttta

SEQ ID NO: 638113 - DNA, 410 bp, Homo sapiens
gagttaagttccatagcttatttaagttccatagattattttattattccatagattatttatttaacaccaatgttaatttcctggtttcaataactgtatacattaaaaaaatgttaactatgagaagatgaatgacggaatataraaagtccctgtactatttttttaggttttctttaaatctaaaattatgtcaaaaaaaaatttgaaaaagtgaaatgttggaatacctcatgatcttctgcagaataaaagccaaattgcttagtcaaacaatccagatctcaggttatctgggccctacccattttgacacactcatctactctcaagcagtctaggcacatgtcaaactccagataccccaagttgtttgcaatttcctcagcgctcgacaccttctttta

SEQ ID NO: 638114 - DNA, 560 bp, Homo sapiens
atctgggccctacccattttgacacactcatctactctcaagcagtctaggcacatgtcaaactccagataccccaagttgtttgcaatttcctcagcgctcgacaccttcttttacttaaaggctttgaacatatctttattatgttgagaggctcatttcttccagtttattccatgataacttgaaagatcatttaagacttaatgcaatgatttcctcctttatgtcagggtagcctaaaccatttctgttctcataatacctgtggttacttctctcctagcaattgcactaggttgtaatttatgatttacttctatgttccttttattaccctatgaatgatttaaagacagggatagtgttttttattatggwgttttgatgcctaggaatacctgggatacagtaatgacacaaaaatgatttatataaggaatgcttatgtcttatgtaaagtgcaccaatgatagagagtaaaattgcttctattttatcctttttaaaaggatgatgatatatattattaatacctcactaaagatgaaactgaagac

SEQ ID NO: 638115 - DNA, 599 bp, Homo sapiens
tagaactataacacaaaattctctgataatgcaaatatctatgacctaaaatgtatggactaatgcctttacatctggagagcactttttggaaagcttttacttaaggcctacactctgtattttaaatccaaaattaccaaatgtggttatctcaaattcaagattagaaatggagtcactaaacracagtgcaaaggaactgcgaaaaccaggtataccgattagttgccataaaataatcaagaaagagagagaagaaagagtttggattaagtatatgagttataaaagcataacagtctgtggccatttgtgtaaagctaatcagcctctgtctcagtgttagtctcagagataatctttgtaataaatatggacctgaataatcatcgaattttaaattatgattattataccctgtcccaaagtcccttaaagaatctatatgaaatttcaaactctacttaaatttttgtaatgtagaacctaaaaacaaataataccttttacgggaagaggtttcccttaagtgaaatgcttcatttcaatgtaagttcagagaagtaagccattatttcactctagacttgactaaa

SEQ ID NO: 638116 - DNA, 599 bp, Homo sapiens
tagaactataacacaaaattctctgataatgcaaatatctatgacctaaaatgtatggactaatgcctttacatctggagagcactttttggaaagcttttacttaaggcctacactctgtattttaaatccaaaattaccaaatgtggttatctcaaattcaagattagaaatggagtcactaaacgacagtgcaaaggaactgcgaaaaccaggtataccgattagttgccataaaataaycaagaaagagagagaagaaagagtttggattaagtatatgagttataaaagcataacagtctgtggccatttgtgtaaagctaatcagcctctgtctcagtgttagtctcagagataatctttgtaataaatatggacctgaataatcatcgaattttaaattatgattattataccctgtcccaaagtcccttaaagaatctatatgaaatttcaaactctacttaaatttttgtaatgtagaacctaaaaacaaataataccttttacgggaagaggtttcccttaagtgaaatgcttcatttcaatgtaagttcagagaagtaagccattatttcactctagacttgactaaa

SEQ ID NO: 638117 - DNA, 627 bp, Homo sapiens
ttttggcacaatttaccggtttaaagttcaggaattcttaaattttaaatggttatcagtgttccatatatcagaataccaagggtcaataagctgtcttattttcaattctgacattgcagaactattaaagcaaaacccaagaaacatttctgagccaaaattcagaagtttttccccagacttctaacaccaattgtcctcctatgtaatacactctaacaaaaaaaaattctaggaactgttctccaagcacatgtctgcaattttaaacagactcacgctgccatctgctccttctgataagagactcgtctgtctgctaagaaggtagggaaaaggctcactaagaaagaataatgcaactctgcaacctctacagcctcgctgggtggctcatggacctgcaccaactaattagggttcaaaccaacatttttaggatgtatttggatgggatttgaattcagtgtgactgcrctctaaacagcactacattcagctactggtgtaatttggacaatgagcccagcatctgctacctttcagcagcaaggcataatgagagaagtgtgattaagggaattcacctatctcaatggtttttatgattttagaaagctgaaa

SEQ ID NO: 638118 - DNA, 613 bp, Homo sapiens
tggtaggcatggtgtatgctatgggcatgtactacttctaattctgacaagggagtaccttgagataggtattattattttcattcagactgatgaacttatgattcctmgggttaattaatttgccaagggtcaaacagctattaagctgaagagctgtggtttaaatcaatgtacatgtgtgatgcttatttctacagatagttagatgcttgtatgtcatattgatttttcacctccaaatgaagcatctactcaagctgttaagatggaattatcattgttgatagctcacacactttaaacctcatcatattttattcttagaactgaccaacttaagtaactggatatttatgtggttgtacttctcttgctcatccccgcggactgggtacatgaatataagccagttttatctcatgtttaagaatcagactctttgtcttccctattccttataaggattttttaaaaagagacaatattattcttagaaaggtaccatcatatgactggagttgggcaatctcattgagcagaattatagtaggtggcttatggccatctcctgtaaataccaccttccaaacagaatcttaagcctaaattc

SEQ ID NO: 638119 - DNA, 613 bp, Homo sapiens
tggtaggcatggtgtatgctatgggcatgtactacttctaattctgacaagggagtaccttgagataggtattattattttcattcagactgatgaacttatgattcctcgggttaattaatttgccaagggtcaaacagctattaagctgaagagctgtggtttaaatcaatgtacatgtgtgatgcttatttctacagatagttagatgcttgtatgtcatattgrtttttcacctccaaatgaagcatctactcaagctgttaagatggaattatcattgttgatagctcacacactttaaacctcatcatattttattcttagaactgaccaacttaagtaactggatatttatgtggttgtacttctcttgctcatccccgcggactgggtacatgaatataagccagttttatctcatgtttaagaatcagactctttgtcttccctattccttataaggattttttaaaaagagacaatattattcttagaaaggtaccatcatatgactggagttgggcaatctcattgagcagaattatagtaggtggcttatggccatctcctgtaaataccaccttccaaacagaatcttaagcctaaattc

SEQ ID NO: 638120 - DNA, 534 bp, Homo sapiens
tgcacttgccaaccagcagttactgacaaactgaggcccctgttccaaaagccataactatagcttcaactggacaagagacaaatcagtctcttgaaatcacagtaacttcctcctgagaagaccaccaaacacggactggttatggccagtttacagaggctgtacacttgagtgccttttttgtcctgaaaatatcttttgacacatagggtctaactgtaatacatttgaatgttaattctccrctcaaagttgaacacagaatgcatgtaacatgtagcttgcttaacattcaggcacattacccccttttcatgaatcttcacagctcttcctatatcctgttgaatatgtatactaggccaaaccattcagcttaaattcctattacccctcccttccttgaagtgcttgctttctgtatttagccagaggctgtgtttcctgcctaaaggttgtaatccttcttaagaaataaagccctccttttaaaatttttgagttgatacatttccagatttttaaattttg

SEQ ID NO: 638121 - DNA, 566 bp, Homo sapiens
cactggtcatattgaattagggcacacctaataacctcaccttaacttgactacttctgtaaagactctttttccaaataaggtcacattctgaggtactgaggattaggacttcaacayatcatttttagaggacacaattcaacccataacaaagctgctagtcagatttggcctgggaactacagtttgccaattcctaatttatgtgatttccttttaaaatctgtctctctcactatgctaaaatagtcatgagaacagggaatgtgtccaattttgtttaacattgtatttccaggagttaggttgttgcttgacaaaaataaaacacaataaatttaactgcaaaagtgtcataattcaatcccccaaaactcacactggattacaagggaggtgccctaagtgttgcccttgcctacatttcagtttatttaaaattcatggtctaccaaacagatagagttacctttcttgaataccaaattaatacgttttctgccctatataaaatttcaacttgtttatatctctatggataaattctaaagtttttaagatgg

SEQ ID NO: 638122 - DNA, 564 bp, Homo sapiens
taaacgtttattgagtaaataaacacttaatgaaagaggaaagagtattggttttaagttttaaacatttactgaatctcccaccacgtgcacttgaccattcaaagtgagatgggacagagagcattaaagtttgactttcctcatcyttagatgttcaaaactatttcttccaacaaatcctttttacatggctggccaacaggggcaaccagataaagttacttcccagacatagaaagactagaggaaaagtaatatgtcaatgcagaggaaaataatgtgtactaagtccaggccttcagcattctgagctggacaccacctcttacctctttttcatgcttgtgtgttaacttctaaggtaattccattgttctctcattttcagtaatataaataagcagcattgatacaactgacaaaagatattttagaagtttctaatcgccgatgagttgatttttcatcttacataaataaattagagaaatgctgtaagagctaaaaataaaatgacaggaacataatttttttaacaattattttaggttcagggcacat

SEQ ID NO: 638123 - DNA, 564 bp, Homo sapiens
taaacgtttattgagtaaataaacacttaatgaaagaggaaagagtattggttttaagttttaaacatttactgaatctcccaccacgtgcacttgaccattcaaagtgagatgggacagagagcattaaagtttgactttcctcatctttagatgttcaaaactatttcttccaacaaatcctttttacatggctggccaacaggggcaaccagataaagttacttcccagacatagaaagactagaggaaaagtaatatgtcaatgcagaggaaaataatgtgtactaagtccaggccttcagcattctgagctggacaccacctcttacctctttttcatgcttgtgtgttaacttctaaggtaattccattgttctctcattttcagtaatataaataagcagcattgatacaactgacaaaagatattttagaagtttctaatcgccratgagttgatttttcatcttacataaataaattagagaaatgctgtaagagctaaaaataaaatgacaggaacataatttttttaacaattattttaggttcagggcacat

SEQ ID NO: 638124 - DNA, 578 bp, Homo sapiens
tgggagctggcctggcaagtgggtgggcacatgcactgggcaagaagctgagacataggggccacctgtgcagagtcacaatctctagcaccagcagcagaggcagcactgcacctcacttttcaataatttttttaaaagttgtatgtaatactcatcaattctaaaagtttaattaaatggtaattaactayatataagctggaaattcagatattacaaatatagctatacgtacatattttcactcttgcttatttcagcagatcatgagatgaagaaggacatatgaataacacaactcctaataggtgtttggagctgaggtgaaaagagccgccatgacattagactggaaaaagtagaaccaagtccaacacaagtaaactatggcttctgtatacggaagtgttatgcccagtttcaggtaacatttataagacaaagaaaaaattttaatggaatacattaagtggagaattaccaagtgcaaagcaagttcaaaatcttatcatttcagaaagaatgaaaatattaatctggaaaatgagatgtaaaattgtgctcaaatatttgaa

SEQ ID NO: 638125 - DNA, 484 bp, Homo sapiens
gttttaaagaaatgttcttgatttttttctgccctgatacatctgcttagaatttgccatttttatggccctgggatatatacaatgaacatctgagtacttagttttatgaagctatataatgtcataaatcatgaaattagtgaaaagactttatcatttatccaaacataatagaaaacaagtatagttcttgtttaagaattcacattcttaagatacgatttcagaaagtcttaaaagttttgggtttcagaagtttctttcccaggcctgaaagwataaatttttgacaggacacatcaatatgtcagcatctcttgggctaagaaatagggaataaagcttggaaatgctccccagttgattctgaaacatatccattccctttactaactggtgaaaacaattgattcaaatactaataaattcagaaaaacaaatccactcccagtagaaagccggaatcaagaactgaatttat

SEQ ID NO: 638126 - DNA, 614 bp, Homo sapiens
gttttaaagaaatgttcttgatttttttctgccctgatacatctgcttagaatttgccatttttatggccctgggatatatacaatgaacatctgagtacttagttttatgaagctatataatgtcataaatcatgaaattagtgaaaagactttatcatttatccaaacataatagaaaacaagtatagttcttgtttaagaattcacattcttaagatacgatttcagaaagtcttaaaagttttgggtttcagaagtttctttcccaggcctgaaagaataaatttttgacaggacacatcaatatgtcagcatctcttgggctaagaaatagggaataaagcttggaaatgctccccagttgattctgaaacatatccattccctttactaactggtgaaaacaattgattcaaatactaataaattcagaaaaacaaatccactcccagtagaaagccggaatcaagaactgaatttattatccactgaattatctgcatttatgattygggtcaattaaacctgtagcttttagaatctgtattgttagaaactttggcttttatgttttttctttgactgattacctgcagcatgcccagcactggc

SEQ ID NO: 638127 - DNA, 599 bp, Homo sapiens
aattcccaagatggcaaaagaacatcctaggataacagagataatagctgtacaacaggtttaaaagaccactagtcaagatgcaagcaaagctgaagcctctagaagtaatatctctgtattaattaaatattgttgagtaaattccactccaaaatttaatttcttaaaaaactttatttcgcacatrtttacagaccagctgagcagttccatgtatgtggaccagtggaccaggctaagccgatcttggctagacttgttcatgcatgcagccagctggcaggttggctgggggctgattattctgtaatggtcttgcattatagacctgagctgagctcaggtcttctttatatttctttcacatcttaatggcagactaacccaggccagttctcatgagggtaagtagatttgtacaggcacttatttaagctgtttcttgcaccaagtttgctacttttctcgtggccagtttacccacatggtcaagcccatggatagtatgggagatcactatcaaagggtgtggatacaaggaaatgtggaaaattgggtcaattaatgcgatttctctgccataatcactaacaaaa

SEQ ID NO: 638128 - DNA, 634 bp, Homo sapiens
taatttcttaaaaaactttatttcgcacatatttacagaccagctgagcagttccatrtatgtggaccagtggaccaggctaagccgatcttggctagacttgttcatgcatgcagccagctggcaggttggctgggggctgattattctgtaatggtcttgcattatagacctgagctgagctcaggtcttctttatatttctttcacatcttaatggcagactaacccaggccagttctcatgagggtaagtagatttgtacaggcacttatttaagctgtttcttgcaccaagtttgctacttttctcgtggccagtttacccacatggtcaagcccatggatagtatgggagatcactatcaaagggtgtggatacaaggaaatgtggaaaattgggtcaattaatgcgatttctctgccataatcactaacaaaaaatatgggagaaaagacttcttttgaactgatattttcagagaagtgtggcaattccatttgaaagcttagcgataaattagtaatagaaatttttaaaaaactcaggcacataaacatatataacaattattaactctaaggaaaaatagaacattgtaggaaaatatatataatctttgcattttatgtgtc

SEQ ID NO: 638129 - DNA, 491 bp, Homo sapiens
gaattcttttctggtcacttactggctgtttgatctagagcaaattacatagctgttctgagtctcagtttcccaatttgtaacagaaacagttacatatgcagaattatagaaattgctgagagataaagyaatcaacagaaaaagacaggaaaaaaatgacatagcttttcatgtatttaatgagtatttacaaagtagatatcacatgcaagactactgaggttaaaaggatatgttaaatataaccctgatcctgaaggaaccaacaatctatcagaagacataatacaaatattcatattctcaaatacatggagaactgtcactagtgtcatcaaaaagaagagcacaaagaattgtatggtgctacagaagctcagtgaaagaacagatggcacagagagatggaaagaagtttgcacttctgaagaaaaaaagacaaggaaataggatttaaagcacctcatagatattaacattgagaaaaa

SEQ ID NO: 638130 - DNA, 551 bp, Homo sapiens
tgaattcttttctggtcacttactggctgtttgatctagagcaaattacatagctgttctgagtctcagtttcccaatttgtaacagaaacagttacatatgcagaattatagaaattgctgagagataaagtaatcaacagaaaaagacaggaaaaaaatgacatagcttttcatgtatttaatgagtatttacaaagtagatatcacatgcaagactactgaggttaaaaggatatgttaaatataaccctgatcctgaaggaaccaacaatctatcagaagacataatacaaatattcatattctcaaatacatggagaactgtcactagtgtcatcaaaaagaagagcacaaagaattgtatggkgctacagaagctcagtgaaagaacagatggcacagagagatggaaagaagtttgcacttctgaagaaaaaaagacaaggaaataggatttaaagcacctcatagatattaacattgagaaaaacaaacatctcttcttttaagactagtaagattaaggaaaaattaagaataattttttta

SEQ ID NO: 638131 - DNA, 638 bp, Homo sapiens
gtgtactagaaaaaaatcaaaataatttggtgaagtaatagatttatttactggcctggcctgctgtctagcctgcctcccctctagccaattaaagcctaagtagctttcagtgacaaatttgtcttgtctccttaaataaacttctgttcctgccttttctctcttttctgtgacttctcttcttgtgtttttgccttgtataaaatctatgctgacaacataaaatgttattgtatacatgtatgacattttcttctaaatatttcaaaggtataccttgtccataaaatactgtaagttcctcaaggctagaaacccatgttatgcatagctttcaccataccttttatgatttcaaaataatgtgtaatataataactggaaatttggaaaatgcagaaaagtataaaataaacaattaaaactatccataaatactctacctagaaatagtgttaacagcttgtccaatgtttcaatgcatataaaaatctcagggcaaygattaacttatagaaaaattaaagaaactgaataagatgaaatcaagactagattcttaaaggcaccctgggagatataacattttctgccacattatgatttaatctaatagcatggaagcaatacatgct

SEQ ID NO: 638132 - DNA, 542 bp, Homo sapiens
ttgggaaagcattccgaagattagaaatcctgaaagagactgtgtttctttctaagtactcctgtaatccttgcctggtagaactccctaggcttaacaagcagagagccgctcacaagcacaagcagcccctgtgccatttgaccacaaggtttaaggaagagatgaatgaagagcctcaaggaactattggaactaagtgccagagtcccaagagagagtttttccttgaatttcacagagagctaaaatcacttttttgaacatgtgacagtgctgaagattcacactgagctagcaaagaattcctgcagctttaaaaccctgagagggacgatgccacggaaggctcaggtgcattcttggactcaatgcctgaragggacgatgccacggaaggctcaggtgcattcttggactcaatgtgttcacataaacactcctaatcatgtggatggaatagtagtgagtaaggaattgggaagtaggcaaagatgaatattttagtctctcttagaaaccaataacgtgtgctggcagga

SEQ ID NO: 638133 - DNA, 588 bp, Homo sapiens
aacgtgtgctggcaggaaacatygtaaaaacattaccccatgactctcagaattctgtcagttcttttgagcacccgagatcccaaaggaaacagttgtggacagttaataaattgatttctattgtctcagaaaaaaaagaggctgagaagatacggtgagttggcttcctcaatacccttcatcttctaacttgctttcaagtaatgtgatgcctagaaagataaaattacatttccaagagtctcctcagcctagttcatatatgtaatctagcgtcacatctatcaggtgtaaccatgaacagtgtgagatggaaagagcagatcttttgggaaccacagtggcagaagtggttcttccacaatgggttttaggcctccgggcagcagaaatcctggtgcttaagccagggcagccctgtcatgtggttgagcatttttccttgctaagttatctttgagttgattatccttatataagtaacatccagaatgagctttgctgactagaattaagaatgctgatcaatttggaaaacgtttatgattaagagaagtttatctggccatcctaaaaacaaagatt

SEQ ID NO: 638134 - DNA, 548 bp, Homo sapiens
aaatcaccatagtcataccacctaaatacagctatcatcaaaattttgctgtgttcctattgttgttgttgttttccaaaacatgttctggtttttagagtgtcatgacactggatacataattgttatgtcttcaagtttttcctattatcccacagacattttcatggattaatttttctatttataactcccattacattttagaaaagctttargttttcagaagagttttgaagataatatagacaattcccatacacccaagacactatttccccagttacgaacatcttacattagtatatttcacatgtcacaattaatgaaataatattgatacatcactattaactaaagctgatactttatatagattccctaagttttcccttatgtcttttttctgtttcaggataccatccaggataccactttacatttgttgtcaggtcttcctaggcttctcttggaagcttctcagaatttctttttttttttttttttttgatgactttgacagtgctgaaggctacattcaggcatat

SEQ ID NO: 638135 - DNA, 548 bp, Homo sapiens
aaatcaccatagtcataccacctaaatacagctatcatcaaaattttgctgtgttcctattgttgttgttgttttccaaaacatgttctggtttttagagtgtcatgacactggatacataattgttatgtcttcaagtttttcctattatcccacagacattttcatggattaatttttctatttataactcccattacattttagaaaagctttaggttttcagaagagttttgaagataatatagacaattcccatacacccaagacactatttccccagttacgaacatcttacattagtatatttcacatgtcacaattaatgaaataatattgatacatcactattaactaaagctgatactttatatagattccctaagttttcccttatgtcttttttctgtttcaggataccatccaggataccactttacatttgttgtcaggtcttcctargcttctcttggaagcttctcagaatttctttttttttttttttttttgatgactttgacagtgctgaaggctacattcaggcatat

SEQ ID NO: 638136 - DNA, 489 bp, Homo sapiens
aaataatattgatacatcactattaactaaagctgatactttatatagattccctaagttttcccttatgtcttttttctgtttcaggataccatccaggataccactttacatttgttgtcaggtcttcctaggcttctcttggaagcttctcagaatttctttttttttttttttttttgatgactttgacagtgctgaaggctacattcaggcatataggatgcccctctattgaaatttgtctgatgtttttctcataattagatgtgttatgggagaaagacctcaaagstaaagtgccacagtcattacatcatattaaagctatcaacatgacatattacagttgatgttgaccttgatctcctggatgtggtagtgattgacagtttttccactgtaaagttagtcctttatccctattttgatgtggtacctttttggaaggaggtcaccgtgagcggccatgctaaggagtagagagct

SEQ ID NO: 638137 - DNA, 489 bp, Homo sapiens
aaataatattgatacatcactattaactaaagctgatactttatatagattccctaagttttcccttatgtcttttttctgtttcaggataccatccaggataccactttacatttgttgtcaggtcttcctaggcttctcttggaagcttctcagaatttctttttttttttttttttttgatgactttgacagtgctgaaggctacattcaggcatataggatgcccctctattgaaatttgtctgatgtttttctcataattagatgtgttatgggagaaagacctcaaaggtaaagtgccacagtcattacatcatattaaagctatcaacatgacatattacagttgatgttgaccttgatctcctggatgtggtagtgattgacagtttttccactgtaaagttagtcstttatccctattttgatgtggtacctttttggaaggaggtcaccgtgagcggccatgctaaggagtagagagct

SEQ ID NO: 638138 - DNA, 548 bp, Homo sapiens
gctggagtcataataactgttaacaaaatatgagctctcacasacatcgtcgccctgcctcagaatcactgatgggctggattcagttcctcttttatgcttcaagcagatgggagaggttttcctcaagtgattgtgaacagctgtaagtgactgtattttccacctcacagtttcaatcatttgtttattctgaggacagctcttttattcactcctagtgaacagggccgttcacatcattattcttgaagccatgaattctaggagaacttgggccagttaatcctttccctaattcctcatttgccaaatgagaaaaaaaaatccttgactggaagaactatcaataaagtgtaatatcacatgcatcatatttatatattatatataatataacatatatttatataatacacataaatgaaaatataaaatgtcttctttatacacacacaaatgcgcaggtgtgcaatcaatatttatagacatttcataaatgtaaatttccctattttccccctcagatttagtgcatctatgagatg

SEQ ID NO: 638139 - DNA, 548 bp, Homo sapiens
gctggagtcataataactgttaacaaaatatgagctctcacacacatcgtcgccctgcctcagaatcactgatgggctggattcagttcctcttttatgcttcaagcagatgggagaggttttcctcaagtgattgtgaacagctgtaagtgactgtattttccacctcacagtttcaatcatttgtttattctgaggacagctcttttattcactcctagtgaacagggycgttcacatcattattcttgaagccatgaattctaggagaacttgggccagttaatcctttccctaattcctcatttgccaaatgagaaaaaaaaatccttgactggaagaactatcaataaagtgtaatatcacatgcatcatatttatatattatatataatataacatatatttatataatacacataaatgaaaatataaaatgtcttctttatacacacacaaatgcgcaggtgtgcaatcaatatttatagacatttcataaatgtaaatttccctattttccccctcagatttagtgcatctatgagatg

SEQ ID NO: 638140 - DNA, 548 bp, Homo sapiens
gctggagtcataataactgttaacaaaatatgagctctcacacacatcgtcgccctgcctcagaatcactgatgggctggattcagttcctcttttatgcttcaagcagatgggagaggttttcctcaagtgattgtgaacagctgtaagtgactgtattttccacctcacagtttcaatcatttgtttattctgaggacagctcttttattcactcctagtgaacagggccgttcacatcattattcttgaagccatgaattctaggagaacttgggccagttaatcctttccctaattcctcatttgccaaatgagaaaaaaaaatccttgactggaagarctatcaataaagtgtaatatcacatgcatcatatttatatattatatataatataacatatatttatataatacacataaatgaaaatataaaatgtcttctttatacacacacaaatgcgcaggtgtgcaatcaatatttatagacatttcataaatgtaaatttccctattttccccctcagatttagtgcatctatgagatg

SEQ ID NO: 638141 - DNA, 622 bp, Homo sapiens
ttttcctcaagtgattgtgaacagctgtaagtgactgtattttccacctcacagtttcaatcatttgtttattctgaggacagctcttttattcactcctagtgaacagggccgttcacatcattattcttgaagccatgaattctaggagaacttgggccagttaatcctttccctaattcctcatttgccaaatgagaaaaaaaaatccttgactggaagaactatcaataaagtgtaatatcacatgcatcatatttatatattatatataatataacatatatttatataatacacataaatgaaaatataaaatgtcttctttatacacacacaaatgcrcaggtgtgcaatcaatatttatagacatttcataaatgtaaatttccctattttccccctcagatttagtgcatctatgagatgatattacagcttcactgcatggcttctttaccaggttcttctcatccaacaagcaagctcatgttctagaagcctgaggcagagaaaaactgaatatcacttagtgataactatcttctgagcccaatcactctctttgaacaaatttgaattggctccgtttaaattgagttcctgatctaggagaacaaag

SEQ ID NO: 638142 - DNA, 598 bp, Homo sapiens
atgtatgccatgtgtgagatcattttattcctttcaaataaatcatgtaacttcagtgtttgtcaaggaacccaaagtagtgaaatgtgaaatgtgaattgagaaaagttcagctgaccaagttccattaattttcaggaaagacaagtcaagttcagtcaaaagaagaagaatgaaaaatatctcaaagtgatttttttaatgggggaaattaagccttaggagtgtgtttatcttagtccttttgaatatattttatagcctataaataagatataggagtctataaaacaaagcccacaaaatcagtaccttgaaaatgtaaaacatttgacaatttgatatattttgactatatttaacattatagaaaatgaaatcagtatattctgtttccatgatatcaaaactttctgaaaaaaaataagtcagtcctttatgttaacttgcacatttcattaaatatctagatgtttgacatcatttaagaaatcattsagtttataatatatattaatgcaaatatttagcatcacataaataagtcaattctgggaacaaggtcaaaagtaatgaaagcataaaattctcccagcta

SEQ ID NO: 638143 - DNA, 598 bp, Homo sapiens
atgtatgccatgtgtgagatcattttattcctttcaaataaatcatgtaacttcagtgtttgtcaaggaacccaaagtagtgaaatgtgaaatgtgaattgagaaaagttcagctgaccaagttccattaattttcaggaaagacaagtcaagttcagtcaaaagaagaagaatgaaaaatatctcaaagtgatttttttaatgggggaaattaagccttaggagtgtgtttatcttagtccttttgaatatattttatagcctataaataagatataggagtctataaaacaaagcccacaaaatcagtaccttgaaaatgtaaaacatttgacaatttgatatattttgactatatttaacattatagaaaatgaaatcagtatattctgtttccatgatatcaaaactttctgaaaaaaaataagtcagtcctttatgttaacttgcacatttcattaaatatctagatgtttgacatcatttaagaaatcattgagtttataatatatattaatgcaaatattkagcatcacataaataagtcaattctgggaacaaggtcaaaagtaatgaaagcataaaattctcccagcta

SEQ ID NO: 638144 - DNA, 557 bp, Homo sapiens
ggactttttaatctttctcctttctcatttcagggccccayacatctcaataaataaagcaaaaaagtgtacttatttgtcccaagcagataatatttttttagaattgagcatttctgttatacttacatacattgatttcaatgttgaaaccagccagttattttgagctatttcctgagctatgtgatatttgtgttattttttcctagacacctctcagagtctcacactgattcctctgctttttctcttatctttccacaatctgttttccgaacactagttaatgaggctttacaacatagatatggttatgccactcctctgcttaaaatcctctaagggattctcatcatatgtacaatcaaatatttttatcatagtctagaagctccacatggcagtctcctgtctccagcctcttcttcttttccttttcctcctcctccttcttctcctcctcttcttcttcctttctctgtacagtaccataaaccttctttcagttcctttaacacaccaaggtctcaggccctttgtactaactgttttat

SEQ ID NO: 638145 - DNA, 576 bp, Homo sapiens
acaaaataatttttttattcaaaagtatttcaaacatcatctctagtaaaagttagaatataaaaataaagagagaatttccattttaatggaaatatttccatattctttcctatagttggaaaatttggggccattatttctttaaataagctttcctaccctttatctttctctgtccataacttctctttctaaagtagccatacatgtatataaytcttctcattgataccctgtacatcctttagactttcatcgctgtttttaattttttttctttttgctctcctgactagataatttcacacatgaacttattcaagttcaatgattgtttcttctgctgtttaacccctctagtgagtttttaggtttgttgctatatttttaacttcaaaaattatattggttctttttgatattttctatgtatttgttgaaatcctcattttattttattttatttttgagataattaagcattctttgctgcaaaggtttttaaattttttgacagataatttatatacctacatttcgttaggccctgtttctggagatttattttggccc

SEQ ID NO: 638146 - DNA, 628 bp, Homo sapiens
gaattcgttgattctgattctaggctgcacagaagcctaattagtatacacctctattatagttggaaaaaataatgttgtaattggctacattattataaaaacattactgaggcccacaattttttaaatagtattttattacttggattttaaataagaagtattagtctttacaaacatttgcacgtggttaaaaacatcaacaatcgtatgcagtttaaagacttttgctttccaaattaaagaataaacacacttcctcaaggacatactgctcagattagactactgctatgtacttaaaataagttaaatttaaccattcatataatattaaggtaacagaatgagaatatctcttcttaatacaattaatatttaatacatgctgtatgtatatatatatattcaaggtaaaygaataaagatatgccataccaacactaatcaaattaaagcaggaaagctgtatacatttcagacagagcagactttagagcaaggaaaggaacccagaataaagtagggcattacataatgacaaaaaagtcaatcctcctagaaggcataaagatcctcactatgtataaacttaacaacacagcatcaaaataaatgaggcaaa

SEQ ID NO: 638147 - DNA, 574 bp, Homo sapiens
gaaatctccaataagatgtaattttacatactggaatgtctgatatcaagaaaacagagggtggtcaagtatttttctggccacggaagcattgcaaactaaggcaaatagatggtaatgcagcctaaaatatagggactatagaaatgtaacattttttaaaattttaatctatttattcatgtattttgatagagagrtggaaattcagggagaagagcgaaagaatgaaagccagagaggtacacagggacttgattatcttaggtcttctgtctttaataatgggttgagcctttgtttaataaacaatggaggatttctgaagagcttagaactgttttctctctttgttgaaaaaaatggggcagtaaaaaaatgtacatcacaaaaaagactaagtgagaaaaattatacgaaagaacctatttgttctttgtgatctgacttggtattatttcatatttggccagaaagattgagttggtcttgtaaataaatgaaatggagtagaaaacagctttgcaacatgacagaagacatttcctaatattaacatatataattatccttt

SEQ ID NO: 638148 - DNA, 207 bp, Homo sapiens
ctttccacccttcaccctccaaaaggccccaatgtgtattgtcccactctatgtgtccatgagttatcattatttggcacccacttgtaagtgagaacatgcagtatttggttttctgttcctatgttagtttgctaagggtaatggcytacagctccattcatgtccctgcaaaggccataatcttgttcttttttatactgcgta

SEQ ID NO: 638149 - DNA, 497 bp, Homo sapiens
tagcatgtgaattctgcaccagcaatcaaggtacccaggttctctcatcagaactgtgtaggtggctgtcatgatccacggagaggaatgaagagcagtgtggtacggtggtgcacttgagagccacacagggcaggagagacccacccccagccaagacaggtggtgagtgagtgtgctacccagttggggaaacactgctttttccgcagaactgtgcaacccacaggttggaagatcttactcatgaacccatgcaaccggggcctagggtcccaaccccagagctgcatagattctcaacagcctctcagctggaatctgcttaagcctgccgagttcccagggggaggggtaacaagcaccacagctgcagctgcttgtctaagccrcttgagctccttggaggagggacagcagccagcactggggctaataactgcttaacacgctaagcttcctaggtggtggaagggaggcagccatctctatagctt

SEQ ID NO: 638150 - DNA, 561 bp, Homo sapiens
aatactgagaacctcagaaatgtaatttaattatgcatggtaagaaaatgccagaattcacaggcgactcccaggtcaaggaagcagtgagttagccctggctgaaamtttatgtagtcatattctttccttagactttcctttcaagttttataagtttgagtactattcatattcaatacatataaactactattcatatttagagaagaagcacttaaatgtacctgataggaaactatctgttttatcttagtggaaaaatctcctagaggaagggaccactgtgtgagaagatggaacagtggagagcacattttgatagacacattcagacactgtctctcctggccctgggattgtcactgagaaaactgtaagggaattttatctgttccaagagaaggacagatggcctcaggaagttcaaaagggatgaagggtagagggcttttgaggcatattagaattgtatatttcatgtgacctaaattcttctcctttgtttctctcaaaattctttagtaaaatctacattattcactggtactttgcaaaatc

SEQ ID NO: 638151 - DNA, 598 bp, Homo sapiens
caattagcaaacacagaggacctaatcacagagaaacacagtctcacactcaggaataacatrgtgtgctccacaactcccattcgtcaataacccactaaatgtcccctagtgcttgtccaccacagcacttaaaaacccttcaccttttgtgtccatggagttaagtatccagactgggtctttgttccttctctagttgctggtagtaatatcaaaatgaaataattctgtttactcatctctggaacttttttttttaacaatgtttaattagttctacaaggataaaagaagcatatttaagtgtgccttcaaaaaaaataataaaataaataagaaaaaaacgaatttagaaaataaccaactatgagcagccaagctttattgtttttaaatatttattataatgtaatctatagtttatacctttcctataagttattatttaagaattgttcagttattttaagagctctaattttgcagaaagaaggtggattcattttggactaacaaacttcagaaagtttagttattatcttaatgtacaccacttagcaacacatctgaattgtaaatctgtgcttaaaaaata

SEQ ID NO: 638152 - DNA, 598 bp, Homo sapiens
caattagcaaacacagaggacctaatcacagagaaacacagtctcacactcaggaataacatagtgtgctccacaactcccattcgtcaataacccactaaatgtcccctagtgcttgtccaccacagcacttaaaaacccttcaccttttgtgtccatggagttaagtatccagactgggtctttgttccttctctagttgctggtagtaatatcaaaatgaaataattctgtytactcatctctggaacttttttttttaacaatgtttaattagttctacaaggataaaagaagcatatttaagtgtgccttcaaaaaaaataataaaataaataagaaaaaaacgaatttagaaaataaccaactatgagcagccaagctttattgtttttaaatatttattataatgtaatctatagtttatacctttcctataagttattatttaagaattgttcagttattttaagagctctaattttgcagaaagaaggtggattcattttggactaacaaacttcagaaagtttagttattatcttaatgtacaccacttagcaacacatctgaattgtaaatctgtgcttaaaaaata

SEQ ID NO: 638153 - DNA, 639 bp, Homo sapiens
tgtaaggaataaagtagatgatctgtttaaagtacttagcagattactaggcacatactaaagtttagtgtgtactttccttaggatttttattaatgtgaatttaggattaatatgaatttagaaccaagttcatcacatccacttagagattgcttctccaatcatccctcaggtaagaagtaatcagttgctgaatttgctctcctaaccctatatgtcggtgccatcaatactttcagaaatccaaagagtgagactcattgtgatgagcaatgagcatttcaacrggtgttggaaactccatattgtgcgatatgttttatgtgattgctcaagagctttcaggaatctaatcagctttcagaagcctaaattccatattgtgcaatatgtgttatgtgttagcttaagagtttttaggagcctagacctaggtcaatccacccaactactttcttcgagacccttccaacatcagccttcctccagtgcccaggctcttagatattcatgcaaatggccaaacacaaatcattagaatttcttcagacaatttcctcttaaaagacagggatattcagtcatttattagagagttttccagtttcctgaggcctctgcctcatattaagagga

SEQ ID NO: 638154 - DNA, 523 bp, Homo sapiens
ttgattctaaaagatttctcttaaattgaggaaaaataatactttgaataaacattgataactgaatttttaaaaaattctactcaaaagcacttacttgcataagccatatgtaagcatgttttcaaaagttaatcaaatattagtggttcatgctataccaagtcattcatatgacattatcatgctcagtataattattttttaatgaacagtttagggtcagcatatagaacttattttgcwtgaaacaaaggcaaaaataaaacttaagactttttttaattcagactaagcaaaaagtgttacaaattctcataatgtcagacacttccatttttcttataagaaacattctggctacaaaacagcttttcgtatacaaacttatgaaaaccctaagatcacaaaatgcttatatcattgacaacttggatttgaaaaaaaaatacacttaaagcttacaaactcagtaaaagttccacgatatgtattacttactatgttaattcatctttcttca

SEQ ID NO: 638155 - DNA, 523 bp, Homo sapiens
ttgattctaaaagatttctcttaaattgaggaaaaataatactttgaataaacattgataactgaatttttaaaaaattctactcaaaagcacttacttgcataagccatatgtaagcatgttttcaaaagttaatcaaatattagtggttcatgctataccaagtcattcatatgacattatcatgctcagtataattattttttaatgaacagtttagggtcagcatatagaacttattttgcttgaaacaaaggcaaaaataaaacttaagactttttttaattyagactaagcaaaaagtgttacaaattctcataatgtcagacacttccatttttcttataagaaacattctggctacaaaacagcttttcgtatacaaacttatgaaaaccctaagatcacaaaatgcttatatcattgacaacttggatttgaaaaaaaaatacacttaaagcttacaaactcagtaaaagttccacgatatgtattacttactatgttaattcatctttcttca

SEQ ID NO: 638156 - DNA, 523 bp, Homo sapiens
ttgattctaaaagatttctcttaaattgaggaaaaataatactttgaataaacattgataactgaatttttaaaaaattctactcaaaagcacttacttgcataagccatatgtaagcatgttttcaaaagttaatcaaatattagtggttcatgctataccaagtcattcatatgacattatcatgctcagtataattattttttaatgaacagtttagggtcagcatatagaacttattttgcttgaaacaaaggcaaaaataaaacttaagactttttttaattcagactaagcaaaaagtgttacaaattctcataatgtcagacacttccatttttcttataagaaacattctggctacaaaacakcttttcgtatacaaacttatgaaaaccctaagatcacaaaatgcttatatcattgacaacttggatttgaaaaaaaaatacacttaaagcttacaaactcagtaaaagttccacgatatgtattacttactatgttaattcatctttcttca

SEQ ID NO: 638157 - DNA, 584 bp, Homo sapiens
acttaggttgattccatatcttggctatcatgaatagggctgcaataaacatgggagtgctgatatttctttgatatatggatttcctttcttttgaacatatacccagcaatggaatttctggatcatatggtagttctatgtttagttttttgaggaaactccatactgttttatggtggctgtactaatttacacttcttccaacagtgtataagtgttctgttctcccttctctacaccctaacaaagtgcttttgcataaattatctcattctgatttttctttctaaattacagaagtctygttcaacaggaagggtagattttattgtatatattttaaagatcataaagctgatattcagagaaattatttaaagccaccatgagctccagttctaacatatgaaagttcattttaactcccttgaagtgctttctccctctatgatattgcagtgcctatcttctactatgatggagtgtcagacaatagaatggaaaaggaagttagacttttggctagaaaagtttagccatagtcttgagaatgggcttttgtgctacctgtcttaaagatg

SEQ ID NO: 638158 - DNA, 575 bp, Homo sapiens
caagttacttaatgcctctgattcccagtttcacctactataaaatggaaaaattttgaagaattgtgacaatttgagatgtgcatataattttcttggttttggtatttctgattattaacacctcacacttgctctctccattttcaggacaaggaaagcttaaataagaagataattcaggctatacatacaagtgtttacacacagtttggcttggggttaaaaaaacaaaactgatataattctgataagcaataatttttatgttaacaaacagcttattgattcagtcaaatytgggttttccaaataggggtttatatgaagataaagtctcatttcattgagttctcacacctggctgtctaatacactcatctggaaggttcatctgggggactagaaaacaaatgaagcaagaagtgggatgtcaagaagtatggaaggtctcatcagagttttaccctaattgcaaggtggcaaattgttctaccacaatttcatgggcactggcagaacacatgagtctcctgagtcagagacaaaggattttattgctcacagcaaagcta

SEQ ID NO: 638159 - DNA, 564 bp, Homo sapiens
caatttgagatgagattcagttggggcacaaccaaactatatcaatatttgttaaaattgatgaagcaatattgatgcacattattgttaactaaagttgatagtttaaggtttactctttgtgttatacagttctatatttttgaaaatgtatagtgtcatatattcaccattatagcatcatacagaatagtttcactgtcctaaatgttccctgtgctccatcaatagaacgcattccaccttcttgcagcccccagaccttgggaatcactggcctttttactggctctatagttttgccttttcctgaatgttgtattattgggatcacagagtagttatcctyttcagaccggcttctttcactcagcaatatgtgtaagattcctccatgcctttcatgtctgctggctcttatttaaaaattgctgaataatactccattgcatgaatgtaccatagtttatcaattcatttggtgaattgctatgaagtttgcttctaatttttcgcacctatgaagaaagctactataactattatatggacacaagttttcaa

SEQ ID NO: 638160 - DNA, 564 bp, Homo sapiens
caatttgagatgagattcagttggggcacaaccaaactatatcaatatttgttaaaattgatgaagcaatattgatgcacattattgttaactaaagttgatagtttaaggtttactctttgtgttatacagttctatatttttgaaaatgtatagtgtcatatattcaccattatagcatcatacagaatagtttcactgtcctaaatgttccctgtgctccatcaatagaacgcattccaccttcttgcagcccccagaccttgggaatcactggcctttttactggctctatagttttgccttttcctgaatgttgtattattgggatcacagagtagttatcctcttcagaccggcttctttcactcagcaatatgtgtaagattcctccatgcctttcatgtctgctrgctcttatttaaaaattgctgaataatactccattgcatgaatgtaccatagtttatcaattcatttggtgaattgctatgaagtttgcttctaatttttcgcacctatgaagaaagctactataactattatatggacacaagttttcaa

SEQ ID NO: 638161 - DNA, 564 bp, Homo sapiens
caatttgagatgagattcagttggggcacaaccaaactatatcaatatttgttaaaattgatgaagcaatattgatgcacattattgttaactaaagttgatagtttaaggtttactctttgtgttatacagttctatatttttgaaaatgtatagtgtcatatattcaccattatagcatcatacagaatagtttcactgtcctaaatgttccctgtgctccatcaatagaacgcattccaccttcttgcagcccccagaccttgggaatcactggcctttttactggctctatagttttgccttttcctgaatgttgtattattgggatcacagagtagttatcctcttcagaccggcttctttcactcagcaatatgtgtaagattcctccatgcctttcatgtctgctggctcttatttaaaaattgctgaataatactccattgcatgaatgtaccatagtttatcaattcatttrgtgaattgctatgaagtttgcttctaatttttcgcacctatgaagaaagctactataactattatatggacacaagttttcaa

SEQ ID NO: 638162 - DNA, 544 bp, Homo sapiens
gtgatgtgccttgggttaattttcctcatgttcttgtgctttggatttgttgagcttcttggatctgtgggtttatagtttttcatcaagtttggaaaagtttcagttgttataccttcgactctttttgtgctcctttccccaaagactccmgttacacatgtattagggtccttggaattgtcccagaggttactgatgttcttattatcattttaaaattatttttctctgtgtttttccttttagatagttgctatctttatgtcttcaagttcactaatcttttcaactgctatgtctattctgccactagatacattccatgtattttttcttctcagacattctaattttcaactttagaagttttggaagtctttttttgcatatcattcctatgtctaattacttcttcatggatgtctggaatatgggtttttgtttaatgttagtgcttaagtcttctattttattatttgttttctatttgttcattctgttttttgttactctcagcatcttttcttgatttcttttgagt

SEQ ID NO: 638163 - DNA, 572 bp, Homo sapiens
aactgtctgtgggtattttgtaggcgaaaaatgctgttagatttttttctcttctgcatatgactttatttcccccttcattgctgagggatattttcagtagctatagctcagtgttgayagttcttttctttcagcacttaaaaaatgttgtggcacttttgtgccacttccttctggatcccatggtttcaagatgagaaatctgctggcattcgaatagtttttgtcctctataggttagactaacttctttaagaaaaaaaaaagtctttagttttcagaagtatgtcttggtgtatatttattgaccattattctggttggggttctctcatcttctgaaattaggtttatcctttcaccagatttgggaagtttttcagccattatttctttgaatattttttcagctccatatgtttcctcttcttttgtaactcaaacgttatgttagatctttcgttattttcctaccggtctctcaggctgccttcattttttgttttgttttgtttttaagtctcttttctctctgttgtttatgttgggtaatttttattgatctgtct

SEQ ID NO: 638164 - DNA, 572 bp, Homo sapiens
aactgtctgtgggtattttgtaggcgaaaaatgctgttagatttttttctcttctgcatatgactttatttcccccttcattgctgagggatattttcagtagctatagctcagtgttgatagttcttttctttcagcacttaaaaaatgttgtggcacttttgtgccacttccttctggatcccatggtttcaagatgagaaatctgctggcattcgaatagtttttgtcctctataggttagactaacttctttaagaaaaaaaaaagtctttagttttcagaagtatgtcttggtgtatatttattgascattattctggttggggttctctcatcttctgaaattaggtttatcctttcaccagatttgggaagtttttcagccattatttctttgaatattttttcagctccatatgtttcctcttcttttgtaactcaaacgttatgttagatctttcgttattttcctaccggtctctcaggctgccttcattttttgttttgttttgtttttaagtctcttttctctctgttgtttatgttgggtaatttttattgatctgtct

SEQ ID NO: 638165 - DNA, 355 bp, Homo sapiens
atttattgaccattattctggttggggttctctcatcttctgaaattaggtttatcctttcaccagatttgggaagtttttcagccattatttctttgaatattttttcagctccatatgtttcctcttcttttgtaactcaaacgttatgttagatctttcgttattttcctaccggtctctcaggctgccttcattttttgttttgttttgtttttmagtctcttttctctctgttgtttatgttgggtaatttttattgatctgtctttgagttcactgattttttcctctattgcctccaatctactttttaccctgtccagtgagttttaaattttggttattatatttt

SEQ ID NO: 638166 - DNA, 604 bp, Homo sapiens
ttgttactgctgcatgaaaatataagcccagttccctactcatccatgccaacaccaccctggcgggagaactggagtggcaccaccttcttctactgggtgggagttggatgatcagctacctgctagataggccctactgaagccacagtggggaggcaatgcgagtgttttttcccttggtgtttagctgaagtagggtgagtattataaaaaagtttcttttctgttttgttaggctaacttttttctaggcttctctagcaccctctctgagctgtatggaagacaaaaagaaaaccaagggaacwcactaccatgttttttctcaatttcctgtatcctttccacctttcagaatcttcctatcattgctttttgtactgtgtcagggttttctgtttgctgtaatgaccatattaatgcttttctttactgattgtattaactgtgttgatgagttattttcaattggtttatttttcttcccattaggggttgtattttctggattctatgattggatgccagacattgtggattttaatttttgagtgctgaggatttttgtattcagtttttttctttttagaaagacaataac

SEQ ID NO: 638167 - DNA, 593 bp, Homo sapiens
tgttacatgaagaaatagagatggggtcatttggttgtaaaatgtgtgcatatggatttgcatacatctagtcctttctcaaaaaaggagctcctattttctggtcctagagctagaactacctttgctgtagccctggaaaaacttataaaaagtcaaaaaactctctgattcagaggattctgatataagttgatgtcataatattatgacgtagmagccagagtgtgggcatctccatcctagctctgagacagaaattatgaacaaggttaatataagaaagaggaaaaccccttctcccattgcaacatttcaaaattcccttccagtttcaaccactcagtgtgctatattatgtgaacttacctcagggatagttgcactgggaagttcttcataaacagtgggagagtggggcttttctagactttctggcacaattacaggcacttaagtcttccctctcatgtccaacatctacagtcttggcagatatcaaaatgcattacagatttataatatatcaactgtgttggaggggggcatagatgaaagcaaaacattccaaaagaagggaattgcaggttata

SEQ ID NO: 638168 - DNA, 551 bp, Homo sapiens
cttaaatattttattagggaaacctagaatatttactgtcaatgtgtttatgaaccttactgtaattgttgtcagtgcttgtgattacatcgtagaaatgtataactttgatattagagttaatacactaagcaactttttaactatacatataagtagacacatttttgagataaaacaggcctgttagactagtgctactctgaaaagtactttggaaagtgcattgcagaagctgatgtagtacatattttttaatttgtctataagacttctaatttaaaagaaatcattaatatctctgatgttgaaaacaagtaacacatgttttattattagaacagttcaagtgatttttcagtgtgtgtatatatattacttttagtcagattttaggagtaattgttaatggctgaatgaatcttttaactattagctattgattaaagtttgtatgtttgcatatctttcggtataacaaaatattcaactgaaaaaagaatttttaarttacagaatcatagaatccttagataagccctttaagaagc

SEQ ID NO: 638169 - DNA, 572 bp, Homo sapiens
cccagtcttataaacattcaatcaaacttagatttgatttgtgttttcccactatatctctgattcattgaatcaatagcatatgctgtgtctattcattccctaaggagtaattgtttttcccatatttacagtctgcctattacatattcagaaatactcatggggagaaaagctattgatgtgtggactcttgcctttaataaacactgcttttgtgaatgtaaggtaacaataagggaaataatttcaaatagttggtttaaaatgatcattcttctcttcctttgagcatataaaaataataaaatgtgagaatttaaatgcttctctaagcctactctattataacaaatgtattaaaatagaaattttaattgtgctgtttcctttgaacayttgaatttccttttttcatttgttccctttctggtgatttaaacaggattcttgctgtagctaaatccttaggggcctatagttgtgcagacaatccttttaaaatgaatagtgtcaaccttttaagccacagaggggcgttacagtctccagtttgtaaaatgatgggcatc

SEQ ID NO: 638170 - DNA, 379 bp, Homo sapiens
ttcataagaaactgccacaaactgtcctccaaagtgactgtaccattttgcatttctaccaacagtgaataagaattcctgttgccccacatcctccccagcatttggtgttgtcagtattctggattttggctattctaatagctatgtagtagtatctcattgttggctcatctcttttaaaatctctatatgttgcttcttccttktccctctttcttgatagtttgtgacattttctaattcctcctgtctcagctgcttcttttccttgtttctcctactcttcatttttgttcctttgattcttgtctgataatttactcatatttttctttcctctctttttttcatttctttgccttttcctacatttccc

SEQ ID NO: 638171 - DNA, 601 bp, Homo sapiens
gaacacaaataaacctggtggctgtaggtggagaatactcacaacaggtccacacttgcatataaatgacccaaacaatttaattggaacagtagagtccagattgaataagctttgagtaaaatgaagcagtatctaaacaaccatatatcggggttctgcttgtcttaggggctccagtttgtgtagtatctgcccatcctgttctacttcctggtattttttaaccagtatccagggaatccttatctcattttacctgttgtttttgttctgtctcaggtgatcttgctctaaggcatttctgggactgcagcatagagcatgtgaaagagaatacttcggatcaggcagtattaggactgggagaattgactaagttaacccctaaatacgtagcctgtagtgcaaatgcttggatacaaatgtatggcaaattgagatttaattcaagcagaatccaagatattctgatggggtaaaatatagcagtgagtgtctttgagcagtagggatgctggargtcaaacacatgtcaggttgttggtctggttttgagcagggccctagtcagtagctgtaaatttgtaggaagggcaca

SEQ ID NO: 638172 - DNA, 614 bp, Homo sapiens
gatcatggatcagaagaatcagtattgttaaaatcaccatctgcccaaagcaatcaacacattcaacacattcctattaaactaccaatgtcatttttcacagaattagaaaaaactaaaattcatgtggaaccaaaaagagtctgaatagtcatwgcaattctaagcaaaaagaacaaagccagaggtatcgtattaactgccttcaagctatagcataaaactagaataactaaaacagcatggtactggtacgaaacagacacatagaccaaaggaacagaatagagaacacagaaataaagctgcacacctacagccatctgatcttcgacaaagtcaacaaaaataagcaaaaggactccctattcaacgaatggtgatgggataattggttggctctgtgcagtagagtgaaactgaacccctacctttcactgtatacaaaaattaactcaggatggattaaagatttaaatttaatagctcaaactataagaatccttgaaaaaaacactagaaaaaaaaacattctggacatcagcctagggaaagaatttatgactaaatccccagaggcagttacaacaaaaacaaacattgacaaataggac

SEQ ID NO: 638173 - DNA, 604 bp, Homo sapiens
gaatcttgctccatgcccctcctattgtaatggaagattcactctcttcccaactgaagtacattcctccactagtctctgggatgacatgccttttcactttcttggggatttcacttctttacttacagccccctttgcatttactgaatcatcaccatcacctatggttccggtatcttctatgtttaaaaaagctgctccctttatccaatgtcctctagtagctgtcccgtcacttaactgcttcttcaacaggcagaaagcagaggtccacaattattattctctccagtccttcaagatgattgatgagtgtcccccacccactctgctctgtctctgctccattccacatawattaatgctcttatcaacctgccttcagggaacttacagtctaataagagataaagataatgctacatcaccagatctaatggttatctgttacctttttaaactttctctctagatgaccttacaaatttttataacaattttattgaaatattatttacatataatacaaagttgtgaaaccatcactactacttacactactacttaattctaaaatattttcatcaccctcccccaaaaa

SEQ ID NO: 638174 - DNA, 469 bp, Homo sapiens
ttaaactttccttgtccatgacccaggcttttggtggctgtgggccttacttgagcaaatttacccattgttcccatctgctctgtttttcagcttgtcatattataagagttttatgactagaatgcatatccacctggggttttggatgtgactaccaagctttagtgtttgatttatatttgaatccatgtctttagacatgaaaggttagtgcaaaagcatgcttctccactgtctccttttcattttagcagctctgcttgatgcctttggaatgtgctttagtttctgtcartttgattaagaggaggcaaagagaaagtaacaactagatgaaaaatgctttgtactctgtgtgacacagataggtatgggaatgttgttgagtagagtatagaggtgaacactgttgcagggaagatgtggtaagatgtggtggtgtttcaggctgaaccacagagtgcct

SEQ ID NO: 638175 - DNA, 417 bp, Homo sapiens
ttgtcctagagcattgattagaggagctccctgagattttagttttatgtacatgtagaagtcctctttcatcttcaccattgtcaaaggcacacttctaaatgttgaagaccaaaaaaaaaaaaattgtattactaagttcctgatgtcattattgttagtgttattatgactaataatagtaactacatttataatcaccttgtatgtgtwaagtgctttaatatcaacaaaacctcttagcatagattgcaaactaaaatagagaagggattaagatcatggctttagagaccattttttattcaaatcccagctgtgatcttgaactagctatttaacctttactaagtcatgaaatcctcttctgtaaagtaggaatagtagttatatctgtttttggagattattgtgaag

SEQ ID NO: 638176 - DNA, 612 bp, Homo sapiens
ttacatgatgaatgaatattgaaacttaccccccagaaagaaaaaattgggattcttttgatcttaccttttttcccttttaattttacatgtagaagagttactagctaggcatgttggtgtgcacctgtagtttcagccactcagctacatggaaggctgaggcaggaggattgcttgagtccaggagtttgacaccaggctgagtaacataagagaccccgtctcttaaaaaaaaaaaaaaaaaaaaaaaagagttcacatagcaggcctaaggctgctgtgcttaraagggcctgcttgcaaggttggcccttggctgatgtctgagaactgagcttctgaaacaattcctaactgatacagatgtttcactgtgtctagactgtttccacatgtgatttatgatgagcacttgctctctttctggaagtctaaaattttggtagttgtaaggcagagattgcctttgtgaccagctcccagtaaaatccctaaactctcattcggaaatgggctttttagagctgcatttttcccgctagagatgtgaatatacttgcatgttatctctgaaagactaagatcagtcaatgttttggattttagaga

SEQ ID NO: 638177 - DNA, 597 bp, Homo sapiens
acacagggcccatcagaatgtgaggtcttgtgcagcttcacagatagcatgcccatgaagctagtcctggtcattagtgtatgaatggcatctaatgccacaggattggatgagatcactgtgagagtacagagagaaaacagagtcccaggaacaagaaccctggtggtctaaaacttagaggctgaacagtagaaagagttcacaaaggagactgagaaagagcagccatggaggtaggaggacatgatatgaagaaattcaggttgaatatcccttatctgaaatrgttgggaccagaaatgttttagagttcagattttttcttttcttctttggattttggaatatttgcattataattactggttgagaatcccaaatccaaaaatccgaagtgcaaaatactccagtaagcttttcctttgaacatcatgtcggcactcaaaacattttgaattttgagcatttcagattttggattttcagatttgggatattcaatgggcatctggccatgatgttgttaattgcattttctggggctctcattctgtgatagactatgcaggatggcactggtgtccaagaggctca

SEQ ID NO: 638178 - DNA, 599 bp, Homo sapiens
gctaatcacccgcttagacttcattgtattttcactttatcatcaccttagtatagtcatgtgcctcatcatatcatttcagtcaaccgcagatcacatgtacaatgrtggttccgtaagattatagtactttatttttactgtactttttctcttttaggtatgtttagatacacagatacctaactattgtgttacagttgcccacagtattcagtacagtaacctgaagtaacaagtttgtagcctaggggtaatatgctacaccatataacctcggtgtgctataggctataccatctagatttgtgtgtttacatttcatgatgtttacacgactaaattgcctaatgatgcatttctcagaatgtacacctgtcgttaagtgacatgtgaccatgtttgcttttttattttaaaggggacacaattatataaataacttttttttatgttggaacaagaagtaattattccgcagtatatttaaagtgtggataaaaatttacaaatgacaaatcattttaagaccatttataaattgcgaaaaacttgtaaaggctatacttggtaaactcaaatggcctctgttcttaggt

SEQ ID NO: 638179 - DNA, 599 bp, Homo sapiens
gctaatcacccgcttagacttcattgtattttcactttatcatcaccttagtatagtcatgtgcctcatcatatcatttcagtcaaccgcagatcacatgtacaatggtggttccgtaagattatagtactttatttttactgtactttttctcttttaggtatgtttagatacacagatacctaactattgtgttacagttgcccacagtattcagtacagtaacctgaagtaacaagtttgtagcctaggggtaatatgctacaccatataacctcggtgtgctataggctataccatctagatttgtgtgtttacatttcatgatgtttacacgactaaattgcytaatgatgcatttctcagaatgtacacctgtcgttaagtgacatgtgaccatgtttgcttttttattttaaaggggacacaattatataaataacttttttttatgttggaacaagaagtaattattccgcagtatatttaaagtgtggataaaaatttacaaatgacaaatcattttaagaccatttataaattgcgaaaaacttgtaaaggctatacttggtaaactcaaatggcctctgttcttaggt

SEQ ID NO: 638180 - DNA, 556 bp, Homo sapiens
ttgaatatagaatatgtaatgaccaagaaatcagatgatgataagtgacttagaaaagttttctactgaatttccccttcctggggaatttaataccgcagccttttttattttatatggttaactcttttctgtaattaggaaagcacacaggtaatagattgagcagcactccgaatgaaggctgrcagtgaaactgaattacttatacctccaaagagggatacctgccattaaacatattgtttaattttctgttatataatacttttttccttaggaaacaacatgtaattatatgtatagttattggatgccatgaatctcaactatgataatagaaaatcagatgtttattgctccaattaaaaagtgggttttagaaacaacactatagagagacttgatttccctgactcctgacattgacatatttgaacaagaattaataagccacataatcttccatttaatttatatttatgatgaagtcatatgtattactctttgttagtgtttgcctaatgacctttttaaaaattatttggtgtgagat

SEQ ID NO: 638181 - DNA, 504 bp, Homo sapiens
tcatgtgtgactccacaaagtggtcatataatccctgatgaatcttctcaaaagacagacatttactgctttatttcctatggtaagacagttttaaatgttagttattcatctgttcaaaaccataatattgtggctgaaatttgaagatatttgaagcagccatttttctccctacctgctctcccttccaggtaaacctgaaacataaagccttgtgctgacacatcattgtatctactaatagtctttaatctcaaaattgattaggtatatcattcgttctacaacatttgggaccttaaaaatttacgatgtcagagaacaaaaaattaaatwtataaaatggtacaaccaaaatgaattcacattctagtgaagggaaaagttagtttcctaaatacttgcaatattcttacttaaccatggtataagttatgcacaagtagtttagaaaatgtgcctagaaaatcaggagaggtaggagttttcaagaagcatgga

SEQ ID NO: 638182 - DNA, 624 bp, Homo sapiens
tgaaaaaccaagccatagacttggagaaaatatttatgaaatgtataactgacacaggaattttgtacagaatgtatgaagaacttttacaactcaataatatgaaagcaaayaacccaataaaaaagcagacaaaatatttgagtagacactttccaaagaagacatataggtggcaaaaatacatgtgaaaagatattcaacatcattcattgttagggagatgttaattaaaactacaatgggatatattacttcccattagaatgaaaaaataaaaaatactgatgatactaagtgttggcaagagtgtggagcaactacaacatttccacactgctggtgagaggataaaataatccagccaccttggaaatattttaccgcaatatggctcatctatttcattcctaggtatttgtctaagagaaatgaaagcatatgtccaaactaagatttgagcaagaatattcacaacatctctacatatttggaatatcctgaaaccagaagcaatctaattgttcattaacaggtaaatagataaacaaattatggtaaaaccacacaataaaatactattcaataataacaaggaatgaaacaatgacacatatagtgatg

SEQ ID NO: 638183 - DNA, 507 bp, Homo sapiens
tagaagctctagtttttgctttcaactcttcagtggattttcctgtgcccccacttcagagcatcttggttatgacagatattttcaggagaatcagcctagagcataagagcatctgctgatccttactttggcaggaatcccaagagaacaacaagtgtcaggagaagagaagccacatccatctgtccttgacttctttgttccttacatttgaaacacggtggtcaataaaatgcacatggcatagggcaaaatttctctttcttattgattatgttaaaatccttgactctgggccattccttttagaagggatgaaaraagaggaaatcttccatccacctaaacactgacattctacctacatcactcaccctttcagataatatttccaaattcttcactttccagtgatacttaggttagataagagttgggagactctctgatatcaaggaaagataaaacgttgatttttcatgcctattccagggaaagtagggg

SEQ ID NO: 638184 - DNA, 599 bp, Homo sapiens
gaattcctcctattatctgttttaataattctggcaaatctcatctttccttatccagacatggtttttatttttcaattttattttaggttctgggggtacatatgtagatttgttacatgagtaaactgcatgccactgaggtgtggtgtagaaatgatcccatcacccaggtagtgagcakagtacccgataggtagtttttcaacccttgctccccttctcctcttccccctctagtagttaccccctccagtgcccagtttttatcatttccacctttaggtccatttgtactcaacaaacgtacattttcatgctctaatttgagacgcagctcagactttttggcctctaaactaataagcctgatctggactctatagctgcatgaggtgctctatttgtgtacagtgtgcatactgattaacaggtcaaaaaaattttacctactttgaggtagtattacatttcatggatctccactttaacaccatattttgtatgtagttatgttttataaatttttcttataaaatttctgagtaattgaacacttttgtaatctttttattttaaactaaaagaattgacattaa

SEQ ID NO: 638185 - DNA, 515 bp, Homo sapiens
atgagaacagcatcagtttattggtcacatataccaaattttgggtagaagacactgcataccatttggggccacacagtggttgtacttggaaacagagtgaacaagcaggggctgtgggagacaggctttgtagtatcaagagggtaaggtgacctcttgttcctgctggaggatgtgattggcttgtttgaataatttcatgggctggcaaggaactaaaatytgctacttggcgataagcaggaactgtgcctggtccagggttgatttgtgcagagactgtatccttgggaatagagtgggaagggcagctgtggtgaggccttttgatgccctccttgtttcaaatgtcaaaggatcacataatagtgagtaattttaggacttacaccacagggactgaatgataaactctctgatgaccacatttactcggaattggttttcactacaatgcctgggataaacagagatcatattcatatggaaagctgcctatatttctaggttct

SEQ ID NO: 638186 - DNA, 474 bp, Homo sapiens
tgccacacctctgttattcttgtaaaatcccctttagactttcgttkattcattcttttttgttgttcttgttcacctagactaaaatataggcatttttccattgactaccctatctctttggaagcttccatttctctcttcctattgataccctctgaataaaacatgtttaaacatctaccacatttataagtccccatcaatcttatgattaatttcattcttccaaccagatttgttcttcctttagtatattagtctcctcctgatagagtagtcttcactgtcttctctctctcatgtctcatttattccctagccaatatgcaatttaactttggtctgtaattttaaactgaaattgtaaatatcaccagtgagcttatgagttccccacatgatggaactatgtcatatattatctttcttgatgttgatgctttgtctgcctgtttgtcttaatgcctacat

SEQ ID NO: 638187 - DNA, 474 bp, Homo sapiens
tgccacacctctgttattcttgtaaaatcccctttagactttcgtttattcattcttttttgttgttcttgttcacctagactaaaatataggcatttttccattgactaccctatctctttggaagcttccatttctctcttcctattgataccctctgaataaaacatgtttaracatctaccacatttataagtccccatcaatcttatgattaatttcattcttccaaccagatttgttcttcctttagtatattagtctcctcctgatagagtagtcttcactgtcttctctctctcatgtctcatttattccctagccaatatgcaatttaactttggtctgtaattttaaactgaaattgtaaatatcaccagtgagcttatgagttccccacatgatggaactatgtcatatattatctttcttgatgttgatgctttgtctgcctgtttgtcttaatgcctacat

SEQ ID NO: 638188 - DNA, 507 bp, Homo sapiens
aatcaatatatgccaacagcgagataatagagatgtcaaatttacctgacaaaatttttaaagcagccatcataaaaatgtttcagttagcaattacaaaaatggttgaaaaaaattaagaaatagagtctgcaaataaatagaattataaggcagaataaaatgaaatttttacaactgaaatctatcataagaaataaaaagctcagtggatggtcccaacaccagcatggagagaacagaagaaggaatcagtgaactgaaatatagaatgatagaaattatgcaatctggatgacagaaaaaaatgagttaggagtaggggagagcagaaactcaggagattagaaaaaataagtaagtaccattggtgtcactagcatctcagaaagagaggagaaaaaaggcaggactgaaamgaagtttgaaaaacttgatgtttgaaaacttccaatatttgacagaagacataaatctatagaggctgagcaaatgcctaaagttttg

SEQ ID NO: 638189 - DNA, 381 bp, Homo sapiens
ataaacaggaattaaacaatcatcgtatagccaaatcacttgtaccttcatttttctaacattcattggaaagcctctttcagccaattactgtaggttatactggtgatatggagatacacacaatacctgtcttcagggagtcatattttgtgggagaagcacaayagatgagcagaaattaaacacaatgtaaaatgtgttgaaggtgagatatgcatggggcactctggaaagcaaattcactacaaaggattgaagcaaaaaggaagagttacttcagactcttagagaatctaaatgagaattataggacaaataaatattagttaggtggcccagggtcaaggccaccaagatcatgaaggctatctttccaca

SEQ ID NO: 638190 - DNA, 381 bp, Homo sapiens
ataaacaggaattaaacaatcatcgtatagccaaatcacttgtaccttcatttttctaacattcattggaaagcctctttcagccaattactgtaggttatactggtgatatggagatacacacaatacctgtcttcagggagtcatattttgtgggagaagcacaacagatgagcagaaattaaacacaatgtaaaatgtgttgaaggtgagatatgcatgggrcactctggaaagcaaattcactacaaaggattgaagcaaaaaggaagagttacttcagactcttagagaatctaaatgagaattataggacaaataaatattagttaggtggcccagggtcaaggccaccaagatcatgaaggctatctttccaca

SEQ ID NO: 638191 - DNA, 381 bp, Homo sapiens
ataaacaggaattaaacaatcatcgtatagccaaatcacttgtaccttcatttttctaacattcattggaaagcctctttcagccaattactgtaggttatactggtgatatggagatacacacaatacctgtcttcagggagtcatattttgtgggagaagcacaacagatgagcagaaattaaacacaatgtaaaatgtgttgaaggtgagatatgcatggggcactctggaaagcaaattcactacaaargattgaagcaaaaaggaagagttacttcagactcttagagaatctaaatgagaattataggacaaataaatattagttaggtggcccagggtcaaggccaccaagatcatgaaggctatctttccaca

SEQ ID NO: 638192 - DNA, 472 bp, Homo sapiens
tgggttcatagctaggcatatgacctgcatcaaatggtttttatgtcattgttcactttcctgtctcttattcccccattgctaatgcagtaaaattcttggaacttatttttctctttgtttccaataagtttattttttttctgttgttattttgaccarttattcctcagattcataatgatattgtttagaagattgtcattatatcttgattgttacttgtttgttttaatccagtaatgcttttcgtcttcaaaattcaacttttccatttcaatcaatgtaaatcataattgacagaaattattcatttttattagagaaactaaataagagatgtgattaaattagccactgcaatgacatggcatttatttggtaattcacaagtgattatttttctgttttacctacagttcttcataggatgctatgcagattatgggtagactgtatttcagaacggctg

SEQ ID NO: 638193 - DNA, 632 bp, Homo sapiens
tgctacaagtgtaatatgtttgctgcatttctaagattctgtatgtaaataataaaatagtaaaatatctcgtaaatttttatattggttgcacgttgagatcatatttgaatatatgatttaaataaaatatattttaacattaattttacctattcctttgtaartttttaacgtgcctactagtaaatctaggattacctaggtggcttgcattttattactatgaaacagtgtaagtcctggctgtacaaatgccccatccacattaggcatccaattgatgttctgatacaacgtttatctcctcttctctactttcttgtgcatccctaacttttaatgcttattgacagcagtagcagaaataatttagtgcaaagataaaaagctattgagagaacatcccattatttcttcaaattaaagtgaaacaattttagacttcagctagggtcatattccttcctgaatgaaattccttcagtaactttctgttttcctccagtgaacttgcagattccatagcacaccttataagaccttgcaaaacctggccctggtccttgttccagtttcatttcttggcacttcctacctggcagtctaatctcagctatacatgttaactt

SEQ ID NO: 638194 - DNA, 587 bp, Homo sapiens
ttgttgtgatctttctgctccttagctcagctaggtccaagttcttgtctcacaaccaggaaaaattaggtatgcagacaccagagagtgagaggagaagaatttattaagtgaaaggaaggctctcagcaaagaggggacttggtgggtggttcccctacctgaaggtgggaaaatcccctgtgtggctggatcccggggcttttatgacctcagaatggggaatgtgtattgatttgtttgtgagtatgcaaaaaaggttaaagcagaaacaccattcaaaggtggacacaacagtgtataaaaccagttaggaaagagtacgtatatgtaaaataggtgaagagtggggatcaatcagaggaaagcacaccaaataggaagacaagttctcaatccagtctgaggatttaacttgtagcttggctttcaggctttaaactgttttcaacttggaggtggtgtttcactgggaaccctcccctatckgcctaggcatttggctgcctcctgttgctatcattatggtggtttgctgcacttctcaatccatcacctaagtattaagccctccatgtattggctat

SEQ ID NO: 638195 - DNA, 617 bp, Homo sapiens
gtattacaggagagaatttgaattctcaatgtctttctatgagggctgttttattttaatgaatgccattagctttcattggggtatgatttgagtatgtcatatggagttgatgactccttagtggggctctactacacctaggatgcatataaatacatcaattattcctaattgaaacaacaccattcattatacagccctgtagactggtcatattatcatcttcatgctaattggaagcattttgtaaatgtatgtgtggaaatgccagcaccaggtgtgtatgtttttttcttttttcagaattgcatgttttgctaatgaagtgttttagcactgaaatgtaaaagggacttttgatatcacctatgttattattcaatttttgtgtaarcttctctataatatgtccattttaaagtgacaatatgctttattgttgtattagtatgtggccatgttaaactgagtaccatatataagtgatacctaaggctcctggagggcaggttaatatgaagcctttgtgaagaatatggatactaattaagtctgttgaactaaattatcccattgttatgagtgcctgctcaatcttcattcacttaataata

SEQ ID NO: 638196 - DNA, 550 bp, Homo sapiens
aatcaatataacaacgtaataaatatgacacataattctccttggagttttacatgtccttaagtatagtcttaacatttccataagctaacaagaaggagagtcaatatccctgggatgtttcaccttcatcacatgactgaaacagrtttctttggcaagaactaagactccactctaaaatgacaatatttattatgttaaactattttctactgtgctatcattggtataataatagaggttaacgaatagcctctttttgctttacaagaacaaacccttaagtaatttgcaaatatggcaatacatcaaaataattcttgagtttttatttactttcaaatttcaatatacccaatggaaactctgatcccctgggagattgttaaacagtaatcccaatattaatctacaagcatacaagctcttaaaaactactgataaaattacctttattactccccattagtattcattagtattcctcaagcaaggtggtcagttatcctttcaagaagtcatgctaccagaaaaagtcggcacagtc

SEQ ID NO: 638197 - DNA, 591 bp, Homo sapiens
atggaaactctgatcccctgggagattgttaaacagtaatcccaatattaatctacaagcatacaagctcttaaaaactactrataaaattacctttattactccccattagtattcattagtattcctcaagcaaggtggtcagttatcctttcaagaagtcatgctaccagaaaaagtcggcacagtccagtggtcaagagctcgaagcttgaagctagatggcctgggtttggatttgtgcactgcttttccctagctctgccaagttattcagcatctctgtgtctcacttttcttgtatataattgtttttttaaaatggtgattaaatgagttaatatgcctgatctctattcttgacatgtttcattttagcaagaaccttgctaagtcagtttagtattaagaatctctcacatttgatatctcatcaccccaccctgccttcagcaagaatcctgttaggtcaatttagcaagaacccacttattctagaagtttcctcttactaattttttatccactgaccccttcactgttggatgtaattctccagctgtctttgtttattcacagttgaactcaatc

SEQ ID NO: 638198 - DNA, 591 bp, Homo sapiens
atggaaactctgatcccctgggagattgttaaacagtaatcccaatattaatctacaagcatacaagctcttaaaaactactgataaaattacctttattactccccattagtattcattagtattcctcaagcaaggtggtcagttatcctttcaagaagtcatgctaccagaaaaagtcggcacagtccagtggtcaagagctcraagcttgaagctagatggcctgggtttggatttgtgcactgcttttccctagctctgccaagttattcagcatctctgtgtctcacttttcttgtatataattgtttttttaaaatggtgattaaatgagttaatatgcctgatctctattcttgacatgtttcattttagcaagaaccttgctaagtcagtttagtattaagaatctctcacatttgatatctcatcaccccaccctgccttcagcaagaatcctgttaggtcaatttagcaagaacccacttattctagaagtttcctcttactaattttttatccactgaccccttcactgttggatgtaattctccagctgtctttgtttattcacagttgaactcaatc

SEQ ID NO: 638199 - DNA, 591 bp, Homo sapiens
atggaaactctgatcccctgggagattgttaaacagtaatcccaatattaatctacaagcatacaagctcttaaaaactactgataaaattacctttattactccccattagtattcattagtattcctcaagcaaggtggtcagttatcctttcaagaagtcatgctaccagaaaaagtcggcacagtccagtggtcaagagctcgaagcttgaagctagatggcctgggtttggatttgtgcactgcttttccctagctctgccaagttattcwgcatctctgtgtctcacttttcttgtatataattgtttttttaaaatggtgattaaatgagttaatatgcctgatctctattcttgacatgtttcattttagcaagaaccttgctaagtcagtttagtattaagaatctctcacatttgatatctcatcaccccaccctgccttcagcaagaatcctgttaggtcaatttagcaagaacccacttattctagaagtttcctcttactaattttttatccactgaccccttcactgttggatgtaattctccagctgtctttgtttattcacagttgaactcaatc

SEQ ID NO: 638200 - DNA, 568 bp, Homo sapiens
aatatatccctttcaatccagaaattttaatttttatcataattattatcattttataatatctttaaaacttcctaaaatctggactgtctcaagctcttccctgggggtttattcaattagacaatatttattgattgcctattatgtgcaagatactatgagagacagagagataaatatatgtggtctsgggcctagaaaagcttacaaccttctcttttgttccaaagtttcagaattcgaccaaaattgtaacagcctattccccacaatgggtgaggtagaatacagtattagccttataaaaaatgtaaagcatatggttacatttttcttgtttatcaaaaagtatgtcattacagctacacttttataaatcaaaagaataattcagtatttaaacaaaaccccattattttgctatcccatgcccactaattggatgcaatggaccatatcgacttctcttgggagttttaatttttcaaacaaatgtatgaagtcaaatacaaagttaaaagtttctgtttactgttagtttatttggaagctaaacacaaaagat

SEQ ID NO: 638201 - DNA, 624 bp, Homo sapiens
gaatgtttggtttgcaaatagtttctgccattctgtatcttgtcttttcatattcttactaggatcattggcagagcaaaattttattttcctgaaatcaaatttatcagtttattctttatgaattgcacttttggggtcaagtctaagaattctttgccccttttatccaaaagatagtttccagttttttgtaagtttcatggctttacatttaaaaatatctgtggtctggtttgagttaatgtttgtataaggtgtatgacttaaatcaatgttttcatcttccttttctttttctcacttatggatgttcaatttctccatcaccgcctgttgaaagaactatatttctcccattgaactgttcttgcatgtttgtcaaaaatcagttgagtatatttgggtgagtttgctattgagtwctgattctgtttcattgttctacatgtctatatatgtgtctgttaataccacatagatttgaacatgtatattctaataccacataaatttgacacatgtaaattgtgtcaatttttaaaatgttaattgatataatcatgtaatattcttttttagcttattaatatggtggattatattgattaaattttaaatata

SEQ ID NO: 638202 - DNA, 417 bp, Homo sapiens
ttcacaaagatagaaggtaaatggtttttctaaatttggtagccttggagctggggcttgacctaactcagattttaatgcttcaaaagcttgttggcactctttatcccagtgcttggggaatctttctttcccttttatggmctcagcagctcggacattaggtcataatttggaatccagatgtggcagaaaactgccattcccaagaagccccagagttgctgtttggtttgtggaatcagcaataaaatgattgcccttttttgatctgtggccagtatgcaagcttctggggtcagagcaaatcccagatattgaatcttttgtaaggaaatccaggtcttggttgggaatgccttgtatcctgttcagccagaacatgtagggttttaacgatgttaaaatttgagtcat

SEQ ID NO: 638203 - DNA, 379 bp, Homo sapiens
tgctgtttggtttgtggaatcagcaataaaatgattgcccttttttgatctgtggccagtatgcaagcttctggggtcagagcaaatcccagatattgaatcttttgtaaggaaatccaggtcttggttgggaatgccttgtatcctgttcagccagaacatgtagggttttaaygatgttaaaatttgagtcatgacatgtctgactggcaattaacagatcatcagcatattgacataaaatcacatttctcaagtttaattcgcttaactcctttgccaacacatttccaaagagatgaaaactgtctcaaaaaccttgaggaagtactgttcatgtatattgggtggttttctgggtattgggtttcttccattc

SEQ ID NO: 638204 - DNA, 574 bp, Homo sapiens
ggaagccaaaagctactctttcttggttaatctcctttctttattagctttctctctcctgtccctattattgaaaaccttataagtctctgttaccagggtcaacagtaggatctggggttctgtctatattcagctttctcctgatgtctggaacagactgagtaatgaaatgtgtggcaagcggtgccctcccttctgtttactctgggacagcattggtgtattttcrgaaagctgtcatgacccagttgaggaagactgctggaattttctcctctttttcctgagtaatatctctaaccttatgatagttcatgagatttactatgcacttgtccattgccttagcaaagtaataaaatgacccatctagctttgtcagtagcatcttcataatcccactgggggttttgctctgggactacatctcagcccactcagatgacagccttgtggtcgttcatggccactgggcaatctgaatactctctggcctttcttagtatgtggtcttttttatcaaaggtcagcaatgtgtcaaaataagtgacatcctgccatggcaatgaga

SEQ ID NO: 638205 - DNA, 574 bp, Homo sapiens
ggaagccaaaagctactctttcttggttaatctcctttctttattagctttctctctcctgtccctattattgaaaaccttataagtctctgttaccagggtcaacagtaggatctggggttctgtctatattcagctttctcctgatgtctggaacagactgagtaatgaaatgtgtggcaagcggtgccctcccttctgtttactctgggacagcattggtgtattttcagaaagctgtcatgacccagttgaggaagactgctggaattttctcctctttttcctgagtaatatctctaaccttatgatagttcatgagatttactatgcacttgtccattgccttagcaaagtaataaaatgacccatctagctttgtcagtagcatcttcataatcccactgggggttttgctctgggactacatctcagcscactcagatgacagccttgtggtcgttcatggccactgggcaatctgaatactctctggcctttcttagtatgtggtcttttttatcaaaggtcagcaatgtgtcaaaataagtgacatcctgccatggcaatgaga

SEQ ID NO: 638206 - DNA, 574 bp, Homo sapiens
ggaagccaaaagctactctttcttggttaatctcctttctttattagctttctctctcctgtccctattattgaaaaccttataagtctctgttaccagggtcaacagtaggatctggggttctgtctatattcagctttctcctgatgtctggaacagactgagtaatgaaatgtgtggcaagcggtgccctcccttctgtttactctgggacagcattggtgtattttcagaaagctgtcatgacccagttgaggaagactgctggaattttctcctctttttcctgagtaatatctctaaccttatgatagttcatgagatttactatgcacttgtccattgccttagcaaagtaataaaatgacccatctagctttgtcagtagcatcttcataatcccactgggggttttgctctgggactacatctcagcccactcagatgacagccttgtggtsgttcatggccactgggcaatctgaatactctctggcctttcttagtatgtggtcttttttatcaaaggtcagcaatgtgtcaaaataagtgacatcctgccatggcaatgaga

SEQ ID NO: 638207 - DNA, 633 bp, Homo sapiens
tgcagaaatttctagaaaaagggtggtactccttagccattgccatggagaggggtggtaatttccaggtgctgtcattgcagtggtaaaccaacatggcactggtggacatgtcttatagaggggttctttttttctcttccacrtttcagctagtcttcattctgccccagagtccaagcctcacctccagaaatgagtctgacctcataccccaaaggcgtttagaatctttgggcttgtttttgttttttaatttgttaaacattggtagcaatgagatgtcactttattgtaatatttcgtgaaatctataagagcatagatggtgacatgttgggtgtttcactaatctattgctgaaaattagatgtctggcccaaacattatttgtgtatgtttcttctagtttagaacttttctgatcctaaagaaggaggctcatgtgataaatgaataaataagaaaaaagtcaaacaacattgagaagataagttgaaataaatcacttatgattggcatagataactacaggaaacacattttttgaaggcttaggtcttagaatggaaaaacttgagtttcaatttatcttcttccactgatatccgtagctcagtggctgtggatagg

SEQ ID NO: 638208 - DNA, 633 bp, Homo sapiens
tgcagaaatttctagaaaaagggtggtactccttagccattgccatggagaggggtggtaatttccaggtgctgtcattgcagtggtaaaccaacatggcactggtggacatgtcttatagaggggttctttttttctcttccacgtttcagctagtcttcattctgccccagagtccaagcctcacctccagaaatgagtctgacctcataccccaaaggcgtttagaatctttgggcttgtttttgttttttaatttgttaaacattggtagcaatgagatgtcactttattgtaatatttcgtgaaatctataagagcatagatggtgacatgttgggtgtttcactaatctattgctraaaattagatgtctggcccaaacattatttgtgtatgtttcttctagtttagaacttttctgatcctaaagaaggaggctcatgtgataaatgaataaataagaaaaaagtcaaacaacattgagaagataagttgaaataaatcacttatgattggcatagataactacaggaaacacattttttgaaggcttaggtcttagaatggaaaaacttgagtttcaatttatcttcttccactgatatccgtagctcagtggctgtggatagg

SEQ ID NO: 638209 - DNA, 575 bp, Homo sapiens
ttgaatatagaatatgtaatgaccaagaaatcagatgatgataagtgacttagaaaagttttctactgaatttccccttcctggggaatttaataccgcagccttttttatkttatatggttaactcttttctgtaattaggaaagcacacaggtaatagattgagcagcactccgaatgaaggctggcagtgaaactgaattacttatacctccaaagagggatacctgccattaaacatattgtttaattttctgttatataatacttttttccttaggaaacaacatgtaattatatgtatagttattggatgccatgaatctcaactatgataatagaaaatcagatgtttattgctccaattaaaaagtgggttttagaaacaacactatagagagacttgatttccctgactcctgacattgacatatttgaacaagaattaataagccacataatcttccatttaatttatatttatgatgaagtcatatgtattactctttgttagtgtttgcctaatgacctttttaaaaattatttggtgtgagatacaaattctgaacaaaaga

SEQ ID NO: 638210 - DNA, 581 bp, Homo sapiens
gagtgaatgtttgtatgtgtgttcatggctggataacaagtacaaaaataaatgactgacaatcatattatgagtggcttctacagtgatatagggatagattaaattacatacccagtttcctccatgtctctcacatgatgccctgaagtcttaataataattgctaatgacagtgaatttgtggttttattattgaaaaacctgtttctacatttataaaaatactcgatgctctaaacatatctacttacccctttgtccaggccttccctacttcatgaacatactcatgataaatgcaagcaatcagtgtctcctttggttttcctactattcaaaagaagcttcaaaatatgatgtcatctaacatgtttcaccaataattataaaatatgaatttatatgataaataggttcctggaagmccatagacattaattttatttattcagtccatgtttattgaacacttttcacgtatcaagctttctgtatggatcagaagacagtggtctacaagacaatatgatctttgccatttcagctctaacattatgggaaagatgtcatacaatgaa

SEQ ID NO: 638211 - DNA, 596 bp, Homo sapiens
accatttgtcataaagatgccttacccaattaaattactttggcatctttattgaaaatcaaataaccatgtagggatggatgtattttgggatcctactctgttgcattgatttgtatattcatcttactccagtaatacattcattatccgatttactctttgtttgtagcaattctatgactaaggcaaaatctccaaaattttttttagtattgttttagttattctagaccattttccttttcataaaaattctaaagattgcactgaatctatgaaaaacttgagaaaaattttaaaaatgctaataatccatgaaaatggtatatctgtattaatttaagttttttatttcttttgtcaatgttttacagttaccattgtacaggccagttctgtagttatcattatgcagcatatttttgttaaatttaactttaagtatacttttggttatttaacttttaataattaattgatattaaaatgaaattgatttctatatatcaatmttgtattctgaaagagagggtggaaaactccctgtgctagtaaagaatcagtaatataaatcaacttatgtttttctttct

SEQ ID NO: 638212 - DNA, 559 bp, Homo sapiens
aaacacacacacatacacacatagaatgagaagatggcattgttagtgttaaagcaacagccaaagcatgaactcatgtctacctgctttttttagctctcctggagataattaacaaatgtaggtctctccacagcaacactcttctgttggcccatgaccaacaggtaactacattcccaaagatactggtctaattccttctccctgrcaaaagagctcaggggaaaagcacagctcggtctctctttttcagtcacatctacctactcccaacaggcttcacccaaacaacaagtccaaggattctgaacaagatgtttttcttttcagcatgtccaacttggctcagcctccctgtagagcagttctagtatgattcagtatgattctggaataaaatcaaatgatgcttgtttcctttcttcatctgctgtaaggaagtttctaatctcacaaggcaaatttctgctttatctggaattcacattcaaaaattatgtctacacctaaaacgtataaaagatgagagagagattcctggacacattgaatgtat

SEQ ID NO: 638213 - DNA, 559 bp, Homo sapiens
aaacacacacacatacacacatagaatgagaagatggcattgttagtgttaaagcaacagccaaagcatgaactcatgtctacctgctttttttagctctcctggagataattaacaaatgtaggtctctccacagcaacactcttctgttggcccatgaccaacaggtaactacattcccaaagatactggtctaattccttctccctggcaaaagagctcaggggaaaagcacagctcggtctctctttttcagtcacatctacctactcccaacaggcttcacccaaacaacaagtccaaggattctgaacaagatgtttttcttttcagcatgtccaacttggctcagcctccctgtagagcagttctagtatgattcagtatgattctggaataaaatcaaatgatgcttgtttcctttcttcatctgctgtaaggaagtttctaatctcacaaggcaaatttctgctttatctggaattcacattcaaaaattatgtctacacctaaaamgtataaaagatgagagagagattcctggacacattgaatgtat

SEQ ID NO: 638214 - DNA, 569 bp, Homo sapiens
cccaataaatgacatatctgttacttttaagttagcagatttccttcactggcctctgttctcaagaaaacgatctgaagccatcggatcctgttatactatggggaaaagaaggaaattcaaacacatacattcttattatcattgtcatcaaattgtgcggacacattttaaagaggttaaaatcgactttctatacttggttcaagtacgtgatgtcatatgaaatactcgttgtttttttkttgttgttgttgttgtttttataaactggggagacttgatatagcctgttctttaaagtcagcaactaagccattccgtgaaagttagagttctgaaccatgtttatggtgagagcagtgttaagcaggtgataagtgtttatgtatctgtattattcaattaataattttaagtattaagggtaaaaaagtgaagtaatggagttgaaaaaagatcattttagacttctttgtacacatacccctaattttttgttttttatttttaataggtgagaaaatataaataaagtgctatgtcaaagatagttttagaaattagct

SEQ ID NO: 638215 - DNA, 545 bp, Homo sapiens
ctgcctgtatctaaaatgcaacacttctaaaatttaaatgatcataatgctcaaaaaattagctccttttctagaccatcggaggatggttgattttatccaccacccaccaggtgaattggtgaattggtatgtggccaactcccttaagaatcaccttggtcttggcctcagtccagtgcagaaagaaatctatcattctgttcaactctgcctcaaataacttgtaggcaaaagtgacatgcrcctgtctgtaacatcagaagagcaaagaaaggtgatgtactgagtaacaaagcaaatttcccccagacatttccatggaatcaacaaaattaaggtacattagaaaaagagagtgataaatgtatgtaatataacctacatttctcagctttgaactataatattatagactgaactaaagttctgtaagtacattccaggctcctacattatagtgatgtcagctcttgtcaattgagcaattgtctagatagtaaaccacatacgagtctgaggtagagcttggaatgagcttatgc

SEQ ID NO: 638216 - DNA, 607 bp, Homo sapiens
catgctcagctaatttttttgtatttttaatagagtccaggtttcaccatgttggccaggctggtctcaaactcctcaactcaagtgatctgcctgtcctggcctcccaaagtgctgggattacaggcttgagcctctgtgcctggccacaactttagtttagacaaagatttctcagataaaaattcaacaccatgatctacttataaagttatataatggacttcatcaaatcttcttcacrtcaaaagatactgttaagatagtaaaaggataagccaccacctgggaaaacaatatttgcaaaacatacatctaataatgaacttgtttcctaaatatataaataactcttaaatctcataaataagaaacaacacatttttaaatgggcacaatatatgaacaatttacaaaagaatatatacagttgacaaataaatgtatggaaatatgctaaataacattagcctttaaagaaatctaagttgaaactacaacaggatactgctgcacatattataatatctaaaattaaaaagaccaaaacatcaagtgtttgtgaaaatacagaggaactggaactctcacacagttggtggggacc

SEQ ID NO: 638217 - DNA, 545 bp, Homo sapiens
ctgcctgtatctaaaatgcaacacttctaaaatttaaatgatcataatgctcaaaaaattagctccttttctagaccatcggaggatggttgattttatccaccacccaccaggtgaattggtgaattggtatgtggccaactcccttaagaatcaccttggtcttggcctcagtccagtgcagaaagaaatctatcattctgttcaactctgcctcaaataacttgtaggcaaaagtgacatgcgcctgtctgtaacatcagaagagcaaagaaaggtgatrtactgagtaacaaagcaaatttcccccagacatttccatggaatcaacaaaattaaggtacattagaaaaagagagtgataaatgtatgtaatataacctacatttctcagctttgaactataatattatagactgaactaaagttctgtaagtacattccaggctcctacattatagtgatgtcagctcttgtcaattgagcaattgtctagatagtaaaccacatacgagtctgaggtagagcttggaatgagcttatgc

SEQ ID NO: 638218 - DNA, 545 bp, Homo sapiens
ctgcctgtatctaaaatgcaacacttctaaaatttaaatgatcataatgctcaaaaaattagctccttttctagaccatcggaggatggttgattttatccaccacccaccaggtgaattggtgaattggtatgtggccaactcccttaagaatcaccttggtcttggcctcagtccagtgcagaaagaaatctatcattctgttcaactctgcctcaaataacttgtaggcaaaagtgacatgcgcctgtctgtaacatcagaagagcaaagaaaggtgatgtactgagtaacaaagcaaatttcccccagacatttccatggaatcaacaaaattaaggtacattagaaaaagagagtgataaatgtatgtaatataacctacatttctcagctttgaactataatattatagactgaactaaagttctgtaagtacattccaggctcctacattatagtgatgtcagctcttgtcaaytgagcaattgtctagatagtaaaccacatacgagtctgaggtagagcttggaatgagcttatgc

SEQ ID NO: 638219 - DNA, 460 bp, Homo sapiens
agtaggtcatccctccttcaatgtgtgttgccaaatgtctgaaatatgcagaaatagcctatgaaatgatttttactttttaaagcttcagcaacgatgggaaacacctgtattttggcataagattataccccayccacactcccaacgataatcagtcccggaaaaaagtccctagcacagagtattcaattcatctgtgtttattttcacacataatctacccccacattccatctatttaagtatctctcacacatgatgcataaattagacatcatgctagaaactaagaaactaagatgaatgacacatagttttattcagtcaaattgtctagatttcatataatataggaaaaatgcaagctatctaagtggacctgtgggagaatttatttgtaaggacatatttcaaatacagaacaaaaggcatatgaaaaaaggaactttttctcttc

SEQ ID NO: 638220 - DNA, 616 bp, Homo sapiens
ttatttgataagaaatttttcttaacacttttaatgtaaaagtgtactctgttttttttatataaaaacaatgacaattaattttattaggtttttaaaaatattttccttcatttttgttgtaaaacacacataacacacaatttgctatcatgatctgtttaggtgtacagttcaatgatattaaatacattcataatatgttaccatccacctctgtaactctccattttgtaaaactgaaactcgatacttattaaacaataattcctcaatatcctgcctctgatccctagaaaataccatttactttctgtctttatgattttgactacactaactagctaatataagtggactcacacagtatttgtctttatgtgacttggcttattttacttagcgtaatgttcccaagtttcatccatgttgtagcatatgccagaattttcttcttttttttwaaaaaaaaggctgaattatactctattgtatgcatataccacatttatttatctatttacccatctatgaacacttgggttgtttccacattttagctgttttgaataatgttgccataaataaaggtgcacaaatatatcgttgatacctt

SEQ ID NO: 638221 - DNA, 546 bp, Homo sapiens
tttttctaccaaaagtctctgactaatgatttagctattcatctggctttgtaaaaaaactaaggacatgatataaacttctatttctacatctacttttaaaaaaaataaatcaaatttatataatctcgatggaagcaggaggggtctatgccagtctagatgttgcttactgctgtttttccaaactctagcaacatggcaggcacatgacacatatgtgtgcaaagaagaaacacagccctgagacatctctttggattgacattcatcctttaagaaacatagtccaactaaccttgactttatttaaaatgtcaacatattttctttcattttcttcagacatattgaattagaaaaactttgctgatctctagaastattgttactgaaactttttgcatttccattctgaaaacagtatcagaaacaggaacagaagatgagtttaacatgttattatttgttttttggtgaaaacacatttggtgaaaacactttgtttccattaccagtttttccttttttgaatatggacaaata

SEQ ID NO: 638222 - DNA, 619 bp, Homo sapiens
aagcttcaaaattatgtccaaaagcattatagtttcaaatgctagcagagttttaatgatcttccaaattctttgatattaatgatgatgataagagagcaaagtgaaaaccacagagaagaaaaggaaaagataaaaggaatctactctatagtttgctcattagctataccacctatattttcctactgaatgattcttgccataacaatataataaatatatccttctcaataccatttcctgggaaatcttttgtacaaacaaacaaagaatgtcagggagttaacatattgtttgcctactttaatgactttggtattagaatgaaaaagcattactataagaatataagaaaaamctaactcaatttatgctactatactctcataacacagaacacttctgtgacttcagctatgctggagttttctcccaaacacaaagcaattcttcagatgattctcctgtggacgtcagctgagtgtcttctaattcaattaatttctgacactatctacctggagatagcatcaagtcacacaggttgaaaggtccagtcctgcaagactacccttcttatgccagtctctggcacaggttatggcctgtgcttctg

SEQ ID NO: 638223 - DNA, 619 bp, Homo sapiens
aagcttcaaaattatgtccaaaagcattatagtttcaaatgctagcagagttttaatgatcttccaaattctttgatattaatgatgatgataagagagcaaagtgaaaaccacagagaagaaaaggaaaagataaaaggaatctactctatagtttgctcattagctataccacctatattttcctactgaatgattcttgccataacaatataataaatatatccttctcaataccatttcctgggaaatcttttgtacaaacaaacaaagaatgtcagggagttaacatattgtttgcctactttaatgactttggtattagaatgaaaaagcattactataagaatataagaaaaaamtaactcaatttatgctactatactctcataacacagaacacttctgtgacttcagctatgctggagttttctcccaaacacaaagcaattcttcagatgattctcctgtggacgtcagctgagtgtcttctaattcaattaatttctgacactatctacctggagatagcatcaagtcacacaggttgaaaggtccagtcctgcaagactacccttcttatgccagtctctggcacaggttatggcctgtgcttctg

SEQ ID NO: 638224 - DNA, 416 bp, Homo sapiens
aaattaacaattttagctacttaaaaaaaattgtatatatcagaattgtaataaaatmaaaaataaacaggaaaataattacataaaataagacaaaggtttgatctttttaatatgtattggctccagacaactcattagcaccttagcaacatgaacaaataattcacaggagaaataaacataatcataaaaatatgttcaggctcaccatcaataaagtgccatttttatttttcaagttagagttagcatcaactgacatatgtcaaattgacataccatcagccaatataccaaaaactaacatatggacagatataacatttgtctacaattagaagggaaataactatgagcattggatatggtatacaaccattgaacaatgtcaactatcttatattaatacagta

SEQ ID NO: 638225 - DNA, 416 bp, Homo sapiens
aaattaacaattttagctacttaaaaaaaattgtatatatcagaattgtaataaaatcaaaaataaacaggaaaataattacataaaataagacaaaggtttgatctttttaatatgtattggctccagacaactcattagcaccttagcaacatgaacaaataattcacaggagaaataaacataatcataaaaatatgttcaggctcaccatcaataaagtgycatttttatttttcaagttagagttagcatcaactgacatatgtcaaattgacataccatcagccaatataccaaaaactaacatatggacagatataacatttgtctacaattagaagggaaataactatgagcattggatatggtatacaaccattgaacaatgtcaactatcttatattaatacagta

SEQ ID NO: 638226 - DNA, 430 bp, Homo sapiens
tatttttcaagttagagttagcatcaactgacatatgtcaaattgacataccatcagccaatataccaaaaactaacatatggacagatataacatttgtctacaattagaagggaaataactatgagcattggatatggtatacaaccattgaacaatgtcaactatcttatattaatacagtaactctacttttattttttcacttcttactctaacttgcatataagttcataaattagcagacatatttatcatccctgaaatacaaggctttcttatgaacagagaatgagatttgctctttctctcttcctcctatttttctacctctcatatgaaaaatggattcatagatgcatctgcttctcttccctcacactgaayatggtccagttacctgcatctacacagagcattactgagtact

SEQ ID NO: 638227 - DNA, 505 bp, Homo sapiens
aattgaagtaaaatgttatttatatgtatccaattctaacttacccttattttacttatcaattgtataatatttatttatagcaactttattgagatattattagtatttcatgaaattcatccttttaaagtgctcattttagtgggttttagtatatttacagaggtctacaatcactaacactatctaattttagcacaatttcaacacaycaaaaataggtcctgtacccttcagaagctaccctttcttgctcctccctttagccccttaaaaccaataatctactttgtgtctcaatatatttgcatattctgaactttttatacatctggcatcatacaatatgtgggatttttcctctagcttctttcactaagcacaaggtagggttcatccatgatgtggcatgtattaggactttattcctttatacgcccaaataatgtctcatttcatggatacacattcaccagttgatatacatttgggttgtttctaa

SEQ ID NO: 638228 - DNA, 472 bp, Homo sapiens
tgaggtagtttaaaaatgtaaatgtaagtatccaaattataaatacaaaactacaaaaaaatcggggaatctctaaaagaccttgctgctatggcttgactgtgccygccagatttcatgtattggaggtttgattccaaaattcatatgttgattggaggtggaacctttgggagataattagggttagaaaaggtcacaggggtgaggagcctccctgatgagactcgtggcttcacaagatgagaaaaagagatttacactgacacacaggcacattctcaccagcttaccatgcaatgcgctctgccatgtcttaatgcaggaagaagtccctcacaaggtgccagcaccatgcttttggacttcccagctttagaaccatgagctaaataaactttctttctttataaattacccaattagtggtattctgttataacaacagtacaaaaacacttacatagaaaat

SEQ ID NO: 638229 - DNA, 583 bp, Homo sapiens
tgggcatgagttttatcttgctgttcattgcagtttttcaccaaaatacatatcttattttctattaaatgggatagcaataactataaagcaagcttcagtgaaagtcagtcatgtacttaggtgcataattgatttctttaagcctcagtttttaaatctttcatgtggggacaatagaaataaaaccatgtagagttgaaattaaggctccatgagctactactgatgaagcacaygttagtgcctgacctattattgtgcctagtattatttagttagatgcattcattttatgataaagaagtttggatcccaggtgacttaagtaaccctcatctgtttcttacttttctcaaagccaggtgttttgcatatattatttcctttaattcttactatctggaatatatgctaatgttctattcttaaggatgatgaatgaggctcagaaaatgtatatagcttactccaaacacacacatcatgaattaaagacttataattcaaagtctaggctttacataccattaaaagttgattagactccacctaccaccacatgcagtcttttctagcatgc

SEQ ID NO: 638230 - DNA, 498 bp, Homo sapiens
ctgaacttcatcttgatctcaaaagttggctgggcacagtggctcacatctgtaatcccrgcattttgggaggccgagacggatggatcactttaggtccggagttcaagaccagcctggccaacatggcaaaaccctgtgtctactaaaaatacaaaattacccaggtgtggtagcgcatgcctcttatcccagcttctcaggaggctgagacaggagaatcacttgaacctgggaggcagaggttgcagtaagccaagactgcaccacggcactccaggctaggtgataagagccaaaatctgtctcaaaaaaaaaaaaaaaaagtcacatactttcctcattcactttgccttggtgagtcaatgagtaaccatggggatccctaatgggtactcgaggctcctctactttgccatacccttttcctccttcatctgtattaattcacacttttaattttcatttgatatttcaacacttgtttatctattttca

SEQ ID NO: 638231 - DNA, 498 bp, Homo sapiens
ctgaacttcatcttgatctcaaaagttggctgggcacagtggctcacatctgtaatcccggcattttgggaggccgagacggatggatcactttaggtccggagttcaagaccagcctggccaacatggcaaaaccctgtgtctactaaaaatacaaaattacccaggtgtggtagcgcatgcctcttatcccagcttctcaggaggctgagacaggagaatcacttgaacctgggaggcagaggttgcagtaagccaagactgcaccacggcactccaggctaggtgataagagccaaamtctgtctcaaaaaaaaaaaaaaaaagtcacatactttcctcattcactttgccttggtgagtcaatgagtaaccatggggatccctaatgggtactcgaggctcctctactttgccatacccttttcctccttcatctgtattaattcacacttttaattttcatttgatatttcaacacttgtttatctattttca

SEQ ID NO: 638232 - DNA, 498 bp, Homo sapiens
ctgaacttcatcttgatctcaaaagttggctgggcacagtggctcacatctgtaatcccggcattttgggaggccgagacggatggatcactttaggtccggagttcaagaccagcctggccaacatggcaaaaccctgtgtctactaaaaatacaaaattacccaggtgtggtagcgcatgcctcttatcccagcttctcaggaggctgagacaggagaatcacttgaacctgggaggcagaggttgcagtaagccaagactgcaccacggcactccaggctaggtgataagagccaaaatctgtctcaaaaaaaaaaaaaaaaagtcacatactttcctcattcactttgccttggtgagtcaatgagtaaccatggggatccctaatgggtactcgaggctcctctactttgccataccyttttcctccttcatctgtattaattcacacttttaattttcatttgatatttcaacacttgtttatctattttca

SEQ ID NO: 638233 - DNA, 587 bp, Homo sapiens
tactggtctgaacactctcgtacctattacccgatctaattctcatcacagtgctgttacggtgtaagatacatgcaattgctaccattctctagcttaaaaaaacaaggcagagaggaagaaactaccagtttcaagttcatatagcacattagaggaaccactgagaaagcracaggcactccattcaacttagctatagcaggattatacttaggaagacacacgtttagaaaaaagcaacctggatggagcaaagtcattggagtttgaagttcagttgctttctatttctgtgacttagagaaggatgaaatctctcttatcacttgtgtttctctctggcctctgtcaattttacatataaaactgtggtagttgtcatttttcttccaggacaacaaagaacacataattagagttcttcattggtatgttaagaggcagttgtctataagtctctcaagtttttgcaaattttatgagcagaagtatcatgtcttttttccagatgatctcttcaaagatatttgtagagcagacaaccttagaaaatggagatagtgtctccctttaaagcaaaggac

SEQ ID NO: 638234 - DNA, 587 bp, Homo sapiens
tactggtctgaacactctcgtacctattacccgatctaattctcatcacagtgctgttacggtgtaagatacatgcaattgctaccattctctagcttaaaaaaacaaggcagagaggaagaaactaccagtttcaagttcatatagcacattagaggaaccactgagaaagcgacaggcactccattcaacttagctatagcaggattatacttaggaagacacacgtttagaaaaaagcaacctggatggagcaaagtcattggagtttgaagttcagttgctttctatttctgtgacttagagaaggatgaaatctctcttatcacttgtgtttctctctggcctctgtcaattttacatataaaactgtggtagttgtcatttttcttccaggacaacaaagaacacataattagagttcttcaytggtatgttaagaggcagttgtctataagtctctcaagtttttgcaaattttatgagcagaagtatcatgtcttttttccagatgatctcttcaaagatatttgtagagcagacaaccttagaaaatggagatagtgtctccctttaaagcaaaggac

SEQ ID NO: 638235 - DNA, 611 bp, Homo sapiens
taaaaaaacaaggcagagaggaagaaactaccagtttcaagttcatatagcacattagaggaaccactgagaaagcgacaggcactccattcaacttagctatagcaggattatacttaggaagacacacgtttagaaaaaagcaacctggatggagcaaagtcattggagtttgaagttcagttgctttctatttctgtgacttagagaaggatgaaatctctcttatcacttgtgtttctctctggcctctgtcaattttacatataaaactgtggtagttgtcatttttcttccaggacaacaaagaacacataattagagttcttcattggtatgttaagaggcagttgtctataagtctctcaagtttttgcaaattttatgagcagaagtatcatgtcttttttccagatgatctcttcaaagatatttgtagagcagacaaccttagaaaatggagatagtgtctccctttaaagcaaaggacaggtttctttcatgccttggaaaatatagygtcttgttcaaatccaaattgcccagtacaataaatataatgtctctctatgggatgaaaggcagacatacttactgcctgttaaaaaagg

SEQ ID NO: 638236 - DNA, 676 bp, Homo sapiens
aattacatcatactggaaagcaaatgagcactgagcattcttgatggtgagactagactgaatgcatttgatactcaaagaggtggctacaagttcaaaacaaaagctaagaataccaatatgttgcttataatcacaamtgtaagtaagttttcactgaattggcaggtttagtataatattgataaaaactaggaaaaacaatagaactactaaatatttacctgaaatgtccaagaaatagtgtgttaggaataactcaatttgtcatcactgaaacatgtttaattatttatatataagttcattctttaccttagtaaacatattatattgaatatatttacactaacttttttagaattgaatgtcatcattatgaatggaatcaagcaaatcaataaaattaagccttaatacttctagaaatggcagcaaagcagacacatgaacactgccacagttaaaaattataaaaattagaatgaaatatattataaaattattaaaggcactgtacaacatttaaagcagagaaaaagaaaaggatagtcaactccaaaaaaaattgaaaatgaaagggaaataatcgatcagtttatgtccttctggtttagggatgttgtacacctccaagattgactttggtggcactggatactttaaggagtaaaat

SEQ ID NO: 638237 - DNA, 612 bp, Homo sapiens
agctgttgctatgacctaagcaaaaaaccataatttaataaaggtgaacaaagtcctattagatttaatctgtctttgaggtgatggaagcaagccttagggtcaggatgacatttctgctgtgtgtggaaagataaggcagagtttagaagggaggcaaggaggaggacatttcaagcagagggaacaaacatcatgagtgagaaaggcatggcagattcaggtatttgtgcgtgaagaagttggaacaggtaaactaatacaaatagatgaatgcactcaattgctcagaataaaaaggaatcatggaagggagggatcaggtggggaggagccaccaaggaaggcttagggaggcagagccatttatgcagctagggarggagtgagtcgtaaaggagcatagtttgacagaaagaagtacagggaaccaggtaacatggagaccctgggtgagataatgaggaaggggactgtggagattaaagaagatgggaagggagggtggaaatagttacaaatggcagcttgagaggtaagatgtacagcggttctgaagagtacaaggggcctgagttactgctgtgctgagaggtcagaatggtcactgtg

SEQ ID NO: 638238 - DNA, 579 bp, Homo sapiens
tacatgtgataatttaatacattcacttaatttgtaaagatcaagtcagtataattgaaatatccatcaccttaaatatttttctytgggctagaaacatttgagttattttcttctagctagtttgaaatatacaataggtaattgtgaactacagtcaccctactgatctatcaaacacttggccgtatttctcctatcaaactgtatttgtttccatcaatcaatctctctttgtcttctcctcctctcatgatctttcccttctatagtagggagctcagcaaacatctgttggactgaataaggtttttctattccatgcagtgtgacctggtctctacaacggcagcaaatagatggaggtacctcgggactaagttctgctgtcaagtccaacagtgggctgctcaaagggcccacaaagaacaataattaggtaaccacctccctcaccaaacagtttgtggaagaaggcctgagaagtcttcagatggtttcaccattgcacagcccatctctttgcaatctttggccttttcacaaggcaggtgccctgggatatctgctgggcacaca

SEQ ID NO: 638239 - DNA, 561 bp, Homo sapiens
gtaataaggtgagaggacgtctcatatacaaagttaaaattaagatttaacacactggggaatcctgcacttctgtgaggagctatctctgcatctatttcataacctcagagagaaaacttggagaggctacaaaacagttaccttctgggtgggtcactctggcttgctctctggaaaacagaatcacagacgtgtgacagaagagccacaaaatggcttgtcaccagggattggatctaagcacctaaaactacaccattggccatttatgagacggctgcaggcacagcgagagtcacgcctcacttctcattcagctactctgggaaccaccttcctttgatacgaggaggaaccagagagaaggctaaggaagagcccactacttatcatcrtagggccagcagcatgctgatcacctgggcgctttttagacctgtaacaagatccttccagtgatctctgtgcacatttaggttagagaagtagcagtaacaggcatagattaaaagctgcaacaaggaggatgcacaatgtctggaggatatttaggaaaag

SEQ ID NO: 638240 - DNA, 576 bp, Homo sapiens
aatgttgctgactgacactattataacatttatgtttatccatttatctccctctttgtgcttcccagggtcaagggatcayatcctattcatctctgtagcccctctgtccagcaacaatggtgatccatacgtatttattaaatgaagggattaattaacaaatgcatctatctttttctacaatatggaaaaacttactaaaaccatagtgattggggaagatcagtctgaattcaagaaaagactttcaagaatatttttcatgaagtttagctttctctctcaaatacatacggttaacttgaacctaactgatagcctgtttctaaacccagctgtttactactgaataactagcaggacatttgcatataaagtcttgattttcaaaggtctgtgtttatgaacagttctccttatcaggctggataagcaggtcccaaccctgattcccaggtgcacattttaatgacctgggggctccatgcaccagagctgcgcctcagactggcacttccccagtgctgtctacagtagaccagtttatctgtgttttctaaacagacacgcgga

SEQ ID NO: 638241 - DNA, 576 bp, Homo sapiens
aatgttgctgactgacactattataacatttatgtttatccatttatctccctctttgtgcttcccagggtcaagggatcacatcctattcatctctgtagcccctctgtccagcaacaatggtgatccatacgtatttattaaatgaagggattaattaacaaatgcatctatctttttctacaatatggaaaaacttactaaaaccatagtgattggggaagatcagtctgaattcaagaaaagactttcaagaatatttttcatgaagtttagctttctctctcaaatacrtacggttaacttgaacctaactgatagcctgtttctaaacccagctgtttactactgaataactagcaggacatttgcatataaagtcttgattttcaaaggtctgtgtttatgaacagttctccttatcaggctggataagcaggtcccaaccctgattcccaggtgcacattttaatgacctgggggctccatgcaccagagctgcgcctcagactggcacttccccagtgctgtctacagtagaccagtttatctgtgttttctaaacagacacgcgga

SEQ ID NO: 638242 - DNA, 569 bp, Homo sapiens
aagattaacaagcctatggaccatgattctgactattctgaggcctgagttgacttaatactttctttgaacatttaagcagcggaataacttcacaattatggtaacatcaaggacaatgaggattaataggtaagcagggggaaagtttttagtgctgcagaacggtgaaggacattcagttgctgcactaaaatccctcgtagttgaaggaagatccaacaggcaagtatattaaaaaaaaaaaaaaaaaagaaatctagatgttacggtggggaggggatttagctcagacggatgattgagtcaggacaggatttaatttacagaccsaagaggaagttaaagagaatgattttggagaaccaaggttgtagcaatgcagagatcaggaagaacggactctcctcaccattcacaatgacctgaatgtccttgaagttgatctccccccgtgccaggattctgccctcacagcgataagtgccctcatctgttttcttgatgccccggatctgcaggtagttgttggacaggactatgaatcggactagaagagataagaggca

SEQ ID NO: 638243 - DNA, 610 bp, Homo sapiens
gacattttctggcaattatctgggctgtggaaatggggcatgttttctaaatgtaaaacaaggtcaccaggtctggcatatctcagagctctggtggggaccatggcacagaatatcgatattcacaatagacctggtaaacccaggatatatgtcctcacaacaaaagccataccagtattctatttacctacaggcaagttttagacttagattttcaagctctggggaattctaagaaataagccttaaacagatccaccgaagtattgtttctgagccagtgctgttctccattgtcatttacagaactctgaatgtatacagaataggagatgggggatgattcactattctggaagttgtgctgatttttctaagaaaactcctagacttcctctgtagtcaaggtgaagtctagatgacagatttgctatgttgaggcagmtttttgcaaaaggaaggaagaggccctggctcttaaatggccatactattgaccctgtaatagagcaatgccaagaattctaggtgtggcttgaccagccagctcacatggcctgagggctcctgctctacccagtgagtttctgaagcaagttctaaaatg

SEQ ID NO: 638244 - DNA, 495 bp, Homo sapiens
tggtttttgtgtatgactcaatacccagtccaggtagctttatgaaaaatgatagattttggaaacctgcttgctctatgagtgtaaagagcccaagggtctccttcaagtgcatttggtttagagatgtctatatrttatctgaaagttgtctgtatggctcgtctttataccaggaagctccgttttctttatcctgtggcataaaaaaatgaacctaccaagagtcatctttccctccgccttttgtctcaaattctgctttcacgcctctgctatgcactaatgttcctagccagaaaagactgcagctttcaagaggggtttccttcattctctaggctgctttacgcctcaggggaaacccaggagcccaggggcctgtggcgactttagacagcatttcccaagggcttcgttataaacttagttgatttggaaacctagcagatcacttctagatgtttaggtttaaataggaatgagatagaattc

SEQ ID NO: 638245 - DNA, 495 bp, Homo sapiens
tggtttttgtgtatgactcaatacccagtccaggtagctttatgaaaaatgatagattttggaaacctgcttgctctatgagtgtaaagagcccaagggtctccttcaagtgcatttggtttagagatgtctatatattatctgaaagttgtctgtatggctygtctttataccaggaagctccgttttctttatcctgtggcataaaaaaatgaacctaccaagagtcatctttccctccgccttttgtctcaaattctgctttcacgcctctgctatgcactaatgttcctagccagaaaagactgcagctttcaagaggggtttccttcattctctaggctgctttacgcctcaggggaaacccaggagcccaggggcctgtggcgactttagacagcatttcccaagggcttcgttataaacttagttgatttggaaacctagcagatcacttctagatgtttaggtttaaataggaatgagatagaattc

SEQ ID NO: 638246 - DNA, 467 bp, Homo sapiens
catttatatgcttttttctgtagcacctttctgaaggagatttgrtgtcatttttaaacccttgagagtttaatggccagatttcaaattccagctcttccgcttgttatctgtgtgaccttgggcctctccaacccctagttttcacatctataagatagggataataactgtatctgcttcatagagttgttataaagcttctgtgagatcatccatatgaaccataaagctcagtgcctggcacatggtttgggctgaacaatcatgcacatttatttttattatgacttccattcacttagcagtgaattgagaaatgatatacacaaaagtgtatctctaaaagcttctccaacaattattgttctctcttttattattgttgttattcttctctcttttattattattgctcttttattaaatttagattttctcttttgctccgaaatgaattgctgctg

SEQ ID NO: 638247 - DNA, 667 bp, Homo sapiens
acattttagactcccgagcttgaactcttaacctcttcatatctaaacctttgaagggcatctgatttggcacaatgtcttgcatataaaagaagttcaataaatgttcatcaactggatgtcttagatttagcrtatgtctctgtcaaatcattccctgtggagttagaacaactaggggcaggcaggtgcagggcctcctgtgtaaatggtctagtttcagccataagtttcaatcctgccttttgaagggggcatccctactgatcttaagtaatatgaacagaaggtcccagtacacatgttgtggtttatttgggaggagggacttcccaggtccactaagatataatggtaacctcagctgttttcttagagtaagttctcttctcttctagtaaaccagtgactctcaaacttgcctgcacatttacctcacctagagagcttaaaaaattattgatgcctgggtcttatcccagagtataatgtaattgacatggggtgcagggccggcaggatttttacaagcatcctagatgattctaatgttctgccagtgttaagagctcttctaaactgagggtttgcttcctgattgcatctcattaaatggaaatgaaaactggcaggtatcattaattaatttggtgaagagcttgctgct

SEQ ID NO: 638248 - DNA, 631 bp, Homo sapiens
gagggttccagtttttccacatcctcttcaatacttgttacttatttttttattatagctattctagtgggtgtgaagtgatatgtcattgtggtatytgatctgcatttttttggtgactaatgatgttgaggatcttttcatgtacttgttggccatttatatattttctctggagaaatatcttcttttataatgaggtgtaaatgttatttatatattctgaatacaagtttcttatcagatacatgatttccaaatattttcttccactccttgtattgccttttcattttcttgatgatgttctttgcggcacaaaaatgtttaagtttgataaagcctcaattacctatttttctttggttgcttgtgattttggtgttatatctaagaaaagatcatctaatccaaggtcaggaagatgtatacctatattttcttctaaaagttttatggctttagctcttaaatttagctatctccaatccattttgagttcattttttgtatgatgtgaggtaagggttcaacttcattcttttgcctgtagatgtctacttgtcccattaccattgagtgattttggcacccttgtcaaaaatcaattgaccataaatatatgggttta

SEQ ID NO: 638249 - DNA, 601 bp, Homo sapiens
ctatggcataaggaggaggggagtatgggctgaatgaggctgggtggatgcatgccagagatggtggctttgaggatcttatctcacttctttctccacaaacccatgttattcctgagacctcggtgagcctccctgaagtcaagacccatataaaggaagaggccagtgcagactagggaatgggtttccttctgatggttgagacaatggctgtgttgacactaaacagcagaaactgtacctttggcccaacgtgctgagagtttgacattaagcaaatgtttgggccatttgtggttaaagttttttgttttgaaacggtctcgtttcatcacccaggctgcagtgcagtggcatgaagatagctcactccagccttgacctcccgggctcaagcaatctttctgcctcagcctcctgaatggctgggactgcaggcgtstgctactatacccagctaatttttctattttttgtagagatgggggtttcgccctgttggccccgctgggctcaagtgatccttccacctcagcctcccaaagtgctgggattataggcttgagccacggcacccaacctgttgtggttaaagtta

SEQ ID NO: 638250 - DNA, 613 bp, Homo sapiens
aatcagtgataaatggactgtttttgtgtattttattattggagagcctggaacccctttcacttttcatcacttacactggtgctttccagcttccagaaccacagtgaagaacagtctatgttatctcacctggcttttccttcctcaaattgcatatccttttggacagccctagaatgtctctgccatcttgtatcctttaaactaagagttcttaacttagggtccagggaccccctcccaagggtccatggatagaattcagggtgtctctgaacttgattgggaacaaaattgtatttttattgttaccaatctgtcactggaatttagcattggtttcattgttttttttttccagctttttattttattaaaaaaccttttttaaatttcaataatttttggagaacaggtagtgtttggttgcatggaaaagttctttagtggtgatttctgagattttggtgcatatgtcacctgagcagcatacactgtacccaatgtgtagtttttatccctcrcgcccctcccaaccttccctcacaagtcaccaaagcccattatatcattctctttttttttgagacggagtctcgttctgtcaccc

SEQ ID NO: 638251 - DNA, 574 bp, Homo sapiens
gcaatctcggctcactgcaacctccgcctccttggttcaagtgagtctcctgcctcagcctcccaagtagctgggactacaggtgcatgccaccacacccagttaatttttgtatttttagtagagacaggttttcaccatgttggccaggatggtctcaatytcctgacctcgtgatccattcacctcggcctcccaaagtcctgggattacaggcatgagccaccctgcccggccgagttgatttttgtataaggggagagaggaggatccagcttcattctttcacatgtggctagccaattatcgaagcaccatttcttgcatagggtgtccttttcccacttcatgtttttgtttgctttgtcaaagatcggttggctacaactatttggctttatttctgagttctatattctgttccattggtctgcatgcctatttttataccagtaccatgctgttttggtgactatgaccttataggttgaaatcgggtaatacgatgcctccagatttgttcttgttaattagtcttgctttgggtatgtgtgctctttttggatttcatatg

SEQ ID NO: 638252 - DNA, 487 bp, Homo sapiens
agaagaggaacaaatatctacaaaggacaagtgcctaagaaaaaagtacataggagtgtggagtctgggatcaatccatatgagagtgatcatccccaagttacctcccagggtgataagataaacaaagagaaacatgaagaagagaacaatcttctgatagggatgatctgtgaggcccaataagagaaattcagtcactactgtmtggttcttatcttccattggttccattggttcattgtaatctgtcataagaaagaggaattatttttattacaaaggaaatcaatgattaatagctacaaatagtatttgaagctaatgatagattattttaaacagggttataagagacaattgtgaaatagtgttggtctgggagatactcctagatactagatgtgagcagttgtgcaaagatcctgtgtaaatgtgaacaatttactctttacctctttggatcctatacactctcccaccaaga

SEQ ID NO: 638253 - DNA, 642 bp, Homo sapiens
aacattacagtgcctttctcttttttcattttacagaattattttattttatgtaattattttatttttaatttgcaaataaaattgtttctatttcttaggtacaacatgatgttttgaaatttgtattcattgtaaaatggctaaatcaggctaattaacatatgcattgcctcacatatttatcattttttgttgggagaacacttaaaatctctcttagcaacttttaggaatataaaacattgttactaacaatatctccatattatttttaaaaaacaggaaattcagttgtttcatttcaccaagatgtgaacaaaatgccaatgtytgctctctttagagaaactgaggtggaaggtcatgttcccaaagttcaaactaatcctgaggttcttctacaaaagttgcctctaccaaaaagtttatgttttccaaatgcagtttactcacttttttatgtatctccgttaactgcttcaaagcaaacgatcattttctattagtaagaatggaagatgcagctccctccatggtggtaaccgttttcaagaagtattaatttccaggtacctgaagaggaagacaaatccctcatattgatgagcctaggttaaagagatactttttgacccacac

SEQ ID NO: 638254 - DNA, 644 bp, Homo sapiens
ctggttgtatctgaaatacaaaagatacagagctctgctctggttttgtatctgaaatacaaaagaagcatgtccaacatccagggcacactgctgcaaggcgtgagctcccaggtcttgggcaactctacctacccctgttgctttgtaaggttcagtccccacagttgctttcaggggttggagttgaacgcctgtggctttttcagatgcagtgtgcaarctcctggtggagctaccattcaagggtctagaggactgtggctcacttctcagagctccattaggcagtgccccattggggactttttgtggggctccaaccccacatttcctcttggcactgccctagtagatgtttcctgtgagggcgccatccctgttgaaggcttctgcctgggcacccaggcttcctcataaatcctctgaaatctaggtggagactaccaactgttctttactcttacattatgtgcaccataaagtttaacaccacatggaagccaccaaggcttatggcttgcattccccaaagtggcaacccaagctgtacctgggtccctttgagctctggctagagctggagttgcagtagccagaatgcagagaacagtgtcctgaggctttgcagggcagtagggccc

SEQ ID NO: 638255 - DNA, 570 bp, Homo sapiens
tgggtccctttgagctctggctagagctggagttgcagtagccagaatgcagagaacagtgtcctgaggctttgcagggcagtagggcccttgaccattcccattaaaacattctttcctccttagtctctgggctgtgatggaagggactattgccaaagtttctgagatgcctatccrgcctttccctgttatcttttatagtagcacttggctcccttttagttatgcaaatatctctagcaactggttgctccacagcctgcctggattcctcttcccaaaagctttttctttctctgctacatgaccaggctgcaaattttccaaacatttatgttctgcttcccttttaattataagttccattttagttttttgctcctgcatctgagcataggctgttagaagaagccatatcatttcttgaacacttctagaaattgttttcatctgcatcactctcaagtccaaacttctacacaaccctacaaagaatgcagccaagctctttgctaaggcatagcatgtgtgatctttgctccagttcccaataagttcctcatttct

SEQ ID NO: 638256 - DNA, 589 bp, Homo sapiens
ctgcttcccttttaattataagttccattttagttttttgctcctgcatctgagcataggctgttakaagaagccatatcatttcttgaacacttctagaaattgttttcatctgcatcactctcaagtccaaacttctacacaaccctacaaagaatgcagccaagctctttgctaaggcatagcatgtgtgatctttgctccagttcccaataagttcctcatttctatctgagacctcatcagcctggacttcattgcccatattactatcagcattttgatcacaaccattttatgagtctctaggaagttccaaactttccttcaacttcctatcttcctctgagctcttcccacttcgaaagtcacttccacattttcagatgttatcacaatgccctacttttcagtaccaactttctgtattaggtcattctttaatcgctgcaaagaaatacttgagaatggataatttgcaagaaaagacgtttaaatggttcatggtttcatggttctgcaggccatacatctgcttctggggaagcctcagggagattttattaatgacggaaagtgaagcaggagc

SEQ ID NO: 638257 - DNA, 612 bp, Homo sapiens
atagcatgtgtgatctttgctccagttcccaataagttcctcatttctatctgagacctcatcakcctggacttcattgcccatattactatcagcattttgatcacaaccattttatgagtctctaggaagttccaaactttccttcaacttcctatcttcctctgagctcttcccacttcgaaagtcacttccacattttcagatgttatcacaatgccctacttttcagtaccaactttctgtattaggtcattctttaatcgctgcaaagaaatacttgagaatggataatttgcaagaaaagacgtttaaatggttcatggtttcatggttctgcaggccatacatctgcttctggggaagcctcagggagattttattaatgacggaaagtgaagcaggagcagtcatttcacatggagaagtcaggagcaagacagagagagagagagagttggggggtagggaggtgccatacacttttaaatgatcaggtctcatgaatactcactcactattattgaaaaagaacaaaaccatgaggtatctgcctccataatctaatcacctcccaccaggccccatctccaaattagggcttataatcta

SEQ ID NO: 638258 - DNA, 579 bp, Homo sapiens
aagtttatagtgctaaatgcctacatcaagaagttagaaagatatcaaattaataatttaccatcatacctgtaggaactagaaaaacaagaaaaatcaaaccccaaagatagcagaagaaaacaaataactaaagtcaaaacagaaatctacaaaattgagatgtaaaaatccacagaaaagatcaatgaaaccaaargtttgctttttgaaagaataaaaaacactaataaactactagctagattaacaaagggaaaaaaaggaaaatccaaaaaagcacaatcaggaacgacaaagatgacattaaaacaagtcccacagaaatacaaaactcctcagagactactatgagcacctctatgtacacaaattagaaaatctagaggaaattaaagaatttctagaaatacacaaattcccaagcttaaaccaagtagtaattgaatccctgaacagaccaataacaagttccaaaatgaatcaaaaataattaaaaaaaaaaactagcaacaaataaaagccctggatgagatggattcacagccaatttctacctgacatacaaagaagagctga

SEQ ID NO: 638259 - DNA, 591 bp, Homo sapiens
tagccaaagcaatgaggcaagagaaataaataaaaggcattcaaataggaaaagaggaaatcaaactatctcttttcatgggtgatatgattgaatccctagaaaaccctgaagactctgccaagaggctccttaaactgataaaccactttagtaaactttcagtatacaaaatcaatgtacaaaaatcagtagcatttctatacactaataatgttcaaactaagaaccgaatcaagagcataatrcattttaaacaatatatacaaaaagaataacatgcttaggaatagatctaaccaaaagatgaaagacgtctacaagaagaaataaaaaccactgcacaaagaaatcagagatgacgcaaacaaatggaaaaaattccatgctcatggattggaaaaatcaatattattaaaattatcatattgtccaaagcaatttacagattcaatgctatttctactaactaccaatgacatttttcatagaacttgaaaaaaaattaacagttcatatggaatcataaaacaaaccaaatagccaaagcagtcctaagcaaaaagaacaaagctaggggaatgacattac

SEQ ID NO: 638260 - DNA, 505 bp, Homo sapiens
gcaaacaaatggaaaaaattccatgctcatggattggaaaaatcaatattattaaaattatcatattgtccaaagcaatttacagattcaatgctatttctactaactaccaatgacatttttcatagaacttgaaaaaaaattaacagttcatatggaatcataaaacaaaccaaatagccaaagcagtcctaagcaaaaagaacaaagctaggggaatgacattacctgacttcatattataccccaaagctacagtaaccmaaatagcatagtactcatacaaaaatagacacatagaccaatggaacagaatagagaagctagcaataaagctgcacagctacacccatctgatcttcaacaaagtaaaaaaaaaaaataagcaatagagaaagaactctctgtttaacaaatggtgatgggataactggctagccatttacaaaagaatgaaacagggcccccatctttaacgacatacaaaaattaatataagatggat

SEQ ID NO: 638261 - DNA, 641 bp, Homo sapiens
agaaaagaaaatgcttatgtgctattggtgggaatgtaaattagctcctgcacagtggagagcagtttggcgatttctcaaaggactgcgttgagccagctatcccattagtaggtgtacacctgaaggaatacaaatctttctaccaaacagacacctcaacctgtatgttcatcacagcactattcacaagtgcaaaaatatggcatcaacctaggtgcccatcaatggtggattggataaagaaaatatgacatatatgcaccattaaatattatccatccataaataagaataaaattatgttctttgcagtaagacggatgcagcaggaggccattttcctaaagaaaataatagaaaaacaaatactgttatgttctcacttgtaagtgcgacctaaacattgggtacacaytgacatgaagacgggaaaaatagacactggaaaatacaagaaggaggaggaagggagggggtcaagggctgaaaaattacctattgggtactgtcttcacttcttggttatgttagtccatttttgcaccactataaatacccgaggctaggcaagttataaacaaaaaaagaggtttaattgtgtcacagttctgcaggctgtacaagaagcatggcaccag

SEQ ID NO: 638262 - DNA, 562 bp, Homo sapiens
ttctattttaaaatatttaattggcaaataaatattgtatctattcaagatgtataatgcaatgatttgatatatgtatacattgtgtaacaataactgcaatcaaattaattaacctatccatcacactcatgctgtaagtgagatccccagaacttagtcatattgtaacataaagtttgaagttggaccaacatctccccattttttctacacccagtgcccagaaaccacagttttactttgcttctgtgggttggactttattaaaatttcacatataaacaagattatgcagtttttgtctttctttgactggctaaatatacttataacaatgtcttccaaacattcaygttgtcacaaatgacagaattttcttcctttcaaagtctgtatgtattatattgtgtatacgtgtcacattttctttcttcattcaaacactgttggacacctaggttgattccttatcttagctattgtgaataatgctgcagtgaacctgggagtgcagatatctcttcaatacactgatttcaattacttgagatttgcacca

SEQ ID NO: 638263 - DNA, 634 bp, Homo sapiens
gttttccctgtgttttattctattagttttacagtttcaggtcttacatttaagttttaatcaactttaagttatttttgtatatggyatgagataaggtccaatttctttattctgtgtgtggatatccaattttcccaagaacatttattgaagaaacactcctttccccattgtgtattcctggcatctttgtcaaaaatcaattgatcataaatgtgtggatttatttctgggctctctattctgtttcactggtctatgtgtctatttttattccagtaccatgttgttttgattactatatctttgtaagtcattttgaagtcaggtagtgtgatgcctccactttcgttctctctactccagattgctttgtctatatggcatcttttgtgattccatatgaactttagaacttttttccatgtatctgaaaaatgccattgaaaatttgaggagcattgcattgaatctgtagattgatttttgtagtacagacatttcaacaatattaattcttccaatttaaaaacataggcatctttctatttacttgtgtctttttcaatttatttcatcaatgtatttccattttcattgtagagatcttaaacctccttgggtaaattta

SEQ ID NO: 638264 - DNA, 634 bp, Homo sapiens
gttttccctgtgttttattctattagttttacagtttcaggtcttacatttaagttttaatcaactttaagttatttttgtatatggtatgagataaggtccaatttctttattctgtgtgtggatatccaattttcccaagaacatttattgaagaaacactcctttccccattgtgtattcctggcatctttgtcaaaaatcaattgatcataaatgtgtggatttatttctgggctctctattctgtttcactggtctatgtgtctatttttattccagtaccatgttgttttgattactatatctttgtaagtcattttgaagtcaggtagtgtgatgcctccactttcgttctctctactccagattkctttgtctatatggcatcttttgtgattccatatgaactttagaacttttttccatgtatctgaaaaatgccattgaaaatttgaggagcattgcattgaatctgtagattgatttttgtagtacagacatttcaacaatattaattcttccaatttaaaaacataggcatctttctatttacttgtgtctttttcaatttatttcatcaatgtatttccattttcattgtagagatcttaaacctccttgggtaaattta

SEQ ID NO: 638265 - DNA, 634 bp, Homo sapiens
gttttccctgtgttttattctattagttttacagtttcaggtcttacatttaagttttaatcaactttaagttatttttgtatatggtatgagataaggtccaatttctttattctgtgtgtggatatccaattttcccaagaacatttattgaagaaacactcctttccccattgtgtattcctggcatctttgtcaaaaatcaattgatcataaatgtgtggatttatttctgggctctctattctgtttcactggtctatgtgtctatttttattccagtaccatgttgttttgattactatatctttgtaagtcattttgaagtcaggtagtgtgatgcctccactttcgttctctctactccagattgctttgtctatatggcatcttttgtgattccatatgaactttagaacttttttccatgtatctgaaaaatgccattgaaaatttgaggagcattgcattgaatctgyagattgatttttgtagtacagacatttcaacaatattaattcttccaatttaaaaacataggcatctttctatttacttgtgtctttttcaatttatttcatcaatgtatttccattttcattgtagagatcttaaacctccttgggtaaattta

SEQ ID NO: 638266 - DNA, 492 bp, Homo sapiens
gaattctatgcatgcatcatacaatgatactataattgatatcagtttcctggtttacattattgtactatagatacataatatataactttggaaaaactggaagaagagtacacgggacctctttgtgctatctgtgtacctcttggtaatctatamttcttttaaaatataaatttagaacaaaattacaatgaaagagaagggagaagaagggggaatgaggatgaaggggaaaaaggaaaactgagaaagtcaggcatacaatttttatcttgaaatattcataatgattccaacagaggagaagtaatgaaagaaggtctaacaacattctcctctgatctaaaagtttcaaaaggattttggttacctgaaaattcatgtaatgaaaagccactggctttttatggtctcagaggcaaaggagtttgaaaaagaaaaggcctgaagagatgtaaatttaagattaataaggaaaatctattactt

SEQ ID NO: 638267 - DNA, 254 bp, Homo sapiens
acaatttttatcttgaaatattcataatgattccaacagaggagaagtaatgaaagaaggtctaacaacattctcctctgatctaaaagtttcaaaaggattttggttacctgaaaattcatgtaatgaaaagccactggctttttatggtctcagaggcaaaggagtttgaaaaagaaaagrcctgaagagatgtaaatttaagattaataaggaaaatctattactttagtagtaaaatgtttcaagaattc

SEQ ID NO: 638268 - DNA, 612 bp, Homo sapiens
tacctgaaaattcatgtaatgaaaagccactggctttttatggtctcagaggcaaaggagtttgaaaaagaaaaggcctgaagagatgtaaatttaagattaataaggaaaatctattactttagtagtaaaatgtttcaagaattctactttttctaaacatagacactagccccaggttatttatattttcattacttatcatgcaaaagaatggaaatagaattttaagygtcaaaataaatttaggttatggaaaaattttagaaaactggaactggaatatacacattgatggcctcagataattgcctctgtaaatgaagctaatgaagcacatacaccattaataattgttactttttttaaacttggtattaaacctgaaatcttgtgcaaaacaatagttgctgcagaaaaggctattaagctttatttttcccagtcttatacaagccaaagattgtaatagagaaaattgcaatactatacatgattgtgatttggggcctgagcaaaatgataattcaactcagctgatccagaagtttctcttctacttataatacacattctaggtaaagtgaagtaattacaagccagaaaagccaa

SEQ ID NO: 638269 - DNA, 612 bp, Homo sapiens
tacctgaaaattcatgtaatgaaaagccactggctttttatggtctcagaggcaaaggagtttgaaaaagaaaaggcctgaagagatgtaaatttaagattaataaggaaaatctattactttagtagtaaaatgtttcaagaattctactttttctaaacatagacactagccccaggttatttatattttcattacttatcatgcaaaagaatggaaatagaattttaagcgtcaaaataaatttaggttatggaaaaattttagraaactggaactggaatatacacattgatggcctcagataattgcctctgtaaatgaagctaatgaagcacatacaccattaataattgttactttttttaaacttggtattaaacctgaaatcttgtgcaaaacaatagttgctgcagaaaaggctattaagctttatttttcccagtcttatacaagccaaagattgtaatagagaaaattgcaatactatacatgattgtgatttggggcctgagcaaaatgataattcaactcagctgatccagaagtttctcttctacttataatacacattctaggtaaagtgaagtaattacaagccagaaaagccaa

SEQ ID NO: 638270 - DNA, 581 bp, Homo sapiens
caatcaaggaggcaggagagcaccagcactcattgtttcccctggaataccctgaactccatggagaagagacactggtacagttgcatttcttgcagcccagaagaatgagaactggagtcyattataatttgacattaaaggaaaaagcatgtcattttaagctataagctaaaatatccaggggatgcttgggttatgcacagactcagcaacaaacacgtccctgaataagaggtgccaccccatcttactccccatttggagttctttccattggacaagttatttgtaatgaaattactgagtccaactacagaagcattttaaagcctcttgatagatatttacaaatttattttgccatttacaagaacaaagtgcattttacttaccaagctgtgagatattttccaatgtttggtttaagcattttctctggacattttagtcagaactgttctcatatatctatgagccctttgcaaaaatagtaagaaaacttccaggtatgtattttctacaaatattttcccacattttaaattgatttttaattttttgaccatggaagttttatg

SEQ ID NO: 638271 - DNA, 581 bp, Homo sapiens
caatcaaggaggcaggagagcaccagcactcattgtttcccctggaataccctgaactccatggagaagagacactggtacagttgcatttcttgcagcccagaagaatgagaactggagtctattataatttgacattaaaggaaaaagcatgtcattttaagctataagctaaaatatccaggggatgcttgggttatgcacagactcagcaacaaacacgtccctgaataagaggtgccaccccatcttactccccatttggagttctttccattggacaagttatttgtaatgaaattactgagtccaactacagaagcattttaaagcctcttgatagatatttacaaatttattttgccatttacaagaacaaagtgcattttacttaccaagctgtgagatattttccaatgtttggtttaagcattttctctkgacattttagtcagaactgttctcatatatctatgagccctttgcaaaaatagtaagaaaacttccaggtatgtattttctacaaatattttcccacattttaaattgatttttaattttttgaccatggaagttttatg

SEQ ID NO: 638272 - DNA, 601 bp, Homo sapiens
acagcttgatgttacagtggactcaactttttttttaatactttaaagaaaatcacttgtttcttacttctgagtgaaagaaaaaactattagagctagctatctacaatgccagtaagtggaaggaaggtttaagataataataccattttaaagggccaattacaaaaaataataaagcttctgcttcagctcctttgtacttcagctccttcaaaaaactcagygaatttggtattatcccaaggttataggtagaattaaaagacagccctaaaaccacaaacttcaagtgacaaaatgaggattagaattcagttagacctagactgtctcaaaacccaagctctttccacacccatgctgcctccatctccccttccattattacatgttaaaatcttgcaatggaacaaatattggggaatctggcacacttagggaaacaatctagttccaaaattttgctgtttcattgaataaatttcattaggaagcagcaaaatgtgtttatagtttatgtagtaattccacatctattacctaatttaatcttcatagaagccctatgatgtggtggatattgtcattacttccattt

SEQ ID NO: 638273 - DNA, 601 bp, Homo sapiens
acagcttgatgttacagtggactcaactttttttttaatactttaaagaaaatcacttgtttcttacttctgagtgaaagaaaaaactattagagctagctatctacaatgccagtaagtggaaggaaggtttaagataataataccattttaaagggccaattacaaaaaataataaagcttctgcttcagctcctttgtacttcagctccttcaaaaaactcagtgaatttggtattatcccaaggttataggtagaattaaaagacagccctaaaaccacaaacttcaagtgacaaaatgaggattagaattcagttagacctagactgtctcaaaacccaagctctttccacacccatgctgcctccatctccccttccrttattacatgttaaaatcttgcaatggaacaaatattggggaatctggcacacttagggaaacaatctagttccaaaattttgctgtttcattgaataaatttcattaggaagcagcaaaatgtgtttatagtttatgtagtaattccacatctattacctaatttaatcttcatagaagccctatgatgtggtggatattgtcattacttccattt

SEQ ID NO: 638274 - DNA, 601 bp, Homo sapiens
acagcttgatgttacagtggactcaactttttttttaatactttaaagaaaatcacttgtttcttacttctgagtgaaagaaaaaactattagagctagctatctacaatgccagtaagtggaaggaaggtttaagataataataccattttaaagggccaattacaaaaaataataaagcttctgcttcagctcctttgtacttcagctccttcaaaaaactcagtgaatttggtattatcccaaggttataggtagaattaaaagacagccctaaaaccacaaacttcaagtgacaaaatgaggattagaattcagttagacctagactgtctcaaaacccaagctctttccacacccatgctgcctccatctccccttccattattacatgttaaaatcttgcaatggaacaaatattggggaatctggcacacttagggaaacaatctagttccaaaattttgctgtttcattgaataartttcattaggaagcagcaaaatgtgtttatagtttatgtagtaattccacatctattacctaatttaatcttcatagaagccctatgatgtggtggatattgtcattacttccattt

SEQ ID NO: 638275 - DNA, 605 bp, Homo sapiens
aaaaataacaaaaaataaataataaagtaaagcttttttgaaaataattggaccatgagatgtctgagggaagtaaaattaaatggaccacgagtttgaactgtaatattggtatgttatagggaaaagattacatatagggccaaataaatccacatggattgactaaataagtgaataattggatggttgaatggataaagggatgctaaacagcccccaaacacttgcaagtgttttggaatcttaggaagccacacaattactctgttcttttaaattttcctccctaattccttctggataagaatttaggccttgcaaaacttcytctgagtgacagtcctgtggatggcatctttgacttccttgtttctcaagctgtagataagtgggttcaacataggaatcactgctgtgtaaaacacagacactactttattgagatccagggagaaggttgcactgggatgtacataaataaagaaaagggtaccatacgagatgaaaacagctgtcaggtgagaagagcaagtagaaaaggttttgcacctcccatcagcagagcggatcctcaggatggccatgaggatgtaaatgtagga

SEQ ID NO: 638276 - DNA, 528 bp, Homo sapiens
aataaataataaagtaaagcttttttgaaaataattggaccatgagatgtctgagggaagtaaaattaaatggaccacgagtttgaactgtaatattggtatgttatagggaaaagattacatatagggccaaataaatccacatggattgactaaataagtgaataattggatggttgaatggataaagggatgctaaacagcccccaaacacttgcaagtgttttggaatcttaggaagccacacaattactctgttcttttaaattttcctccctaattccttctggataagaatttaggccttgcaaaacttcctctgagtgacagtcctgtggatgrcatctttgacttccttgtttctcaagctgtagataagtgggttcaacataggaatcactgctgtgtaaaacacagacactactttattgagatccagggagaaggttgcactgggatgtacataaataaagaaaagggtaccatacgagatgaaaacagctgtcaggtgagaagagcaagtagaaa

SEQ ID NO: 638277 - DNA, 605 bp, Homo sapiens
aaaaataacaaaaaataaataataaagtaaagcttttttgaaaataattggaccatgagatgtctgagggaagtaaaattaaatggaccacgagtttgaactgtaatattggtatgttatagggaaaagattacatatagggccaaataaatccacatggattgactaaataagtgaataattggatggttgaatggataaagggatgctaaacagcccccaaacacttgcaagtgttttggaatcttaggaagccacacaattactctgttcttttaaattttcctccctaattccttctggataagaatttaggccttgcaaaacttcctctgagtgacagtcctgtggatggcatctttgacttccttgtttctcaagctgtagataartgggttcaacataggaatcactgctgtgtaaaacacagacactactttattgagatccagggagaaggttgcactgggatgtacataaataaagaaaagggtaccatacgagatgaaaacagctgtcaggtgagaagagcaagtagaaaaggttttgcacctcccatcagcagagcggatcctcaggatggccatgaggatgtaaatgtagga

SEQ ID NO: 638278 - DNA, 522 bp, Homo sapiens
agccacacaattactctgttcttttaaattttcctccctaattccttctggataagaatttaggccttgcaaaacttcctctgagtgacagtcctgtggatggcatctttgacttccttgtttctcaagctgtagataagtgggttcaacataggaatcactgctgtgtaaaacacagacactactttattgagatccagggagaaggttgcactgggatgtacataaataaagaaaagggtaccatacragatgaaaacagctgtcaggtgagaagagcaagtagaaaaggttttgcacctcccatcagcagagcggatcctcaggatggccatgaggatgtaaatgtaggaaatcaggatagtcagaccactgaagactcccacagctccagccacgatgaaaactgccaacttattgagcctggtatcagcacatacaagggaaagtaagggggacatatcacagaagaaaggattgatgacattagggccacaaaaagggagacaaaatgcatttgtt

SEQ ID NO: 638279 - DNA, 644 bp, Homo sapiens
tgtcagaaagagtaggaaaaggaagacctgcaactgaggattgtaattcaagcctgtgaaaatgaattaggtgacctttgtgtagttttcattagccattgactggttctgctttctactagaagaagagcaaagaattcacaacagacttgataaatgtgacttcaaaaatgagacacagcaaaaatatgccacgaacttggtcaaagtcaagaatgatataaattagttacaccatgcagtcaaacaaaagtgagatatacaccagtgcaaaacagcagacctgaagctatgacatcttaagactccatgaaaatccatctgtacatagatgagaaaacagaagaagcagctttctcaaggtcccataactaattattggcagagttgattcctgaatacttgcctaatgacttctacttcagtgacccttrcctgagtccaccaggtagacacacacctggtgaagggatgcaggagggtgggagtgagcaagctagagaggaaatgaacagccactcatttctaggccatatgctgtgcactttatgattacaacctaaggctaaatgcatgttttccaagtgcactggagtccacctcttctgaccctgaaaaagtaacttatcttcaactctgtcatg

SEQ ID NO: 638280 - DNA, 626 bp, Homo sapiens
tatttgacttttccccctttgggggtagcaggtttgattgtcttcatacataaataattattttattaaccttacaataaaaccatctcttctaggacttgtctaggtgtgagcttctttttcttgatttttgtccagatgtagtaaaaaatttaaatctaaatacgtgactttctttttttttgttttgttgtttttttgagaagaaatctcactccctctgtygcccaagctggagagcagtggcgccatctcggctcactgcaacctccacccccagggttcaagggattctcatgcctcagcctctcaagtagctggtattacaggtgcactaccacacccagctaatttttgtatttttagtagacatggggtttcaccatgttggccaggctggtctcgaattcctgacgtcaagtgatccacctgccttggcctcccaaagtgctaggattgcaggcatgagccaccactcctggacctaaatatgtgaccctttattagcccaggaaacattctgtagccttgatcatcctttctgccctgattgttctgatttatcctaaaaatacacatattatctgttaggtgaatctctattctatgtttttgatatcagtatg

SEQ ID NO: 638281 - DNA, 560 bp, Homo sapiens
aacaaaaatttgatcctctaagtgtcgattccttttaaagcctccatgtggcttttatttctgcagctgcattgtaatttccttaaagttcacaaatcctcttcattattactttactatgattttgcctataatattttgcctcttcttcatggaaacaaatacatctgagatgttactagaattctgactctatttaccctctctctaatggttgcttaaagcacttttatttgaagaacaggtaaatgtttrttccatgagggtatttgtattttctaactgttttgaaattgtatttactgatttaaataagaatcaatattaatattttaattcttcctatgttgcttatcacataattattttaaatttctttatgtacatctgtgctgaataatctttataatctatatttctaagtttttgtaaaaatgtattttctgtagccacaaagacaatttctagatagtgcttttctagaagtaaggggataattactcatgattaaagttaagatgttaaacttacaaaacaaacccatatgtcaaagaaaaggc

SEQ ID NO: 638282 - DNA, 610 bp, Homo sapiens
gattggatggtgcctgcccccattgagtgagggatgattttcccacctcagtctacctactcacatgccaatctcttctggaaacaccctctcagacacacccagaaataattatttaccagctatctaggcatcccttagtccaaccaacttgacacacctgcaattgactgtcacatcctcctctctctttctctctctcacatactcacaccatgcacacacatcactgaatctaataggattaaaaataatcttttcctctctctttcttcaaaacatctttaaacctttttctttctttcctcaaagttccattttaaatatgtttgtcttcccaatcagatgtcccttttcccttcttttggcaaaaaaaaaamcactcttttagtggttctaagataacttgtccctcccacacctggtgtggctgtcaaccatgaggccctgaatcttcaaaccacagaggtaggcccctgatccaggagaataagtcagttggaggataccagtactctggacacaactaacaggtaagtagaaaaaaattgggtcaatcaaagacagtttttgtttcttttgaatggtgtcaaatagtgacagaaaagaa

SEQ ID NO: 638283 - DNA, 610 bp, Homo sapiens
gattggatggtgcctgcccccattgagtgagggatgattttcccacctcagtctacctactcacatgccaatctcttctggaaacaccctctcagacacacccagaaataattatttaccagctatctaggcatcccttagtccaaccaacttgacacacctgcaattgactgtcacatcctcctctctctttctctctctcacatactcacaccatgcacacacatcactgaatctaataggattaaaaataatcttttcctctctctttcttcaaaacatctttaaacctttttctttctttcctcaaagttccattttaaatatgtttgtcttcccaatcagatgtcccttttcccttcttttggcaaaaaaaaaaacactcttttagtggttctragataacttgtccctcccacacctggtgtggctgtcaaccatgaggccctgaatcttcaaaccacagaggtaggcccctgatccaggagaataagtcagttggaggataccagtactctggacacaactaacaggtaagtagaaaaaaattgggtcaatcaaagacagtttttgtttcttttgaatggtgtcaaatagtgacagaaaagaa

SEQ ID NO: 638284 - DNA, 605 bp, Homo sapiens
tcacacattttcttcttacatttcagtactttgtcatgtggcaacagccacgtacaaaggagattgaaaaatgtagtgttctatcttggttgcaatgtgaccagctaaaaatggggcttccattaagcaagaggagaatgaaagatggaattcctctttagtagtatttgctacagaggtaaatgtaatttatttggcttcttttcttcttagccattttttccccttagatgatcttcctttcatgctggcatttgtatgatagctaaaagcacaagttttgctgtctgaggacctgagttagaatcccaaccccactgtaaataaactgtatgatcctgtctccatcatgagatatatttgatccttctttttttgtaggrtaatgattcctagctcttctttttttgtagtagtgctgatccctagctcttctttatttgtagtaatactaatccctagctggttcgccattaaatgcacgcttctctccctccaaaggagaaaagaacttttcctgtctcatttactgctgtatcctcaggacttggaataatgcctgctaatcaggagtcaccatatacatattttttaacttaattttg

SEQ ID NO: 638285 - DNA, 568 bp, Homo sapiens
tgttatgccaggtatctgcacagattataaagctaccataattataacaacaaggtgttgttcctagactatatggaaatatgagtagaagacccaaaagcagattcatgaacrtatgccaatttaacataaatgtttatttcaaattgggaaaataatgatgaattaaacataaaaggtattataatatttgaatgcttttgaaaaaataacaaatattaaaactctaccttacactacctaaattaaataatcctaactataaatatgtgacaagatataataaagatagcattacaattttcttgtaagaatggtcttcttaaatagtacataaaggtcatttaattttttttaattagctacatttatttatatatatattattatactttaagttctagggtatatgtgcacaatgtgcaggtttgttacatatttatacatgtgccatgttggtgtgctgcacccattaactcttcatttaaattaggtatatctcctaatgctatccctccccactccccccaccccacaacaggccccggtgtgtgatgttccccttcct

SEQ ID NO: 638286 - DNA, 643 bp, Homo sapiens
tgtaaataggttgttattttcttctgaagtttaagttatctagcttcagtttgcaggagtttaagaaatcacaacttagttttcagtgattctaaattaggaaaaatgggggtggggagtgagaggaacagaaagaaggaaaaaaaatgaaaacattattttggagacttgtagccaggaaatattaggattcagtccaaactgtggaaaatagtaaaaatggaaaaccattaggcaagactagaatctagtaataggtatratatactttctaaaacataatttttctctctcaagtttcccatttttgctaaagacaaatcatggtaggaccaatttgctttattatatgtggactgattatctgtataaagtgcagcaagagtaattatttttttcatataggcctttttaattggctttcatggaactttgttccatagaaggaatctcaggtaagacttctttaaagccaaacccagccacggctttgtaccatcaaataactatgagttgggtagattcctctcctcttgaggtcccaagataacttggggctcctgagcctgtcagaaagtggcattctttacttaccacaggtcaggaactctgtccagagactgtgtagacaaggtaagagagc

SEQ ID NO: 638287 - DNA, 522 bp, Homo sapiens
gctttgtaccatcaaataactatgagttgggtagattcctctcctcttgaggtcccaagataacttggggctcctgagcctgtcagaaagtggcattctttrcttaccacaggtcaggaactctgtccagagactgtgtagacaaggtaagagagcagttttcccaaggggcttttattagctccaaaagtcaagtttgattccttaaagggaagcacactattccagtcaaagccttggtaaaataaccagtttctgcaatggtgtcctgttgcaaaagaaaacaggcatattgcacttatgccaataaatatactgccataagttaagaatactcataaatagtttccaaattctggaaaaatcaggcagaaagaaataaatatgctccaaattttgttcacaggagtatactttacctcaattcctacaagctgtaaatagctcaaaaagttttcttttctttttctttttcttttctttttttttttttgtgagacaaagtttcactctgccccctag

SEQ ID NO: 638288 - DNA, 516 bp, Homo sapiens
gtcttataatttattaagcatgtaaagcaatatcttaagaaaattttgtagttcaaaccagttatttagtgtataattattttaatcaaaaccaaatcttcagaaaaatgattgtaacttccctttaattatagaaaacttggtcatataaaagattttttaaataagtcctcttattatgatttacacagagcattcatggcatgcttgaactttctagtttgtcctaaatgtctctgtttctgaaacaaccagtcattttattctaggataagatttactgtacaagattctgtctcatataaaattatttttgtttaagcattcttaccaaaaatacctcttcatttctataactttctctatatctctcttatttcytggttccttttactttgttttatatataacctttaaataagctctgaattagaacaagacatttacgttttaataagaacatctttttaaagttttaaaaataatttttaaatttgaaaatttctcaaacactta

SEQ ID NO: 638289 - DNA, 596 bp, Homo sapiens
tttatagctgtgaatttcaagtgttactcaagaactttaaggttaaatataaaggtatatttttaaacgataattcaggatttagatgttttcattaaaccaacaatatttcatgtcttatttatcaaaaattacacaagcaaagatcattctgtcttgggctgtgttttatagttttgtaamctttaaggtcaatctcatagtattctgcaggaataagcaaaaaactgcttgaccaataaatgcaaataaaaatgctaacagttcttaagacagttctaatgttattttaccaataattttaaagccagcttatttattaaaagcttacttaagtcatgtgatattggaaaagcatttgacttttttttaaagagagtatttgatttaagtgcttttatttttctttaagccaattagaggtattttatatattttcagtagtgaaacattgtgtacacaacacataaatacataaacgtattaggcacgccaatagaagcgcatcttacagattcataagacctcttctttttcttatcttaaacttgcaaattattgataacctttttcattaccctaggcagttgtcagct

SEQ ID NO: 638290 - DNA, 556 bp, Homo sapiens
tcaggtaatacagtagagaagagcagagctttagacctaagaaatatctttctatgactcttgaaaccccacaaagaaaacagaacayctcaaaataggtgagtggcacctacccccatgattcaaccatctcctactgggtccctcacacaacatgtgggaattatgggagctacaagatgagatttgggtggggacacagagccaaatcacatcattctgtccctggcccctcccaaatctcatgtcttcatttttcaaaaccaatcatgcctttccaaaagtcccccaaagccttaattcattcagcattagctcaaacgtccaaagtccaaaatctcatctgagacaaggcaagtcccttctgcctataagactgtaaactcaaaagtaagctagttacttcctagatacaatggggtacaggtattgggcaaatacagctgttccaacggggagaaattggccaaaacaaaggtgttacaggccccatgcaagtctgaaatccagcatggcagtcaaatcttaaagctccaaatggtctcctttgactcca

SEQ ID NO: 638291 - DNA, 569 bp, Homo sapiens
ccacaaagatagctcaagttggtaccaagcactaacaggaaatttaccaaaggtcaggggtatctgcactcagaatcccttcatggttaccaaaatgtgagacccaaatatctgagacaggtctcagtcaatttagcaagtatattttkccaaagttagggatgcacctgtgacatcctcaggaggtcctgaggtcatgtgcccaaggtggtcagggtacagcttgcttttatgcattttagggagacatgagacatgaatcaatatgtgtaagatatacattggtttggtctggtaaggtgggacaactcgaagtgggggcttccacattagaagtagataagagataaaaggttgcattctttggagtccttgatcagccctcttctgaatacacaatttagtctggatcagtgaatctgcatttttacataaacagtagggcagaggaagcaatcagatctatatttgtctcaggtgagctcagagggatgactttgagttctgtctgttctttgtccacaagaaatttccttctgggaaaattgtgagaaatgaatgtagcttct

SEQ ID NO: 638292 - DNA, 563 bp, Homo sapiens
gacatgaatcaatatgtgtaagatatacattggtttggtctggtaaggtgggacaactcgaagtgggggcttccacattagaagtagataagagataaaaggttgcattctttggagtccttgatcagccctcttctgaatacacaatttagtctggatcagtgaatctgcatttttacataaacagtagggcagaggaagcaatcagatctatatttgtctcaggtgagctcagagggatgactttgagttctgtctgttctttgtccacaagaaatttccttctgggaaaattgtgagaaatgaatgtagcttcttatctttgtagctatgttatttaggaataatatgggagggaagtttgccctatgcagtttmcagcttgacttttccctctggcttagtgattttggggtcccaagatttattttcctattacactactttgtaccctgggccaagtccaaatcacaatctccgtgatatgatgataaacaaaataaactctcctctcacaagtaaaaattttagaagcatatcttggagtcacatatttgtttgaa

SEQ ID NO: 638293 - DNA, 585 bp, Homo sapiens
caacccatgtcaagccagtgaatttcttttggaagtagttatcatcatgaagggaggagatgtgaatctgagagctgttggcagtggttactttccaccacttagaccaggaagccaagaagcttgtctgcagcaagtgtgaaaagtgagatgccaggaaaaagaagtcaagtttataaattcagaaaaacttcctggatagaactctcatagtactccagtgactgaggtatataggttccctgataaaatggccgtatatattatattcacaattatatccccagctgtagtactgtaggcattttataattatttgttcaatgaataagtaaatagggtctcaagtggaggaaacagttaaatgaaaaaaaagtggcagctgttctgaattattttgatcttggaagrttttatatttcatgtaggattataattgactgattgttgatttcatcattttgacttagaaacttttgctctgaaaaatatggcaggagttcatttgggtggattagataatcatcaaagttacttgaaaagcttgtataaatgtcaggttctggataccagcctgtggaaatt

SEQ ID NO: 638294 - DNA, 364 bp, Homo sapiens
ggtctacagataacaaggtgtttaagaactctgatctcctgagaacacataatgtgccaaatatcctgctaggaattattgggaggtacacaagaaagggagagtgtgtggtctctgcccacctgtggtttgccatctgccaccctcttgcattttctgtgctcctacaacttgccaggagctagactatgtgtagagtcacacggaagcaactccttttgcttgkagtaccccacacaccttgccttcttggaaaccccttggtcatttttcaaaactcagttttccatatcacttttatcttataatgatcactcttggtagggctggaactcctttgtattcttaccgtacctgggtatgg

SEQ ID NO: 638295 - DNA, 619 bp, Homo sapiens
ccttctgaaggtctaatgaacccttcaggtgacaagataaagtcacaaacctccctttcatgcctctgcacactgaggctcaataacacattcagctctgtggttggtctgctgattcttgtagttgttgttgttaccrcataacctataatgttctaaaatgttaattgcaatttctccagttgtcttcacagcagacctgtagcctcattttgcaaatgagattgagaatggacagggacccgttcaaagttccagagctggaaagtgacttgggaatctgacatatttggatctggctttctagctgatgttctttctaatttggcacagtgtcactcagctatgactagttttattggatgtttatttgctgtcctttcccctctgtttggatatttcataaagatatctcttttcaattcctgacctattctatatggtctggttctaaaatggaggagttgaacactaaggataactcagccctgtcctttcgtcaaatatggaactaaatcctttctgtgcacctagagatgtattaggccctttaggagatataaagataaataggttagttttgccttcagagagctcacactctataatgggaacaaaa

SEQ ID NO: 638296 - DNA, 529 bp, Homo sapiens
aagggagaagaagtgatgaaaattcttttgattagtcaatgaatttagggggaatggccaggagttctgctaagaggatttgattaacatcactaagaggaatcttgaggaggcttcaaagatcagggactcagactcctgaagaaaataccataaccattctctcctacccaccatccaactttgcaagatgttctctttataggtgaagtgacctctctgagttagacaagccatgaggtactctggctcctrgacagtgagtggatattgattggaaaggaacatttggggttgactcagagttaagaatctcagtctcttaacctatcccagcaaaatttattccaagttcagaggaagaatgagtacactacaagaaattagttaaagcaattaaaaatataaatggatatttactgaatacctaccatgtgccaggcactattctaggcactgagggaaaaacaatggggctggagggaggagtgagaaggaaaaaaaaaaaaaacaacagacaaaattatcc

SEQ ID NO: 638297 - DNA, 529 bp, Homo sapiens
aaggaaaaaaaaaaaaaacaacagacaaaattatccaactttctggagcttctattccggaagggatttcagataataaataacataactaaataaactatgcagcacattagtgataaatatagaaagaaataaaggaggaaggaggatacaggtagagtggggagtgcaatttaaattggtttgaacagagaatatctcactgagatgacatttgagcaaaaacttgaagaaggtaaagaagcgagccacgtggttggatatctgaaagaagagaattccagtgagaaggtagtactgtttctggtatatgttagaagcacaggacrgagattactagagctggagggtactgtctggtgaggagaaaatctgtaaatgaggctaaagaaataaaggagtagggccttgatcatggaaaaggctcttggttgtttcccaggtgagatgggagcccttgagcccttgagcacaggaaggacctggtctgatttcaagaatcatttgtttgctgtgctgagaattgatt

SEQ ID NO: 638298 - DNA, 559 bp, Homo sapiens
ggtatttggagtctgactttaagggacaagtctgagctggacatataaacttgtaaatcatcagcacatagatggttttgaaaggcatgaaactagatgagatcatcaagagggtgagtgtagacaaaacaaaaatgtaataacatggctgagcaytttttagcatcccaggcctttaaatccagctctcagctggagataccacttaggtatctccaggcatctcaaatttaacaggtccaaaactcagtgcattatctgacctctttcaaaacttgctatgtaagcacagtactgatattaagttgaatgattatagtaggctctattttttgagtgcttacatgtctggcattttgctaagcactttacatgcattatttagtttaatccttacagtatcatgttaagtagatattactattttctttctatagcagataagaaaagcgaggccagaaagtttgaataaattgcccagggacacacgactagtaagcggtgaagtttgatggtaatcccaggtctcttgaatccagaccttatatttataacaacc

SEQ ID NO: 638299 - DNA, 559 bp, Homo sapiens
ggtatttggagtctgactttaagggacaagtctgagctggacatataaacttgtaaatcatcagcacatagatggttttgaaaggcatgaaactagatgagatcatcaagagggtgagtgtagacaaaacaaaaatgtaataacatggctgagcattttttagcatcccaggcctttaaatccagctctcagctggagataccacttaggtatctccaggcatctcaaatttaacaggtccaaaactcagtgcattatctgacctctttcaaaacttgctatgtaagcacagtactgatattaagttgaatgattatagtaggctctattttttgagtgcttacatgtctggcattttgctaagcactttacatgcattatttagtttaatccttacagtatcatgttaagtagatattrctattttctttctatagcagataagaaaagcgaggccagaaagtttgaataaattgcccagggacacacgactagtaagcggtgaagtttgatggtaatcccaggtctcttgaatccagaccttatatttataacaacc

SEQ ID NO: 638300 - DNA, 667 bp, Homo sapiens
accttgtccacttaaatatcagtgggacctccacaaaaaaatttctgcatcatgtccccccataatttctctcataaatggcamtttctcttttagtaacttactaaaaaatttaattgacctttttttaggctttcatttatttactttaaaagatatatattcagacaggtaaatactatagacttgtataaacctcatttctaccctacctctattcctatctactctatcccatcccccaaatctcatattgaaaatgatgtagtacttttccttagttcagctaaagatggggtcttgtcccacggccaagaaaatttaggcttgcagatgattttaagggtgagtgaggtagggtttcactgggggaaaaggaaaaaaaggggaacagagaatctctgcaaggccagagttactgctagtgtgcttcctgcctgtcagcttgaatcccaggttccacacaggaagatgaggggctgcaaatggtgcaaacttctgtgactatatcccattgtacattcctcctagtacgcaggctgattggaagctctgccagggagtccttctcacctggctgtcccagcaacaacttctattacttcctttagtatctgtccagtgtttctttaatgtaaatataggcatgaatttagttgttggtccc

SEQ ID NO: 638301 - DNA, 667 bp, Homo sapiens
accttgtccacttaaatatcagtgggacctccacaaaaaaatttctgcatcatgtccccccataatttctctcataaatggcaatttctcttttagtaacttactaaaaaatttaattgacctttttttaggctttcatttatttactttaaaagatatatattcagacaggtaaatactatagacttgtataaacctcatttctaccctacctctattcctatctactctatcccatcccccaaatctcatattgaaaatgatgtagtacttttccttagttcagctaaagatggggtcttgtcccacggccaagaaaatttaggcttgcagatgattttaagggtgagtgaggtagggtttcactgggggaaaaggaaaaaaaggggaacagagaatctctgcaaggccagagttactgctagtgtgcttcctgcctgtcagcttgaatcccaggttccacacaggaagatgaggggctgcaaatggtgcaaacttctgtgactatatcccattgtacattcctcctagtacgcaggctgattggaagctctgccagggagtccttctcrcctggctgtcccagcaacaacttctattacttcctttagtatctgtccagtgtttctttaatgtaaatataggcatgaatttagttgttggtccc

SEQ ID NO: 638302 - DNA, 527 bp, Homo sapiens
ctgtatctgacttattttacttaatgtataaccatgttgccacaaatggcagaatttctctctttcttaaggctgactaatattctgttgtacgtatataccacattttctttatctactcatctgtcaatggataaagaacaatggatatttygcatttataattttgatagatattacacaattgcattccttagaagttgaaacatactgcacattcattatagcaatgtgagagagtgcctgtttctctacagtttccccagaagctggtgtattattaagcttttgaatttttaccaaataggtgagaaatgctatttctgtgtagtcttaattttcattgtatgagagggatgagtatcttttcataagtttagggctgcagttacatttctttttctgagaactttctgttctctacttttcagttggttctttgggcattaacatttctataaatataagactaaagtaatggataaagttactaaaataaagaagactattaaaatttatttcatgtg

SEQ ID NO: 638303 - DNA, 590 bp, Homo sapiens
taatcacaattttgtttcaacacattttgatctgttaatgggcattcatatgtctttggtgaatatcttgctttttaaaaacattttcaaaggaagaaactgttttttacatttaccaaaagcctattaagtgcaaattcaaagtgcctattttccacctgtcctctgttattttctagcactcgcaacttacaggagccactcacttttctactttagaaaaatttttcttctcatttctgcccataccttccctgatctctcttgtcttttggtatttctcccctccatctgatgagctgctcagwtgtcatacattttctggtttcagctccccggagagggcggtttattttccactccgattttcttgcaagggtctgttcatcccacttctgacctttcttttttggagacagaaaaaggaggcatagcattaaattgaccacggctaaatgttttgcctggactggggagctgagaagagaaggctgtaaatctagatatgaggactgtttttgttcatcacactcttgccatgatcaatctttgtgtattcttgtggagtgacatccatgcctagtttgctt

SEQ ID NO: 638304 - DNA, 621 bp, Homo sapiens
ttagctttgttcattaaaaaaacaacaaaaaattccagattggtgttttttacctagtttctactatgttctcttygtttcttctgttcgcttttgtcatgcagcccagttttggttatgagaccagacagatatgaaagaccactccttggacaagactgtgattctccagagctcaagttttcttgtatatatcttagtagttcatgattcagattaaaatcgcatcctaatcaattgagaaatgatcctggaagctgggtctgaaggtcttggacttttctgaggttttctgtgctttccccccacctactttagagtatcctttactttattaagactgtactctgtggagtctcatgagtcgtttcagttgttcagccctgtgtattgatgcatcatgttagttttgtgttcactctggaatgtgatacagtaaaaggtctatatatttttttcaactcatctaaattgtcttaggtctagctggacttgatcaaatggcaattgagaaagtcaggctttaagtaagccagatatctggcttttgattctcctctttctcactgtcttctcctcattccccttagatatagaataccctcataatttttctaatat

SEQ ID NO: 638305 - DNA, 635 bp, Homo sapiens
gaattccataatctctggtgtctctgtcagttgaatatttcatgtgaccatgaatacatcattcamccagatacacttaactagaaagaagtgctttgtgtgaaatcagtgagatcagtcacctttcactgtcttggcaaatggaaggaaggaattgtacatgaaagattaacaagtcacatttgaactgggaaaaaaaaagagtgacattttcagttgtcattgtatttggcctaaaacaatattacagcatatttggttcctcctggaatatacttaccccattgacttggtattctttctgatatcatccaattgtctgattgcccataaggctgagaaagagactacatggcaaattagtagccatcataaagtctatgaagtaggcgagtgacctttatttccatcctggcagaggacaaaaataagagcgtatttgtaagaaaactgaatacgcccaaagcagataagttgatgtatgaaaggtaagtcccatagactttaggtgtcatgcgaggaagcttcgtggttgccaagagatctgaaaaaaatttactttggagaaatatagtccaggatctaattaggttttcaagtacagaatcttggtctcaagggcaattggatttatg

SEQ ID NO: 638306 - DNA, 635 bp, Homo sapiens
gaattccataatctctggtgtctctgtcagttgaatatttcatgtgaccatgaatacatcattcaaccagatacacttaactagaaagaagtgctttgtgtgaaatcagtgagatcagtcacctttcactgtcttggcaaatggaaggaaggarttgtacatgaaagattaacaagtcacatttgaactgggaaaaaaaaagagtgacattttcagttgtcattgtatttggcctaaaacaatattacagcatatttggttcctcctggaatatacttaccccattgacttggtattctttctgatatcatccaattgtctgattgcccataaggctgagaaagagactacatggcaaattagtagccatcataaagtctatgaagtaggcgagtgacctttatttccatcctggcagaggacaaaaataagagcgtatttgtaagaaaactgaatacgcccaaagcagataagttgatgtatgaaaggtaagtcccatagactttaggtgtcatgcgaggaagcttcgtggttgccaagagatctgaaaaaaatttactttggagaaatatagtccaggatctaattaggttttcaagtacagaatcttggtctcaagggcaattggatttatg

SEQ ID NO: 638307 - DNA, 563 bp, Homo sapiens
ttgtcattgtatttggcctaaaacaatattacagcatatttggttcctcctggaatatacttaccccattgacttggtattctttctgatatcatccaattgtctgattgcccataaggctgagaaagagactacatggcaaattagtagccatcataaagtctatgaagtaggcgagtgacctttatttccatcctggcagaggacaaaaataagagcgtatttgtaagaaaactgaatacgcccaaagcagataagttgatgtatgaaaggtaagtcccatagactttaggtgtcatgcgaggaagcttcgtggttgccaagagatctgaaaaaaatttactttggakaaatatagtccaggatctaattaggttttcaagtacagaatcttggtctcaagggcaattggatttatgggtactgaattcagccaaagaatatccaagatgatacctaaaagtccccccaaagctcgcaagagaatgatacatagtagtggagtgccaggtttcgttagaaatgtatttttcttgggcagggacactcacgtgggcctgatt

SEQ ID NO: 638308 - DNA, 622 bp, Homo sapiens
atattagagtgaatatctttacatagaggacaagaactaaaagattatgaatattatagaatggaaaaataaatatcacaagcaatgatgatatgacaatgacaacaaccaaaagctatcaaaagtgaaaaacagaataagaaagaatttggcagatggaatacatccacccatcttctcatctcataggaaatttctatcagaaagtatttaargttgacagcattccatgtatattttgaaaaggaaaaaaattaaccactagaaccaacaagaataatacaacctaaaaaattctagaatgacaacaaaaagacacataagtatcctttttgaacatttttcttagcctggaattaactgataaagttaaaaaatgcatgattaaccacttgaagagataaaaacatattataaagttatcaagggaatatatacctttacataactccacaaaacataaaaaaatttacactgtgtagccattaaattttttaaagcattaaatgataacctaaagttgataactacactatggttatgtaagaaaatattccttttcttaggaaatacataagaaagtatttagggataaacaaccataataaatataatacatgta

SEQ ID NO: 638309 - DNA, 613 bp, Homo sapiens
cacattgttttagttactattgccttgttgtatagtttgagtcaggtaatgtgatgcctccagctttgttctttttacttagaattgctttggccatttgagctcttttttggttccaaatacattttagaatttttttctaattctgtgaaaaatgtcacttgtagcttgataggaattgcactgaatctgtaaatagctttgggcagtatggtsattttaacaatattattctttctatccatgagcatggaatgccttagcattcatttgtgtagtctctgattactttcagtagcattttgcaattcttattgtaaagatctttcacctccctggttagctgtatttctaggtattttatttttttgtggctattgtgaatggcactgcattcttagtttggctgtcaacttagatgtcattggtgtttagaaatgctactgatttttgcacattgattttgtatcctgaaagtgctgaagttgtttaccagatctagtagcatacaaaatatgagcgtacttaacatcttgggaacaccttgttatcaacacaattcaaattgagacagaaaaatttcccttttgggtaatcatatccctgaattcct

SEQ ID NO: 638310 - DNA, 580 bp, Homo sapiens
gagcaacaataattattaaactatgaaattaatttacattaaatgtctttaatatgctcaatgatgaaaacagactcaaataggacaattttcaactcaggcatggtgtcaaagtcagaaaggcaatgttcaaaaaacattcatcttcaattagagaccagactgcatgaaaactctacccagactgcatgagaactcaatcagatttgtatattacagatgttayacatcttgtaccaggttgcaagaagtaataataaaaaagctaaattcaaagcctctttagagccacagaactctgacaggggaaaagctgaacactgagaattgggattaagacatcggtgtgtatgtgcttgagattttccagtacccttgaaaccttgaacctgcagaagtagtcctgttccctttgccagaaggcagcagccttcctttgcttagagagaataaagaggcctcacatgagtcagagcattcacaagagagtaatttcttttctcaggatgtagtctttcttcccctcatggctcttagacttagcaaccagggtcaaggcttagaatgatgaggtgtgatg

SEQ ID NO: 638311 - DNA, 660 bp, Homo sapiens
tgcaagaagtaataataaaaaagctaaattcaaagcctctttagagccacagaactctgacaggggaaaagctgaacactgagaattgggattaagacatcggtgtgtatgtgcttgagattttccagtacscttgaaaccttgaacctgcagaagtagtcctgttccctttgccagaaggcagcagccttcctttgcttagagagaataaagaggcctcacatgagtcagagcattcacaagagagtaatttcttttctcaggatgtagtctttcttcccctcatggctcttagacttagcaaccagggtcaaggcttagaatgatgaggtgtgatgactaaggagaattggctctactttaagaggaaaatgattacccaccaggagttcaaagaattggctaaaatgtgccacaagaacaaggagaacatataaaagcatatattaatatcttgagggtaattctaggactggggaaataaaaagctgagtaggggagaattttctgacataggagaacctcagtgactcagaaattagcttgcaggcaggacaccagaagctgattctaatgcactgttaggatggctctttgaattttggaaaaaataacagcatgcagtaaaagaggtagggatgccattattgccatgcagag

SEQ ID NO: 638312 - DNA, 491 bp, Homo sapiens
aagaatggaaacagggactcaacagatacttgtacatcagtattcattgtagcattattcatactagctaaaagatggaaacaacccaatgtccatcaacaaatacatgataaagtgtgatatatacatatagtggattattcagccaaagaaaagaatgaagttccaatacatgctacatgaatgaatcttgaaaacatgctaagtgaaagaaacgagagaatagaacaaatatcatatcgttccactgataggaaattctagaataaacaaacatagagacagaaagtagattagaggttgagggaacagggggatgggaagttattgttaatggttccagagtttctgtttggggtcacgaaaatattttgaaggtggatagtggygatgggcgcatattattgatctacttaataccatcaaactgtatacttaaaaatggttaaacaaatagcaaatttcatgttatatatattttaccaaaataa

SEQ ID NO: 638313 - DNA, 590 bp, Homo sapiens
ttttattcctcaaggaattgattgttaatatatggtatctcrgtgataaagataaaaataaaacaaaacaaaatatctgtttaataggtttgaaattgaaatttcttgatcccaacaatattcccaaggcctcaatgacaagtggtttggttcagcagttccaacacacagtccttccctcagtgactcccttggcaaccctcatctgcacactgattgccatattggtaagaactcaacagatggtgctcatttcttgagttttctctgcttttcttttgtctggctgattaaatttcaactttcaagctcttccaactgtaggataaatttcatgcctgtaatccttctgcagattgaagcatttcctagcaattcttagagtaactttgaataccataaggaaggattaccagtaaagcctttgtgagagattcttgccagtggctgttagaccatctgttcacccgggggaagggaaaaagaaaagcccagagaggaagaggcatggatcatgctgcagagaaagaaggaaatgtttgtggcagggacatccagatttggtttgtttttctcaccgttagctaaat

SEQ ID NO: 638314 - DNA, 590 bp, Homo sapiens
ttttattcctcaaggaattgattgttaatatatggtatctcggtrataaagataaaaataaaacaaaacaaaatatctgtttaataggtttgaaattgaaatttcttgatcccaacaatattcccaaggcctcaatgacaagtggtttggttcagcagttccaacacacagtccttccctcagtgactcccttggcaaccctcatctgcacactgattgccatattggtaagaactcaacagatggtgctcatttcttgagttttctctgcttttcttttgtctggctgattaaatttcaactttcaagctcttccaactgtaggataaatttcatgcctgtaatccttctgcagattgaagcatttcctagcaattcttagagtaactttgaataccataaggaaggattaccagtaaagcctttgtgagagattcttgccagtggctgttagaccatctgttcacccgggggaagggaaaaagaaaagcccagagaggaagaggcatggatcatgctgcagagaaagaaggaaatgtttgtggcagggacatccagatttggtttgtttttctcaccgttagctaaat

SEQ ID NO: 638315 - DNA, 476 bp, Homo sapiens
gaattcttcccatcagtataagttggagtcacataaaccataatgtatcaggttcaattmttaagagttttggtcaaactacaatacaagcaactgtattcttgctgtgtgactgaccagcctctcttatgaccagagcatccatatttggattcaagttgagattgaatatggcttctctttgatccttacaagagcatccaaattacctgactaaaatgttacaatggccacagatatatattttctagtggcactactttcccatcctctacatttcgctttcttttctggctcaatggactctgtttaattcagagagctagtttgctaggcccctgagcccctgcttgttggattcaaccagactcaaacatttatgtagacccagatgttattaaagcaagaaccgaagatttctaaggcaagaagggcctttagaagacatcttaccttgtctcctggagaaacagcca

SEQ ID NO: 638316 - DNA, 560 bp, Homo sapiens
gaattcaagaccggcccaggcaacatcgcaagaccctgtctctatttttaaaaaatctaaaaattagctgggtgtggtgacagtgcctgtagttgtgtctacttggaaggctgacatgggaggatcataagcccaggagttcaaggctgcagtgagctatgaatgtaccacggcactccatcctgggtgatagtgagaccctgttgctaaaaacaaaacaaaacaaaacaaaaaaacagctggcttcagaaatatagtgaggtcccaacttttaatgtcagattatccagtgtataggttagcaaagtatcttgtttctcttctttttccatcttgctctgtgtcttctattcatggctctattccttaaaacttttaccagaggctgaaaggagtaaggaggtgaaacttgcacttgttcatgttggtccttgtaggcatgtctggtgatggatttggtggagaagagattttgaattaagcattgaaaaagaagatttctattacccagcaatggcaatagttcatgctattcctascttggggtcccacagataagt

SEQ ID NO: 638317 - DNA, 604 bp, Homo sapiens
cgatcaatgtggaattttcatgtgcttatgagctggatatcaagatctccttggattctgtkgtgaagcctatgctaaggtaaggtgtctcctgggctgtgcacattgctttttctattccttgacagttaaggttagcataatcaaaattgctagcgtttgtctttgatgccctaggaaaaacataattcacgtttcttgagcctaaatgctttcaaccagcattgttcaatagaactctctgtgacgatggaaatattccatctgtactgtttaatgtggtggctacatgtggctgctcagcacttgaaatgtggctcagggggctgcggaattgaatttttaattttatttaatttcatttcatttaaatgtaaattgccccatgtggctagcaggtactgtattggacagcacagccttagactttgctactacgtgctttgctttccctctgcattctcagcctgaaaaatggtaggtaattgaataggtaacattgttttggattcctgtctcataattgtttccgttttagtgtaattaacctgacagttccaacccaagaaggcagcttcatcaccaagatggctctctacaaaaa

SEQ ID NO: 638318 - DNA, 591 bp, Homo sapiens
gtttgtttttttttttttttagctgttcaaccagtctgtatcttttaagtggggaattaatctgcttayattcaaggttattattgataagtgagaagttattcctgtcattttgtttattgttttatggttgtttgtgtaccctttgtttcattctctcttatcatttattattgtagtttggtggctttctgtagcagtaacatttgactccttctctttcggttttgtgtgtatgatctgccattgagtttacacttttgtgtgtttttattatgtcatatatcaacccttcacttctaaatgtaggacacacttaaatgttcttgtagggctggcctggtggtgaattccctcagtttttgcttgtctgggaaatactatttttcttcatttttgaaggatagctttgctgggtatagtattcttgattagcaggttttttttatttcagcactttgaatatatccttgcattctctcctatcctacaagagttctgctgagagatctgctgttggtctgatggggttctattatatataacttgatgcttttctttcactgtttttagaattctgtctttggcttt

SEQ ID NO: 638319 - DNA, 591 bp, Homo sapiens
gtttgtttttttttttttttagctgttcaaccagtctgtatcttttaagtggggaattaatctgcttacattcaaggttattattgataagtgagaagttattcctgtcattttgtttattgttttatggttgtttgtgtaccctttgtttcattctctcttatcatttattattgtagtttggtggctttctgtagcagtaacatttgactccttctctttcggttttgtgtrtatgatctgccattgagtttacacttttgtgtgtttttattatgtcatatatcaacccttcacttctaaatgtaggacacacttaaatgttcttgtagggctggcctggtggtgaattccctcagtttttgcttgtctgggaaatactatttttcttcatttttgaaggatagctttgctgggtatagtattcttgattagcaggttttttttatttcagcactttgaatatatccttgcattctctcctatcctacaagagttctgctgagagatctgctgttggtctgatggggttctattatatataacttgatgcttttctttcactgtttttagaattctgtctttggcttt

SEQ ID NO: 638320 - DNA, 585 bp, Homo sapiens
gggccttcgcagcccccatgatcatgatggctccctactcccacttctctctctcaaactagcttttctcaatcctatgactccaccggactttgtcacccccatgacctggtgttgggtctgatcaccccaacagaaagagcgtgatagatagacatgcaggacaggatgagaacaaggtagaagaaataaatacatgatggttgagaattttgcaaaattgatggaaggcacaaatcctcagaaacaggaaaagaaatcatgagtaaaaagatacacaatagtaatgaaactgcataataaagataatgagattatcttaagagcagacagagcaaagacagattatctacagaggaatagtaattgactgccaacaggctcttaccmgcaaaaacagaagccagaaaacagtggaaaacaattaaaatgctgagccaaaagtaaatgttgttatgccccaaggaaaaatgtatttcagtaatgaggggtgaataatattacaggatctttgggttttgaatttcttcccagaaacttgtggccagtggcgcctttacagttcttgttctgcatccaggaaga

SEQ ID NO: 638321 - DNA, 614 bp, Homo sapiens
ccatgctccacccagggcccctaaccccaggccctgcgtctatgggctaatgataactcacagctggccttggccccatgggaaccactttgcccagaagattctgaccccctaattcaagggtagtccttggccaatgactggctgacactgggagtcaagtgccagggctcccagtagcccaggctaaagctggtctgcaccttggaccacagccctgctgagatctcttgccctggtgctatcctcactttcccaggctctagggaacctgacctaagacaacagggatgcccttgaccccacctttgtcctggggcaatgttcacccttcaaaactcaactatctgctcttctgtgagtattygttgaggcagaattcatacattcatccagtagacattgatttggcaccactgagtgccaggcactgtgctaaaggctggaataaagcacatacggcctttccctaggagttcccaggcacgtggcagaggcaagtacacagacagataacaatatcatgtgataaaagcaaagatagaggtaaacagatgcacaggcaccagcctcagcctgggcacaagatcagggctgcctgcagaagacaatgc

SEQ ID NO: 638322 - DNA, 551 bp, Homo sapiens
ggcacgatcttggctcactgcaagctctgcctcccagattcacgccattctcctgcctcagcctcccagaatagctgggactacaggcaccygccaccatgccccgctaatgttttgtatttttttagtagagacggggtttcaccatgttagccaggatggtctcaatctcctgacttcgcaatctgcctgcctcggcctcccaaagtgctgggattacaggcatgagccactgcgcctgctctaagtgtgtgttctttgtttgcatgaaaacctggattccatactatcccatacttcaagatcagaggattcagatgagcttatgcaccatttccattcatgccattaaaggtttaggcttttgaaatcaaacagattatgagctaaatataataatgtgtcatttatggttttacctgagatccttagatgatttttttttttcccctgagacagggtctcactcctgttgccaaggctggagtctattagcatgatcttggcttattgcagcctcgactttctgtgctcaagtgatcctactactt

SEQ ID NO: 638323 - DNA, 551 bp, Homo sapiens
ggcacgatcttggctcactgcaagctctgcctcccagattcacgccattctcctgcctcagcctcccagaatagctgggactacaggcacccgccaccatgccccgctaatgttttgtatttttttagtagagacggggtttcaccatgttagccaggatggtctcaatctcctgacttcgcaatctgcctgcctcggcctcccaaagtgctgggattacaggcatgagccactgcgcctgctctaagtgtgtgttctttgtttgcatgaaaacctggattccatactatcccatacttcaagatcagaggattcagatgagcttatgcaccatttccattcatgccattaaaggtttaggcttttgaaatcaaacagattatgagctaaatataataatgtgtcatttatggttttacctgagatccttagatgatttttttttttcccctgagacagggtctcactcctgttgccaaggctggagtctattagcatgatcttggctyattgcagcctcgactttctgtgctcaagtgatcctactactt

SEQ ID NO: 638324 - DNA, 585 bp, Homo sapiens
agaggaaaagagagaggctagaatggcaacaggcttgatggatggaggaggaagtcgcagaagaygatgagaaggtatgggaggagtgggggaaagtgtatttcaaatatttaagtattggaaataagaccacatattagagtttttggagagagttttcctttaaacaacagaccttgacctagttctccagcaaggtcttctgcagcaatgtctccttgcatccctcactttactacccaccttgagtctgcaccaatatttccttttcctagacaccctcacctcattcctggcctggcaagtgtaatcctccaggcctcagctctgggtctcctcttccaggaagatctccctaaggttctcctggctgatttaggtaacccctcctctgtgctctcacaccctccatgagcaacatttttgcagcacttcatgttacatggacattaactgccaatgtctgtctcttgcgctagactctaagctctcttaggacagaggccatgtttgattcatttttctaccccgaggacttggtagagaacaggcatcaatacaagctcatgatactaaaccaagcca

SEQ ID NO: 638325 - DNA, 585 bp, Homo sapiens
agaggaaaagagagaggctagaatggcaacaggcttgatggatggaggaggaagtcgcagaagatgatgagaaggtatgggaggagtgggggaaagtgtatttcaaatatttaagtattggaaataagaccacatattagagtttttggagagagttttcctttaaacaacagaccttgacctagttctccagcaaggtcttctgcagcaawgtctccttgcatccctcactttactacccaccttgagtctgcaccaatatttccttttcctagacaccctcacctcattcctggcctggcaagtgtaatcctccaggcctcagctctgggtctcctcttccaggaagatctccctaaggttctcctggctgatttaggtaacccctcctctgtgctctcacaccctccatgagcaacatttttgcagcacttcatgttacatggacattaactgccaatgtctgtctcttgcgctagactctaagctctcttaggacagaggccatgtttgattcatttttctaccccgaggacttggtagagaacaggcatcaatacaagctcatgatactaaaccaagcca

SEQ ID NO: 638326 - DNA, 585 bp, Homo sapiens
agaggaaaagagagaggctagaatggcaacaggcttgatggatggaggaggaagtcgcagaagatgatgagaaggtatgggaggagtgggggaaagtgtatttcaaatatttaagtattggaaataagaccacatattagagtttttggagagagttttcctttaaacaacagaccttgacctagttctccagcaaggtcttctgcagcaatgtctccttgcatccctcactttactacccaccttgagtctgcaccaatatttccttttcctagacaccctcacctcattcctggcctggcaagtgtaatcctccaggcctcagctctgggtctcctcttccaggaagmtctccctaaggttctcctggctgatttaggtaacccctcctctgtgctctcacaccctccatgagcaacatttttgcagcacttcatgttacatggacattaactgccaatgtctgtctcttgcgctagactctaagctctcttaggacagaggccatgtttgattcatttttctaccccgaggacttggtagagaacaggcatcaatacaagctcatgatactaaaccaagcca

SEQ ID NO: 638327 - DNA, 629 bp, Homo sapiens
tgtgttatatccagtaggattttcttacctgttctcccagccacaactgatagttttctcaggagtctttcaaaccctactcagtccaaaatctatgccaaaattcgtcctgcatatggttgcagtaatgtccactagtgtcagcagcggacaggagttttcattgttccacatacacrtgaaactcgatgtcgtcagtcttacatccttttctgttttgttggctgcttaatgggatcacacgttgttattttaattgcattttgtttattattaataagattaaatgacttgtattaaacgttttagaggctcaaatttcctcttgtatgaaatacctgaccaggacttttgcctgtcttatgttgtgttgtctttcttttgtatgctgatttatggtaggtctgtatatattctagatattggtgatatgaaggctataagtgttgataaggtcttgcagtgtgtggcttacctttttattctcactctggtgtcatgtggaggttgaaaattcctaattttaatttgtttattacttttatttttcatattgtgacttaatgaatcttcccttatagaaatcataaagcgattcttttttgttgtcttctaaatactatatttgc

SEQ ID NO: 638328 - DNA, 580 bp, Homo sapiens
acttgtaaaccattaacttacagaaaaaggtggaaaagaaattattgtaaatgtgaataccaactaaaattacaaaactttcttggcaatttcaaagcctttttataactttatacctaggctttggataaataatctccaggaaataccatatttttccctacttatggcaattcacgaaagcaaaaatatacatttataaaaatattgaatgagtgtagacagaaaaggcaactgaaattacaactatggccactatttcctttttaaaaaacttttaagttcagggtaaatgtgcaggtttgttgtgttgggtgtttgttttacagattatttcatcacccaggtattaagcctagcacgcattcgtcatttttcctgatcctttccctcctcccaccctccatcggagaggccccagtgctgtatggttcccctytgtatgtccatgtgttctcatgatatagaagaattggtcttctctataatgataatagtttatacatggataataggccttggggtcagggatgagcttctgtgaggaataaagaaatttaacgaatgtaatttttccact

SEQ ID NO: 638329 - DNA, 556 bp, Homo sapiens
ggtagaacacaaacatagctggattcaccaccagctgattgtaaagttcttgagccttgagtgaacacaggtggtagccaggcaatggtcatcatgagccttgggtgacaatcagtgttgtactgttttaaagtctaactcagggcagtcccagtgctggtggccacagagatgcttctgtcacccttcctccaactccaggtagctcagcacagagatayttcatttgtttagggaaaagtaagagaagagaaaaagggtctcttcctggtaatccagggaattcttccagacattactcaataccaaaaaggcatctcctctacaagtctgtgaaaaccacaatgttgctgggcttagggagccactaatgcagatatggctgcagtaaccaaaaacagatcacaacgcccatgaccctgtgactacctggaaagccatcccaagaaggacaggtacaaaacagctcagacagtgaaaattacaataaatacctatacttcaatgcctagacactgttgaacattcacgagcatcaagaccaaccaggaaaacg

SEQ ID NO: 638330 - DNA, 556 bp, Homo sapiens
ggtagaacacaaacatagctggattcaccaccagctgattgtaaagttcttgagccttgagtgaacacaggtggtagccaggcaatggtcatcatgagccttgggtgacaatcagtgttgtactgttttaaagtctaactcagggcagtcccagtgctggtggccacagagatgcttctgtcacccttcctccaactccaggtagctcagcacagagatacttcatttgtttagggaaaagtaagagaagagaaaaagggtctcttcctggtaatccagggaattcttccagacattactcaataccaaaaaggcakctcctctacaagtctgtgaaaaccacaatgttgctgggcttagggagccactaatgcagatatggctgcagtaaccaaaaacagatcacaacgcccatgaccctgtgactacctggaaagccatcccaagaaggacaggtacaaaacagctcagacagtgaaaattacaataaatacctatacttcaatgcctagacactgttgaacattcacgagcatcaagaccaaccaggaaaacg

SEQ ID NO: 638331 - DNA, 556 bp, Homo sapiens
ggtagaacacaaacatagctggattcaccaccagctgattgtaaagttcttgagccttgagtgaacacaggtggtagccaggcaatggtcatcatgagccttgggtgacaatcagtgttgtactgttttaaagtctaactcagggcagtcccagtgctggtggccacagagatgcttctgtcacccttcctccaactccaggtagctcagcacagagatacttcatttgtttagggaaaagtaagagaagagaaaaagggtctcttcctggtaatccagggaattcttccagacattactcaataccaaaaaggcatctcctctacaagtctgtgaaaaccacaatgttgctgggcttagggagccactaatgcagatatggctgcagtaaccaaaaacagatcacaaygcccatgaccctgtgactacctggaaagccatcccaagaaggacaggtacaaaacagctcagacagtgaaaattacaataaatacctatacttcaatgcctagacactgttgaacattcacgagcatcaagaccaaccaggaaaacg

SEQ ID NO: 638332 - DNA, 411 bp, Homo sapiens
aggcaccttgattttgggacttctgtccaccagaactgygagacaatacatttctgtggcttatttttttttctcacccatggattggggttacttacatttctgtggtttaaacattccagttggtggttgtttgttacagtagccttcgcaaactaacatgctgagtaggcattcacccaaggaaatggctatggcccctgggcaaggcctgcggactccttaccaagcactctgattgtgatggtgtgggtccttccctctgggaacatggcttcccctgcagtcagtgagttccagttcataaaactgactcagatccagaaatcaagaaaaggatgttaacacttttgggcaactgccttcagaattttggtcatatctcctcgatttctcctgacagtacaagct

SEQ ID NO: 638333 - DNA, 569 bp, Homo sapiens
actgcgagacaatacatttctgtggcttatttttttttctcacccatggattggggttacttacatttctgtggtttaaacattccagttggtggttgtttgttacagtagccttcgcaaactaacatgctgagtaggcattcacccaaggaaatggctatggcccctgggcaaggcctgcggactccttaccaagcactctgattgtgatggtgtgggtccttccctctgggaacatggcttcccctgcagtcagtgagttccagttcataaaactgactcagatccagaaatcaagaaaaggatgttaacacttttgggcaactgccttcagaattttggtcatatctcctcgatttctcctgacagtacaagctcagcagcaccctgctggctttctacccatgctgttttcagggttgctgtgctctatcatctccacaactttcagtggatcagattttttgkctactgccctcctaaaccattacggtcattgtgaccttctaatcacctggtctctgttgttctagggtcctcttgttcccactactatcagtttgcctaat

SEQ ID NO: 638334 - DNA, 483 bp, Homo sapiens
tattgtaatatggatgtgtcattagcactattacatttgagttattttttgtagcatcacctcttttactgatagacaacttttaagatgatgccagtactggagattaattaacaaaggagccctggtagaactgtagctttattttttcctatagagaagtacatgtatgtagacaaatactatgtgcatttgaattagaagggcttgtaccctacgccaattctttttaggrttttggaagtccatatgatctttcattgttaggaagctgcaagctgagaaataaaaccaacttactaatgacaccttcattgggttcaagtggctttaattctgcaccatcttctatagtagtcactatttcaatgctaaccttggggaactgcgacaaagcaccatcttccaggatggcacactcaactcacaaaagctatcagtttatatgctcttcctttcaaaataacgacatcatcttgtaat

SEQ ID NO: 638335 - DNA, 449 bp, Homo sapiens
tggactaattcgcataccttattttttattactggagttttgccttataatatacacttttcttcctgggtttttttctttgatgatagtstatgagatctcacaatttctctatttccttatcaaagaggacactccatttttcttataaaaaatcagaaagcatccctttcctgcatgatgcagagtttgccgcagccttggggtatttctcttgctcctacggattatttctgtacgtctaactcagaccctatatcaattcctacaaatctcacttcccagtaccctctcaactcttctgcaaaaagctgctaaattcaaattctttccattttttctgagtcttctctgcagcagatctctgagcctttatatttctatgccttcatcttgaaatatcatcaatatatggctgagtaatagcagatagtggatatttcaagaaa

SEQ ID NO: 638336 - DNA, 431 bp, Homo sapiens
aaaaaaaaaaaaaggtgtattctaatttttaacccaattttacttgtaattaatctcccaccctattctatgtcctttaaagaatttaagaatcccatcactataatgatttctggacacaatggaacacttkgccaagtttaagtttttaaaattttaagtggtaaacaagtaagattaggaaatatttggattaaacaaagttaaacaggcatattttacctcatgacttctttgaagtcttccagttgggtgcaaggccctgagactcaccaaaactaacataccatatttcttagtcttaaaggtcctctcctcagcaaaatattgtactaaattttgtttccaaagaatttattataaagtatttgaataaatgttaactgaagattattttattggaatttttaaattagagttaaggtacccat

SEQ ID NO: 638337 - DNA, 599 bp, Homo sapiens
gcggaggagcctgggatgacagtagaagtgtgcaggaagcactaagtcaagcctgtactaccacctcttggtttaacaataatgtataagttacctacaagccaagtggtcactgctgaaaccatcttgaaagaacctgcccatccaggtggcatatcagggagatgaaacctagagatgtcacaagrctcatcttaagatgtcagtcaaagagaattggtcaggaaggagtccaaagtgctcacataactatgtcctctgagtgagaaccgtgatgtaaatacctgccactcacaatgtattcatctgaagcctagagttaaccacagatatcaccagctaaaggtacaaactttttctcctttgtctttaacctctttcttagctagggagttgcagaagatgagaggggtgagggaaccaggaagaaggaggacaggcttgtttcctttttctttctgtaggtctctcatagagatacctgtcataggggatggtgatggggacggagaatgttttgtgtggctattgtagagatacctgtcataggggatggtgatggggagggagaatgttttgtgtggctattgtagagatac

SEQ ID NO: 638338 - DNA, 599 bp, Homo sapiens
gcggaggagcctgggatgacagtagaagtgtgcaggaagcactaagtcaagcctgtactaccacctcttggtttaacaataatgtataagttacctacaagccaagtggtcactgctgaaaccatcttgaaagaacctgcccatccaggtggcatatcagggagatgaaacctagagatgtcacaagactcatcttaagatgtcagtcaaagagaattggtcaggaaggagtccaaagtrctcacataactatgtcctctgagtgagaaccgtgatgtaaatacctgccactcacaatgtattcatctgaagcctagagttaaccacagatatcaccagctaaaggtacaaactttttctcctttgtctttaacctctttcttagctagggagttgcagaagatgagaggggtgagggaaccaggaagaaggaggacaggcttgtttcctttttctttctgtaggtctctcatagagatacctgtcataggggatggtgatggggacggagaatgttttgtgtggctattgtagagatacctgtcataggggatggtgatggggagggagaatgttttgtgtggctattgtagagatac

SEQ ID NO: 638339 - DNA, 599 bp, Homo sapiens
gcggaggagcctgggatgacagtagaagtgtgcaggaagcactaagtcaagcctgtactaccacctcttggtttaacaataatgtataagttacctacaagccaagtggtcactgctgaaaccatcttgaaagaacctgcccatccaggtggcatatcagggagatgaaacctagagatgtcacaagactcatcttaagatgtcagtcaaagagaattggtcaggaaggagtccaaagtgctcacataactatgtcctctgagtgagaaccgtgatgtaaatacctgccactcacaatgtattcatctgaagcctagagttaaccacaratatcaccagctaaaggtacaaactttttctcctttgtctttaacctctttcttagctagggagttgcagaagatgagaggggtgagggaaccaggaagaaggaggacaggcttgtttcctttttctttctgtaggtctctcatagagatacctgtcataggggatggtgatggggacggagaatgttttgtgtggctattgtagagatacctgtcataggggatggtgatggggagggagaatgttttgtgtggctattgtagagatac

SEQ ID NO: 638340 - DNA, 644 bp, Homo sapiens
attgatttgagacttttcctgctttctaatataagtatttcagggtatgaattccctctcagcactactgaactaggtgtacatattttatcgagtaaaagtttgatacaaaaaaaggagggaaacacactaattccccatgagtagggctatagatttaygctatgatttacttacaacagttaaactacccagactttgtgtatcaacatggacaaaattctaaataacagtgttgaatggaaaccagcaaactgcaaatgaatatatatagtattattctatttctttaaaattttcaaatccacaaaagaacatgtggtcatgattacgtgggattatatgacatatagaagccaggtaatgttatcttctaatctcggggaggggagggaattggctgtctctgcatggttttatttcttaaaaatattttgagattttatacaaataacagaatgtgttactttttttgatgaaaaggataagccagttgtcttgtagattattatctgtgctttttaatatgttcgaactaattagtaatttatattagcaataaataaaccaatgtaaagtttggggggaaatgacaccagcgataatgaagtgttagagaggaagattagaaggccccacaaagg

SEQ ID NO: 638341 - DNA, 579 bp, Homo sapiens
gggccaccacatccagccctagcccaccaacttacaaccccctgaggctgccccaagatggaagcstgctggggaaataggcatattcagccacgggaagggcagttcgccagcacgagttcggggaaaataatttagccgtctcacttactttgactgaagcctattaaaacaattaaaagaaagaaaaaaccctactgaaatcaaagtgccaactgtagcatggtttctagtagcaaacttgagacaaccaaaatgaaaagcaatagaggaatgatattactgttcaatcatatggaatattaaggagctattttaaaaggataatacaggatcgctaaacagcctagaaaaatgttgttggttgaaagatcagaattcaaaatggaaaatgggacagttatgtcaggtagttgaattattttttagttcatcaattaatcccattaattaattttaattattaattcaatttgctgctttattaattataatgaatttaaattataataatttaattttataaagtagtcactaattatttataattaatttaattctaatgataataatttaacc

SEQ ID NO: 638342 - DNA, 619 bp, Homo sapiens
tttttctagcctgtattgtgacagacattacactggtcaaagaatgacttgagtgatacacaattatgagctgaaacatgttgaatagtgaatgaatcttacttaggctgtggtcttcctcagggatgcctttctttatttggctatggaactggggaaagagtaggagtttaaaaagtaaatgagagagggaaaatattctggacaaaagaaatggcttgtgcaaagctctgctgtaagaggcagaactctagatgctggaggacaaggaaggccagtacagctgtagctgacagarcagaaggaacacggcatgtacgttagtttgctagggctgctgtagtaaagtattgcgaactggatggactacaacaacagaaatttattgtttcacaatcctggaaactagaagtctgcaatcacagtgttggcagggtggttccttctgagggctatgagggagaatctgttccaggcttcttgtccagcttctggtgggttttgggcaatcattagtgttccctggttatagatgcttcatcccaatctctgccttcatcttcacaaggtgttcttgtatgcatctgtgcccaaatctccccttttcataaagacacca

SEQ ID NO: 638343 - DNA, 492 bp, Homo sapiens
ataggcctttacttattatttaatttggctgtagaggatggaattaggctaatggctgttaagtggctaaggcacaaacatggtccatctgccgagaaggctcaaggccattgtctatttcaaaggctaaggaaaaaaaaagatgagtgagacatactgttacactaagagcctcatcaaatgcctttttattccccctctgatcctattcctttcaacactagtgattttcacggtaccatactaagaactcaaaatcaaggcctagatgctggccyattactaaagggaaaatagctcatccttgcttaaggctacaggctattgtagtagaaagcagcctgggcagcagcaaaatgattcagtccattaaaaaaaaacaattaccaaacaacagcaatgtccagggcactgtgcagaacacaagaataattcctgacttcaacttgcctcccaccttggatacaggggaagacagaacaggttcctgat

SEQ ID NO: 638344 - DNA, 492 bp, Homo sapiens
ataggcctttacttattatttaatttggctgtagaggatggaattaggctaatggctgttaagtggctaaggcacaaacatggtccatctgccgagaaggctcaaggccattgtctatttcaaaggctaaggaaaaaaaaagatgagtgagacatactgttacactaagagcctcatcaaatgcctttttattccccctctgatcctattcctttcaacactagtgattttcacggtaccatactaagaactcaaaatcaaggcctagatgctggcccattactaaagggaaaatagcycatccttgcttaaggctacaggctattgtagtagaaagcagcctgggcagcagcaaaatgattcagtccattaaaaaaaaacaattaccaaacaacagcaatgtccagggcactgtgcagaacacaagaataattcctgacttcaacttgcctcccaccttggatacaggggaagacagaacaggttcctgat

SEQ ID NO: 638345 - DNA, 614 bp, Homo sapiens
aagcttccacctttatgagcttaggttttagtgaggaacaattggaaatcaataggtaaacaataaatgtacataacatattagcacgcccatgctcattgcaccactagtcacaatagccaagatgtgtaaacaacctaaatgtcaatcaatagatgaatgattaaagaaaacgcagtaatatacactaatgcatgtaacagtatgcaatatacacacaattcagtcttaactgagaaagaaatctgccatatgtgacgacacggatgaacctggaggacatcacactaggtgaaataagtcagtcacagaagggaaaacactgcacgattccacttacacgctgtatcccaaatactcaaacacgtagagtcaccgtagaatggtgtctcccggaggctggagggagggagaaacgtggagttgctgtcaaatgggcataaagtctcaattatgcaagatacactctacagagcagctacacaacaatgktcctagaattaacggtactgtattgtagactttaaaatgttttaagaaggcagatctcatgttaggtaatctgaccacaataaaataaagttttacaaacctaaaaatatatggacatttct

SEQ ID NO: 638346 - DNA, 529 bp, Homo sapiens
ggtacttctgggtgcccccaaaacaccaggaccctctgagattccctgaacttcaggctctgttttgttggcttccttggacagttagttggagagaagaggaatacttggaaatgctctgaacaaaaactcttgaagaaagactaaattagagaggtctcctatattccttgcttactgccagtgtggaactggcttccacgctgacctctagggcgcaggcaggggagccaaaaacgctgtgtggtcgtggcctgccacggctgcgagtgtcgattccacaccaccggtgtctctgcctccatcagacgtcagtctggagattgtgccgtgaatccactgttgcrgaggacagcagcctctggatctcatgggacatcctgacccgagctcccaacctgagtattgctgtgggcggtcatcgtgctttcaagccgggaagccaacaatattaaactgtttcaatggaaggacccgagagtgggctggagaagaagtcagaagaactgggcctcaggaatcgtgttct

SEQ ID NO: 638347 - DNA, 410 bp, Homo sapiens
gtgccatgaaaaggagaaagctgcaggtcgggtggcaccagctgctgtcctgaggctgcactggagccgcccgcaggggcttctgccgggctcaggccttctctccagctcgaggctcagtttggcccaggctttgcctgctgggcgtgtrtgtgtgtgtgtgtgtgttatatgtgtgtatatgtgtgtgcacgcatgcacttatgtacacacacactttcttccttcataaagcttccttctctgctgcccttgtcatcctgtgaagattttatttggtttccttttcgtgacttgggcctttattctccccagctttgttctcagatcagcctgattctcctctcctacatgagctgctctgtgtggctggagggaacagagctgcagccttcctcagcctgccctcc

SEQ ID NO: 638348 - DNA, 416 bp, Homo sapiens
tgagctccgactcatccttattttctgtgaagcctcctcttactccccaggaaagacgtcagacactcctttgcattccatagtaacttgcatatgtctcargtaaagcacttataagttaggctgttgtttgcatgccattctcactagactgaggatgctctgaggtcagggatcgttcttgatttacttagctccatccctgttccttcatttgtctttttcaacagtggctgtctatcccagggctactggtagttctttttcaagtctgttttgggcaatgcaaggatagcaaaaaggaaaaggaagatttcttagaaaggggaaaggatctccaggtttaaaaatactttcagaaatgttctgagaggagaaatttgtgttaatttttgtgagagcatattactaaacag

SEQ ID NO: 638349 - DNA, 586 bp, Homo sapiens
catatgcgaaggcagattgtgcaggagcccacacactgtgaatggatagctacgcatgtgccacttcctccccttcctgtgtcccccacaaaattgcctccactggcctcctccagtgccagaaattctgtaactttggcacttcaatcaaaatgggraaggatctcagagatgattttgtcagcctcttcattttaaaaaactctatagttttttttttttttttgagatggagtctcgctctatcaccaggctggagtgcagtggtgtgatctcagctcactgcaacctctgcctcctgggttcaagcgattctcctgcctcagcctcctgagtagctgggactacaggctcatgcctccatacccagctaatttctgtatttttagtagagatggggtttcaccatgttggccaggatggtctcgatcccttgaccttgtgatcctcctgcctcggcctcccaaaatgcttacaggcgtgagccaccacacccatgcatggtttgttttatatagacttcgtcattaaacagtccacagcaatggcagcagctcaaataatattaaaaatattggacaatgga

SEQ ID NO: 638350 - DNA, 586 bp, Homo sapiens
catatgcgaaggcagattgtgcaggagcccacacactgtgaatggatagctacgcatgtgccacttcctccccttcctgtgtcccccacaaaattgcctccactggcctcctccagtgccagaaattctgtaactttggcacttcaatcaaaatggggaaggatctcagagatgattttgtcagcctcttcattttaaaawactctatagttttttttttttttttgagatggagtctcgctctatcaccaggctggagtgcagtggtgtgatctcagctcactgcaacctctgcctcctgggttcaagcgattctcctgcctcagcctcctgagtagctgggactacaggctcatgcctccatacccagctaatttctgtatttttagtagagatggggtttcaccatgttggccaggatggtctcgatcccttgaccttgtgatcctcctgcctcggcctcccaaaatgcttacaggcgtgagccaccacacccatgcatggtttgttttatatagacttcgtcattaaacagtccacagcaatggcagcagctcaaataatattaaaaatattggacaatgga

SEQ ID NO: 638351 - DNA, 581 bp, Homo sapiens
tcctacaaatcaataataaaagagaaaaagcagcattatggctcttcacaaaggaaggctcttcacagaggaaggtagaaaaatggataataagcatatgaaaaaagctatccacttctcttcctccaacaccttctttagccacaggtatcagataagtgtggggggagggtgaagaggggggaaggattgaattacttagtgtattagttgggtttctccagaaacatggaaccaayagggggtgtgtgtgtgtgtgtgtgtgtgtgtgtgtgtgtgtgtgtgtgtagacagagagagagggagggagagattgatttgttttagagaattggctcatatcattgtggaggctagcagctcctaaatctgtagggtatggctggcagactggagctccagggaagagttgatgttgcagtttaagtctgaagcacctggaagcagaattccctcttcctttggggacctcagtcttgtttttttgtcttaagaccttctactgattggatgaggcctacccacattttgaagggtaatgtgctttactcaaaatctactgccctatttaaatattaatg

SEQ ID NO: 638352 - DNA, 581 bp, Homo sapiens
tcctacaaatcaataataaaagagaaaaagcagcattatggctcttcacaaaggaaggctcttcacagaggaaggtagaaaaatggataataagcatatgaaaaaagctatccacttctcttcctccaacaccttctttagccacaggtatcagataagtgtggggggagggtgaagaggggggaaggattgaattacttagtgtattagttgggtttctccagaaacatggaaccaatagggkgtgtgtgtgtgtgtgtgtgtgtgtgtgtgtgtgtgtgtgtgtgtagacagagagagagggagggagagattgatttgttttagagaattggctcatatcattgtggaggctagcagctcctaaatctgtagggtatggctggcagactggagctccagggaagagttgatgttgcagtttaagtctgaagcacctggaagcagaattccctcttcctttggggacctcagtcttgtttttttgtcttaagaccttctactgattggatgaggcctacccacattttgaagggtaatgtgctttactcaaaatctactgccctatttaaatattaatg

SEQ ID NO: 638353 - DNA, 557 bp, Homo sapiens
cattcagagacaccccgaatataaccaccacacagagaaagtctgacattatgcttttatgcaaaatagagaatatcagtggggacatttaaaatatctactaaccagtatgaatttataactcaaaaaatttaagtatatttattctcttataatctccaaataagggtaytacaaaaatgcttatcaagtgatacaagctatagcaccaatcatttgaaagaaatcattccaacgatttctaaagcctttttgaaaattgttgcctacagatttttttttttccctttttttgggagacactgagtctgctctgttgcccaggctggagtgcagaggcacaatcataggtaactgtagcctttaccttctggcctcagcttcgcaagaagcaggagctacaggtgtgtgtcactatgcccagctaattattattattattttttttttgtagagagagggtctcgctatgttgcctaggttggttttgaactccagagctcaagtgatcctcccgcctcagcctcccaaagtgctgggattacagacataagcca

SEQ ID NO: 638354 - DNA, 557 bp, Homo sapiens
cattcagagacaccccgaatataaccaccacacagagaaagtctgacattatgcttttatgcaaaatagagaatatcagtggggacatttaaaatatctactaaccagtatgaatttataactcaaaaaatttaagtatatttattctcttataatctccaaataagggtactacaaaaatgcttatcaagtgatacaagctatagcaccaatcatttgaaagaaatcattccaacgatttctaaagcctttttgaaaattgttgcctacagatttttttttttycctttttttgggagacactgagtctgctctgttgcccaggctggagtgcagaggcacaatcataggtaactgtagcctttaccttctggcctcagcttcgcaagaagcaggagctacaggtgtgtgtcactatgcccagctaattattattattattttttttttgtagagagagggtctcgctatgttgcctaggttggttttgaactccagagctcaagtgatcctcccgcctcagcctcccaaagtgctgggattacagacataagcca

SEQ ID NO: 638355 - DNA, 582 bp, Homo sapiens
tgtcactagctatatgacacagtggtttgagccaatactaaaccaaagagaattacaacaaacttttccaatgacttctctattaaaatgataataggtgagatatctcaataagcagattttgtcttcatattaataatattcaataaatcctctccctkcttatgccaaacaattcaaaatttgtctagcccttgtaataccttcagagttttgcattttcaatatttctattattaagtaaaaaaagtttattggaacattttgttctgcttcaaatggtataaccgttttctttttacagtaacttcttatcttttcagtttttcagttttcttcatttttacaatagcttctacctttttatagtttttcagtttcatatgttcaatcatctttaatatttgctgtatctctcagttcatgttagtaactgaaacctttttataacgctaagtattgacaatggtgttggaatattgtgtactgaagccaagccactcaaaaatgctcattttctaaatgttcaactatttcaatttcagaatttcaattaaaatacgcaagcttgatataaaacag

SEQ ID NO: 638356 - DNA, 611 bp, Homo sapiens
aacaattaagagatttacttatctgtatattgatacctcatccacggaaaattgaatgtggtgacttatacaacaccataataaaatacctagaaatttttctaaaatattggttggaattctagattgtttaccargcattacaagggtgctgtctatataaaacctgtttaatgtacatatttctctcactgaaaccatttttttctcaagtactaacagtgaagtttgatatggtattttagatgttattctttctaacaaaaaacaaaaccatcaaagtcttcttgcattttacattttaagcagaatattaaaactcttatataaaatcaagtttcatcagtagtgattaaaattttactgccttgtttcgtaagtttagcaaaatgctgtttcttatttcaccataagtttcaactgcagcgtgtcatactgatatatttttatgccctccgaagtatttcatggttgaaaatgctcaattacttttaactaaaaagcaggtagtgttaacattattttattaacactgataaaattttaatttaaaaattttaagtgcttcactgtgaaattgactcattagattttttctcattgatgacaac

SEQ ID NO: 638357 - DNA, 611 bp, Homo sapiens
aacaattaagagatttacttatctgtatattgatacctcatccacggaaaattgaatgtggtgacttatacaacaccataataaaatacctagaaatttttctaaaatattggttggaattctagattgtttaccaggcattacaagggtgctgtctatataaaacctgtttaatgtamatatttctctcactgaaaccatttttttctcaagtactaacagtgaagtttgatatggtattttagatgttattctttctaacaaaaaacaaaaccatcaaagtcttcttgcattttacattttaagcagaatattaaaactcttatataaaatcaagtttcatcagtagtgattaaaattttactgccttgtttcgtaagtttagcaaaatgctgtttcttatttcaccataagtttcaactgcagcgtgtcatactgatatatttttatgccctccgaagtatttcatggttgaaaatgctcaattacttttaactaaaaagcaggtagtgttaacattattttattaacactgataaaattttaatttaaaaattttaagtgcttcactgtgaaattgactcattagattttttctcattgatgacaac

SEQ ID NO: 638358 - DNA, 611 bp, Homo sapiens
aacaattaagagatttacttatctgtatattgatacctcatccacggaaaattgaatgtggtgacttatacaacaccataataaaatacctagaaatttttctaaaatattggttggaattctagattgtttaccaggcattacaagggtgctgtctatataaaacctgtttaatgtacatatttctctcactgaaaccatttttttctcaagtactaacagtgaagtttgatatggtattttagatgttattctttctaacaaaaaacraaaccatcaaagtcttcttgcattttacattttaagcagaatattaaaactcttatataaaatcaagtttcatcagtagtgattaaaattttactgccttgtttcgtaagtttagcaaaatgctgtttcttatttcaccataagtttcaactgcagcgtgtcatactgatatatttttatgccctccgaagtatttcatggttgaaaatgctcaattacttttaactaaaaagcaggtagtgttaacattattttattaacactgataaaattttaatttaaaaattttaagtgcttcactgtgaaattgactcattagattttttctcattgatgacaac

SEQ ID NO: 638359 - DNA, 598 bp, Homo sapiens
ttttattctgtcatttttctaacttcctaagttgggtgcttagctcttcagttaacagtctttctattttctaatgtaaacttttgaagttataaaatttcctctaaatatttctttaattaaatctcttcaatttggggatgatgatgataacaagaactcagaacgacattgcatttacgatgtgccagttactagtccatgtgctttatgtgttaacatactgaatccatataacacaagtaatagatactgttaccaggggctattttatagatgaggaaactgagccacagtgaggttaagtaatttgttcaaggtcatacagctagtaaataccagatgtattttcaatatcttgaattccaattattttctaatttctatcataatttactcactcatgaagttagaagtgctttaaaatgtccagaggcttcaagtttttccttatctttttgattttttaactcaaaggtattgtggtgagagaacatgatatttatgatcttgaatcttttcttttaaatttgcatgtctttcattctatgtctgttgtaactascacatacttacagtttataatacctagtctgac

SEQ ID NO: 638360 - DNA, 535 bp, Homo sapiens
cctctccatgaagcacactgtcagtccamcgaaacatcctagcctcccaattctctttcctttttgtgcctctctactagaaaccaggctttatgctggttctgtaaatgagaaaactctgccttcaacaattaggggtaaaatattcctccaaagccaaaatttagtctcaatactgtctcatcagcaggaaaatggccattcaatccctaagtttttttaagccacctattctgccttcaattagagtagtacttaattagtaagggaattttaagtttggaagttaactggaaccattatctaagggtaaatgcttcagcacaggccataatagcaggatacagagttcaatctagcacatcccctgcattaaaggggccttgcccaactattatgtagtttttcttgaaatccatttttcaggaagccaggcaagtcacacaagtctaggaagttaaagggaaatcacaggcagaggactacagccacttgggtgagcatgactagccccagtgacttagttcctctggtt

SEQ ID NO: 638361 - DNA, 535 bp, Homo sapiens
cctctccatgaagcacactgtcagtccaacgaaacatcctagcctcccaattctctttcctttttgtgcctctctactagaaaccaggctttatgctggttctgtaaatgagaaaactctgccttcaacaattaggggtaaaatattcctccaaagccaaaatttagtctcaatactgtctcatcagcaggaaaatggccattcaatccctaagtttttttaagccacctattctgccttcaattagagtagtacttaattagtaagggaattttaagtttggaagttaactggaaccattatctaagggtaaatgcttcagcacaggccataatagcaggatacagagttcaatctagcacatcccctgcattaaaggggccttgcccaactattatgtagtttttcttgaaatccatttttcrggaagccaggcaagtcacacaagtctaggaagttaaagggaaatcacaggcagaggactacagccacttgggtgagcatgactagccccagtgacttagttcctctggtt

SEQ ID NO: 638362 - DNA, 509 bp, Homo sapiens
cccatttcctacttggggcttggcataagataccaaaaattaaccaaaacgttttatttyctagcatgcaaatcaagaggttccaatcttcgtgttcactttaaggtatgcgattcatagttgtgatccaacagttcctcatgttccactcaaaaaaggtagctgcagtgatgactttcttaggacacctttggatttaccgtgaaaattaataaattctgagcagccaccttatatttaggcattgatgatcagggtgtaaggatgtagcgtttgtgaaattgagaagtagtaccagaaaaccatttgaaaacctagtgtgcagatcaagatggggcattttaattgtaattacatgatgatggaatttaaacgttttatagtgaataaatggagttttggagttttctctagcttcaacgaagtttacctggcttttagtcacaagtttttttaattgccttgcccccaaagaatagaaataactcgacattttgaaaagctgaaaa

SEQ ID NO: 638363 - DNA, 470 bp, Homo sapiens
gaattcagttgactgagaatttaaaaaaaaaaaaaaactttttctcaaaaaacaagatcctgggagagaaaaaaaaagtgtaaagtccttttaaatatgcacatatacataatggatatcaacttagaagtttattttgccaaggttaaggacaatgcctggaagaaataaacatggaatcacagaaacagtctgtggtctgtgcctttgtccaaagatgattttgagggcttcagtatttaaaggggaaaagtgagctggagggggmaaagggagggcatggtaatccaggtgttgcaagagaaaaaaagcaggtagggggacagtcgattatgtattcgtctcgcactcagtaactggacacgttatataagataaggtccctgtggagatatttcaccttttatctgtagctatctgcttaggaacaaaaggcagcttcttgcatgactcagctttcagcttgattt

SEQ ID NO: 638364 - DNA, 592 bp, Homo sapiens
aaaggcagcctcctgggtgcccttcctggtgcatccttctctctgttctacagcaaagcattgaaggagcttctgcctgcaattggcaccgtgaagagcttaacccacgaaggcctggttttgagtcttggtgggtrgagcagagattctgataaaactctgttctctcttttctttagccttgaagtttcaggcaggaaagaagagaagatgatgcatcgctgggctctgcaaagggcctgttttctaaaggcatttgcctctctgtctgtgcctagccttgggctgggcaaagaggggttgcccctaacatacttggtgattggctggataaattgtaagctgaaaaaacaaagtggttttcacgtttcctaaattatttatattgaaatttgccatttcaatctgactctgaaggaagctcagattggttgtttgaacagggagctctgtgctctgggtccttttacttttgcagtgggatgtattcccagaccacctccatcaggccggctggagagcctggggatcccagggcaatgtttttccccacctggctcagatcaggcagggagagcatgttttgtgactt

SEQ ID NO: 638365 - DNA, 592 bp, Homo sapiens
aaaggcagcctcctgggtgcccttcctggtgcatccttctctctgttctacagcaaagcattgaaggagcttctgcctgcaattggcaccgtgaagagcttaacccacgaaggcctggttttgagtcttggtgggtggagcagagattctgataaaactctgttctctcttttctttagccttgaagtttcaggcaggaaagaagagaagatgatgcatcgctgggctctgcaaagggcctgttttctaaaggcatttgcctctctgtctgtgcctagccttgggctgggcaaagaggggttgcccctaacatacttggtgattggctggataaattgtaagctgaaaaaacaaagtggttttcacgtttcctaaattatwtatattgaaatttgccatttcaatctgactctgaaggaagctcagattggttgtttgaacagggagctctgtgctctgggtccttttacttttgcagtgggatgtattcccagaccacctccatcaggccggctggagagcctggggatcccagggcaatgtttttccccacctggctcagatcaggcagggagagcatgttttgtgactt

SEQ ID NO: 638366 - DNA, 535 bp, Homo sapiens
agatctctggatttttcctgttacttaatttgctgaaaattggccttatgggttgtttcttcctgatcttagaaacagatgcccttaggttggttggggatggccaggaaccaggccaggcttgtgatctgaaattcctacaaagactgctcttgtctctgaagcatggctgtgctgagggtggggagggggttatttcaaaaatgcagcctaatatctcttttctttgagayggagtcttgttttgttgcccaggctggagtacagtggtgtgatcttggttcactgcaacctccacctcccaggttcaagcgattctcctgcctcagcctcccgagtaactgaaactacaggcctgtgtcaccatgcccagctaatttttttgtatttttagtagagatgggatttcgctgtgttagccaggatggtcttgatctcctgacctcatgatctgcctgcctaggcctcccaaagtactgggattacaggcatgagccaccgtgcccagcctgcctgatacctcttttataatatg

SEQ ID NO: 638367 - DNA, 378 bp, Homo sapiens
tgacaaatataaatgaatgcacagtttactcaactctgaattccaagtgcagagaagagaaaaagtattaagtgaagcaaattgataggacagaccattagaggcaggtaagacttgggaagaccttaaaggaagaaaagctcttacttttgggctcttggctagcacttggatcctcctgagttatttgctgcctacaaagtttagaaagggaatgccaagcttccaccaggcggcatctctatgcttccctggtctcatggataacatgtagccttgggtatcccctcaataagttgagaggcctgaaacctccaactgcttaagggttttttaaggggttttytgggggtttttttttttttttttttgagacag

SEQ ID NO: 638368 - DNA, 457 bp, Homo sapiens
gatcaagagattctcttgcctaagcctcccgagtagctgggactacaggcgtgccccaccatgccctgctaatttttgtattttttgcaaagacggggtttcaccrtgtttgccaggctggtctcgaactcccgaactcaggtgatccacctgcttcagccttccaaagcgctgggattacaggcatgagccactgcgcccagcctagatgagtatttgattggtgtttgggagaaagtgccggtacttcaaggtccaggaatctaggggcctatcttagaagtctgcccaccaaacttgacccctttgctgacaaactattccagtccttcaattacttgggaacccgctgaggattggaatctcatagttcccatctattaatgcccctaggctttattgattttaaactctggagattttattttcttgtcatttagacagccactcagcatag

SEQ ID NO: 638369 - DNA, 608 bp, Homo sapiens
tctttttggtgtgataaaaatgttctgaaatggattgtactgatggttgtacaactctgtgaacatactaactactgctgacttgtactcttaaatgggcaaattgtatggtatgttaatgctatctcaataaagtggttaaaaatgagtaaggagagcccatgtgtaagattctgagtgttgaaggagggaagctgcagctgwgtttgtacctcctggagtgctcctaggaccacagctgagggctgtgtagggagataaggagggggcctggcctggacactgcagaggctgaagcgagtaggcacttgatacttgaatggacaaattctgaagttcctggctctttgttaatgcccagtcagtgagggggaagagaagaaaagagttaggcttaagtcttaggatttggagctcagaagggcttttggccagtggccccaaagggattttgacattaaggctttaatagaaccagccatactgtatattcacacatctcttcacccctcactgagcattacacctgaggtctcatttggggtcttagtctgtgagactgaggggctgagagcaggaggatctcatttggcatttcagcatggaaa

SEQ ID NO: 638370 - DNA, 480 bp, Homo sapiens
gaattcccttttctatctggcaaacccatattcattcctcaacactcagctccctctctgggaagtctttccaactccctacaagctcatcaattcatctttctgttcccatcactttacatgtggacctttcttatcccatgctactctgcaccatgcgtcacatggcatcataattcatcttctgtatctctgttttccttgcaagtctgggagcttctcaagagaaagaatcttgtcttaaaatctgttatatcccaggtaccacacatagtagctgacataaagtaggtgcttaataaattaattgaatttgaacagcatcatccagccccaaactataagcaagccgtgatatctaygaaaggttatcttatttacacaccaacaacagtggccatttcatcctaagcagacatccccctgcttacacaaaccacatcctttttgggtaactcctcacacagccccacacgacca

SEQ ID NO: 638371 - DNA, 624 bp, Homo sapiens
ccaagttgttacatcagaggaagagatcattctaattcatcctagctaatttgttatatataggggcagtcaatttacctgatcccatgccctgaatgtaccatgtttcctcgtgcctctgtccgtttggtcattctgtgctgtctgcccagaaggcacctttccctcttcccccacacctttatcctgctacctgttacaggtttttcaagatgcagtttagtattactgcctatgggaaaccttttcagaagtttcaaccctgaaacttagtcctgacctaagagtatccttcaccctccgtcctgcaatcatcccaaggatttttgtatcagagccactgcgtgccttgaaattcattcaatcaacatatatttatggtaggcactgttttaggcactgaagcaaaaatagcctaaaatctctaccttaatagaacttattttttggtgggggaaaataggccrtaaatgaatttaaataaattcttgtaacaggatactatgcagctataaaaaggaattgggatgagatatatatcttgctatggaatgatctcgggatgtattatttgtctagtagaattctgggtttggtcaattgcttcctcgtagtgtcccttaa

SEQ ID NO: 638372 - DNA, 558 bp, Homo sapiens
aaataattataattaatgcaatgttagacatgtccattcacttatccccttcctgtcttaatgacgactgactcctaaacctttttaacctcagttcctttcctaggagccactttattttgtcacttgccagccagacattgcaactctgtatctcacaataccttaaacattattctatcctaaatatgactcattacctcctatactgagcagctcttcctgaacctcctcctgactttccagttttgaagtggtagcactcatctcttagtcactcagcctctaactggttaacaagtaatctttgattcctgtctccctcatatctgggtagtcatcgaggcctcttgattcygcctgaacttttcactcacccttcctctttctcctctccccctatttcgcttctttctgttgcccccagcctagatcaggccagcatttctaattaacaagctggattattattattattttttttacctctcatctctctgctatgctgccagccagcctgcctgcctcactggccttacatcctagtatgtaccccct

SEQ ID NO: 638373 - DNA, 637 bp, Homo sapiens
aagcgttctgggtctgtaaactggctcaggtctgggaattggttgggaaactatgaaactataacgccatgttttgatggttcaagttaggcttgacctagaactcttctacttatacagatcaagtaagaaattagtagattatcatctaattctcttctagggacaccatgatcagctagccaatatcacgggtctctgggattcagactattctgatttttgctttgacaccactatctactatggtaaccacacccactttgcctttagtgatttaagtgccaccaattaacccctgccacccaaggatctaattatccccattgcatttagggaaatgctaatagtttgttggcagcaatttccaagtgtaatttcacagaagagtgaccacagagctcttcagggatgctggagcatcctcacaaatttgagatctycttggatatatcatgccttcagccctatgcctgctgtcatcactgttttgtgtggcactgaagtctctctggctgctacttgaaatcaaagtagcccctgttgttctgcctatcattgtaggcattgctcttactgccgtgggtatagtggtcctgaccggaagatgcttccatatcatttctacccggccaga

SEQ ID NO: 638374 - DNA, 602 bp, Homo sapiens
acccctggagtcatagtttgtgatttttaactatgtgtgaacggctgacagaaatatggactctcttgcaaggaagatggacatgtgcacctgcacacaaaatttgtacacaactgtgagtcactgacaaaccctctgaaacacattcatggaccagaggttaagaacaccttccttgactcgacaaagctctcttagttcttcatgctgatcctttaaaacagattttaaaggcttttagttccataagtgccctattatccttgctggaatctacaaaagccagagcggacattttaaaacattgtattagatgctaagtcattacttcttrttaatcaataacaaacttcaatcatttttacaagattgaagacaaagagactttgcactctaatagaacatctcgagtcttttttttctctcccacttgctttaggtgtttggggacctgtaagtagagccacatcagaaggtaaggcagcaacaaagctcttaactctctttccatcctcacttattcccccttgcttctgcaaagggtatttgaaggttatgctcatctatgcctagctcttctaggggaagcattttcttttcag

SEQ ID NO: 638375 - DNA, 544 bp, Homo sapiens
cctataatcccagctactagggaggctgaggcaggagaatcgcttgaacctaggaggtggaggttgcagtgaaccgagattgcgccactgcactccagcctgggtgacaagagcaagactctgtctcaaaaaaacaaaacaaaacaaacaacaaaaagaaggcaaagtctggaggaaaggaggtgcaaacttccaagagtcctctcctagcagagtcacacatgacacacataatacctccagcaggaatttaaaagtgtaatatgttgctaatcagggaagctagttaagagactcagcacccacagtttttattaggaactggccacatcagcactctctgcctggcacccaaattccagatttccagaaggaaagtgatgttcactataaacyatattgtttgcacaagcagtttaggtacagtcaagcaccctgatcagttaggttggtgggaactctcccaaaatccaagttctcaaatgccagccagagcccaaccctgctagcaggcctttctgaggacaccagcctcaggcctgct

SEQ ID NO: 638376 - DNA, 520 bp, Homo sapiens
acatgtttaggtcctaaaaattggttgtagcccaaatataataataaaattacctgaaggtaataaaaagggataaaaataactaacatacatgctcttactatgtgccaggcactatcctaagcactttacatattaactcaatgaaaatgacatagggggctcccacaagcctctgacttgattgttttctatggtcttcggaataaaggagataagagattttgttgaatgtacagagaaataaagtccccttttaaagtcccttttttacttgtcagatcactttatctggtatttctttagcgccagtatagaaggcactacygtagatggtagaattatcagtaatttttaatggcagagaagcagccagtgataatagggagaaatttggaggctcaggaggcaccagtaggtgaacaaatttgccttttttttttttacttataatgtctatccttttatgaaaataagaattgtgctttagttaaatagaattcaattatatttttcctgt

SEQ ID NO: 638377 - DNA, 572 bp, Homo sapiens
aactatctcatgccatctggattttaaaaaaggatacattttcactcttattkcttgcatcattcattggtttgttcaatattcaacaagtaattactgaatgcccactgtgtgccaggcattgtgcctgtactggataatacattgatgaatgaaacagacctggcccttgtcttcctgaagcttaaagtattgtgagagggacaaacaataaacaagttaatattgcaaacaattatatacttgcaaagtctgataagtgctccaaataaataaatgagatttgccggaagagaataaaagtcagagaattcctgcagaataataagcctacaccaaaaatagatgcattttattttaaaaattttattaatatatttacatggttcaaacttttgaaaatgcaaaaagatatttaatgcctacaacactgagtagctttttgctgaagatcttttcattatcttataacttttgaaccatgtaagtgaattacctcttcgatacccatcacctatatgcccagtttccaacatgttgctgtctccaactgtgataggagatggctccca

SEQ ID NO: 638378 - DNA, 531 bp, Homo sapiens
ttgacacccctgtttcagtcctcattactatttacttaaacagctaattggcaaggaaggggacatttgygaacaataccattagattttaaccactccacagacaccttcgtatagccctggaaagtggactaccctccaaatacctgatggttttccattgtccaaacacctcctagcccagaccctcatcctccctggaggcctggtggtctgcttcccaccactgccttagtaacgggtgaaccagaagcccagcctagaccactggcactagccattgtatcaacaactttggttcccagtcagatttgcttttttttctgttctgtgacttgtggcttaaatcctagttcatctttcaattgttattaaggtggttcggtgtctctgttaattcttgttgattttttttttttatatcaactgcgctgacttttgagagattctttgttactaaggcttagtaacatctacttaaaactcctaacctttgactttggtacttggactcctcttttggatgctgaa

SEQ ID NO: 638379 - DNA, 531 bp, Homo sapiens
ttgacacccctgtttcagtcctcattactatttacttaaacagctaattggcaaggaaggggacatttgtgaacaataccattagattttaaccactccacagacaccttcgtatagccctggaaagtggactaccctccaaatacctgatggttttccattgtccaaacacctcctagcccagaccctcatcctccctggaggcctggtggtctgcttcccaccactgccttagtaacgggtgaaccagaagcccagcctagaccactggcactagccattgtatcaacaactttggttcccagtcagatttgcttttttttctgttctgtgacttgtggcttaaatcctagttcatctttcaattgttattaaggtggttcggtgtctctgttaattcttgttgattttttttttttatatcaactgsgctgacttttgagagattctttgttactaaggcttagtaacatctacttaaaactcctaacctttgactttggtacttggactcctcttttggatgctgaa

SEQ ID NO: 638380 - DNA, 571 bp, Homo sapiens
tgaattccctacagtgaagatgaatatagacaataattcaagcacaaataaccaacagaaaatagcaaaattaatgctcctagtatgagctctcagtcccaacctaacagctgagactatctaatcagatctgacaagaagtctactccccaaactagaagcgatcacaaatatagttaataatgaagcttgccctctctgggcaaatatctttgkgtctttgagaaattaatgatagaatgaagccatcaatgtggcaagacatttttaaatgaaatgtttatacatttttaaaatatacttttttcttctacatttaagggaaacatttttaaaagattttgttttattttatcataaccttttaaaatccacaaatcccacacctctagccaccccaaagattttcctgcaccctgagttgcctgctagttctttattctcatctatttaaaaaatctgtgtagaaaagaaaattattctgcaaagtaagcaggcctttagcctcaagaataaatagaccatttgggggaggttaatgcttcgtagctaaaattgtatgctttgcaaa

SEQ ID NO: 638381 - DNA, 582 bp, Homo sapiens
ggtcaactgattttccaccaaggtgtcaaagcaattcattgaggaaaaaataatattttctaaatgatgctggaacaactagatagccacatatagaaaaaaaaaatgagctcattcccaccacacatcacaaacaaaattaatttgaaatggatgacagacctaaatgtaagggctaaaactataaaactctgagatgagaatacaagagaaaatgttagcaatttgggttaggtgagcattttttaaataggacacaaaaatctcaatctataaaattttaaaaattgataaactggacttcatcaaaatttaaaatgttggctcttcaaaaggcattgctagaaaaataaaaaggcaagccacaaactaggagagaatacttagaaaatgtatatataataaagcacttgtatccagaatacttatagcttaataactcattaaaaaggagacaactcaatttttacaraatgataaaatatttgaccaggcacttcaccaaacaagatacacaagtggcaaaataagcatatgtaaaaatgccccaaatcactggtctttacggaaatgcaaagtaaa

SEQ ID NO: 638382 - DNA, 506 bp, Homo sapiens
tgctttgatattactgggttttgaacttttacctawaggaaattgtgtagtagagttaaccttatccaagagaggttggacctttgccctgggttcctgggagttgatctctagcccttggaatatgctgcctgataagcaaatctgtttacctggggactctgggccaagcagtatcagcttgacttccagagggactgaagactaaaagtcagccacatgtgtggtcaaccatgtctgtgtgactgagtctcaataaaaactctgaacactgaggcttagatgagctcccctggttggcaacactgcacctgtattgtcatacgacattgctgggagaagtcagttttgtccacaatgccactgggagaggacaactgaaagctccatgcatggaaccctcctggactgtgcccctgcaccttttccattagctgattttaatttgtatcctttcattgtaataaactataactgcaagtataacagtttcacagagttctgtg

SEQ ID NO: 638383 - DNA, 506 bp, Homo sapiens
tgctttgatattactgggttttgaacttttacctaaaggaaattgtgtagtagagttaaccttatccaagagaggttggacctttgccctgggttcctgggagttgatctctagcccttggaatatgctgcctgataagcaaatctgtttacctggggactctgggccaagcagtatcagcttgrcttccagagggactgaagactaaaagtcagccacatgtgtggtcaaccatgtctgtgtgactgagtctcaataaaaactctgaacactgaggcttagatgagctcccctggttggcaacactgcacctgtattgtcatacgacattgctgggagaagtcagttttgtccacaatgccactgggagaggacaactgaaagctccatgcatggaaccctcctggactgtgcccctgcaccttttccattagctgattttaatttgtatcctttcattgtaataaactataactgcaagtataacagtttcacagagttctgtg

SEQ ID NO: 638384 - DNA, 506 bp, Homo sapiens
tgctttgatattactgggttttgaacttttacctaaaggaaattgtgtagtagagttaaccttatccaagagaggttggacctttgccctgggttcctgggagttgatctctagcccttggaatatgctgcctgataagcaaatctgtttacctggggactctgggccaagcagtatcagcttgacttccagagggactgaagactaaaagtcagccacatgtgtggtcaaccatgtctgtgtgactgagtctcaataaaaactctgaacactgaggcttagatgagctcccctggttggcaacactgcacctgtattgtcatacgacattgctgggagaagtcagttttgtccacaatgccactgggagaggacaactgaaagctccatgcatggaaccctcctggactgtgcccctgcaccttttccattagctgattttmatttgtatcctttcattgtaataaactataactgcaagtataacagtttcacagagttctgtg

SEQ ID NO: 638385 - DNA, 507 bp, Homo sapiens
actctctaagtccaaattataactatggcattcaaccaacaacacataaatccaacaaattataaataaataaataaatgctgcctcctccactaaactatgagctctatgaagcagggactgggtcttctccatcttgtgcccagctatttgcttaatagcagtgtgtaactgattttcaatgcctttttttttttttttttggaaatggattctctgtcccccaggctgagtacagtgggcacgatctcggctcactgcaacttccacacctcctgggttcatgygattctcatgtctcagtctcctgagtagctgggattacaggcatgcgccaatcaacccagataacttttgtatttttagtaaagatgaggttttgctttgttggccagtctggtctcagactcctgacctcaagtgatccactcgctttgtccttccaaagcactgggatgacaggcgtgagccacgacagctggcctcaatgacttatttttattgtgg

SEQ ID NO: 638386 - DNA, 674 bp, Homo sapiens
ggtagtgctgatggtcaaaggagtaaaagccatagtagctactattcatattactaactgtgtatcaactcctgatgacaattaaaatgcaagtattacatgtcaacttcaatttaagacagaaagcaccgaaattgtctccatagtcaattaaaagttactaatagggataagctaaaacccaagtcccccaactagtccagtrtttaattcagccctggtacaaacatcccaggatctgaaaccaatacacatagtctttaacttcttcagtttctagtattgcactggaatatttaattgaatgatgattagaactaccattgggggcctatattaatttctatttattctttgtcttaaagaacaaagctaaaatcccactgtccttggagttgatactacacagctttagcatttcagcattttctaactcaatggtataaaatctagctaaataacaaaatcacctgtgagctttctataaatgtagaaagccagcctccatatcagacattctgaatcagaataagacacagtacctgctctggaaaaagatagcctagcaggggaaacagaaaaaaatcacagggacctcaaatattcaaatatcagaaacaggctataaaacaaagatgcttaccatgtttaaagatataaatgctaagcttgaa

SEQ ID NO: 638387 - DNA, 633 bp, Homo sapiens
atggggaataacttgcacatagcagccttaatgctgccctagaataggaggtcagctttagcttgggtaattcatcagggaaagactgtgttagatattattggaacatcacaatatrgagcatacaatacttttggggtgtttgaaatccaaattataggctaatgaataagggaaatgttgtacagcttttttaggatctattctcttggaaaaaccagccgtaattatagatgctctgtaggtgggagtgctcacacaatcacactttttatgctaacataaaggaataaaatggtaaaggatatacttaatctgtacatttgactttaaattttcacagaaggcctcagaccagagttttgctcctaaaatgtgacctagtacatttaagaacgtatagattagacctcctgagtccctccagctattcattagattgaatcagtactgattcctaatggagaaatctactaggcaaggacttctgcacttagtgtaagaatcccaaaaccttaggcatggctgccctctacagttagaaccaggtgtaactcaactctgagggtctttccgtgttgaattttgctcatactttgttccatattgagtttccttcagataagtcttatt

SEQ ID NO: 638388 - DNA, 657 bp, Homo sapiens
cctaacaagcataattattcttagttcattatcatttagggcacttaaggattgaggatgttgataaaaaactaaatatgtacaccaggaattatgattctggtagttgctgtaggctgatgcctcttccacccatttatctcattgggagttgtaatgccttgtagtatttcttatccaktttaggggaaattaaccagtggtgttcaatcttttggcttctctgggcctcactggaagatgaagaaatgtcttgggccacacataaaatacactaacactaacgatagctgatgagctaaaaaacaaaaattaaaaaaaatcacaaaaaaatctcattatattttaagaaagtttatgaatttgtgttggactaggggttggacaagcttggtttactcagagacgaggaaagaaaaatagtaactgttatgtatccactttgtgtatactagaatctacacataatattacatttaattctcttaacaaccttctaaggtaagtggaattatctgtatttttctggaaattttaagcaatttacccaattgaacacacctagaaagtggtagaactagagatgcaagcccaggtctgtttgcttacagtttttctcttttctccacatcactgtataaacatagtcaatagctt

SEQ ID NO: 638389 - DNA, 586 bp, Homo sapiens
atgtactaattaataccttgcttgcttattaccaagttcctctcattttacatttatgcaggcttcagtcagagcatcctgcatttaaatcttggatacaagcttcttcctcctgacccagtttaatgctacaagtatgaagggtgaaggagagtactttgcatattggagtcacttgggacttgtgtgggaaggcttttgttaagcctaattacacaaggtgacaagagttcactcctcagctggargataaacttagataaattaactgaaaaccatttttcactctttctcacttcacctccaacacactttccttttagaatggcttctgcctgttcctttaagttcctccacttgccaaaaaaaaaaaaacttaaataacgcctgctgtcaaaatttcatttagacagagagctatactgtttaaaaggtagagaccccctacatttttattctgtgaaggtcatatgatctatggcacagaatagttaagcctcattcatacttgcctcctcataccaggacagggaatgttctctatctgtttctctctctgagcaccagtgcccttaattctaaaatg

SEQ ID NO: 638390 - DNA, 541 bp, Homo sapiens
agcttgaactttattggtatttacaaattctactgaattttttacattgattttgtgtcctgaaagtttactgaagtcttttatcagttccaagagtcttttattgaaatctttagggtattcctgggataaaattatatcatcagcgaagagagagagtttgacttcttttcctatttggttgccttttatttctttctcttgtctgattactctggctacaacttacaatattatctttaataggactggtgagagtgggcatccttgtcttgttccccttctcaaggggaatgcttctagcttatgcccacttagtatgatgttggctgtgggtttgtcatagaaggcttttattattttgaggtatgttcctttaataactagtttgttgagggtcattattatgaagggatgttgaaatttactgaaatctttttccacctgtattgagatgatatggtttttgtttttaattctgtttatgtgaatcacatttattgattttygtattatttgcatgggtttgcatatgtggaac

SEQ ID NO: 638391 - DNA, 472 bp, Homo sapiens
cccttaattctaaaatgaaggggtaaggaaaaaatgtaagagtaaatatcactaagcataatatgtaacatgtaaaagctctgaatacatggtagtaattaatgtttgatatttgtatattatatataatgatagatgtttttcactgatgtttcctgtgcagttagcggttacccaactttgttgtaagtttttctaatgaagcattgatgacttaaactctctgcctcaaatcctatctttggacttatgttgtaaattaaaggattgtacattcttaatgtagacctgagttaggatattctattctattctatttatttttaaatgtatgtcccaaattttactgcagaaaatgtgatcactttttccataaataataaaaacagaaaatgtctcawgtatcttttgatttaactagcacttattgaaggctttatctgtactaagtacactacatgagacacctcat

SEQ ID NO: 638392 - DNA, 551 bp, Homo sapiens
cctacctcaaccacacaataattttgcttccagtctctagacaaacaggaattctagtccttgctttgccacagggggcaaatatcaggctttagcatggtgaaaccatctttcaaaaaatagtaagtcaatggaaaaaactgaattatccttgtcttytaatttgatacagaaaatgttgtcttgtagctcacttatatttttctgttagagaagatctgtttccacaatgactgaatataatttatttcttcttttttggattttttttctatactttaagttctggtatacatgtgcagaacgtgcagctttgttacataggtataaatgtgccatgtagtttgctgcacccatccacccattatctacattaggtatttctcctaatgctatccctcccctagccacccacccaccgacaggacccagtgtgtgatgtccccctccctgtgtccatgtgttctcattgttcaactcccacttatgagtgagaacatgaagtgtttggtttcctgttcctgtgttagtttgctgagaatgatggtttc

SEQ ID NO: 638393 - DNA, 619 bp, Homo sapiens
ttatctgtactaagtacactacatgagacacctcattatcttcgacccttctgaaagaaataattattattaactttgggattggaaaggaatctagagttcagagaggttaattaatgaccaaagtcacctaggcttaaggagctaaagcaggattaaaatatagacctgtttaactgttaagcccgtggtctttccactttactacgctgcctttccatatctaagaataatgtaaaattacctttataattcatgatcatttttgtcagcacagtttatccagagttgtaatgccttataaccacaaaagtatacatctcacctatgtaatatgttcattatgaatcattattctgrtatccaggctaaagaaacagcccctatggtggctgtgaaagtcttcaggcagagaaaaatagcaagaatgcaactgtatgatgagtcttaaagcttcttgtcagaagtggcatatgtcacttctgctcacattccattaatcaaaacaaatcacatggtcaagtcctatgtgagtggggcagggaggtatattcctcacacaggaagaaggacagtgattatttgggaattacaataatctaccataagattatatatc

SEQ ID NO: 638394 - DNA, 614 bp, Homo sapiens
tcctctaaaagtgcaaataattcagctacctgtcttctttttcctaaatatctactccattctttttttctattgctgtctctgccatcagttaaatacattgccaataacaggtaaattcttgacttaataggatacctcaatgcctgatttcaatcttataagcattacatttctcaattatcccatccagaaaccactgggaagtgttaattaggtactaaaaacaaattggattacctcagggaatctttcttaacaattttgcagtcaatcaggtggtaagatcataaattacacatatcatcctagtatccattccagatgtgatttgaaatccttgactttctatggtttgtcgttcaactttgtatcaatatgaagtaattgaaaaacagcctatgttaaacaccttgatccatgtaataaaactgggaaatgatgactatgatagtttcagaaatgtatactctctcagcagagttaattatgtcatgaacawaagagtataatttggtatatagtttttttcaataactattaaaaacattgagatataatttatatatgatatttatttttttaaaaataaatttggaaaatgttttaaacaa

SEQ ID NO: 638395 - DNA, 545 bp, Homo sapiens
ctgtaatgaacataaatgtgattatgagctacttgagagcagggcccaagtcttcctcatttctggttcattaatgtctgttattcagaaggtctcagtgaagaccaattggcatgttgggggcctcagcagatttttgtagagaatctasttggcaggcctcctgaatgcaccttgtctctgaaaaagagagcagatttctcacacatgatttcctgtcctggtatccaaatgggagagccctgcagctgcacagcctgagagcagatgttgccctgtcaggtgtctttgattctactcaagaaaccacaggaaactggttgcagacaaatcatcagcactgtagcaacaggggaatggcagcctatatggtgtgctcacagaggaaatatggcactcggccacagaggggaaaatgacttgtctagtctagaagtgcagataagtggggcctggctgttgtctccttctattaggcgcagaacttttctattctgttttgttgtcaagttgactattcagacatctgtgtcatgtgttcaatc

SEQ ID NO: 638396 - DNA, 600 bp, Homo sapiens
aaccatttacgatacccagcacctaaattagcacatataagaagtatgtaccataaaatatttttagattttaattatttgaactaaactgataccttggagcactagggatagaggaaaaaaaggcagctcgtgagacatgaactaataattattcagtaccttagtgcaaggacaagtattttcatattatgtcattttattttatyttatagcaattcaatatgttaactaattttattctcattttactgtgaagagggttggaatgtctctaagttgcccaagatcacatatctagtttattacaaaactagaattcaaactcatatttgtcagacaacaaagcccatgcttttttttctgcctcaaaattactaaattgtttcctttggtataatagctgaaatttagttccatcatggtaagtgtatttttactgtaatttcaatctgattatgtatacaggttgtgtgaatatgtatgaatatgtatataatttaaaagttatgccaatatttctagtaatattgttttctaataaaaaaattaaaaaagggaattgcatatacctttatagctttggggaatgctttttgt

SEQ ID NO: 638397 - DNA, 600 bp, Homo sapiens
aaccatttacgatacccagcacctaaattagcacatataagaagtatgtaccataaaatatttttagattttaattatttgaactaaactgataccttggagcactagggatagaggaaaaaaaggcagctcgtgagacatgaactaataattattcagtaccttagtgcaaggacaagtattttcatattatgtcattttattttatcttatagcaattcaatatgttaactaattttattctcattttactgtgaagagggttggaatgtctcyaagttgcccaagatcacatatctagtttattacaaaactagaattcaaactcatatttgtcagacaacaaagcccatgcttttttttctgcctcaaaattactaaattgtttcctttggtataatagctgaaatttagttccatcatggtaagtgtatttttactgtaatttcaatctgattatgtatacaggttgtgtgaatatgtatgaatatgtatataatttaaaagttatgccaatatttctagtaatattgttttctaataaaaaaattaaaaaagggaattgcatatacctttatagctttggggaatgctttttgt

SEQ ID NO: 638398 - DNA, 615 bp, Homo sapiens
ctttgcagccatgtagtatggaaggaaacaagatatttccatgtcctcagtgctgaacaacttttagtagtcgagagattccaagcctacccatgcagcttctatagtgatatacaacagagatggcagagggcagggtctaagacagaggctggatggaggacagacctaggatgcaagaagcagaattgaagcccaaataggaatcaagatagagccaagtcatcgatctctagccatgccaaaagaagatgcttggaataccattagcagccacaatcttcacttgacaatatcagtatgattcttggaaatcaagacaagaaacacttccatggatacctgcaaaaccccacgggtaacagacacacacatgtagcccaggtgtttactcccattataaagacatgtaaacttccccacactccmagatactatccggggtggattagatgggaaagacaaacttttgagaggagagaaatataacttgattaaatatttatccaaaataatattgctttaaatatatcactaggtacctttaagtttttaagttttggggaatcaaagataactttgaggatttagtaaaagttatgaacattctttccc

SEQ ID NO: 638399 - DNA, 442 bp, Homo sapiens
atctctatagggcttagtgaataactgaagcttagtcattaactcctggaagatctatgaatcccgggttaagaaatcctaggttgtggaaatggcactagacttgagttttgactcaatcatttgccacctatgagaacttgaataaatcaactcttctctctgaatctcaggtttctcactgtttgtgaaatatctattacatggaggagtgggatagggatggctctatcataaaaaacatatcttctttacactcttctttgcaaaattttataatatatgaatacacttacagtcctacatggtcctatatagttattttggatctgtcatygatcacttttaattttcctcttaagagtgtcactctttttctctatcccaccagcatcagcgtacctttctggcagtcctcatcctcacatatgagaaactgcag

SEQ ID NO: 638400 - DNA, 559 bp, Homo sapiens
ttagtccttcctatgtatgaagcacattattctcaacccactgcttcttcctataactctcttgcttaaaatctaccaagactctcaattacataagagataatatctaaaatctaacagtcaaagacttaaaaaaaatcaattgatctcaccctgcttaatcaatcttacatcctcagctctagtagtctaaattttactactaagaggaagctttcataggaggaaaaatgatgtgatttgaagtcgttggctcagtcacttactagctattttcatcctgggtaaarcacttatcctatcacggccttagttttctcaacacttaaataaagtatttgttctggacaatttctaagatccctttcagttctgacactgtctgactccatcaccctgtgccccttaaatgctaaattcattcctactctgaatccttgatctttctgtgttctctttctgtagcatcctttctgccagactaagcattttctgttctccaaggttcaacttatgtacttgctcatccatgaaatcttcagagctccaaagtttgtga

SEQ ID NO: 638401 - DNA, 592 bp, Homo sapiens
taaatatatatacctactatctacccagaaaaattaaaaattaagaaaagatagaatgcatggtgaggagcaaaaaacaacaacaaaccccccaaaaataaacactgagggtgtatgttatatatcaaaccattaaatgtttttctggtttggaggagtgggactggagatgctgagataagggaaaggatggattagatcctgtatgagaaagggtaacaaaacagcatttacagggtaataaaagaagagaaagaaaacattctgtgactgactgatgaagaaggtgaacaagtgaggcaagggatatgtctatggaataacagtaattgaaatgctatatgaaccaatataatttttgcatcctgctggtttataatgtaatttgaaacaacaatgatgctgaagaggagttgctggaatcacctgctaatccaaacagactacacagtgaggatatctctggatgagatggttgccctcagtaattataggagtctgaartgtgtctgacaggcagaagagaaatagcaatataaacaccagcgggagtcaagaaatacaactttatcacagcttacggcattcctga

SEQ ID NO: 638402 - DNA, 389 bp, Homo sapiens
aagaaaacatactgcagctcccgatttggtaaaaagccagtggcttgctgcaatccagagtcactgtggggagcgctggccgggcaagtggggtgggaggraggggctgagaaagggaggaagcgctgtgcttgccagactggccctgcctttgggcgctcttggtgccacgaaggagtccccagcgtgggagcgcgggacctccccgcgctgacgtgaccccgagactgcatttggcccccaccgctacagccacccgagggtagaagacctccgaggccgacttcccgggaaggggaggcccgctcggagcgcggcagggaacttcctcccagccctttgacaacagcatgccttgccgggggcagagggccagcaaagaaatctgg

SEQ ID NO: 638403 - DNA, 389 bp, Homo sapiens
aagaaaacatactgcagctcccgatttggtaaaaagccagtggcttgctgcaatccagagtcactgtggggagcgctggccgggcaagtggggtgggaggaaggggctgagaaagggaggaagcgctgtgcttgccagactggccctgcckttgggcgctcttggtgccacgaaggagtccccagcgtgggagcgcgggacctccccgcgctgacgtgaccccgagactgcatttggcccccaccgctacagccacccgagggtagaagacctccgaggccgacttcccgggaaggggaggcccgctcggagcgcggcagggaacttcctcccagccctttgacaacagcatgccttgccgggggcagagggccagcaaagaaatctgg

SEQ ID NO: 638404 - DNA, 596 bp, Homo sapiens
tgtgattctctcagttttgttcttcttgcttaagacgttttgagtcttctggttcatttttgattccataaaatttttaaattgctttttctaattctgtgmaaaattgttggtattttgataaaaaatgcattgaatctgtagattgctttgagcagtatagtcatgttaacaatattaattcttccagtccgtgagaatgagattttttatttgtgttatctacaatttatttcatcattgttttgtagttttccttgtagacatctttcaccttctgtgatggttaatattgtgtcaagctgattggattgaaggagggaaattattgtttttggatgtatctgggtgttgccagaagagattaacatttgagtcagtgaactgagagaggaagactcaccctcaagaagacccactcccattatgtgtgagcaccatccaatcaactatcagcatggctagagaaagcaggcagaagaaggtgaaagaagctgacttgctgagtcttcccgcctttctatttctcctgtgagggatgcttcctgctcttgaacatcagactccaagttctttggtttttggactcttgaacc

SEQ ID NO: 638405 - DNA, 633 bp, Homo sapiens
ggtatttggaaaccacactggaaacactacagatgttcatatctactatgctatcattacttctagctcttttaagtggacaaaactaggaaatattcttaaagataaaatatatcatcatcatgattcattctgaacttattcaaattttacttaacattagtcatagaagaagtttggtttttatcccagctcccccagttgcctatagaacaagtgatataaactgtaactaccctaagccctcaattttgtacctgaaaaattagaataataaaaccaactactcacttgaacactcataagaagatagttggtctatcctgaccatatggaaaataatgaagtatcataaaccacagatatatagaactaaccatttggttttattataagaaaacgtagaaattctgaaagccacaaaattatcaattccaagctaggacattccagaagttaatagctaaatacagctagaaagaactactagaaactacaggatgactgatcacttttataacaagcttctaagatagagcactgagctccctatttctctgttccgccttccrtccactcatgtaaacactggcttcccccaaaaaacatcaattccattgttaggccttcttc

SEQ ID NO: 638406 - DNA, 567 bp, Homo sapiens
gataagttctgtacacagcaagcaaatacacaatccccatttttagtctcttaaaccttatgaccactttctctaagaccgtttttgaaattcaatttagtacttctagtggaagaacaaaggtgcagtttgcatattctgggttycctatttatctacagccacattttttttttctttgcaaacttttcaagataaaaattttaaaccccagagctctggaagatgcttgctctcccttcagccaaaacaggcatccggtttctacaataaatgagatcatagcatccccactcatactgctgtagctaggaacctgtcagcatttttattataaaacccttttctttcctctggcttgagagaccaaccatagcaatttgttggggaaatagctacagcaaagggcaatgcacaagtacagagagaaaatgtctcattttacaaaattcaaaaaaggtgtatttaggaattaggcaggcctgcagaatcccaaggagcatttcttttggatggtcatctggccttttaaataaagaaaataaagtttactaatatttaaaacaa

SEQ ID NO: 638407 - DNA, 556 bp, Homo sapiens
ctacaataaatgagatcatagcatccccactcatactgctgtagctaggaacctgtcagcatttttattataaaacccttttctttcctctggcttgagagaccaaccatagcaatttgttggggaaatagctacagcaaagggcaatgcacaagtacagagagaaaatgtctcattttacaaaattcaaaaaaggtgtatttaggaattaggcaggcctgcagaatcccaaggagcatttcttttggatggtcatctggccttttaaataaagaaaataaagtttactaatatttaaaacaaaattttctcaggcagcagatgttaggaaaaaagttgtctagttgaataccatcaggcaccaatacatctggtaacaaaagctataataacacacacattactgaatctgtgctcacatggaarctgctgtgagggaagggagcattctctatcagactctgaagtgagataatggggatgggaaaggttatgccaactacttcaaataggagaaaataggatatattaataatatgctagagatgataaatga

SEQ ID NO: 638408 - DNA, 571 bp, Homo sapiens
atgccattcttgatgttatgtttgaataagatctgattttgtagaaatttttatttccttgatattttggttagctatacttgatcagttattttgtcacagaataattttattctgcaacttcaacatcttgtagaaagcgttctcaaaatgtctcaatacacatcaatttttacatgcccatgaaactgaagactgcttttgttgcttgctatttttgttcattttttttttgcacttagcattcatttatgtattctgaggttggctgaactggacactcctatttgatttcagtgtactccaaattatcttgagtaattattttctcttgatgctataatttataaaataaatattattgttttatactgtacaaataatgtctttaatgaacactgtaaggtttcacccaagttcttcttgctgggttaggaattaatagcaaagaaagtaaaggaagaaaagtagcatttattaactacctattatatataagagctaaccctaagtgtttaacaaagcatatawctctaatactcatattggcatattaggtagttattagccc

SEQ ID NO: 638409 - DNA, 573 bp, Homo sapiens
tgcatgataggtcctgtactcccattctcaccctggatacttcttgtgggacatgtgtccttaagccaataccctactctctcagacttccaaaatgttacaattgaaagggaatttggaagtgtttgagctcccccaacccaggcayattttatttttctttttactgaaaagtaaactgagtccctgaaaatagaaaagatgtactcatagcagaactgattctgaaatcccagttttataattcctaatatttggcagcttccttcatgcccaacttgcagtgtcctcattgtcttctttctgtggctctacttaaagccccgaacagtgccttcatttgtctttgcagatgtatccagatcacaccttatttttcttctttatttctctaaaggttttctcaagtcatactcagctgtggtctctatgtttccccctttctgtcgaaatcgtcatccacaattttgttttcatcctatgaactctaatggaattaccaaatcccatgtttttctcaataattactctcctctgctgggccatataactgctttgttcatttccacaggc

SEQ ID NO: 638410 - DNA, 573 bp, Homo sapiens
tgcatgataggtcctgtactcccattctcaccctggatacttcttgtgggacatgtgtccttaagccaataccctactctctcagacttccaaaatgttacaattgaaagggaatttggaagtgtttgagctcccccaacccaggcacattttatttttctttttactgaaaagtaaactgagtccctgaaaatagaaaagatgtactcatagcagaactgattctgaaatcccagttttataattcctaatatttggcagcttccttcatgcccaacttgcagtgtcctcattgtcttctttctgtggctctacttaaagccccgaacagtgccttcatttgtctttgcagatgtatccagatcacaccttatttttcttctttatttctctaaaggttttctcaagtcatactcagctgtggtctctatgtttccccctttctgtcgaaatcgtcatccacaattttgttttcatcctatgaactctaatggaattaccaaatcccatgtttttctcaataattactctcctctgctgggccatatawctgctttgttcatttccacaggc

SEQ ID NO: 638411 - DNA, 587 bp, Homo sapiens
gcagtcttgcatgcttggatgacctccacttgatcatggtatccactattttatatattgtcgaaatttatttgctaattttaagggatttgtgggtccatattcatgagggatattgacctgtagttttcttcttttgtcttttgtctgaagtattttaataatattagaaaggaataggaatgtgttctctcctcttctrttttctgtaaaagattgtatcaaattgatcttaattatttttaaatgtttgtagagttctccagtaaaatcatctgagcctaaagatttctttttttgtttgggaatttttaaaataataaagtcaagtcttttaaaggtaatggagctatttatattatctatcacatattgggttgcttgtggtagtttgtgttttttgggtaattggtacattttatctaagttgtcaaatttatgtgtatagaactgtttgtagtactcacttcttgtcctctggatgtctccagggtctttagtaattatttcatttctgatatttgtaatttatactatttcttttctttatcagtcttgctagaggtttgttaattttattgatctta

SEQ ID NO: 638412 - DNA, 587 bp, Homo sapiens
gcagtcttgcatgcttggatgacctccacttgatcatggtatccactattttatatattgtcgaaatttatttgctaattttaagggatttgtgggtccatattcatgagggatattgacctgtagttttcttcttttgtcttttgtctgaagtattttaataatattagaaaggaataggaatgtgttctctcctcttctgttttctgtaaaagattgtatcaaattgatcttaattatttttaaatgtttgtagagttctccagtaaaatcatctgagcctaaagatttctttttttrtttgggaatttttaaaataataaagtcaagtcttttaaaggtaatggagctatttatattatctatcacatattgggttgcttgtggtagtttgtgttttttgggtaattggtacattttatctaagttgtcaaatttatgtgtatagaactgtttgtagtactcacttcttgtcctctggatgtctccagggtctttagtaattatttcatttctgatatttgtaatttatactatttcttttctttatcagtcttgctagaggtttgttaattttattgatctta

SEQ ID NO: 638413 - DNA, 600 bp, Homo sapiens
ttatttctctgcttttttattttgccttccagtgggttacttgaacaattttgcaacccgtttatttcctagagtatgtttgggtccacctttttgtttaattcctcctcttaggtgttgggctaagtattaayatcacattatatatgacagtgtactgtgttgtctttctaccagtttgagtgaagcatagaaaccttattttcatttatattcccttagtcttccctatatattttttaaaaaatatttcatctacattagactgttgctatttaagtttctaccatcaaatataatgtaggaaatccaagagaagaaggaaaatctactgtatttgcccagaaggtttactatggctttttcttatcattattttttgatgttcgaagcattcttctttccttattttcttgctgtttagaaatctttctctagaagccattttatcataggtcctctggtgacaaattctcttagttttcctttatctgagaatgtcttaaattccttttaattcctgaagaatattttcactgagtatagtattcttggttgacagttcttttctttcagcagtcgaaaatattgtatcacttc

SEQ ID NO: 638414 - DNA, 624 bp, Homo sapiens
atcgtaagtcctcactgatactcacattccatctcttgagtttaatcagcttccatttacctatcmatttgcttcttagtcttggtattgctgtttccttcatctctcaccctcatttggatccatatttcaatgatcacattctctgcccaacccctctgattgatgctctggtttgaacataacacaattctggcgttaccatcagcatcttctcctagacacagtttctcattttttctatctggggtcacataaacacaaagtgtcccctgacatgccactgctctctacttaccccaacttctcaattggctcctccctcaggagaagaaagaggatacacaaacattcagatgagtgccaggtatacagtagtcattccacttattcagaataactttttttaaatgccattaattttatagtggaattcaatgtaagagtattaactgatctataaaatgtttcacatatattgtgtgagatatatacctctataatttacctccttcaaaattccttaaggaatttaagaaactgtgtttgttggggtgaggggctacatcagcaaaagccaggggagatttttactttattccataatattctaccatagatatt

SEQ ID NO: 638415 - DNA, 624 bp, Homo sapiens
atcgtaagtcctcactgatactcacattccatctcttgagtttaatcagcttccatttacctatccatttgcttcttagtcttggtattgctgtttccttcatctctcaccctcatttggatccatatttcaatgatcacattctctgcccaacccctctgattgatgctctggtttgaacataacacaattctggcgttaccatcagcatcttctcctagacacagtttctcattttttctatctggggtcacataaacacaaagtgtcccctgacatgccactgctctctacttaccccaacttctcaattggctcctccctcaggagaagaaagaggatacacaaacattcagatgagtgccaggtatacagtagtcattccacttattcagaataactttttttaaatgccattaattttatagtggaattcaatgtaagagtattaactgatctataaaatgtttcacatatattgtgtgagatatatacctctataatttacctccttcaaaattycttaaggaatttaagaaactgtgtttgttggggtgaggggctacatcagcaaaagccaggggagatttttactttattccataatattctaccatagatatt

SEQ ID NO: 638416 - DNA, 634 bp, Homo sapiens
ctatgactctacttgtcaaataagtacttattcttccatttcagatgtttccacttgtataaagacttcaatgactgccctctatagagttctgcagttgttctagtcaatattttgacgcacctaacaaygatagttaacatttacatagtgctcattttctgccaagcactgttctaagcactttataataaaaaatggctaattgaatcctcacaacagtcctatcaagaagacactgttagtatctccattctaaagagaaagaaactgagtttggaagttaaagcaggtaagtcttgaagaatgagttcatagattttaatcaggtaaagaaagatattctacacaaatagaagagcatatatatggtatatatatgcatatatggcatgaggttatgaagcagaatagtatgggtattcattaatttattcaaaaattatattttgaacattggctacattgtagacactgtgcttagtttggcattctgggagtaacgggtagcaaaggaaagagaaggtgctacaagcagcttattgttactggtaagtaaagatgaaaggggaaatgtaggcaggttcagttcatggaggatgaatgtgtgtaatgctaagcagcttagatttga

SEQ ID NO: 638417 - DNA, 615 bp, Homo sapiens
tttcattgtatttaatcattcactttttaaaatccctacaaagtagacactacgtttattgtttagggtaattagtaggggaggaaagatrgttaaatagaaatagcccatgctttaagatgtttatagtcgttatagtcttgcttatagtcaagatgcttatagtatgggaaataaaatattttcataaataatcataaacaaagtagaaatgaaaagtatcaatggcttacttttggggacacttgagattcaaaaatagatctgttggattccaaagaccatgtgcatctcactatgtaaaacattggctttggaatttacacacccggatttgaatctcagcttcagcattacctggtatgttggataacattgggaaagtcattaaaccattttcagtctcagttttcttatctttaaaagaggggtaatagtacccacctctcagagtttgagtgtattttaagtataaccatattttaacatatttagcacaaagtgtaataatacagtagatgctcattagatattaatcattttatatatgcaagttaactgtatcttatattagaatactggtattatggtggtcataaaactatattgttttaa

SEQ ID NO: 638418 - DNA, 602 bp, Homo sapiens
cccttcatcctcaccaatacttcagtgatttttgtctatttgatagatgcaacatggcatcctccttttttttttcagtcattcaatctgtcttgtgcttcggctaaaacacataaagacaggatccactagcttaagcccagtatcaattgttggtgaagaaacattttctgaggcagacataagacctcctcttggaactcctagtaaatagctggagaacactttgaaggaggcttgttagtgagagcaaactcagtggaggttcatgtcatggtaatttgaggtatataaatattctaatatgtacataattaggttatagaaattaaatatcagatgtctgatttgtaataggagcttagttaatattgctttrttttatttccctattttaagaagtactcaacataatcactaagtacacttttctttgtttatgtgtgtaaatattcttagatcagtgatatcaagctttgacatgcatcatgatcccttgtagcatttgttaaggcacaagctctgactgagtttctgattcggtgagtctggtgtggggcctgggagtttgcatttcttacaagctcccaggttatttgctc

SEQ ID NO: 638419 - DNA, 549 bp, Homo sapiens
cctccagggactacccatcttcaagtacctgtattctctctggatcatttctatctctacctcttcctcacttttctcaaatggcttccttgtttatccccatccttctcacctgtctgctacctcacactttttctctttcttgctctatttttatttctcctttcagactctaggtaacttcttcccataccagttgtcttatatctaggtctctagacagtataaattaaatttggaagtagaagcaaccaagtaaattaagcagtgtgtatgctcattttaagttaaatctcttgcatgttacgtgtatgacataaaattgtgcatttaaaagatacatataacaggttaaattatttgttgttttgcattgcatatgtttaaaagactgttttggttatatcatttaatgtattacttatgtgaacatcttccctgttacttgaagtgcaaaatgaatggattgatatgyaaatgataagcaaatccagtgaatatgcatattaacattgttttgaagaacacttgcattttaagatagaactt

SEQ ID NO: 638420 - DNA, 572 bp, Homo sapiens
gtaaagtatgacattatctcttgcattaacatgaaaartagaaaatatagccaatgaacttgtctatttagttaagaagatttccaggaagaatactgaaattgtccagtttgttttggagtttgggagttttatgggttttttagtgatgtacaataaataccaatagctatgagctaatgaaggaactgtccagttttcaagcacaatctagaaaaatatgaccaatctaggacttgctaggttggagaagaaaaccatttcttcttcatagctttgccagaccagcagaagattctcaaagtaagaaacggctttagctcaagaaacaattccaaggtgctgccaataaagcatggcctaaggataaatatttgattaagtctcagaaaaatttgaggccatgcctgatacactcttttgactgggaaaaatagcttgtaagattctcaatgatattgccccacagacctcagattctaatcccaaggtagaagggggcctatttcaaaaatgtatgggtgtgccttctgtctcataaagtacattaagatcttaatatacaggaagct

SEQ ID NO: 638421 - DNA, 594 bp, Homo sapiens
atgcatcatgatcccttgtagcatttgttaaggcacaagctctgactgagtttctgattcggtgagtctggtgtggggcctgggagtttgcatttcttacaagctcccaggttatttgctcttgatgctggtctggcaaaccacactttgagaacctaatccatatgcatcagcaagagtggtgtgtcactggagattgcggaatgagtgttttcagaattacattattattccacttatcaaggcactgatattgctctctatgtaatattggggctcccttgaatgcccttatgctttatttgggtgaaaattcctatagcaatgggataatgttctaccttccttctttactcagcatatttccctgatgattcataaaatcataaaatcacacaatggttgaatttcattgcctctttttgtgtgtctgactctgattacaaatgagctaaaataagcaggttgagatttagggcagtttttactaatrgggagctacttcgtactaggagccatctaggagaatgggcaggggttgccaggtattcttattttgattttaggttatccaccttgccctcctttccagca

SEQ ID NO: 638422 - DNA, 572 bp, Homo sapiens
gtaaagtatgacattatctcttgcattaacatgaaaagtagaaaatatagccaatgaacttgtctatttagttaagaagatttccaggaagaatactgaaattgtccagtttgttttggagtttgggagttttatgggttttttagtgatgtacaataaataccaatagctatgagctaatgaaggaactgtccagttttcaagcacaatctagaaaaatatgaccaatctaggacttgctaggttggagaagaaaaccatttcttcttcatagctttgccagaccagcagaagattctcaaagtaagaaayggctttagctcaagaaacaattccaaggtgctgccaataaagcatggcctaaggataaatatttgattaagtctcagaaaaatttgaggccatgcctgatacactcttttgactgggaaaaatagcttgtaagattctcaatgatattgccccacagacctcagattctaatcccaaggtagaagggggcctatttcaaaaatgtatgggtgtgccttctgtctcataaagtacattaagatcttaatatacaggaagct

SEQ ID NO: 638423 - DNA, 603 bp, Homo sapiens
caacatcaagaaaacgtgatgcaagtctgaaccttacttatggtttaatccatgaagggcaaataggtgtaaactcacatgctaacaccagcctattgatacttgcctctgtagtgttgtgttcagaaggattctgaaggaaaacctgcaatattaggaaagaatgtcaccggcatgggtgtgggaagtgycagaatttgtggtatgcgtttgccatctttgatttagagagtaataaatagtcctgatctttgatgatctcagataccagaaaaaaagttcttcactagaatgctgaagtataagacagtatatacttaaggtaactacaaaataaatgaaatataacctggttcattgtaccaaacatatgtttattgggacaaatcaacttcaagagtaaaataaaatgaaaatactagaagacaaatgggttaataaggatggaataaaaaagggatttggcagatatctggtagcttttaaggagaacagtttaatcttcaaaattaacaacactagagaaaatgtctttccagaaaaaaataaaataaaaaagttgccatagtaactagtgctagaacctccacacagaccaaattt

SEQ ID NO: 638424 - DNA, 633 bp, Homo sapiens
aggtcttaggaattggagaaaatcagtccagcaagataatgctttcctctgccacatgacattagcaacaatccttaactttactgagggcaaacaagaccattgaaaacccctagtcttccttcttctcacagcaaaccattccacaattagcccaagyctttgttcagaaattgaatcatttgtactcaagggaaattccaatataagccctctgaaatttggttatctgaggatttttatcagacagggaagtaaagcaagctgactgaataccaataaagaatttgatccgagtgggagttagatgatctttctcattttaagatgtcttaaggaatcagtaagagaacaattgaaatgtggtatgtgagctctggaggcctgcaattgtccctaacagccatggaggatggggaaatcccattgacctagtttgctacagactcataatactggggattaactaagccattgcttatatgttgacaggatgaggtgaattgggttccagcctagttcccacaaggcattaaggacagaaatgtcttcaacaaccatccacaaacaatggaataaaatccaaacttcttagactaactttcagcatcaaatcactggccctcttacaat

SEQ ID NO: 638425 - DNA, 566 bp, Homo sapiens
catacaaaacctgtgaagtagcagatgatgctaccaccactaccaatcatactacttttggtaacagctagactcactgttmagcattaagtttaccaaaggcaaaaacatccactgaaaacccctgtcttctattttcatgaagccaactatttcccagttaacccaaatctttgttcagaagttgtattatttgtactcacggggaattccagtgagagccattttgaaattcagtcacttatgggcatctgcatgatttatacattcctgtttccatgtctgtccctgcccaaaatgccttcttcattcctcattatcgaggcaagttcaaaccgtgtattaaagcctactataaatcctacccacccatgaattgtggactgctctctgtaccccatagtgattcttttattgtgaaatgccacttactgtgacactcatcacatatttctattatatattggtgcaaaaatcttctctcattgagaagacttagctctgtgagggcagttgctaaactgtctactttatttttaaacctctctaagtatctacctagcaca

SEQ ID NO: 638426 - DNA, 691 bp, Homo sapiens
ttaagcgcttagcatattacttgccaatagctctgggctggagcatccgtttcctctgttcacatactttagaaggtctcactccgatctttctctgataagaactcctcctcatcaggtgaggagcttgtaggatcaaggggatgtgcccatctkgtgcctaagcaccacctcatcaagagttcgaccctgcatcctgcccaaattgtcctgtttctagaccctagatatgtgcctaattcattttttaatggtggaccatctctgcgggtgtgtgtactcctaagtatcacaatgggtttcaaatggtgtggcttaaaagcatgtgctaaagtgtcaatagctctaaatgtgagtcatgagacagtgcagaagaaatcttcatggggagggaagaaaacgaggtggttcttagcccaggagctcaggtcccttcttcctatgctacctccttatggctaggaattctgaagagtctgaaagtttactcagttgagtctcactttgaacgtggatttgcaggttcattttgaaaaaatatttgttaaagtaggaggattaaatatattcagtgacggtttgttagcttgttttagaactttaaaatatttggtatatgacttccatttgaacttttgtttcaagccacataaatgttatgaatgaatctccctgagacatagtaactgtg

SEQ ID NO: 638427 - DNA, 691 bp, Homo sapiens
ttaagcgcttagcatattacttgccaatagctctgggctggagcatccgtttcctctgttcacatactttagaaggtctcactccgatctttctctgataagaactcctcctcatcaggtgaggagcttgtaggatcaaggggatgtgcccatctggtgcctaagcaccacctcatcaagagttsgaccctgcatcctgcccaaattgtcctgtttctagaccctagatatgtgcctaattcattttttaatggtggaccatctctgcgggtgtgtgtactcctaagtatcacaatgggtttcaaatggtgtggcttaaaagcatgtgctaaagtgtcaatagctctaaatgtgagtcatgagacagtgcagaagaaatcttcatggggagggaagaaaacgaggtggttcttagcccaggagctcaggtcccttcttcctatgctacctccttatggctaggaattctgaagagtctgaaagtttactcagttgagtctcactttgaacgtggatttgcaggttcattttgaaaaaatatttgttaaagtaggaggattaaatatattcagtgacggtttgttagcttgttttagaactttaaaatatttggtatatgacttccatttgaacttttgtttcaagccacataaatgttatgaatgaatctccctgagacatagtaactgtg

SEQ ID NO: 638428 - DNA, 691 bp, Homo sapiens
ttaagcgcttagcatattacttgccaatagctctgggctggagcatccgtttcctctgttcacatactttagaaggtctcactccgatctttctctgataagaactcctcctcatcaggtgaggagcttgtaggatcaaggggatgtgcccatctggtgcctaagcaccacctcatcaagagttcgaccctgcatcctgcccaaattgtcctgtttctagaycctagatatgtgcctaattcattttttaatggtggaccatctctgcgggtgtgtgtactcctaagtatcacaatgggtttcaaatggtgtggcttaaaagcatgtgctaaagtgtcaatagctctaaatgtgagtcatgagacagtgcagaagaaatcttcatggggagggaagaaaacgaggtggttcttagcccaggagctcaggtcccttcttcctatgctacctccttatggctaggaattctgaagagtctgaaagtttactcagttgagtctcactttgaacgtggatttgcaggttcattttgaaaaaatatttgttaaagtaggaggattaaatatattcagtgacggtttgttagcttgttttagaactttaaaatatttggtatatgacttccatttgaacttttgtttcaagccacataaatgttatgaatgaatctccctgagacatagtaactgtg

SEQ ID NO: 638429 - DNA, 691 bp, Homo sapiens
ttaagcgcttagcatattacttgccaatagctctgggctggagcatccgtttcctctgttcacatactttagaaggtctcactccgatctttctctgataagaactcctcctcatcaggtgaggagcttgtaggatcaaggggatgtgcccatctggtgcctaagcaccacctcatcaagagttcgaccctgcatcctgcccaaattgtcctgtttctagaccctagatatgtgcctaattcattttttaatggtggaccatctctgcgggtgtgtgtactcctaagtatcacaatgggtttcaaatggtgtggcttaaaagcatgtgctaaagtgtcaatagctctaaatgtgagtcatgagmcagtgcagaagaaatcttcatggggagggaagaaaacgaggtggttcttagcccaggagctcaggtcccttcttcctatgctacctccttatggctaggaattctgaagagtctgaaagtttactcagttgagtctcactttgaacgtggatttgcaggttcattttgaaaaaatatttgttaaagtaggaggattaaatatattcagtgacggtttgttagcttgttttagaactttaaaatatttggtatatgacttccatttgaacttttgtttcaagccacataaatgttatgaatgaatctccctgagacatagtaactgtg

SEQ ID NO: 638430 - DNA, 580 bp, Homo sapiens
catctagcaattactggggcccaagggacctcaccgtgcaacaaatgttggtaacatccaaaaacacgtaacatttttcttccataacttctcttcttcccgccacctctgctatctgcttctgcttaaggacagtttggaagcaccaatattattggtttatataaaccattatattacataaatgtcaattttaaataaagctwccccataatctattccaattcccctagaaatggcagtgagcaaaagagaagcagggagcatcttcaccactcagagatacatttacataaagaattgtctgtgtgtgctacaaggtaaagctatgcattagctgtttcctttaagcatcaccttgggaaaatatattctgaaccagatttttccaatgcttaaacttctctctgggaagacacaggcccttctggaggctgcaataactgagtaagaccactggggtaccatttggtaaactgcagcttcagtgcactcaatagtaccttagtggcctgaaagagttaatgcagcatctagtggtacatgacttaattccttgggaattatttccaggctgaga

SEQ ID NO: 638431 - DNA, 565 bp, Homo sapiens
tattccaaacaatttatttcttatcagccaacacagggagctcacagcttgctatatcaaaaagagatatttagattagctgtgcgttcttgggtaagttgcttaacttgtctcattttcaagggcttcatctaaaacatagaattctggaaaatgtcaaggagaataataacagtaataataacgcaagtgaaaaggggaagaaaggccaggcatggtggatcactcctgtaatcccagcactttgggaggccaaggcaggtggatcacttgaggtcaggcrttcgagaccagcctggctaacatggtgaaaccccgtctctactaaaaatacaaaaattagccaggtatggtggcggacacctgtaatcctcgttactcaggaggctgaggcagaagaatcgcttgaacctgggaggtggagatttcagtgagctgagatcgccaccactgtactccagcctgggcgacaaaagtgaaactccatctcaaaaaaaaaggagaaggaaataagatttttcttctacttttattgaggtccagttgctcctctttttagatctta

SEQ ID NO: 638432 - DNA, 558 bp, Homo sapiens
taaatatataaatgtgtgtattatgtacacrgtgatgaatatatgtaaataggcaggaagacacacatatgcccatctatctgtatggcatttcacttcttcattgtcaacagctattgcgagttacttggagagtgattcagaagtgatcaataggaataatattaaaataggcatttttctcttaagaaaaaagcattcttatgtcattctctcataatcctattaatcggggaggaaaggaaccataacaggccttttcaaaaaaccagttggaatatcttagtcttttcttcctctaggtcacttgttaagcttgaagaataacaggatcttgctggaaagaaaatgagaggaagagtgtttttcaatttaacctctgacatctctaattgttctcatcctggttcacaggctcctctttttccacttactgctaaaacatcgctcttcccggggctggatacactttatctattctctttgggtgatgtaattcactcatattatgcataaaatgatgctaatgacacacaaatctatatgtccaccttgatg

SEQ ID NO: 638433 - DNA, 607 bp, Homo sapiens
ttttcaatttaacctctgacatctctaattgttctcatcctggttcacaggctcctctttttccacttactgctaaaacatcgctcttcccggggctggatacactttatctattctctttgggtgatgtaattcactcatattatgcataaaatgatgctaatgacacacaaatctatatgtccaccttgatggcatatatgtactccatactttgcatgtacaacattgaacttatatattttcatcaaaacctgctctatttagagtatatctcagcttcctgggttatccttttatgttttcaaaaaccccatgcaataaaccaggaagccagtggaattgagtcctaccatcttagtgctgacacatgtacatctccactgtcatttttccaaaaacatatttctgccaaacggaagggaatattccaaaatactcttaagtattctagtttaggaaaaccctgaaatacctaatttaaattcacaaattgcataagttagttgttggttatttaggtttattaccaaccactgcctattcgtcctctaccaacccaggcrtggtactgggctctgaagttcaggagttgagaagagacagc

SEQ ID NO: 638434 - DNA, 529 bp, Homo sapiens
tactggctctgtgaggtcaggcaaaccacttagttccttaaagcttcagttttcatacctgcaaaatggagattaaaatacccatctcataggataaatgtgtgtagcacagtacctggtgcatagtaggtattcatgaaatgtggctcccgctataagcaatgaaaaccagcaccaccttaacattgacccttttaggatacaacgttccaaggaaaagtttaattttgcactggttagaaggaatttcaaatcattaccaggggaaaagtgtaaaaactgcaagataactcaataatattgagttattctcaatagatacaygaaataatattctacttggaaattcaattaaataagctccacaaatgtttattgaatgcccactattcactaggtattgcattgggttcaggagatttaaagattagttaagacagggatcttgtttccatggggcttacaatctcatgagggagatagactcacaaacacaaaaatcccttaaaggagtttcaaagaaggggag

SEQ ID NO: 638435 - DNA, 433 bp, Homo sapiens
aaatgtgtgtagcacagtacctggtgcatagtaggtattcatgaaatgtggctcccgctataagcaatgaaaaccagcaccaccttaacattgacccttttaggatacaacgttccaaggaaaagtttaattttgcactggttagaaggaatttcaaatcattaccaggggaaaagtgtaaaaactgcaagataactcaataatattgagttattctcaatagatacatgaaataatattctacttggaaattcaattaaataagctccacaaatgtttattgaatgcccactattcactaggtattgcattgggttcaggagatttaaasattagttaagacagggatcttgtttccatggggcttacaatctcatgagggagatagactcacaaacacaaaaatcccttaaaggagtttcaaagaagggga

SEQ ID NO: 638436 - DNA, 433 bp, Homo sapiens
aaatgtgtgtagcacagtacctggtgcatagtaggtattcatgaaatgtggctcccgctataagcaatgaaaaccagcaccaccttaacattgacccttttaggatacaacgttccaaggaaaagtttaattttgcactggttagaaggaatttcaaatcattaccaggggaaaagtgtaaaaactgcaagataactcaataatattgagttattctcaatagatacatgaaataatattctacttggaaattcaattaaataagctccacaaatgtttattgaatgcccactattcactaggtattgcattgggttcaggagatttaaagattagttaagacagggatcttgtttccatggggcttacaatctcatgagggagayagactcacaaacacaaaaatcccttaaaggagtttcaaagaagggga

SEQ ID NO: 638437 - DNA, 433 bp, Homo sapiens
aaatgtgtgtagcacagtacctggtgcatagtaggtattcatgaaatgtggctcccgctataagcaatgaaaaccagcaccaccttaacattgacccttttaggatacaacgttccaaggaaaagtttaattttgcactggttagaaggaatttcaaatcattaccaggggaaaagtgtaaaaactgcaagataactcaataatattgagttattctcaatagatacatgaaataatattctacttggaaattcaattaaataagctccacaaatgtttattgaatgcccactattcactaggtattgcattgggttcaggagatttaaagattagttaagacagggatcttgtttccatggggcttacaatctcatgagggagatagaytcacaaacacaaaaatcccttaaaggagtttcaaagaagggga

SEQ ID NO: 638438 - DNA, 610 bp, Homo sapiens
cttacaatctcatgagggagatagactcacaaacacaaaaatcccttaaaggagtttcaaagaaggggaggcaacagcttaacctgggaaggtcaggaaaagctttgaagaatggataatactgaaatataagctaggtttagttgctagagtgtaacaggttttctttatcatcaatctctgtcaactgcctcatcctctgccacaaccccaagatatttcctagagctactttcaaattttcatgtcttttggggagcagaaaagacatatgcttattgattatcatatttatagaagaaacaacaagatcattttctttactgttactcattgtctaccaatctattatggctaatgaatgagaagaaaaaataaggaagatgtttagagttattttccttaaagggagattccacatcctgtgcctgccttgggaagccttgaagaaatgactatgcttacccacaaacatctcttggcaccactgtcaggtttgagtggaccacagcmacaactcatgagatcatttatatttgtatattcgttgtgtataaacttggaatttatctaaaaatagcacattagaaggtgcaaaaccatttaattt

SEQ ID NO: 638439 - DNA, 511 bp, Homo sapiens
gtttattttacatgtcaacttggctgggctaagagatgcccagatagctgataaaacattgtttctgaatgtgtctgtgagggtgtttcggagtaaattagcatttgaatgagtagaatgagtgaaaaagatcgactctcaccaatgtggacaggtattatccaatcgattcagggtctcaataaaacaaaaaggcaaaggaagggtgaatttttgctctcccttcttgagctgggctatctatcttttcctgccctcagacatcagacctgcttgttcttggtcctttggactmtaggacttaaaacagcaccattcctacttttcagttcttaggcttttggagtgaaattgaatgataccattttccaacttgcagacagcaagtgatggaatttcttggcctccataatcatgtgagccaattctcataataaatctctttctctcctttttatatatctcctattggctatttctctggaaaaccctaatatactcttgttcatat

SEQ ID NO: 638440 - DNA, 511 bp, Homo sapiens
gtttattttacatgtcaacttggctgggctaagagatgcccagatagctgataaaacattgtttctgaatgtgtctgtgagggtgtttcggagtaaattagcatttgaatgagtagaatgagtgaaaaagatcgactctcaccaatgtggacaggtattatccaatcgattcagggtctcaataaaacaaaaaggcaaaggaagggtgaatttttgctctcccttcttgagctgggctatctatcttttcctgccctcagacatcagacctgcttgttcttggtcctttggactctaggacttaaaacagcaccattcctacttttcagttcttaggcttttggagtgaaattgaatgataccattttccaacttgcagacagcaagtgatggaatttcttggcctccataatcatgtgagccaattctcataataaatctctttctctcctttttatatatmtcctattggctatttctctggaaaaccctaatatactcttgttcatat

SEQ ID NO: 638441 - DNA, 584 bp, Homo sapiens
gcaagtgatggaatttcttggcctccataatcatgtgagccaattctcataataaatctctttctctcctttttatatatctcctattggctatttctctggaaaaccctaatatactcttgttcatatattttgttacttttwaactcatttgcatctcaggcaaaaaaaaaaatcttttcttattagcttctatcctccaatttctttccctatctccaagaaagatcactatcaaccctcttcttccttcattctttccagagatgtcaacccatgttggctggttctgctatcatctaaatcattctgctattactgtggtcagtggggaggcagaagtgataagcagcaaatatacatcatctagaacttcagttctgacccactggcaaagcgtcttcaccacaactgaaaaggttctgaggtagatctgggtttattatgaaagattgacacaattgaatattaatgtcttccactgaagaagaaaggtaatgatacctatgtcttatgttttctatccttggcataaggcctcaataatctcaattcaaatccaaaagttttcaggaggaaacctc

SEQ ID NO: 638442 - DNA, 551 bp, Homo sapiens
tacttaaaagggcaagacaaactctacagcattatggattgttaagcgctaggtaatagcaaatagaataaacagtataagaatgcattagatgataacactactgagggctgtaaaaatctctgaaggcttcatggtgagggggagatttaaactgggccttaactgatttgcaaaactaaaacaagaagacaagatatgggtgttccaagatagagtgggaagctttagcggtggtatttggggaaaattaattggtcagtattcctacaaacaaccattactacagaaaacagacaacagtatagacaaggaactgtctgaagggacaaaagtgaratgttcagcagggtaaataggggatggtgtgataatgataatttctttgattatagctatctgctaagccctgtgctaatttaattttttaaattaaattaaaactgcataattcagagataattattatcgctttttcttatcagaaaattataaacagttgaggtcttccaaggcaaagcccttgttgttacccatcatgctgagggtta

SEQ ID NO: 638443 - DNA, 545 bp, Homo sapiens
agttacctctcagacatcaggcagatgattaattgtactgtgaagcggtcaagtcctccagaatactgcattttgggaacactgattagtcatattcttataagaattgggagctgccatttttaacagtttgaataagaaagttgcattgccaattctgtacctatctgatatgttctctccccggaggagaagaaacaggccttattcatctccccctccccaaccctaaacattcttcccaagtcctgaatatgcctgaaaagacatgtcattatggtttttcctgtggagtctagagttcccccacctgcaccctactgaagtcattcataggaaaaggcaatgacagccagatcttgacagatcacccctagcacagtttcactgtgatcccacaggggctttactgaatatcagtcccagagcygtctgtcttttccatttgggctgtggcagactgagctgagtaggtcagggatatgttttacaggcattacgcaggccagtcttcagaggccagtgtgcatggtgggtccagccat

SEQ ID NO: 638444 - DNA, 545 bp, Homo sapiens
agttacctctcagacatcaggcagatgattaattgtactgtgaagcggtcaagtcctccagaatactgcattttgggaacactgattagtcatattcttataagaattgggagctgccatttttaacagtttgaataagaaagttgcattgccaattctgtacctatctgatatgttctctccccggaggagaagaaacaggccttattcatctccccctccccaaccctaaacattcttcccaagtcctgaatatgcctgaaaagacatgtcattatggtttttcctgtggagtctagagttcccccacctgcaccctactgaagtcattcataggaaaaggcaatgacagccagatcttgacagatcacccctagcacagtttcactgtgatcccacaggggctttactgaatatcagtcccagagctgtctgtcttttccatttgggctgyggcagactgagctgagtaggtcagggatatgttttacaggcattacgcaggccagtcttcagaggccagtgtgcatggtgggtccagccat

SEQ ID NO: 638445 - DNA, 615 bp, Homo sapiens
cctatattagatatatgttgcatatagtttttcacagtctgtggtttgtcttttcattcttatcagtgtcttttgaataccagaagtttttattattgatgaatgcaatttattattttttcctttatggttcatacttttattttcatatctaagaaatctgtttaacccaaggtcacaaagatgttcttctcttatttcttctagaggttttgtagttttacattttgagcaatgatcaattttgagtaaatttttatatatgatatgaggtatggatccaagttcatttttttgcacatgtatatttaattgtttctrtattatttgttgaaatgactatcctttttccatttaattgtatgtctttgtccttatatgtatggtttaattttggactctccattctattaatctgttttgccatctttccaccaatactatattttggttactgcagctttataataattattgaaacaactttgttcttctttgatctccaactttgttcactttttttttcagagctgttttgactctcctaggtactttaaattttcatacaatttttagaattaacctgttaattctacacctacaaaaatttcaact

SEQ ID NO: 638446 - DNA, 565 bp, Homo sapiens
ctatacaccaattggaatggctaaaacttgggagtttaacaattccaagtgttgatgaggatgtggaggaactgaaactcccctacattgctggtgggaatgtaaaatggtccaaccactttggaaaacagcttggcatttcttaaaaatttaaacataaatgtattgtacaacacagccattgcatttctaggtattcaagagaaatgaaaacatatgtctacacagtctgcagcttttttcatartatctccaaattggaagcaacccacagatacattaacaagtgaatgtataaacaaaacaagatatatatgtaaaacctcagaagtattgttccaattgaaaggcatgaaactgtgcatattgtataaatcattttacatggaaatatataaaataaaaatcaatatatagtgatataaagtagatctactgcttcctaggcctagaggtagacagagggaagggataaaaagaggcatgaggaatcttggggtgatggtaattatctggaactctaatgtggcagtggtttctcagatgtacatgtctatcaaaacag

SEQ ID NO: 638447 - DNA, 535 bp, Homo sapiens
cctggctaattttttcttatatttttagtagagaggggatttcactatgttggccaggctggtcttgaactcctgacctcatgatcctcccactttggcctcccaaagtgctgggattacaggcgtgagccaccttgcctggccaagatctctgttttaatgctaatgctgctcagttgtacctggattccaaaggtggaggagataacaggcatgtccaagccccacttcctatcatggcctgaacttgttcttcakatttattttggaatgcctttagctgagaggagggtccattcagtcagttgcaagggttagaattttatttttggtttacactatacaaattcagaaaagggcactcaacaacaaaacaaacatacatatccactaggaatgaacaaatgtcttcttttttttttttttggagacagggtctcactctggagtgcaatggcacaatctcgattcactgcaacttccacctccttggttcaagcaattcttgtgcctcagcctcctgagtaggtgggat

SEQ ID NO: 638448 - DNA, 441 bp, Homo sapiens
ttcttcagatttattttggaatgcctttagctgagaggagggtccattcagtcagttgcaagggttagaattttatttttggtttacactatacaaattcagaaaagggcactcaacaacaaaacaaacatacatatccactaggaatgaacaaatgtcttcttttttttttttttggagacagggtctcactctggagtgcaatggcacaatctcgattcactgcaacttccacctccttggttcaagcaattcttgtgcctcagcctcctgagtaggtgggattacaggtgtacaccaccacacccagttcaatttttttttttttttgkatttttagtagagacggggtttcactatgttggccaggctggtcttgaactcctgacctcaaatgatccacctgccttggcctcccaaagtgctgggattatagacatg

SEQ ID NO: 638449 - DNA, 482 bp, Homo sapiens
gggggaaaagacagtttatttacactgcaactgagagttgctcaataatgagtaattcactgaatagccagagacacagtttctaccccaatttaacaaagttggtagcagggccagtagttaaaggcttcagtgggaaagtatggaagtctctggcatttttatgctaatagaagtgggcaatctgtctccatggcagtttaattcacaggaaaaatccttgccacaaggagttaatgacagttggatttgtgggaggctctgctttagtcagataaggcaagttcagataagatttckttctgcatctcaaatgttttcactttaaaataatctttgtaccgaccctgggggggggatctgagtgggtccccataacattataagttacacttattgtctaagaaatgtttccctacctgaagtcttaaagatacttctaaattttctgctaataattttagcagtttgagcatgatatg

SEQ ID NO: 638450 - DNA, 617 bp, Homo sapiens
accccaatttaacaaagttggtagcagggccagtagttaaaggcttcagtgggaaagtatggaagtctctggcatttttatgctaatagaagtgggcaatctgtctccatggcagtttaattcacaggaaaaatccttgccacaaggagttaatgacagttggatttgtgggaggctctgctttagtcagataaggcaagttcagataagatttctttctgcatctcaaatgttttcactttaaaataatctttgtaccgaccctgggggggggatctgagtgggtccccataacattataagttacacttattgtctaagaaatgtttccctacctgaagtcttaaagatacttctaaattttctgctaataattttagcagtttgagcatgatatgcctaggtgtttgggtttaataagcttctaagaagtataagmctttaagtcagtgtttttcatcaaatttgggggatttttgtctatcatttctataagttttgtttttttctgcccattctcactcttctctttcaaacactacaattacatttatgtgaatcacttggtattgctccacatgtccctgaagctgtgtttatattttttaattaaatta

SEQ ID NO: 638451 - DNA, 576 bp, Homo sapiens
acagcctcaggagtgtccagggtgatcagagcacagtttggttttatacattttaggaagatatgagatatcaatcatcatatgtaagatgartattggttcagtctggaaaggtgggacaactcaaagtggggagggagcttccaggtcataggtagataagagacaaatggttgcattattttgagtttctgttaagcgtctgcaaaggaggcgatcagatatgcatttattttagtgagcagaggggcaactttgaatacaacaggaggcaggtttgccttaagcatttcccaccttgacttttccctttagcttggtgattttggggccacaagattcatttttcttccatagtttttaggtatcaccatgcttcactcattttttaatttttttttttttggtagagaaggggtcttgctaggttgcccaggctggaagtttttatttctccaggataaatgcctaggagtataattactgagttacgtggtagttacatgtttgattttatgagaaattgtcaaactgtttttcaaagtatctgcgtcattttaaatccccatcagcaat

SEQ ID NO: 638452 - DNA, 576 bp, Homo sapiens
acagcctcaggagtgtccagggtgatcagagcacagtttggttttatacattttaggaagatatgagatatcaatcatcatatgtaagatgagtattggttcagtctggaaaggtgggacaactcaaagtggggagggagcttccaggtcataggtagataagagacaaatggttgcattattttgagtttctgttaagcgtctgcaaaggaggcgatcagatatgcatttattttagtgagcagaggggcaactttgaatacaacaggaggcaggtttgccttaagcatttcccaccttgacttttccctttagcttggtgattttggggccacaasattcatttttcttccatagtttttaggtatcaccatgcttcactcattttttaatttttttttttttggtagagaaggggtcttgctaggttgcccaggctggaagtttttatttctccaggataaatgcctaggagtataattactgagttacgtggtagttacatgtttgattttatgagaaattgtcaaactgtttttcaaagtatctgcgtcattttaaatccccatcagcaat

SEQ ID NO: 638453 - DNA, 607 bp, Homo sapiens
accatgcctggctaattttttttttcatagagatggggttttaccatgttgatgaggctggtctcaaacccctggcctcaagtaatcttcccatctcagtctcccaaaacactgggattataggcatatgctaccacacctagcctctttgttttttatttttatttttttctttttcagattgagacaatttctattgatctatcttcaagttcattgactctttcttctaccatatttaatttacataaagcccatcctgtgaatttttcatttgagttattatacttttccattctacaatttctgtgtgattttttttgtttttgttttcatttatttggtgagaatctttatctgttaattcattaagattatattttcatttagctatttaaaaacttagtctgctaaatscaacatcagggctgtctgaggttcaacttctgttggcttttatttttattgactgtgagtcacttttttcaggtttttttccatatctaaatttttttgtattgaagactttgtggattagacattgtcaagattctgaattctatatctttctgaggagtgctatttttttctctagaaggtaacgtaa

SEQ ID NO: 638454 - DNA, 607 bp, Homo sapiens
accatgcctggctaattttttttttcatagagatggggttttaccatgttgatgaggctggtctcaaacccctggcctcaagtaatcttcccatctcagtctcccaaaacactgggattataggcatatgctaccacacctagcctctttgttttttatttttatttttttctttttcagattgagacaatttctattgatctatcttcaagttcattgactctttcttctaccatatttaatttacataaagcccatcctgtgaatttttcatttgagttattatacttttccattctacaatttctgtgtgattttttttgtttttgttttcatttatttggtgagaatctttatctgttaattcattaagattatattttcatttagctatttaaaaacttagtctgctaaatgcaacatcagggctgtctgaggttcaacttctgttggcttttatttttattgactgtgagtcamttttttcaggtttttttccatatctaaatttttttgtattgaagactttgtggattagacattgtcaagattctgaattctatatctttctgaggagtgctatttttttctctagaaggtaacgtaa

SEQ ID NO: 638455 - DNA, 588 bp, Homo sapiens
gtagtgttgcagtcacttttatatgtgaataagtctgtagaaagacttctaatggtgaaactgaggcttaaagtatgtacatttgaagtttttatggatattagtacatttctctttaaactattgcaacaatttagtttcattgttagtatatgatagtacctgttggtttttttttccctcatcctcactaatactgggtgttatcaaactttaaaatttttgcccatctcataagtgaacaccacaaataatttttctagaaataactcaaagagcctttcttggtttctgaccaaatgcctttattttcagtgtattttcytgagcatcttctcaaaacattttacctttagatttttctgattattttaattctatgaattttcacctctgaatcaacaatctccattatacagagataccaaaaaagaaattcaaaagcaggattttgacccattttactgtaggtaaactccctcttatcaatgagttatgagataccttaagttgtcattttcagtgtgtgttactcactacagtgagattcaatgtcagaaaaaaaaattctgctttcagaaacagaca

SEQ ID NO: 638456 - DNA, 555 bp, Homo sapiens
atgaggtagcataaatgtaaacagcataaatgggactcaaactacacagttttagtaatgatcaaaatggaccataaaccaaatatttattataarcattccacaaaaaaaaaagagtgccaggtttgatcttggtagatgacactaactacatttccaaaagtcagagcataaatatgagctatgagcttgaagagagagtgtgatgtggaggccagcaggcctgtatttttagaaagtatattgaatttatattctcatgtctgtacacctatctgatctaacactccagaaatacgtattttggaagccatgtataacgccatgaaaagtgcaatctgtctttaaaaaccagatattcattcactgacaagcatttattcaatacacatgctaagcactagaaataaaactatcagcattatatagcctttgcttggggagaggttactgtaatgtgaggtggaacattcaagtattacagatgaggtccaaatgaaggatttggagaggtcaccagagggaaaggacttgtgagtggcaggggctgtattg

SEQ ID NO: 638457 - DNA, 586 bp, Homo sapiens
ttgggcagcagtgaagaaagaaccatgaatccgtgccctattgaagcctgccaaatgtcattttcctcagctttatttatctctataaagcaattaaataggcagaaaagatgaaagaaaaaaawtaactcatttcaaactaaagcaagctatattctttgcactgtcttttcccttcccccaaaccccacttcagctgcagcctgtagaaatgctggtgaatactcaacatgtggaggctgtgtctcacagttcacagttcctaaaatgacaaatagtgcacaggttgtcactgtgaatggcagatccaaagacctggggctcagctgtctccatcgttcagaaaggaattgagagttatttctataccaatctaggcaggcctggctggctctgccacctgccagctgttttaccttgcatttgacttgtttgagcctctattttctcattggtagaataaatttatttatatctacttcatagagttgttttaagaattaaatgagataaaatatatagaattaaatgaaattaagaggaaagtacaagcagggaatttggcatataataggtgctcaaaagc

SEQ ID NO: 638458 - DNA, 556 bp, Homo sapiens
ctagccaagggaagctgtgaggaactgtgccatgagggatggggctatccagcccagatataatgcttttcccatggkttttgcaaacccgcagaccaggagattccctcgggtgcctacatcactagggccctgggtttcaagcacaaaactggtctgccatttgagtagacactgagctagctgcaggagtttttttttcataccgcagtggtgcctgggaccccagcaagatggaactgattactcccctggaaagggggctgaagccagggagccacccccatggagcccagcaagctaagatccactggcttgaaattctcgctgccagcacagcagtctgaagccaacctgggatgctcaagctgggtgggggtaggggagactgccattactaggcttgactaggaagttttcccctcacagtgtaaacaaagccactgggaagttcggactgggcggagcccaccatagctcagcaaagccactgtagccagattgcctttctagattcctcctctctaggaagggcatctctgaaagaaaggcagca

SEQ ID NO: 638459 - DNA, 556 bp, Homo sapiens
ctagccaagggaagctgtgaggaactgtgccatgagggatggggctatccagcccagatataatgcttttcccatggtttttgcaaacccgcagaccaggagattccctcgggtgcctacatcactagggccctgggtttcaagcacaaaactggtctgccatttgagtagacactgagctagctgcaggagtttttttttcataccgcagtggtgcctggraccccagcaagatggaactgattactcccctggaaagggggctgaagccagggagccacccccatggagcccagcaagctaagatccactggcttgaaattctcgctgccagcacagcagtctgaagccaacctgggatgctcaagctgggtgggggtaggggagactgccattactaggcttgactaggaagttttcccctcacagtgtaaacaaagccactgggaagttcggactgggcggagcccaccatagctcagcaaagccactgtagccagattgcctttctagattcctcctctctaggaagggcatctctgaaagaaaggcagca

SEQ ID NO: 638460 - DNA, 537 bp, Homo sapiens
cttcagcagacttaaacattcctgcctgctggctctgaagagagcagcagatctcccagaaaattgcttgagctctactaagggacagactgactccttaagtgggtccctgacccccgtgcctcctgactgggaggcacctcccagcaggggtaaacagacacctcatacaggagagcaccggctggcatctggtgagtgcccctctgggatgaagcttccagaggaaggagcaggcagcaatctttgctgttctgcagcctccactggtgttacccaggcaaacagagtctggawtggacctccagcaaactccagcagacctgcagcagaggggcccgttagaaggaacactaacaaacagaaagcaagaacatcaacatcaacaaaaaggaggcccatgcaaaaaccccatccaaaggtactcagcatcaaagatgaaaggtagataaatccacaaagatgaggaaaaaaaacagctcaaaaatgctgacacttccaaaaccaagaatgcctcttctccaccaaaggaccaca

SEQ ID NO: 638461 - DNA, 381 bp, Homo sapiens
caaggaactaaggaaaaagggcaaaccaaacacaaaattagtaaaaagaaggaaataatgatcagagcataaataaatgaaagactaaaagaaatagaaaaatcaacaaaawgagcagttgggtttttgaaaagataaagaaagtaaacagcttttaggtagactaagtaaaataggagactcaaaatcagatgaaaaaggaaacaatatggctgagtgcagtggctcacacctgtaatgccagtactttgggaggccgaggtgggcagatcacctgaggtcaggagttcaagaccagtcgggccaatatggtgaaactccgtctctacaaaaatgcaaaaataagattagccaggcatgatggtgggtgcctgtaatgcc

SEQ ID NO: 638462 - DNA, 563 bp, Homo sapiens
gaaaaccaaacaccacatgttctcactcataagtgggagttgaacaatgaggacgcatggacacagggaggggaacatcacacaccaggcctgttggggggtgcaggggaaagggagggatagcattaggagaaatacctaatgtagatgacaggtgcagcaaaccaccatggcatatgtatacctatgtaacaaacttgcacatctgcacatgtatcctagaacttaaagtataaaataataaaataaaagatagtgcctatatacaaattataaaatgcctrgaatagtgcctagcactatgaagatattaaataaattgccaagagctcatacattacctaaactgtcatgtgggaaataaggaagcaaagggacccatcccagccgtagtcactctggataccacaactcttctaatgatccaacagcacccctcattcctcagtttttatttctcccagcaactccttgttccctcactcctgtataagcctcatggctctgtcactggcttctctgcctaactctgagcttctctgtcctctgtgtctcactgagtg

SEQ ID NO: 638463 - DNA, 565 bp, Homo sapiens
cagcctgtactgcctgggaagttggacccactccctctgtgggatgtttgcccaagaaggaacagcacacctgctctgtccctgtggcctgggaaggagggcttgccaaaaacagacttatcaagaaacaggagacargagggaaaaaaaggcagtgacattaagagccaggtaagtgcaggcctcaaccaggagacagatacacacatactgagcacaaattctgtaaatggctgtggattggatatgtgtgtcactctcctgttaggtgtgtgggtcagcttgcccctgagagctgccaggtcttctgtgctctcatagctattttagtatgagtcacagtaatctacgtgctttttgtctccatttacataaaactgagaccccgtcaaggccagggactgcatctatacatgtgttgtttggttctcaggaaccaccatgtgcatagatgctcattaatcatatgaatgaatggatggatgaattaataaaacattatatagtttatagagcatttttataatcatcgtttcacctgattttccctcaaaaccctcctgag

SEQ ID NO: 638464 - DNA, 565 bp, Homo sapiens
cagcctgtactgcctgggaagttggacccactccctctgtgggatgtttgcccaagaaggaacagcacacctgctctgtccctgtggcctgggaaggagggcttgccaaaaacagacttatcaagaaacaggagacaggagggaaaaaaaggcagtgacattaagagccaggtaagtgcaggcctcaaccaggagacaratacacacatactgagcacaaattctgtaaatggctgtggattggatatgtgtgtcactctcctgttaggtgtgtgggtcagcttgcccctgagagctgccaggtcttctgtgctctcatagctattttagtatgagtcacagtaatctacgtgctttttgtctccatttacataaaactgagaccccgtcaaggccagggactgcatctatacatgtgttgtttggttctcaggaaccaccatgtgcatagatgctcattaatcatatgaatgaatggatggatgaattaataaaacattatatagtttatagagcatttttataatcatcgtttcacctgattttccctcaaaaccctcctgag

SEQ ID NO: 638465 - DNA, 479 bp, Homo sapiens
ttcatctcccccggccacagattcctcacttataaaatggtggcattaaaacctaccttgtagacctattgtgaggatcatactacgtgtgtgaagattttacacactatagctgcttccttagactctagaaaggcagtgtgcttggtggtggctcagcacacagatgttgcagcctgaaagcacaggatcagcctccagctgccttgtgctgattgtatctggagcaaggtcaggtgtggggactcacgcctgtaatcccagcactttgggaggctgaggcaggaggatcgtttgaggctgggggtttcagatcagcctggccaagacaaaaaactagctgacgatggtggtatgggcacctgcagtcctagctattcaggaggctgaggtggraggatcacttgcacccaggagtttgaagctgtggtgagctatgatcatgcccctgcattccagcctgggtgacagaggagacc

SEQ ID NO: 638466 - DNA, 548 bp, Homo sapiens
gaataaatataaattgacaaaatatttatagttgaactggcaggacttgatcatggactggatatagaaagtgagagagataaaggggtcaaaattaatttttctgggttttggtctggaaactgggcaggcagagattccattttctgagagggggcaagggcaggtttgcagtgggtgtcagggagagcttcagtgtgggcatgctatgtttgcaagagaaccagtttaagatgccaagtagttgactaaatgyctgagactagggacaagatctgaggtcttggctgcagatatgagcttggggttgttagcatacagacacggtttaaagctgtggcactgggtgagatcagagaggagaagggcaggagtgagtcttgacctgaataagattgaataaagaagaaggagctagtggcagaatgagggatggccagcagggtgggggaaaaacaaaagcatggtgctgaggaagctaagagaggaaggagagtgtttgttagaggaaatatttgaatgctacagagaaggtgagcatgaggaac

SEQ ID NO: 638467 - DNA, 541 bp, Homo sapiens
tgatctctcagaaaatggcataatggaaaggaatagaattagagaaagattagctcaaatgcarttctattatggttctaacccataatagctctgtgatctgcccaagctatgtggcttagtttccttatctgtagaatcaaacactgatgcttcctgtagagggttttcttgaggatgacttgtataacacagtcaaaggacctgatactaagtaagtgtgcagtaagtattggctcttctcctcccagtcttcacaccagcataatcacttgcaccttcctgaggcacttgccccacccagctttgcatcatggacccatgtgggctggtgtgatcctcattccaggtgtgagtgttctctttcttctgaaggaagagaaaataggcctcagagcctgatgaaacttgttctcattatggcacacagttaccagctgtgtgaccttagtttactcatctggcaatgggaactttcatgaggtttaaactacataaaatatgtaagagatttgctcactgcttggtacatagtgtttgg

SEQ ID NO: 638468 - DNA, 438 bp, Homo sapiens
aaaaatcaaaagtgccattttctggctatttggaaccactgtcaagtttgtattggggtcaagcagcattgcagaagaaaataaggtgtttaggttttaggtcaggtgacagttgaggttttaagttcttgagaacacaggtggatctttctcacagagcaaagagcaggacaggggattgatctcccgagggagattcccccctcccatccaagtcagggcacgaaaatttcactcgcgtccatgtgaagagaccaccaaacaggcttygtgtgagcaacaaggctgtttatttcacctgggtgcaggcaggctgagtctgaaaagagattcagtgaagggagaataggggtcgggccgttttataagatttaggtatgtaaaggaaaattacagtcaaaggaggggggttctctggcgggcaggagtgggggtcca

SEQ ID NO: 638469 - DNA, 584 bp, Homo sapiens
acatctttcctgagctacaatttccaactggtataattattgtacagaattttgagtagctgtattgcaccttggtcgcttatcatataactaataagttataattatagcaacaaaacactttgaaaagcaaaattagtttagtggcaatcaaattcaaaaatccattcaaagaaagctaagtaataactgtaattgagtcatatgtaaaatgaaaaagcttcaaaacataatgttttaaaacatcttgtagaaaagtgacacagcatctttgattttcttgttatgttgctctttagctataaagataaaaaaattggagcaagatgattgactagagatgctgagcatgcatgtctgtgacaagaaaggaccaasgcaacaacaaataaacagctaagatttgactggagtgtcaaagggagaggactggagtgcagtaggggagtggagatacacttgcagtgactggaattccaggaggtcatcacctccgttgtgttgtctccaccacttggaatagattggcccagagttaggagagacttccagttgcaggaaaaaggtaagcagatgatcccgcc

SEQ ID NO: 638470 - DNA, 591 bp, Homo sapiens
gcccacatagcagaactaaaaaacagcctgtcaggatgcctctggtaagcacatccccaagccagccaagtagccttgtgccccatcccaggcctgagaaacaatcttgtgggctgcctctgacaaacacattcccaaaccaaccaagcaaccacatgcccatgctcctggccagagtaacagccctatggccccaaccccagtgagccagatatgaagtcagccaaaccaccatgtgcgtaaaaatgaccctgacctgagaaatagcctggcaagcccattcctggagagccacaccacaaattctgtcagtctaagctgatgataaacttacaaatgytaccagtgtggattacagctaaagaaactacatggagagttacactactgcatctagaaccaaggccaatatactccatcaaaccaacacagcaatgctcatttatgcaaatagctcttttgatatgaagcctattcaattaaagagaaaagtcatcttttccagtacatgcatagaagtcaacacagggacacatcaaccatgaataagcaagaaaacatgtcaccttcaaaaggaaacaattctccaga

SEQ ID NO: 638471 - DNA, 616 bp, Homo sapiens
tttcacaggggactgagcagatagttcacatctcatagaacacagcagagcaaacaacttaatgcatttctccattggatgtttttattttcatctgaaatcccttctttaacgaccagacattaggttttctctctctttctccctgcctttcatagctccactatgacttatgatgctggttcacttatcagggcaaccaaatatgccaagatccacatccaatattactaacaagctaatcaaactaatcaacccagctgtggccccaaatttgtaaataatgctttgcaaaacaaaaatccctgtagttaatggggttctccatttttattaagtggctaaaaaaatyatcataccttcatctagctggccttttgggggtacaggcagtatctcccatttcacccttgcacacacactcttcaagcagtttatccaagtacccatcactgtaccaagtgagctcagatattcaccacagaggaagaggagggaattgagaatcaacgtcttggatcctagctcttaacaaggttgaatgtttattcaagacttatctgagcatcagatttttatttaaacgttgataataaaatagaaatataaaacctta

SEQ ID NO: 638472 - DNA, 599 bp, Homo sapiens
cagttctctgtgtctagctaatctagtggggatttggagaacttttgtgtctagctcagggattgtaaatgcaccaatcagcaccctgtcaaaatggaccaattgtctctctgtaaaacagaccaatcagctctctgtaaaatggatcaaacagcaggatgtgggtagggccagataagggaataaaagcaggctgcccgagccagcagtggcaacctgctcgggtccccttccacactgtggaagctttgttctttcagtctttgcaataaatcttgctgctgttcactctttgggtccgcactgcctttatgagctgtaacactcaccacaaagatctgcagctccactcctgaggcaagcgagaccacgaacccaccaggaggaatgaacaactccrgacaggaggagtgaacaactccagacatgctgcctcaagagctgtaacactcaccgcagaggtctgcagcttcactcctgaagctggtgagaccatgaacccaccagaaggaagaaactctgaacacatcccatattcgaacatcagaagaacaaactccagacacaccacctttaagaactgtaacactcaccgcgag

SEQ ID NO: 638473 - DNA, 574 bp, Homo sapiens
agctgcagcccgagagtttggagatacctggtatcttagtcaagtaaatgatagaatgacaccaaagaaagggacaaattccctactgatcagcaagccatcctcagtatggatccccactgggaccttgactcagatcatgagaactggagttgtagacatctgttgacctgtgttctagaaggactaaggagaattagaaaaaagcccatgaattgttcaatgatgtccaccataactaagggaaaggaagaaaatccttctgccttccttgagtggctatgggaggccttaagaaaatatattcccctgtcacctgacttactcragggtcaattgattctaaaagataagtttattacccaatcagctgcagatatcagaagaaagctccaaaagcaagccctgggccctgaacaaaatctagaggcattattaaacttggcaacctcagtgttctataataggaaccaagaggaacaggtccaaaaggaaaagcaagatcagagaaaggtcgcagccttagtcatggccatcagacaaacaaatcttggtagttcagagaggacagaaa

SEQ ID NO: 638474 - DNA, 574 bp, Homo sapiens
agctgcagcccgagagtttggagatacctggtatcttagtcaagtaaatgatagaatgacaccaaagaaagggacaaattccctactgatcagcaagccatcctcagtatggatccccactgggaccttgactcagatcatgagaactggagttgtagacatctgttgacctgtgttctagaaggactaaggagaattagaaaaaagcccatgaattgttcaatgatgtccaccataactaagggaaaggaagaaaatccttctgccttccttgagtggctatgggaggccttaagaaaatatattcccctgtcacctgacttactcgagggtcaattgattctaaaagataagtttattacccaatcagctgcagatatcagaagaaagctccaaaagcaagccctgggccctgaacaaaatctagaggcattattaaacytggcaacctcagtgttctataataggaaccaagaggaacaggtccaaaaggaaaagcaagatcagagaaaggtcgcagccttagtcatggccatcagacaaacaaatcttggtagttcagagaggacagaaa

SEQ ID NO: 638475 - DNA, 522 bp, Homo sapiens
cagtgcaaaaacccaaggaggtggcagtcttacactgccaaagccatcagaaaggtgaaggacataaggcagaaggaaaccatcaggcagatgctgaggccaaaattgctgccaggcagaaccccccattagaaatacctrtggaagggcccttggtatggaacaaccccctccaagagattaagccccagtattccctgactgaagcagagtggggactttcacgggggcatagttttctcccctcggggtggttggtgacagaagaaggaaaggtacttatacctgaagccagccagtggaaaatttaaaaccctccaccaaacttttcatatgggtattgaaaacactaatcaaatggccaaatccctatttacagggccaaatctcctctggaccatccaacaggtagtcaaaacctgtgaggtgtgccaaaagaataatcctttggtttatcgtaaggccccttttggggaacaaagaataggtcactatcccggagaggactggcagttagacttc

SEQ ID NO: 638476 - DNA, 579 bp, Homo sapiens
attacaaatagtaacactatgaatattcttgcatatgtgcaagatwttctttagggtatataattaggagaaaaataataaattctattacttgagactattaaactttaaacataaatctaaagcagattgtaccaatttatatccccatgaattacatatatgtgtgtctatgcatgtgtgtatatgtgtatatatatatatgtatgtgtgtgtatgtgtatatatttataggaatacttattagacctcctcatcaataactgttgaggttatttagtggatacaagtttagaattgttatcaaatcttagtgaattaagcctgttattgtagcaggaagggcagcagacaaaacccctcagacaccaagttaaagaaggaaggggtttatttggccaggagcatcagcaagactcctgtctcaagagccgagctccccaagtgaacaattcctgtcccttttaagggctcacaactctaagggggtccgcgtgagagggtcatgatcgattgagcaagaagggggtacgtgactggaggctgcatgcaccagtaatcagaacagaacagaacagg

SEQ ID NO: 638477 - DNA, 559 bp, Homo sapiens
taattcatgacaaatgtacttattttctgccatatggcctctttcctgattaagagaaccacatcctattcctaacttattactattaatgacagcacaggcctcaaacttcaaggtgacttgtttgggcaccttttttttgtttgtttgtttyggctaacactttactcgtatcgtttatgagcccctaccagtcctcagaccttaatcttatttttaaaactgtggtcatgggaggctcagatgggtcataacacacatcaggttggtcatttcctgggctatataccttgtatagaataacattatacaaacaagctctttttagagttctagtacacttataataaccataaaataataggactgtagcaaccttttgtcctacctcagtgacttgatgtatacactgggaacagtcctcaatctgaggaaggacagttgaagtccttactgtaaaattccaaatgttaaggaaaatgagttccgtgatgagtttcctcatgcttcggccatgcgtggaccagtcagcttccgggtgtgactggagcagggcttg

SEQ ID NO: 638478 - DNA, 401 bp, Homo sapiens
aacacagctattttgaattctctgtctgaaaactcacatatgtctctctctccaggattggcccctggtgccttatttcatttggtaaggtcatgtttttctgtatggacttgatgcctgtggctgttcattggtgtctgatctttgaagagttatgcatttatcacartcttcacagtctgggcttgtttgtgtccatccttcctgggaacgctttctacatattcaaagggacctgggggttgagatctgagtttttggtcactgcaagccatatctgcattacagagcaccccaagcctagtaacgttgtggttcttgaagactcgtagaggtaccactttggtggtctcggataagatatggaagaattctctggattaccaggtggagacttttgt

SEQ ID NO: 638479 - DNA, 545 bp, Homo sapiens
ccacattcttcttggggaggaatgttccacaaccgtgattctgtgcttagttttcraggctacttcatggggttatttaagcaaaaaaaatgaattaaacattagtaaaagcccagcatagaaagagaggggggaaaagaagaaaaacaactgtttttcaagaagggatggtagtttctgttacacttccttctgctttctttggatttaatttgctctgctttttctagtttcttaaagtgctttgagaacttttttcttttaatataggcatcgttagctataaatttacctctaagcactgcattagctgcatcccatgtttgtcttttcattttcattcattttcaagtatttgctgatttaccttgtgatttcctcataacacatttgttatttaggagtgtgctgtttttttgttgtttttgttttttttctttttgagatggaatctagctctgtcacccaggctggggtgcaggggcacaatcttggctcactgtaacctctgtctcctgggttcaagcgattctcctgcctcagcc

SEQ ID NO: 638480 - DNA, 561 bp, Homo sapiens
acctcgtcttcccaattactctgagcagaagatctttcatcatatcttattgagaaatggaagcaacctaactgaactccatcttcccacttccagtttccctgcatctaaaccatactgtttacattcccttttcttacagtatatggagtgtcactgttcctatcaaaggtcagttttcacttgtactctggattctgtcttctctattcttctcagrgtctttatttcagccattgtttccctctgcttctctctctaagcaatcctctcatgcagagatgatctagtatctcctcccttgatctcacattctctccagctaacatcttttttttttttacttccttatttggggaatataaatgaattttgtgtttaggcttgggttccattcccaagttatctcattatgtatatgcaaatattccaaatttcaaaaaatcaacaatctgaaatacttctggtctcaagcatttcagatgagggctactcaacccataaaccttcagggcaaacgcctttctggaccacagtgcttcactgcaaactcaacattca

SEQ ID NO: 638481 - DNA, 606 bp, Homo sapiens
gtgtgtgtgtgtgtgtttatcacagtttctttatccacttgttgattgatgggtatttggcatttggcatttgggttggttccacatttttgcaattgcgaattgtgctgctataaacatgactgtgtaagtatctttttcatataatgaattctttccctctgggtagatacccagtagcgagattgctcgatcaaattatagttctacttttggtccttgaaggaatctccatactgttttccatagtggttttactagtctgyatacccaccagcagtgtagaagtgttctctcttcactgcatccatgccaacatctattttttttaattttttttattatggccattcttgcaggagtaaaatagtatcacattgtggttttgatttgcatttccctaattactagagatgttgtgcattttttcttatgattgttggacatttgtataccttcctttgagaattgtctattcatgtgcttagcgcactttttgatgggattgtttgttttttccttgctgacttgtttgagttcatgtcaattctgaatattaatcccttgtcatatgtatagattgtgaagattttctcccactttgca

SEQ ID NO: 638482 - DNA, 606 bp, Homo sapiens
gtgtgtgtgtgtgtgtttatcacagtttctttatccacttgttgattgatgggtatttggcatttggcatttgggttggttccacatttttgcaattgcgaattgtgctgctataaacatgactgtgtaagtatctttttcatataatgaattctttccctctgggtagatacccagtagcgagattgctcgatcaaattatagttctacttttggtccttgaaggaatctccatactgttttccatagtggttttactagtctgcatacccaccagcagtgtagaagtgttctctcttcactgcatccatgccaacatctattttttttaattttttttattatrgccattcttgcaggagtaaaatagtatcacattgtggttttgatttgcatttccctaattactagagatgttgtgcattttttcttatgattgttggacatttgtataccttcctttgagaattgtctattcatgtgcttagcgcactttttgatgggattgtttgttttttccttgctgacttgtttgagttcatgtcaattctgaatattaatcccttgtcatatgtatagattgtgaagattttctcccactttgca

SEQ ID NO: 638483 - DNA, 482 bp, Homo sapiens
gtcagttgtaatatctcccattttgtttctaattgagtttatttagatttttctctcttcttttcttggctaatcttgctaatgctstatcaactttttaaaaatcttttcaaagaaccagcattttgttacatttatcttttgtattgttttttgtttgtttcaatttcatttagttctgctctgatcttggttatttcctttcttctgctgggtttggtttgttgttgtttctctagtttcttgaggtgtgaccttagactgtctatttgtgctctttcagactttttgatgtaggcatttagggctatgaacttccctcttattaccgcctttgctttatcccagaggtttcgataggttgtgtcactaatatcattcagttcaaagaatttttaaaatttccatctggatttccttgttgacccaatgatcattcaagagcaggttgtttaatttccatgtatttgcatggttttgaa

SEQ ID NO: 638484 - DNA, 581 bp, Homo sapiens
tgttttataaatttggtagctccagtgttaggtgcatatgtatttaggattgtgataattttctgttggacaaggccttttatcattacgtaatgtccacctttgtctttttgaactgctgttgctttaaagtttgttttgtctggtataagaatagtcattcctgttagcttttagtgtacatttgcatggaatgtcttttttttacccctttaccttaagtttatgtgagtcctagtgtgttaggtgagtctcttgaaggcagcaggtagttggttggtgaatttttatccaacctgcaattctgtatcttttaaatggagcatwtaggtcattcgatgttagtattgagatgtgaggtactatcccatttatcatgctatttgttgcctatatgccttttctttttgtatctttgttttataggtcctgtgagatttatgctttaaagaggttctgttttgatgtgtttccagaatttgtttcaagatttagagctccttttagctgttcttgtagtcctagcttagtagtggtaaattctctcagcatttgtttttctgaaaaagactgaatctttc

SEQ ID NO: 638485 - DNA, 535 bp, Homo sapiens
actctgtcttgccaattccagctactttggtatttctggactctcatgccaacttctcaactctgagagtctaccaggctctgcctaggttcctacctccctctgttgtatcttagaaattatctcaaagcagttaagctgaggaatttgtagggctcaccttatttgttcccagtttctgtccttcactgcctgatattcaatgattgggaccattgttttacatagtaagtcaagcatttggtttttttcagacaaagaggtaaatgcactcgctatccctccatcttgaccagaagcagaagtctcttatcctattgttgttcatctatgtcaactcagaagagctttgaaaaaataaaatagtgctgtccttttttgttccttgctaacttgtatattcacaatataactttctgtctgtaggcttactgtatgtgttggaactagaacaactatgtcttatycagtgtgcaaccccatcacataatacaatttccagtagataatattctctgtataaatgtttgagtgc

SEQ ID NO: 638486 - DNA, 564 bp, Homo sapiens
gaattcattacttttgctatttcttttgagacaaaacttgagggagaataataatccctgagtgtaaatattcatgcttaggcacctttaaccagatagtcaaactgtacagaggcactcaacagagtatctaaaactccattttagtatatccgtctttcataaactgataagactacactgtcttttttctccatggtatctacgaaactcaaagggaacagtatagtgtatatgggtggagagttgtgacatcattcattattcattcattcatttatttaccaaatatttgggggcaacctaccacatgctagatattgtacttgatgctggggttagaacataagtaacacaaatccaatcctagtgcttgcatcttggggcatctagtctgtctaggtataagagcactaggcagaaaatcacacgaataattagaattgtgataaatcctctacagaaaawgtaaagggtgctataagagtgtgtactgggggaaataatttagtctggagagtgaggtgtcaagaaaagctttcctttttaaactgggcaccaaag

SEQ ID NO: 638487 - DNA, 385 bp, Homo sapiens
aaaaaataagctgaaaattgttctaaccrtggggaacagcgtgtaagaaggagagaaaaggtaagataatttgatggcactcagggaagttcattttaatatcaatagtccagcccttcttgctttatcactaaaggccatttccatgtagtgatacattcaaaagacacaaaatgctagtaccaaaaaagcttggaattatagccagtcacaccacatctagaaaaatttctaagggtctttgactttattgctgttgaagttccttagaagcagagcccgaggcagtaattggggtgcaggtgattcagtcgggagcgtgcttcaggaagaacctgtaaaggaagcgggataatcaggaaattgagctgagcaacggtgcagt

SEQ ID NO: 638488 - DNA, 385 bp, Homo sapiens
aaaaaataagctgaaaattgttctaaccgtggggaacagcgtgtaagaaggagagaaaaggtaagataatttgatggcactcagggaagttcattttaatatcaatagtccagcccttcttgctttatcactaaaggccatttccatgtagtgatayattcaaaagacacaaaatgctagtaccaaaaaagcttggaattatagccagtcacaccacatctagaaaaatttctaagggtctttgactttattgctgttgaagttccttagaagcagagcccgaggcagtaattggggtgcaggtgattcagtcgggagcgtgcttcaggaagaacctgtaaaggaagcgggataatcaggaaattgagctgagcaacggtgcagt

SEQ ID NO: 638489 - DNA, 608 bp, Homo sapiens
tatgtagtggctataaattcttcatcctgtaaataatagatgtgtgccagcattcagaatatataaggattaaattttaaatcatgcagactgctgagctgatctgcataataagcattttcctggtttgttcagcagatgagccaaaggggatggacctaaaatctgtcctgattcatggggcccttgtgagtgagcattcagagatccaacctcaaggtcctaataaactgtcctgaggaagatacaagctttcctccagggagtggtcagcgtgacgctgttatgagcagagagacctcttattgttcttgcactgaagttccctattyctcgtctcttgcctgcttgtccattgcccagagatgctattcagtcttggaccaatgccccccagcagcaggaacaggcttaaatactgacccgatgtttacctcctctccataatgaagaattaaatgtcatatttgttaattggtccaaagccagggaagtttttgacttcccttacctgcttcttttggctaaaaggaagcaggtgttgacatgaaagcaaacaactttcttttcttatgtaaaacatgaaaaattgaaattattctaagtac

SEQ ID NO: 638490 - DNA, 616 bp, Homo sapiens
tttcacaggggactgagcagatagttcacatctcatagaacacagcagagcaaacaacttaatgcatttctccattggatgtttttattttcatctgaaatcccttctttaaygaccagacattaggttttctctctctttctccctgcctttcatagctccactatgacttatgatgctggttcacttatcagggcaaccaaatatgccaagatccacatccaatattactaacaagctaatcaaactaatcaacccagctgtggccccaaatttgtaaataatgctttgcaaaacaaaaatccctgtagttaatggggttctccatttttattaagtggctaaaaaaatcatcataccttcatctagctggccttttgggggtacaggcagtatctcccatttcacccttgcacacacactcttcaagcagtttatccaagtacccatcactgtaccaagtgagctcagatattcaccacagaggaagaggagggaattgagaatcaacgtcttggatcctagctcttaacaaggttgaatgtttattcaagacttatctgagcatcagatttttatttaaacgttgataataaaatagaaatataaaacctta

SEQ ID NO: 638491 - DNA, 562 bp, Homo sapiens
aaataaggagcaattttgatgctactttcaatcaaggaaattggagcaaagaagattttagggcctctggctccacctctctccactgatgcattrttatcagaatgtcacaaatggccttgtctgactctacattgggtgatgggatcatggggtctggtgctggcattgtctgttctgtgcctttgggaaaatgatttggtcctcatcaattaaatgagaaagaacgagtgacctataaagactgctgtctagaatgacctggcacaaagtattcaagagacatttaactcagagaattaaactcaaaattgtactagttatattacttttttttttttaagatggagtctcactctgtagccaggctggagtgcagtggcatgatctcggctcacttgaagaaaagagtgtcatttttgtttttttgttgttgttgttttgttttatatatttttttattatactttaagttctggggtacatgtgcacaaagtgcaagtttgttacatatgtatacatgtaccatgttggtgtgctgcacccattaactggtcattta

SEQ ID NO: 638492 - DNA, 562 bp, Homo sapiens
aaataaggagcaattttgatgctactttcaatcaaggaaattggagcaaagaagattttagggcctctggctccacctctctccactgatgcattgttatcagaatgtcacaratggccttgtctgactctacattgggtgatgggatcatggggtctggtgctggcattgtctgttctgtgcctttgggaaaatgatttggtcctcatcaattaaatgagaaagaacgagtgacctataaagactgctgtctagaatgacctggcacaaagtattcaagagacatttaactcagagaattaaactcaaaattgtactagttatattacttttttttttttaagatggagtctcactctgtagccaggctggagtgcagtggcatgatctcggctcacttgaagaaaagagtgtcatttttgtttttttgttgttgttgttttgttttatatatttttttattatactttaagttctggggtacatgtgcacaaagtgcaagtttgttacatatgtatacatgtaccatgttggtgtgctgcacccattaactggtcattta

SEQ ID NO: 638493 - DNA, 562 bp, Homo sapiens
aaataaggagcaattttgatgctactttcaatcaaggaaattggagcaaagaagattttagggcctctggctccacctctctccactgatgcattgttatcagaatgtcacaaatggccttgtctgactctacattgggtgatgggatcatggggtctggtgctggcattgtctgttctgtgcctttgggaaaatgatttggtcctcatcaattaaatgagaaagaacgagtgacctataaagactgctgtctagaatgacctggcacaaagtattcaagagacatttaactcagagaattaaactcaaaattgtactagttatattacttttttttttttaagatggagtctcactctgtagccaggctggagtgcagtggcatgatctcggctcacttgaagaaaagagtgtcatttttgtttttttgttgttgttgttttgttttatatatttttttattatactttaagttctggggtacatgtgcacaaagtgcaagtttgttacatatgtatacatgtrccatgttggtgtgctgcacccattaactggtcattta

SEQ ID NO: 638494 - DNA, 669 bp, Homo sapiens
aataatttctaatattcgcatgagtaaatactgctgcagagaaattgtgacattttaaagtcatacaaatatttagtgagaagatagagcactagaagccttccaaactctgctctgttttgataaaatagcattttgttctattttcagaattctctctctcttagtcttattctctcagtcttgctctcagtttctatgtccttgtgtggcactactagcagttttggacagagtgggggcatggaaggcaagaggaggagactcctgtggtccctctgtgggacactagagtgtggccagctgtggcctcccagctgttggaaggctttcaggaaaactcagtgatgatcgctactagctaacatccacagggctgacataacattccagacaagcctctaagtactttacaagtagtaatttatttttcataaccatcctcattatatagatgaggacatgtggccctgaaaagtcaaataatctacccaaggtgtcacttcaggcaaatagaacaccgagaaattgaacttgggtatctgcttccaggccaggattctttccctgttagccaaactgcctcaaatcctcaaaggaactctttttaactgcttcraatagctaggcaaaatataacctgttactagcagtactagatgttcaaac

SEQ ID NO: 638495 - DNA, 560 bp, Homo sapiens
taattgattaactccttaattagccttttctggcgtggattccttagcactttcaaatgtggcattatgttttaattcatataatggctcaatggagtttccattatttactcaatttttagcagatgaatatgatgttagtaagattaagtgacttgcacaaggttacatagctcatatttactaaaactcaaaatttatgccttattttccaactctctgttgagtattgcattcattacaccataaytgtggttatttctgacacagagaatttcctatattttgacatatatgtattttccaaaaccttaccaacatctatttatcatagaaatgtaagtttactcctgtctagaaagtaaaatagaaatgaaacaaatgaaaacagacaaaaataatccagggcttttgaacttttttttttctcccagatgaagtaattacttctacaatggtacaaatatttaagtaagccatctggtgagataatctcatgaaaataactctcagatttatgtacgaatgtcctcaaaatttggggagggctaataaagtaa

SEQ ID NO: 638496 - DNA, 420 bp, Homo sapiens
tgacaaacctggcgaaaccccgtctctactaaaaatacaaaaattagccaggtgtaatgrtgggcacccataattccagctactcgggaggctgacacgagaatcacttgaacccgggaggcagaggctgcagtgagctgaaattgcaccactgcactccagtctgggtgacagagcaagactccgtctcaaaataagtaaatgaataaatgaatgaattaatgaataaataaataataaagtaacctcttgtccacacgggcctatcttttgctctttggcaggctcctgctttccgacccctcatcaatatggccctatcgttgggaacatgtactcagagatgttaatttccacattcttccctacctcacgatcttctctccagtgagagtgacttatctgtaagggtaatattct

SEQ ID NO: 638497 - DNA, 420 bp, Homo sapiens
tgacaaacctggcgaaaccccgtctctactaaaaatacaaaaattagccaggtgtaatgatgggcacccataattccagctactcgggaggctgacacgagaatcacttgaacccgggaggcagaggctgcagtgagctgaaattgcaccactgcactccagtctgggtgacagagcaagactccgtctcaaaataagtaaatgaataaatgaatgaattaatgaataaataaataataaagtaacctcttgtccacacgggcmtatcttttgctctttggcaggctcctgctttccgacccctcatcaatatggccctatcgttgggaacatgtactcagagatgttaatttccacattcttccctacctcacgatcttctctccagtgagagtgacttatctgtaagggtaatattct

SEQ ID NO: 638498 - DNA, 604 bp, Homo sapiens
gggggctcgtccgggataacaacatacaacattcatcgagatggtgagtagaggagcagactccaactctgtccttttattctgaggcccttggcttccattttagaaccagatcaaaccaaatacggggcccctttcagccatttaaaaataattagcatggctgccagccttacaagacttgggggacaggattgctagggagaacatggagcatcccccagtacccatgggtcactgggcatactggccctgtttgaaccagcttcctttcackgaggacttagctgtcatgtggggctggaagaagtcctggtgtacctgaggatttccggccagggttaccaccattgttatccaaaggtatttggacggaccccagcctctgactaccctgatgagatgtcggcaacagaatctccaactttttatcataatttcctcctttcctgtctgcgatcatcatatctatttcatcctctctgtgtatgcaatgtatgggaaattttatagttcagggaggtaatcttgtttggcaagatcagggaatgtcatagtaaccagcgatatagctcaagggaaggcatctttgtgattttcgagg

SEQ ID NO: 638499 - DNA, 544 bp, Homo sapiens
agttaataaagcagcagcagggttttagtgtattgactccaattttaaaagcagttctactgtgggcacaatgttatccaacagcattatatgctaccaagaaatctttcatgaaaaaaaaaaaacagtcaattcatgtggcagacttcattgttattttaagaaattgccacagccacccaaacattcagcagccaccgccctgatcaatcagtagccatcagtatcaagacaagatcctctatcagcaaaaacattatgccttgctgaaggcacagatattcattagcatgtttcagcatattttaaaattaaagtatgtccattttttaaacctaatgttatagcacacttcataaactacagtgtggtattataacttttatatgcactggaaaagcaaaaaattttgtgactcactttactgtgatatttgctttattgtaatggtctgaaatcaaaacagcaatatttcccttgtatrcctatatattcttaatattaaccccttttcaggtgcatagtttgcaaatatattctccca

SEQ ID NO: 638500 - DNA, 550 bp, Homo sapiens
tcttaatctgtagtcagtaaagaatgtcactttttaacwtgtccaggacctccaagtttatcttgggaccttaagtgtaaagtatttggggataaaaacccattgctgaacttggcttgaagaggtattatctgagattccttatggaacagagttccatcaaagccaacccaaaaggcctatgtagggataattattcttgctgcactttatgcaaatattcacgccaagtataaggctaaagtttattctacaaagaacacagtcctatcataatttgtttttaccaaaaatgagcaatggagagagaaattgtgctccaaagcttatcatacatttgtcattaaatcctagtcacaataattgtttttaagctttttacctacattttagactaaccctgcttatttctgtgaatcaagtggtgatctcctgcagcttggaagaaacaaagagagatgggtaatgtgaaaatctggataaatatgctagttctgggcaattattctgcaaattctgccaggtaatgaaagtgagtagggtgcccata

SEQ ID NO: 638501 - DNA, 487 bp, Homo sapiens
cttggcttgtagatgccatcttctccttgcatcttcacacgataatgtgcatgtctatttcttaatctcttcctataaggaccccattcagctagattagggaccacccataygatttttttgccttagtttcctttttaaagaccttgtatacaaacacagtcacattctgaggtacttggggttaggattacaacataggaattttctataagacacagtttggcctataacaaaagccagcagtgctctgacatgacactaagaagttaatataaacttcttatgaaaaaagacgcaataaaacatcctaaaactgaacagcctatgtatggtatagtctttgctttcatcactttctttcaagttactgttgtttctcatctggactccttactacattagcctctaaactaagcttcttgaattttctcatattcaaccccaaatgaagtaacagtttgccagtaatttgtagatttaatgc

SEQ ID NO: 638502 - DNA, 559 bp, Homo sapiens
ttaaatttttaagtgtctcttgttaaacacagccattattaaaaattaaattctataaacaataattaagctataaaaaaataaaagttaaatatcagacaattctaattaaacataattccttttaacatattttacagttttttatgctctttaggctattttcagctctactgtctatgtggtcaacataatatrtatgagtgtgttgttcccctccctgtgttcatgtgttctcatcattcagctcccacttataagtgagaacatgtggtgtttggttttctgtttcccaattcatttgctaaggataatggcttccagcttagtccatgtccctgcaaaggacatgatctcattcatttttatagctgcataatattccatggtgtatatgtatcatttttttttaaatctggtctatcattgatggacatttgggttgattccatgtctttactattgtgaatagtgctgcaatgaacatacacatgcttgtatatttataatagaatgatttatattcctttgggtatatactcagtaatgggattgctgg

SEQ ID NO: 638503 - DNA, 559 bp, Homo sapiens
ttaaatttttaagtgtctcttgttaaacacagccattattaaaaattaaattctataaacaataattaagctataaaaaaataaaagttaaatatcagacaattctaattaaacataattccttttaacatattttacagttttttatgctctttaggctattttcagctctactgtctatgtggtcaacataatatatatgagtgtgttgttcccctccctgtgttcatgtgttctcatcattcagctcccacttataagtgagaacatgtggtgtttggttttctgtttcccaattcatttgctaaggataatggcttccagcttagtccatgtccctgcaaaggacatgatctcattcatttttatagctgcataatattccatggtgtatatgtatcatttttttttaaatctggtctatcattgatggacatttgggttgattccatgtctttactattgtgaatagtgctgcaatgaacatacacatgcttgtatatttataatagaatgayttatattcctttgggtatatactcagtaatgggattgctgg

SEQ ID NO: 638504 - DNA, 459 bp, Homo sapiens
aatacaaataattaataataataataaacataacatcagctgtttgatcttgaattcaatgaaattattgaaattattagctattgatagcctgacatatttattaatataataaataaattgtagtctccacacaattttacaaggggctgaatgagaggtgaatttcattctatcaattcttttttttttttttgagacagagtctcgctcttttgcccagaccggactgcagtggcactatctcggctcactgcragctccacctcctgggttcatgccattctcctgccccagcctcccgagtagctgggactacaggtacatgccaccacgcccagctaattttttttttttttttgtatttttagtagagatggggtttcaccgtgttagccaggatggtctcgatctcctgacctcgtgatctacccgccttggcctcccaaagtgctggga

SEQ ID NO: 638505 - DNA, 539 bp, Homo sapiens
ttgtacccaataaataatttttcaacccttactcccttcctgmcctcttcccttttggggtccccagtctctgttacagaagaaagttttatagttactctttaacaaatcctgtttccaatgtgtgctttatagggtcaatgtaggcagatacttccagatcccagctgatgaaattcaggtcaaatagtattagtgaaagcactagctttaaacagtatttgaggttgaattattaaaatctgttacgatctgaggaaaaaactggggtcctcagggtaaatattttgattattgtgcaactctgttcatgttttaagtgaaatattttataatagcttattagagtgacgccccctagacacaatatggcaatcctgattgctggtcacatagttgggcaattattttaatctggaaatagacattgattattttgtactgctcattcaataatttatttctttattcaacatgtgttagttatctaacaggtcccattagcggtacaaaaatgaataatatgctgatgttgcaaa

SEQ ID NO: 638506 - DNA, 601 bp, Homo sapiens
attaactatcataattagtaagacaacatcgtagttttgaatgtgtgaatgaggtgcacttctgagatggtaacactggaacttataagtggtagggaagctgcttcttcattgcatacctttaaaacattatgtaccatatatctttttattaacacgtagccagtgtaaagaacagcaaaaaccttagaatccactgcatctttctcaggatttctgccccaaatagagagccaagtcacttgttattaacttttgatggcttattaagggaaatgtacttccttcattttccaaatgcttaactgaccgtctgtgatcagacttagctccagctgggatacattttatgacagccattttatgtacccaattcttttctgtccgatctgatggcaatagattgatggggctattttggtatgaggccacacatccttcaataaaaatgatattgagtgagattccttttttatcaatgtcatatattttgtcaaaatcgtcgctagttggcaggaatgatgtaccagttagtttcatacaacccacraacatgccaactgccaatattcttatactgtattctgaagtgcagtgttac

SEQ ID NO: 638507 - DNA, 627 bp, Homo sapiens
caagctcaccatttgttaacatcttaccacacacttccctcttgccaaatcatttgaaaatacactataaatgtcatgacatttcatcaataaatattaaaatgtgtatattttcagaatgataaaattttctgacacagcctgagmatacttacagcacaagtcaacattaatttactatcattatacacaggccatacaaatttccccagttatctaaaagatgtcctttatggctgtgttttatgctttgtctttgcatttctgtgttttgtttttgtttttatgtctaaaatccaattaaggtgtatatatttgcattatttcttcctagtcacccttcatgaagcaactgtcttcctcatgtgaatttttttgtgtaacattgaattatttgaaaagtcctggtccgttgtcctgcagaatatcttatagtatagaaaggcctatcttctaatgagataaacttacacctaagatttcaagcaagaatatgctattggtgatgttgtatgtctcccacatcatcgcatcagtaggtatatatgtgccattatttggttaagattctgaccatcaaatatctccattgtaaaggaatttttaaactttgtaaaattaaaattt

SEQ ID NO: 638508 - DNA, 603 bp, Homo sapiens
agccattgtttgcaatgctcctctgacttattttttcaactaggaagctactacttcttaatrgaagttttttttagacatcaggtacttctttcccttttctatttctcaacatttgtttattcattatgtactaaatgtcaggtgtgctcatattgtttcgccaaacacgcgcacacatacgtattagaatattattattctaatcatattggaattattattctaatctagtgttgtgttcgcttatctgtttttaaaatgtgagctacttggtttaggataatgctgtacatggagttatccggtaaatatcgttaaaaggccaagtgagaattactaaagaaaaatgatcatgatttcttcctttgttgcccacatatgcagctaaaatacacacattacaacttttaaaagttttttgcttcatttggcctatttttctctactgttatcttcaggagccatgataggataatgttggtgcatctggtatgtttgggtttcatgaaaatatgattaatgtgggcacccttgtatcacttgattaaaaattattttgcattataaaagtattattttaaagtaagcacaccgggtacc

SEQ ID NO: 638509 - DNA, 603 bp, Homo sapiens
agccattgtttgcaatgctcctctgacttattttttcaactaggaagctactacttcttaatagaagttttttttagacatcaggtacttctttcccttttctatttctcaacatttgtttattcattatgtactaaatgtcaggtgtgctcatattgtttcgccaaacacgcgcacacatacgtattagaatattattattctaatcatattggaattattattctaatctagtgttgtgttcgcttatctgtttttaaaatgtgagctacttggtttaggataatgctgtacatggagttatccggtaaatatcgttaaaaggccaagtgagaattactaaagaaaaatgatcatgatttcttcctttgttgcccacatatgcagctaaaatacacacattacaacttttaaaagttttttgcttcatttggcctatttttctctactgttatcttcaggagccatgataggataatgttggtgcatctggtatgtttgggtttcatgaaaatatgattaatgtgggcacccytgtatcacttgattaaaaattattttgcattataaaagtattattttaaagtaagcacaccgggtacc

SEQ ID NO: 638510 - DNA, 545 bp, Homo sapiens
aaagtgattactatttcataaactrtgtccaggctttgctcctttctcaatgttgggctgttcaattttaatatttcaattggtccaaacaaaactaactgaaagggtaaagtgattgggctttttcaatgcccttatatcttggtgtttgtttatgaataaatgggttaatgatatttttattaacgttcataatgactgtttaaagttatcagtttaaaaatattacaggtaggtattttaaacttagctttttatccaattaatatttccatccttcatatcaagtatttgttcttaccatgtgtcttgtttagttttatcagctttccttggtttatgttaaaagatactttatttcacattgttttccatgttttcacagcttttctttatttgacatagtagtaaacatactagtaaacagaagaaagtatgagagattataatgagaaaaagcttgatgacccagataaatcttactggtattggcctaatagtcaaacctcttttttcctttaataaatgtttttatttgttaagtt

SEQ ID NO: 638511 - DNA, 609 bp, Homo sapiens
cccacaagtgtggaaccacagtgaagtaactggggcccacagtaaccacagatgaagtaactggggcccagagaaatgattcgcctacaattatataactggtaagcaccttattacaattaaaacccagaattcctaaatgttggtcttacgtacttttccctacaccaaaatttctcatcaattttgttgatatctcctttgagaatcagatgccttttaccccagggaaatgcatatgtgcccatccatgtgaaacgctgcacataatcctaagagggttcacaaaccttttagggtctactcatgagcccctggtaataacacctgccgaagctaccaccttaatttctatgttaaaaaccaaggacagggtgggctaccgggccctgcttctgaagttaagtgactgggggggctttttaaatcatatttttaaagtgtacctttcccttaattttaaccaggatcacttgatcatcataacgtgcatgtattaatggctttatttgagctattaataatgtcctwaaaaatatttttaagaaatctgaatctcactgttatttctttaaaattaattgaacacacacacaaacaagagaaaat

SEQ ID NO: 638512 - DNA, 592 bp, Homo sapiens
acacactggcaaactgatcttatacttccagcctccagaactgtgaaaaataaatttctaaagtttataagccaccctgtctaaggtatttgtaaaagcagcctgaactgaataaaacaagtacgtttcttgtagatagaatatarctatatgccttagatttttattcagtctaacaattttgtaattggtgtgtttataatacctatagaaaatgctattattgatgtagttggattataatatacagatctgctaggtatattgtatttgttcaatatgttgttttattgttctttttctgaccacttgagttaacttagcaactttttaatgcaattttcacagtttttctttcagcactttaaagatgtcattctattatctttcaatttgcacagtttctgagaagtcttaaataattcgatataattcttttttaatatacaaagtaggccaagtatattgctgagaatggatataattcctattcttatttcactgtgtataatttgacctcattctttggctatcttgaagaacttctctctgtctttggttctcagtagcttgaatatgatgtgccaagtta

SEQ ID NO: 638513 - DNA, 592 bp, Homo sapiens
acacactggcaaactgatcttatacttccagcctccagaactgtgaaaaataaatttctaaagtttataagccaccctgtctaaggtatttgtaaaagcagcctgaactgaataaaacaagtacgtttcttgtagatagaatatagctatatgccttagatttttattcagtctaacaattttgtaattggtgtgtttataayacctatagaaaatgctattattgatgtagttggattataatatacagatctgctaggtatattgtatttgttcaatatgttgttttattgttctttttctgaccacttgagttaacttagcaactttttaatgcaattttcacagtttttctttcagcactttaaagatgtcattctattatctttcaatttgcacagtttctgagaagtcttaaataattcgatataattcttttttaatatacaaagtaggccaagtatattgctgagaatggatataattcctattcttatttcactgtgtataatttgacctcattctttggctatcttgaagaacttctctctgtctttggttctcagtagcttgaatatgatgtgccaagtta

SEQ ID NO: 638514 - DNA, 592 bp, Homo sapiens
acacactggcaaactgatcttatacttccagcctccagaactgtgaaaaataaatttctaaagtttataagccaccctgtctaaggtatttgtaaaagcagcctgaactgaataaaacaagtacgtttcttgtagatagaatatagctatatgccttagatttttattcagtctaacaattttgtaattggtgtgtttataatacctatagaaaatgctattattgatgtagttggattataatatacagatctgctaggtatattgtatttgttcaatatgttgttttattgttctttttctgaccacttgagttaacttagcaactttttaatgcaattttcacagtttttctttcagcactttaaagatgtcattctattatctttcaatttgcacagtttctgagaagtcttaaataattcgatataattcttttttaatatacaaagtaggccaagtmtattgctgagaatggatataattcctattcttatttcactgtgtataatttgacctcattctttggctatcttgaagaacttctctctgtctttggttctcagtagcttgaatatgatgtgccaagtta

SEQ ID NO: 638515 - DNA, 475 bp, Homo sapiens
aaattttcagtcaacctagattacaaattgcacataaagagtgtgtccctgcactgatctgtagagtctccaatctgtgtaaactaaatctccatcctagtgtccttcatctcttgtgggcctttactaaaacataaaataagaataagaatatttctaaacctttcctcttgagcatagactctcacaggaaggagttttctttccaagtattaggacaagttttaccaaatattggccataatgtactgagagttttcagctttccaagatgtgatatctgtatcttcacagcctctcttactgtctcaaagagaatgccaygtattttatattcgtttcgtgaaacagtccattgtatagaataaagggtcacataccataaaacatccaaattaagaaattacaagtggtttaaacaagataaaaaaagtaaaagccaaagctagaagaggttgaccggcacaatgtcatg

SEQ ID NO: 638516 - DNA, 459 bp, Homo sapiens
gaattcggctaagggatagacgcaaacattaccagctgttattccggaggtcacagatttgcaacttttccaattactcctgcagataacatcatcattgtagaatgtaagaatgaccttttgagatgtcttttcaggtttttgcatttctgatgaccaatgggtctacctggacccaccaaccctcaccaacagggcctgccaaactatacttgaaaagccctggccttcaaattttcatggcaattgatttgagtaataactctgtctcccatgtgtggtggccagcatcatgtcaaactctttctttattgcaatgtcatggtcacagtgaattggttttgtctgtgcagtgggcgggaagaacctgttagcagcagaatgtatcctagtgacacggcaccaaagyatgttggctgcggcaaatccatatgggtctgcagcaacctcaattcttgc

SEQ ID NO: 638517 - DNA, 635 bp, Homo sapiens
gtcgtgggaaagtaaagacatcatggacatcctggacatcgggttcaaggtttcagctggaaattgggtctggagctaatgagagtgatctggtccataggttatgagtgacttatttttaaggaaggaaactatgttttcttaactggtaaaatatacatcatataaaatttaccactttaaccattttaagtgtacaattgagtttcattaagtacatttayaacgttatataattatcaccaatatccatttcgagagctattttgccatcccaaagagaaactctgtatccattaacgaatagctctcttctcccctctccctccagactagtaatctctactctgctctgtctctatcaatctgactattccaggtacatcctataaatgtcaacatacaatagttgtccttttgtgtatggattatttcacttagcacaatgttttcaagatttactcatgttgtagtagcatttatcagaatttcactcttttttaatggctacataatattccattgtatggatatagcatattttgtttattcattcatctatccatgggcacttaggtagttttcagcttttggctgctctgcacaattgtgcaatgatcattggtgtacaaata

SEQ ID NO: 638518 - DNA, 567 bp, Homo sapiens
ttttttccttggttgctcatgcgtttggtgtcacatctaagaatcaactgccaaatccaaggtcacgaagatttatttctacattttctcctaagagttttatggttttagctattatatttaggtcattgttccagatgctttgattctgatagctttccttttcatacctttgatttcttcttgctgtagtgtgattttctgctttggtgatctgagcagactgacttaacttgtaattaygttaaaggagagttattcagccccggttagattccttctgtgttacagtgactgaatatttaacctttatgaaattcaacttccttatccgaaaaatggaaatagtacttttccttagggttgtggtgaggattaaatgagaagattaagtgtataaaagacttagcagtgtttttgaagcacagtaaaagctcagtaaatgctggctagtattgatgtcattgttgtcattattatgctgaaagtttgtatgtaatataatatcatttttccccatctgtgaacctagcgtggagatcagacatgtataaaggaaagatacaa

SEQ ID NO: 638519 - DNA, 568 bp, Homo sapiens
gcatccaacctgtatttcctgtatgtctgagtcttkaacttatggtcacttgagggcggaccaggagttggaactatcattcattcacttagtcagtgtgcaaacatttattgaacacatgacatgtaccagacattatgctaggtgctgggaaacaatagagaataacacaagtctatctgcctcacaaaatgatagacactagtgagtcctttacaagttagttggtttctacccatagagacggaaagtattatagaatggtggctaccaaaggctggggagagaagaatggggagctttgtttaatgggtacagagttttcatttaattttgcaagacaaaaagagttatgaagatggatgggggccgatggttacacacagtttgaatgtacataatactactgagctgtacatgtaaaaatggctaagatgatacattttatgtatatataaccacaattgaaaaaaagtacacccccacccccaaaaatagaacaataaatttacacatgttgttaagggaaaaaatgtgagttggtttctaaaaatgaatggtaaaagct

SEQ ID NO: 638520 - DNA, 553 bp, Homo sapiens
acagaatggccctttgtagatgtgattggcacataaaacgggattactaccttagccattttagacacaataacatatgtatattacataaattgacagatgtggctaacattaagctctaatcaaaagctatactatttcctgcccttgcactgaaatacaamatacctgacttaaatacctaacatctagtccaattcttgaatcatatgtgaattgacgttttccaaatcatgctaactcacagcaaactcttcttttctggagggtttattatttgcaccgcttatttggcattgctttgaactattttttgtttttcttttgcttatgtctcatttctccagttggaatgtcagcactaaaagtgataagtatagcactagaacaaaaactagtacacttttagggtcctccacagtgtcattacactctctctctctctctctctctctctctctgtgtatatatatatatatatatatataatatttattagctgacttcccagtatttttccctatggcttcagaaactcttttaaaaaatacat

SEQ ID NO: 638521 - DNA, 553 bp, Homo sapiens
acagaatggccctttgtagatgtgattggcacataaaacgggattactaccttagccattttagacacaataacatatgtatattacataaattgacagatgtggctaacattaagctctaatcaaaagctatactatttcctgcccttgcactgaaatacaacatacctgacttaaatacctaacatctagtccaattcttgaatcatatgtgaattgacgttttccaaatcatgcyaactcacagcaaactcttcttttctggagggtttattatttgcaccgcttatttggcattgctttgaactattttttgtttttcttttgcttatgtctcatttctccagttggaatgtcagcactaaaagtgataagtatagcactagaacaaaaactagtacacttttagggtcctccacagtgtcattacactctctctctctctctctctctctctctctgtgtatatatatatatatatatatataatatttattagctgacttcccagtatttttccctatggcttcagaaactcttttaaaaaatacat

SEQ ID NO: 638522 - DNA, 568 bp, Homo sapiens
taacataaacttccattaaggttatattcaaattattaaatcattcaagtcactcccaaaatacagaaaattgagttatccacagtacataattagatcaatgcctaagaaattaaggaaaaagagaactttaaaaagaaccacaggtgaggattctaggaagatggcagagttggaactaccagaaatctagctcctcacctagatgacaattgcactggaagaatctgtctgatgtaactatgttagaactctggagtcaatgcaaggcttccatcttccaggggacagcttagatagtaaattgtagtgaattttggtgaatttcagctcttaatacagtagcggctacccatcccccactctaagcccagtggcaggyaattgtgcacctgttcctggagcagctttatataatacaactttcatacaactttgagagccagggtggacgaacaggaccctgtcctgcaattattaggtatttgtgctctgatctccagattgctgcttctgatcacacaaagaggttatggccattgtttttgcatctccctcactgttgcaa

SEQ ID NO: 638523 - DNA, 567 bp, Homo sapiens
gccccatgcctactggcagctctaaaccttccatttctggattgaatgaacattacagggacttcagtgaacaatttgacgctatgactagatatacacagaccctattacatttagagcatatcatcaacaggtaaaaggggcatggcttstgctgactgacagaccttactataaaccttttgactgggaaatcagagtacatcaaggcttttagaagaaaacatacgctgtcacctaactgggaatgtccttgcaaagtaccactgaccacctacactgctatcaaaataaaagaaaaatcctcctggattcgtgcaagtcatgccaaaccagacccagattaccactcccagggcaattggaagaccatccctacaggtgacctttaagtaaggatttccagagtcgagacccaggcccaggaagcaaacaatatcatgaagtagacagtttttcccaagatcacagatcaagcaactttgcttacacctattaatattttcttcctcttttcagcctctcaaattcaataaatataaaaacaacaagagatcagaaaacaac

SEQ ID NO: 638524 - DNA, 567 bp, Homo sapiens
gccccatgcctactggcagctctaaaccttccatttctggattgaatgaacattacagggacttcagtgaacaatttgacgctatgactagatatacacagaccctattacatttagagcatatcatcaacaggtaaaaggggcatggcttgtgctgactgacagaccttactataaaccttttgactgggaaatcagagtacatcaaggcttttagaagaaaacatacgctgtcacctaactgggaatgtccttgcaaagtaccactgaccacctacactgctatcaaaataaaagaaaaatcctcctggattcgtgcaagtcatgccaaaccagacccagattaccactcccagggcaattggaagaccrtccctacaggtgacctttaagtaaggatttccagagtcgagacccaggcccaggaagcaaacaatatcatgaagtagacagtttttcccaagatcacagatcaagcaactttgcttacacctattaatattttcttcctcttttcagcctctcaaattcaataaatataaaaacaacaagagatcagaaaacaac

SEQ ID NO: 638525 - DNA, 567 bp, Homo sapiens
gccccatgcctactggcagctctaaaccttccatttctggattgaatgaacattacagggacttcagtgaacaatttgacgctatgactagatatacacagaccctattacatttagagcatatcatcaacaggtaaaaggggcatggcttgtgctgactgacagaccttactataaaccttttgactgggaaatcagagtacatcaaggcttttagaagaaaacatacgctgtcacctaactgggaatgtccttgcaaagtaccactgaccacctacactgctatcaaaataaaagaaaaatcctcctggattcgtgcaagtcatgccaaaccagacccagattaccactcccagggcaattggaagaccatccctacaggtgacctttaagtaaggatttccagagtcgagacccaggcccaggaagcaaacaatatcatgaagtagacagtttttcccaagatcacagatcaagmaactttgcttacacctattaatattttcttcctcttttcagcctctcaaattcaataaatataaaaacaacaagagatcagaaaacaac

SEQ ID NO: 638526 - DNA, 557 bp, Homo sapiens
gctcttgttcattggactctgcaagcagtgagcaactgaacctgcrtttcagttataagagagtaggaaaggcttcatggagaagttgacccttgagttgagtcttgaagatgagaagattccactaggagaatgggcaatgaaaggaaggccagtacatgggagctgataaaacagcatggtgtatgaagagtcagcctagttcacacttgtcttgagtgcagtgtccacaagtactatatcatgaagagccttagctaccatgcaagggaattttaaagtattgcatcctaagcaggcttgtcgtaacacttgtgaggttcagggcaagagcagaagtacaggtttttggctgtcttcctgtttcctctcctccaacctaaagatcctcacacacatctgtgaatagcccagcctgcatgtctaagctatgtcctatcctcatgaaaacatctgccttttggcctcctctaaggcttaagaatgagccttggcagcctggtggcttcatgggtctggaagcagactcagattctttgggctgggtgttccaggag

SEQ ID NO: 638527 - DNA, 557 bp, Homo sapiens
gctcttgttcattggactctgcaagcagtgagcaactgaacctgcgtttcagttataagagagtaggaaaggcttcatggagaagttgacccttgagttgagtcttgaagatgagaagattccactaggagaatgggcaatgaaaggaaggccagtacatgggagctgataaaacagcatggtgtatgaagagtcagcctagttcacacttgtcttgagtgcagtgtccacaagtactatatcatgaagagccttagctaccatgcaagggaattttaaagtattgcatcctaagcaggcttgtygtaacacttgtgaggttcagggcaagagcagaagtacaggtttttggctgtcttcctgtttcctctcctccaacctaaagatcctcacacacatctgtgaatagcccagcctgcatgtctaagctatgtcctatcctcatgaaaacatctgccttttggcctcctctaaggcttaagaatgagccttggcagcctggtggcttcatgggtctggaagcagactcagattctttgggctgggtgttccaggag

SEQ ID NO: 638528 - DNA, 499 bp, Homo sapiens
gaaaatatttgcatttcactttcttgtccatcaaaaaaagggaagaaaaactaaaacagttaagattttgtactgaaatagtgagcatttacaccctgccacatatttgtggagaggaggataaacaagtgcaaggaaatacccaggagaaggacttgatgaatgagacaattggcaggacatatgatgggtctgaggagtggctgaagatgatgtctttaaacttggacttccctgattttcagaatggagcattgcaatgagcctgcattcagggtccatagatcaaacctgaatatccccagttacctagtagatagggctgcargtggcaggggtgggggctgggcattagtggtctaacctcgtatgaactttcctgcttctggtcaagaaggctttggaattctgttgggggttgaatctgggtgctgaatttttgctttaatctgtgaattgttgcggatgcccacggctgaaattaactaacttttaaaaa

SEQ ID NO: 638529 - DNA, 499 bp, Homo sapiens
gaaaatatttgcatttcactttcttgtccatcaaaaaaagggaagaaaaactaaaacagttaagattttgtactgaaatagtgagcatttacaccctgccacatatttgtggagaggaggataaacaagtgcaaggaaatacccaggagaaggacttgatgaatgagacaattggcaggacatatgatgggtctgaggagtggctgaagatgatgtctttaaacttggacttccctgattttcagaatggagcattgcaatgagcctgcattcagggtccatagatcaaacctgaatatccccagttacctagtagatagggctgcaggtggcaggggtgggggctgggcattagtggtctaacctcgtatgaaytttcctgcttctggtcaagaaggctttggaattctgttgggggttgaatctgggtgctgaatttttgctttaatctgtgaattgttgcggatgcccacggctgaaattaactaacttttaaaaa

SEQ ID NO: 638530 - DNA, 609 bp, Homo sapiens
ttacctatgattataagcatgatttcaaactaactctaacaggaataaaaccccacattacattttaataaggtagtatcaatcttgagttattaagaaatgtatatgctgcacactgctcagaaatatgttagcatggtattgttggccacccacggattatcacacagataagggcatgctagggaccttcagaagcaaatgttcatttcatgttatgctcacagagttttgagactgtaaaatgtatggcamaatttgaagtatttggccactgtcagtgacacgaataggttatataaactgcatttacttccagtggaaaaagtaaactaccacgctgatgatgatagctgagcagaccttagaacactaccctagaagtaaatttatgatcctgtggcatgctagtggatcccctgaacacactaaacctttgattgaagatttgtaagaaaaaaaactaatttccagaactatatatatatatttacactggaaagaaaatgaagtggaaaataaagtaagcaatagcttcaaatttatttaagtttatttgaaaccttttttcaaaagccaatcaatgctcagaacagagaattagaattc

SEQ ID NO: 638531 - DNA, 591 bp, Homo sapiens
tctcttactgcctttaatgttaccgtcctgttgcatatgtatttttaccatgcaataactcatatttattttaaagaactctagacttgaagtcagtggatcacaaggaatgagggggtttggatatgagacctaaatataatgtaaagcttattatgatcttacggtgggtagagagatggagcttaaaaggatcataggaaagaagtatttgaactacattgctgaaagtagcaaaaatataaatcatttatatatggaaatttgagtaatacattaaatacatggtaaattatttgggaaggttaygtagctcacattttattataccttctctatcctatgcagtttaatacacacgatgggccctccaagttaaataacccaatgaaacgggaacatgctcttttgtattgaagttaaatttagtgaaggccacccactttcaataacattgaagcacatatattctgttgttgctgtccattaatatttatttttccccgtacaatgaagtatgaagctatcgagataggtttcataaatgacctatgaactgttatttcaaagcacacaaactatgtaaattgg

SEQ ID NO: 638532 - DNA, 650 bp, Homo sapiens
gaaattaaatataaagggtaaaattgtgctttaaacatggaaactgcattccctttggactggtawaattgtagcctggtggtcaagaaatacaaatctagaaagaggatgacagaggctttaactctattgcccccagattttgacttttggttgtctcaatttatataattttctgttgcctatcacttaacacgttgctgtagctattattgtttttgatagttttgccttttaggcttcacactagttataagtggattgcacttcacaattacagtgttgaggtattctggggttgtcttcattttacctatgagttttatacctttgaatgttttcttgtttcacgttagtgtctttttctctcagagtgaagcattttcttttgtatttcttatatgactagtcaggtggtggtgaattattataacttttgtttggaaaacttttaactatgttttcagtttagaaatatatttctcagtttgaggatttccatttgacatttaattatttcaatctcttcattaaatatctctgataaatttctgaatcacttttttttgtattatcttggagatcactgagtttcttgaaaattactcttttgaattattgatcagagagctcatgtgtcactgtctcac

SEQ ID NO: 638533 - DNA, 650 bp, Homo sapiens
gaaattaaatataaagggtaaaattgtgctttaaacatggaaactgcattccctttggactggtataattgtagcctggtggtcaagaaatacaaatctagaaagaggatgacagaggctttaactctattgcccccagattttgacttttggttgtctcaatttatataattttctgttgcctatcacttaacacgttgctgtagctattattgtttttgatagttttgccttttaggcttcacactagttataagtggattgcacttcacaattacagtgttgaggtattctggggttgtcttcattttacctatgagttttatacctttgaatgttttcttgtttcacgttagtgtctttttctctcagagtgaagcattttcttttgtatttcttatatgactagtcaggtggtggtgaattattataacttttgtttggaaaacttttaactatgttttcagtttagaaatatatttctcagtttgaggatttccatttgacatttaattatttcaatctcttcattaaatatctctgataaatttctgaatcacttttttttgyattatcttggagatcactgagtttcttgaaaattactcttttgaattattgatcagagagctcatgtgtcactgtctcac

SEQ ID NO: 638534 - DNA, 380 bp, Homo sapiens
aaccagttgctagagtctgaacgtttgtgttcccttaaaatttatgtactgaaacctaatctcaaattcagtggtattaagaggtggggtctttgggaggtaattaagttataaggggtctaytcacaggaatggaattagtacccttataaaagaggctttaagggggtctgttggccccttgctctatgtgaggacacataggaggaatcagctatgatgaactggccctcactagatgccagatgtgctaccacattgatcttgggcttcccagcctctagaactgtgaataaacgatttatttgatttataaatgatccggtctattttgttatagtagccaaaacagatgaagacacctacatctcaaatatggt

SEQ ID NO: 638535 - DNA, 380 bp, Homo sapiens
aaccagttgctagagtctgaacgtttgtgttcccttaaaatttatgtactgaaacctaatctcaaattcagtggtattaagaggtggggtctttgggaggtaattaagttataaggggtctactcacaggaatggaattagtacccttataaaagaggctttaagggggtctgttggccccttgctctatgtgaggacacataggaggaatcagctatgatgaactggccctcactagatgccagatgtgctaccacattgatcttgggcttcccagcctctagaactgtgaataaacratttatttgatttataaatgatccggtctattttgttatagtagccaaaacagatgaagacacctacatctcaaatatggt

SEQ ID NO: 638536 - DNA, 380 bp, Homo sapiens
aaccagttgctagagtctgaacgtttgtgttcccttaaaatttatgtactgaaacctaatctcaaattcagtggtattaagaggtggggtctttgggaggtaattaagttataaggggtctactcacaggaatggaattagtacccttataaaagaggctttaagggggtctgttggccccttgctctatgtgaggacacataggaggaatcagctatgatgaactggccctcactagatgccagatgtgctaccacattgatcttgggcttcccagcctctagaactgtgaataaacgakttatttgatttataaatgatccggtctattttgttatagtagccaaaacagatgaagacacctacatctcaaatatggt

SEQ ID NO: 638537 - DNA, 531 bp, Homo sapiens
cagagaaataaacatgaccaggatttataaaagcaaatatacaaaacttcagtgttattgagtaaatttgggaagtagttatggttgtttatgtagtgatttgtaagatgaaggtaaaggccacttaggcctgtctgagaagctgtataagtagatgtttattctggttgctgcatgaagaataggttagaagggaacatgggtaaagatcacgaagacaccactaatgaggttctttgtaaatatggttctgtacagtttgaataacattgagtttatgtgttttgttttattttgttttttcagagacagggtcctgctttgttgcccaggctaaaatgcaacggygctatcataatcatggctcactgcagcctcaacctcgtgggtacaaagtatcctcctgcctcaggctcctaaagttttgggattacaggtatgagccactgtgcccagctgtcatttctaatgagagtggaagaactgaaaagagtgaaacacatcagagaaaaatcttagtggcataaatga

SEQ ID NO: 638538 - DNA, 531 bp, Homo sapiens
cagagaaataaacatgaccaggatttataaaagcaaatatacaaaacttcagtgttattgagtaaatttgggaagtagttatggttgtttatgtagtgatttgtaagatgaaggtaaaggccacttaggcctgtctgagaagctgtataagtagatgtttattctggttgctgcatgaagaataggttagaagggaacatgggtaaagatcacgaagacaccactaatgaggttctttgtaaatatggttctgtacagtttgaataacattgagtttatgtgttttgttttattttgttttttcagagacagggtcctgctttgttgcccaggctaaaatgcaacggtgctatcatratcatggctcactgcagcctcaacctcgtgggtacaaagtatcctcctgcctcaggctcctaaagttttgggattacaggtatgagccactgtgcccagctgtcatttctaatgagagtggaagaactgaaaagagtgaaacacatcagagaaaaatcttagtggcataaatga

SEQ ID NO: 638539 - DNA, 531 bp, Homo sapiens
cagagaaataaacatgaccaggatttataaaagcaaatatacaaaacttcagtgttattgagtaaatttgggaagtagttatggttgtttatgtagtgatttgtaagatgaaggtaaaggccacttaggcctgtctgagaagctgtataagtagatgtttattctggttgctgcatgaagaataggttagaagggaacatgggtaaagatcacgaagacaccactaatgaggttctttgtaaatatggttctgtacagtttgaataacattgagtttatgtgttttgttttattttgttttttcagagacagggtcctgctttgttgcccaggctaaaatgcaacggtgctatcataatcatggctcactgcagcctcaacctcgtgggtacaaagtatcctcctgcctcaggctcctaaagttttgggattacaggtatgagccactgtgcccrgctgtcatttctaatgagagtggaagaactgaaaagagtgaaacacatcagagaaaaatcttagtggcataaatga

SEQ ID NO: 638540 - DNA, 456 bp, Homo sapiens
tataattaaataatatcagtttcatttctaccttctggtctttatctctggtgactttgtggttatgtgtaactttacagatggtattgcctggaagacaggattctgaaaccagcaccaactttccttctgccttctccttggtcagtgtggacagacaatcgctggagaggtaagatcagggtgttttccctccaccacaatggcaagcctatacccaacctgaacgtgtagatgtatttaattcattaggcagaactcaaagttacctcaacctggccgaccaatcactctctgaccttgtttgtaacccgagtgaaagctcttgaccagaaatgaagaaatggagtcacattcatacccaaccctctcttgatrtaacaggagtagtgaatccaggcttgagagagatggtagatatccaggaagttacatgaacagttccaaagcaaaagc

SEQ ID NO: 638541 - DNA, 612 bp, Homo sapiens
atttcttaataattcagtggcatttattacatgaacagtgtttgccatcaccactctatttccaaaacattttggtcaccccaaaagaaaagcgcttacggattaagtatttaatcccatttccctctccttggccctggcagctccctatctactttccatatggactttatactttctgctagatcttttgtatctggcttctttcacttagcgtaccaacttaaagttttatccaccttgtagagtgtatctgtatgttaatcatttttatctctgactagtattctatcatatacatataccatattttgtttattcatttgcttgatgagcatttgggatgttttcacattttaggtcttgggaatagtgttgctatgaacaattgtgtgcaaatatttgtttgattaccacttttcaattatttggggtttatgcctaggcatggtattgctaggtcaggaaatcagaaagtgmatctttcaatgtggttcttcttcttcaatgttattttggctatttgtaggccttcacatttcaatgtgaattataggatggcttttccatttctgcaaaatggctactggaattttcatatgcatagcattg

SEQ ID NO: 638542 - DNA, 554 bp, Homo sapiens
gatgaagaataatccctaatcctacctctagtttgctcttcccccaatatacccagctattgagaacccaagggatactttacgtaagtaattataatgtctattcttcataactaaactaattggcagtagtgtaaactgaggctcagaaagactaagtaacttgtcagcaagatgcagatatttaatgtaagcataggtcagatgactgtaaagttactcttcttttcaactrcacttccagggacctttacattttataagtgtattctttcatcttaacaaaacaacttggaagaatagctctggtatcttcttgcaactggtgttatcaagccaattgcacgcattcagaaggctatatcactctgctcctgactaatggtcactgtggaaactgtaactatactgtgattcacacagtttggcttcatccaagcccagtgccagcaggtcagcttcactctgttaactcccgtggggtgaaggtcattacagaactccgccttggctaagcttatgcacagctgatcatggatgatgctgcatagttg

SEQ ID NO: 638543 - DNA, 624 bp, Homo sapiens
tcattttgtaataataataaaaggactagtccaacaggaaaatatcacattcctaaatatatatgcacccaacactagagctcccaaacttgtgaaacagtttctacttgatatggtttggctgtgtcctcagccaaatctcatcctgagttgtaactccgataattcccatgtgttgtgggagggacttggtggggataatggaatcatggcagcagtttcctccatactgttcttgtggtagtgcatcagtctcaagagatctgatggctttataaggggaaaccccttctgcttggtcctcattctgtctttgcctgccaccatgtaagatgtsccttacccttcagccatgattgtgagacccccccctagccatgtggaactgtgagtccattaaacctcttttccctataaatgacccagtctcagctatgtctttattagcagcatgaaaacagactaatatagtaaattggtactggtacagtagggcaccgctgtaaagatacccggaaatgtggaagcaactttggaactgggtaacagccagaggctgcgacagtttagaggagtcagaagaagataggaaaatgtggaaagtttggaacttcctagagactt

SEQ ID NO: 638544 - DNA, 564 bp, Homo sapiens
agttattcttacatcagccaaaacaaactttaaaacaacagttaaaaaagacaaagagggtcattttgtaataataataaaaggactagtccaacaggaaaatatcacattcctaaatatatatgcacccaacactagagctcccaaacttgtgaaacagtttctacttgatatggtttggctgtgtcctcagccaaatctcatcctgagttgtaactccgataattcccatgtgttgtgggagggacttggtggggataatggaatcatggcagcagtttcctccatactgttcttgtggtagtgcatcagtctcaagagatctgatggctttataaggggaaaccccttctgcttggtcctcattctgtctttgcctgccaccatgtaagatgtcccttacccttcagccatgattgtgagacccccccctagccatgtggaactgtgagtccattaaacctcttttccctataaatgacccagtctcagctatgtcyttattagcagcatgaaaacagactaatatagtaaattggtactggtacagtagggcaccgctgt

SEQ ID NO: 638545 - DNA, 624 bp, Homo sapiens
tcattttgtaataataataaaaggactagtccaacaggaaaatatcacattcctaaatatatatgcacccaacactagagctcccaaacttgtgaaacagtttctacttgatatggtttggctgtgtcctcagccaaatctcatcctgagttgtaactccgataattcccatgtgttgtgggagggacttggtggggataatggaatcatggcagcagtttcctccatactgttcttgtggtagtgcatcagtctcaagagatctgatggctttataaggggaaaccccttctgcttggtcctcattctgtctttgcctgccaccatgtaagatgtcccttacccttcagccatgattgtgagacccccccctagccatgtggaactgtgagtccattaaacctcttttccctataaatgacccagtctcagctatgtctttattagcagcatgaaaacagactaatatagtaaattggtactgstacagtagggcaccgctgtaaagatacccggaaatgtggaagcaactttggaactgggtaacagccagaggctgcgacagtttagaggagtcagaagaagataggaaaatgtggaaagtttggaacttcctagagactt

SEQ ID NO: 638546 - DNA, 608 bp, Homo sapiens
aaatgtaaggatgtgagatttgggaggggccaggggcaaatgatatggtccggctatgtccccactgaagtctcatcttgaattgtaggtcccatatttcccacatgtgagagggacccagtgggcgataattgaataatggaggcagttttccccatactgttttcatggtactgaataagactcatgacatctgatggttctataayggaaaacccctttcacttggtcctcagtctctctttgcctgctgccatgtaagatgtcccttggtcttctgccatgattgtgaaacctctcaagccacgtggaactgtgattccattaaacctttttttctttacaaattacccagccttgggtatgtcttattagcaggatgaaaacatactaatacactgatagccttaagtgagatagacagtaacacagtaacagtgggggatttcaatactccactgacagcactagacaggtcatcaagacagaaagtcaacaaagaaacaatggacttaaactatatcctccagaaatggacttaacaaatatttacagaatattctaccccacaactgcagaatatagatttttttttcatcagcacatga

SEQ ID NO: 638547 - DNA, 553 bp, Homo sapiens
ataaaattggaaatcaactccaaaaggaaccctcagaaccacacaaatacatggaaattgaataacctgcccctaaatgatcagtgggtcaacaatgatatcaagacggaaattaagacattctttgggctgggcacagtggctcatgcctataatcccagcactttgggagaccgaggtgggcggatcacctgaggtcaggagtttgagaccagcctggccaacatggcgaaacccagtctccactaaaaatacaaaaaaattagccaggcatggtggcaggtgcctgtaatcccagctactcaggaggctgaggcagaagaatcactagaacctgggaggcagaggttgcagtgagctgagatcaggccactgtactccagcctgggtgacagaataagattctgtctcaaaaaaaaaaaaaaaattccttgaactgaatgataatggtgacacaatctatgaaaacctctgggatatggcaaaactagtgctaagaggaaagtccatagcattaaatgcctayatcgaaaagtctgaaagagcacaaata

SEQ ID NO: 638548 - DNA, 477 bp, Homo sapiens
ttaatgaaataatttaaatggtaaaaaacaaaaagtttattgcgaatatcagttattctgcacattagctattcggtaaattgttaaaaaaaatgacagacagcctcattggaagcaggttcataatgtattacctggtctatgttagtgaggggaatcaaagtgggggcagtcactgacattcagaagatggctggcacccacagttagactgtacattctcctatgggaagtagttttacagaataccaacctcacataatccttatcctaaaaattctggagatgataaccattatattttgatatttagcatatacaggacaagtctgtattmtatatcatttttgtttttagataacttattttctttctaggtgcttaaataattttctctgtaatctctatcacagttgtgtggttagtagtggcactatttttattacttgttccagaatctggtgaaaaaaaattttt

SEQ ID NO: 638549 - DNA, 630 bp, Homo sapiens
acagactaataacaagcagcaaaattgaaatgataattttaaaaatgccaaccaaaaaagttcaggatcagacaaattcacagctgaattctatcagacattcaaagaagacttggtaacaatgctattgacactattccactagagaatgagggattcctccctaaatcactctatgaagccagtattaccctaataccaaaaactgggaagaagataagaaaaaaaaagtgcaaacaatatccctgatgaaaatagatgcaaaaatcctcaacaaaatactagctaactgtattagtctgttttcacrctgctagtaaagaaatacccaagactgggtaatttataaataaaaagaggtttaatgaactaacagttccccaatggctggggagacctcacactcatgttggaaggtaaaaggcatgtcttacatggcagcaggctagagagaaaaatgagagccaagtgaaataaaaaataaaataaataaaaataaaaaataaagaaaaaagcctgttaaataatattaagaaaaagaaaaatctagcattcaatatgatgtttttatgtatgtttacatcaattaaaaattaactaaataaaaaaagtatgaaaatgttaaatttg

SEQ ID NO: 638550 - DNA, 628 bp, Homo sapiens
atgtcttctgtatcttttatatttctctattactgcatgtgttatactctgctgaatttattagtttatgagcttctcaaaagattataagttttttgaaagcatgggctctcttacattcaatgttcrttgagtaaacaccaatgaattataaaatgaattgaataatttttaattgatcaaatttgaacatatttttcatgattcatgatatctactttaggatgtaacactgttgaaatactgctacttctataaaataagatatatacaagtaaaaagatattcagtacattattcattaccttctattgtggcattctgtttacttttggacaaaaatactaagtaaattatgttttctttgaaggagctcataattttatggtagaagttagataagacaggctgaaagcctcagctttatcatctttagtagggtttatttggtgagtctctcaatctttatcagctttataatattaatgttgatacttattttagagaattgttgtaagcattaatcttagtcttcatgtaatatgttggtgttattatatataatctatcattgtactttgaggtatcttctaagtaaaataatatattcaatcaccatttaaaatga

SEQ ID NO: 638551 - DNA, 591 bp, Homo sapiens
tttatgccggtgcagctaatataatactaagagtcttaaagatgagagagggtagctggtgtgtctttgtcacagtgccacaatgtgaagaagactcgactggtcactgccgtgaggctaagagggcagtgaggctctagaaactggaaaaagccagaaaacgcttcctcctagagcctccaaaaatgaatgcagccttgctgataccttgtttttaagcccagtaagrtctattttgtatttctgaccttcaaaactgtaaggtaatagatttgtgttgtcgtaagccagcaaatttgtggtaattcttcacagctctgtgggtaaatatgtgcaagctaccatgtctattttagaaataccgtgagcatctatcttcctactgcctctgttattgtgcgagttcggttccttcatgaaaataaaacaagaattatatgtaagaccaggtgcagtggctcacgcctataatcccagcactttgggaggccaagatcgtaggcagattgcttgaagccaggagttcaagaccagcctgggcaacatagggagaccctttaccaaaaatacaaaaaactagccaggcatggt

SEQ ID NO: 638552 - DNA, 554 bp, Homo sapiens
cctgcactggtccattgatacatacatttttttcaataaatctctcctgtctccctttccaccccacgcctacaacctcttctgcctttgccacctgatatggtttggatttgtgtccccacccaaatctcatgttgaattgtaattcccartgttggatgacaggcctattgggaagtcactggatcatgagggtggatttcccccttgctgttcttatgatagtgagggagttctcaggagacacggttgtttaaaagcgtgtaacacctcccctttctcactcttcctccttctctggccatgtaagacatgccttcttcctcttcaccttccaccacaattgcaagtttcctgaggcctccccagtcatgcttcctgtacagcctgcagaactgtgatccaattaaccctcttttctttataattacccagtcttaggtagttctttataacaatgcaagaatgaactaatactctgccctttagacagcaaaatcgacgcctctacttcctcctcatcagcccactcagcgtgaagatgatgaggatgg

SEQ ID NO: 638553 - DNA, 554 bp, Homo sapiens
cctgcactggtccattgatacatacatttttttcaataaatctctcctgtctccctttccaccccacgcctacaacctcttctgcctttgccacctgatatggtttggatttgtgtccccacccaaatctcatgttgaattgtaattcccagtgttggatgacaggcctattgggaagtcactggatcatgagggtggatttcccccttgctgttcttatgatagtgagggagttctcaggagacacggttgtttaaaagcgtgtaacacctcccctttctcactcttcctccttctctggccatgtaagacatgccttcttcctcttcaccttccaccacaattgcaagtttcctgaggcctccccagtcatgcttcctgtacagcctgcagaactgtgatccaattaaccctcttttctttataattacccagtcttaggtagttctttataacaatgcaagaatgaactaatactctgccctttagacagcaaaatcgackcctctacttcctcctcatcagcccactcagcgtgaagatgatgaggatgg

SEQ ID NO: 638554 - DNA, 497 bp, Homo sapiens
agctctttgcaactgccttattatggtatctggctgcaataatcttactatagtgagaacattttgcacagctcttcatattcgttggaggtttcttaaacctgacagagggccccagccatttaaatgacagttttctcaagctgtcattttaatatcaataattcagctatcctccatgtttctgacttttgttcattttttttacttcagatgtgaagatatgaattgyttcttttattgtcttataaacatacttctgaaattcaccattgctttctatttctcaggtgtttcttaactggatgaaattaaaataatcaaaaaatagcttgcagattcaactacttactcattttaaaaatcagcaacagacacttacttgaaaatctgcatgtatttagaagcatatctgtataatctatgtcttgcttaatgcccactgagcaatgactgtaagttaacattgttctaagttctttcaatacctcaatcat

SEQ ID NO: 638555 - DNA, 497 bp, Homo sapiens
agctctttgcaactgccttattatggtatctggctgcaataatcttactatagtgagaacattttgcacagctcttcatattcgttggaggtttcttaaacctgacagagggccccagccatttaaatgacagttttctcaagctgtcattttaatatcaataattcagctatcctccatgtttctgacttttgttcattttttttacttcagatgtgaagatatgaattgtttcttttattgtcttrtaaacatacttctgaaattcaccattgctttctatttctcaggtgtttcttaactggatgaaattaaaataatcaaaaaatagcttgcagattcaactacttactcattttaaaaatcagcaacagacacttacttgaaaatctgcatgtatttagaagcatatctgtataatctatgtcttgcttaatgcccactgagcaatgactgtaagttaacattgttctaagttctttcaatacctcaatcat

SEQ ID NO: 638556 - DNA, 497 bp, Homo sapiens
agctctttgcaactgccttattatggtatctggctgcaataatcttactatagtgagaacattttgcacagctcttcatattcgttggaggtttcttaaacctgacagagggccccagccatttaaatgacagttttctcaagctgtcattttaatatcaataattcagctatcctccatgtttctgacttttgttcattttttttacttcagatgtgaagatatgaattgtttcttttattgtcttataaacatacttctgaaattcaccaytgctttctatttctcaggtgtttcttaactggatgaaattaaaataatcaaaaaatagcttgcagattcaactacttactcattttaaaaatcagcaacagacacttacttgaaaatctgcatgtatttagaagcatatctgtataatctatgtcttgcttaatgcccactgagcaatgactgtaagttaacattgttctaagttctttcaatacctcaatcat

SEQ ID NO: 638557 - DNA, 466 bp, Homo sapiens
ttcagatgtgaagatatgaattgtttcttttattgtcttataaacatacttctgaaattcaccattgctttctatttctcaggtgtttcttaactggatgaaattaaaataatcaaaaaatagcttgcagattcaactacttactcattttaaaaatcagcaacagacacttacttgaaaatctgcatgtatttagaagcatatctgtataatctatgtcttgcttaatgcccactgagcaatgactgtaagttaacattgttctaagttctttcaatacctcaatcatttaagtaatcaaaataaatctttgaacgttctgttgtaaatttatggcattaaatattagacactatattgaatacaaagttatagcaaaaaacgattttgttgatcatctgctatagaacatttkttcattttatgcaatataaaaagctgagtaaacatgatttcaaataaggta

SEQ ID NO: 638558 - DNA, 584 bp, Homo sapiens
ggtgtgttaggcatgatggtagaataatggcccccgaaagtgtacacatccaaatccctggaacctgaaaatatggttgtttacatggcaaagcagaattaaggttgcagatggcattaatattgtcaatcagcaaaccttatgctagggagaacatacaggtrggcccaatgtcataagagtccttcaaagtgaaagagaaaattggaaaagaaccagatagaaagcagcatgaagagaatcaaggccaatggtgctggctttacagatggatgaaggggagcatggactaaagaatatgtccagaaggtggaaaggatgaacccatggattcttgcctggagcctccagggagaacacagctctgatggcatcttaatttcagcccactgaggcccactttggaattctgaactccagaagtataaaacaataaatttgtatcattttaaatcactagatttgtagtaatttgttacagcagcaacgggaaactaatacacttggtacctaaccattgatgtgggagagcacaaagccatgccaaaggaattaacgttaaactcatccactaacctcgactg

SEQ ID NO: 638559 - DNA, 573 bp, Homo sapiens
gtataaaataaactgattatattagaggttctacttctatttttagctcacagactatccattcacacattcattcattataaaaatgttatccagcatctacactgaaccagcaccacagcagaaaatgtcattacaggaaagtaaagtaaaaaaattggcaatggacttttagggtatgttccccatctccaaagaacacgtcctacttacagcctaaagaaggtcttgctctcgaattcgaggctcagtaaggcatagattaattcaccccactattaatgtgtagccaacttaatcccaggctctggattaagtggtccatatgtaacastattggtgacatctagaagaccttgcaacaagtcacaacctacttatttaatttctattttgaataaaaattgtcttggaatgattcagagtatatttacaaactgcttgagtaaagtactatattaagccatcttactgcatcctattgtgtttatcttcacttgtcagaaattgtgtgctgctgatttggagaatatggatggctttcaggtctgaatgggtagacatcttattttt

SEQ ID NO: 638560 - DNA, 573 bp, Homo sapiens
gtataaaataaactgattatattagaggttctacttctatttttagctcacagactatccattcacacattcattcattataaaaatgttatccagcatctacactgaaccagcaccacagcagaaaatgtcattacaggaaagtaaagtaaaaaaattggcaatggacttttagggtatgttccccatctccaaagaacacgtcctacttacagcctaaagaaggtcttgctctcgaattcgaggctcagtaaggcatagattaattcaccccactattaatgtgtagccaacttaatcccaggctctggattaagtggtccatatgtaacagtattggtgacatctagaagaccttgcaacaagtcacaacctacttatttaatttctattttgaataaaaattgtcttggaatgattcagagtayatttacaaactgcttgagtaaagtactatattaagccatcttactgcatcctattgtgtttatcttcacttgtcagaaattgtgtgctgctgatttggagaatatggatggctttcaggtctgaatgggtagacatcttattttt

SEQ ID NO: 638561 - DNA, 614 bp, Homo sapiens
aaaatttatagcttaatcatttaaataagcaaccatcatatagaaatacaaaccaataggcataaatttaaaataggaatgaatgaacagcaaaagatatacaattgaagtggaaaaaattcagaaagacattaaagaaaaaagttatctcagaaatgaataacaaaatataacctgcaaataaggaaatcaacacatatataacataaacatgtattaagaattccttcttttggatatataggcagccatgggattgttgtatcakatgttggtactatttttagtttttgagaaaccaccatactgttttctgtggtcgctgtactaatttacattcccactaccagtttacgaatgtttcccttcttccatatccttgctggcctctgttatttttttgttattttaataatagcaattttaactggagtgagattatagttcattgtggctttgatttgcattcctctgatgattagctatgctgagcattttttcgtatacctggttgccatttatatgtcttcttttgagaaatgtctattcaaatcctttgcttatttttaattattattattattatttttgctgttgatttgagttgcttacat

SEQ ID NO: 638562 - DNA, 598 bp, Homo sapiens
agaatacctattcattatttttgtgtcctcttcattctttcatcagtgttttatagttttcattgcagagatcttttccttcttttgttaaatttattcctaagcattttattttggtgtagctattataaatgagattgcttgcttgatttcagatcgttcactgttggcatatagaaatcctactgatttttaaatattttatgccmtgaatagtttgtttctaatacatcatgaatttaggtaaagtaaaaggctgattgttaagaagcagattgccatttataaaaataggatatgtgctgtaaaccatctttcaataaagtgggatatcagaaaaaaacactaggttataacatatctgtcatattctctcccttgaacatccaattcttagtataaaatgacttgccacgtgaaactctcagctagtcattggaatggcttgctattcataagccttggttccctactgagtcactgattgagttggctatgcagaattccctgaccctctggtctttccaattgccattattccaaggtaaaatatcctcatcaggagcctgaattctgtccctgcttacattgctagcca

SEQ ID NO: 638563 - DNA, 540 bp, Homo sapiens
ttttagttcacttctttttataataccaggaagaagggatcttctgcagaatgaacagagaaagatacagacatttatcttctggccgaacatcttctcctgttttttcaccaactgattcctgaaactacataagagtgaattttttcagaattttgcctcagagggctttctgatttaagggttaattcttcccacagcaattagcaagaattatctttgatgttagaagagtgttatttgttgaggaagatttaagtgtttcaaaatgtctgtcagtttttttattgggaaagaggaacgatatttcatggtactgaagaagatggcacagagggacccacctagggaatgctcctggcataatgcttgttggaattaaccaacgttaacctcttaatacaaactcttggggagtggcatgkattaatttttcaaagcagatttctggctttattttttattaatcagttatccatccctcttcctgtagcaactctgtagaagcagcatcttggaattttttttttttcaccttaa

SEQ ID NO: 638564 - DNA, 339 bp, Homo sapiens
tgttttccaatttggattcccaacccctatgtgttctgaaatttttatgtattcccaaaataattttgttttttccccattagaggacacgtgcagtgattaaaaggcatttttgctttaaccattcatgtagcttcagaaggagatctctgccttaatgttatcctgttgaggtattgrcaagaaattgccctctcttcatccctctttttactttcaaatgactaatttattacaggttttgagaattctccattcattatcttagagttattttatcttcaacatgggcatccaggcttataaagtccacactcaccaatatctagggataattaa

SEQ ID NO: 638565 - DNA, 614 bp, Homo sapiens
tttgcttggcaaactggatgtgatgattaacatttatctgtcccttgccaaaaagtacaatgacatgtttggattcatgatctcaactgtgtactcatttataacgtatctctrtgccatatcatagagcaaatcgcttctaggaacttgaatgccaggaatgaagaaggaatactgaattctattcacagctacttagtaatgaaggattatatctctgggaggtgtatttttagaaagggatatacagtttttagattattcttttcttatttcgaatttaatgcatgtttgctaaaatataacttaaaaaaagacaattaaaatggccacactttcagtactaaatattttctattttaatgttctgccagaatttttttctcccttaacccattacttttctctccatcccatctgcattacctcaaacatattcagatgcagataagaattcatatgtatgtgacttattaaccatcatgtcaaatttagtaatagaatgggtcaggaatagaaagaccattctgaagaagaataaaattggaatacaaactttactagatttttaaaaatactatagaacagcaataactaagaccattggtgtgagg

SEQ ID NO: 638566 - DNA, 614 bp, Homo sapiens
tttgcttggcaaactggatgtgatgattaacatttatctgtcccttgccaaaaagtacaatgacatgtttggattcatgatctcaactgtgtactcatttataacgtatctctgtgccatatcatagagcaaatcgcttctaggaacttgaatgccaggaatgaagaaggaatactgaattctattcacagctacttagtaatgaaggattatatctctgggaggtgtatttttagaaagggawatacagtttttagattattcttttcttatttcgaatttaatgcatgtttgctaaaatataacttaaaaaaagacaattaaaatggccacactttcagtactaaatattttctattttaatgttctgccagaatttttttctcccttaacccattacttttctctccatcccatctgcattacctcaaacatattcagatgcagataagaattcatatgtatgtgacttattaaccatcatgtcaaatttagtaatagaatgggtcaggaatagaaagaccattctgaagaagaataaaattggaatacaaactttactagatttttaaaaatactatagaacagcaataactaagaccattggtgtgagg

SEQ ID NO: 638567 - DNA, 554 bp, Homo sapiens
agcctggtggtggtggaatagaaggagagaggctttctctgatattctgattaatacttaatcttggtccaatactgcatccctgcatctaacatatttgggcttcatgggcatttgcaccactctcacctttcaggtggtgctagattaacacatacagctttttcttcctgcttccttcgcagagctgcaatgggttyccataaatgactcaaggtgacaattttttgttgctatttcccttcgagattaaggctttctccatagaaaagacaaggaagatggatccagatagagtttcaggagtggcgttcctcctcttctgctgggaacgccatgatgggaaccttttccattttctgcctatctttcatgtgagtgtctagagagactcatggagagaaatctttgggaacccatttagatatctgtgacctccagtgccctcacattctcatgctagccgacccttggcttttagcatttttttaagtagatgaatatttttaataagctttatggcattgggcagaatctatctcagataacaaaat

SEQ ID NO: 638568 - DNA, 554 bp, Homo sapiens
agcctggtggtggtggaatagaaggagagaggctttctctgatattctgattaatacttaatcttggtccaatactgcatccctgcatctaacatatttgggcttcatgggcatttgcaccactctcacctttcaggtggtgctagattaacacatacagctttttcttcctgcttccttcgcagagctgcaatgggttcccataaatgactcaaggtgacaattttttgttgctatttcccttcgagattaaggctttctccatagaaaagacaaggaagatggatccagatagagtttcaggagtggcgttmctcctcttctgctgggaacgccatgatgggaaccttttccattttctgcctatctttcatgtgagtgtctagagagactcatggagagaaatctttgggaacccatttagatatctgtgacctccagtgccctcacattctcatgctagccgacccttggcttttagcatttttttaagtagatgaatatttttaataagctttatggcattgggcagaatctatctcagataacaaaat

SEQ ID NO: 638569 - DNA, 513 bp, Homo sapiens
gggctaccaatggcagaggacccaatggtttcatacccaacaatctaccatgtggatttgaacatggaaagacactttactctctgcatgcaactgataaatgcaggctgccaagtttgtaggagtttccattctttctacaggttatgttaaagtacagagtatcacagcttgtgataatcactgtgccttgttgagtttcaccacagacatacaaaaccagggcttctattcaccaggttctagggattgctactggttggtaaatagctcaatgatgtaccattttttttcaccaccaccatttttatgaaaattgctgaagcttcatatttatgagtgagacatctttatattttattcaccaaaaaatgaaaatcctgcttacgttgtttgagccatttcggtgaaaaattgcaagtggaaaatcatacacatcctggcttagctcaacagctkgctgttgtgatgttgtcatagctaatgctaacaaggtgcataaagttattttgt

SEQ ID NO: 638570 - DNA, 555 bp, Homo sapiens
atggcagaatgcttccactgcttcagcaatcaggtccacttgatcataagctcagcttacataggccatttgttatgatagttgcaatgtctatttctgagcattctacattrtgtattaccttggcaacaaactagaaaagatgacagccaccaagtcacttatatgtgtagagctcacaggagttactcttctgtaagggggtcttcaaaatgattgtatgatgataatgtggggaggaagaagaggaggcgggagtgaaaagggaaaagagaagaagaaaagaaggagaggtcatgcctgtgttcccagcattttgggagcccaggaaggaggatcagttgaagccaggagttcgataccagcctgggaaacatagcaagaccctgtctctacaaaaaaaaaaaaaaaaaaaattgtattaaattaaattagccaggcatggtggtgcacgcctgtggtcccagctactggagaggctgaggtgggagaattgcttgtgccaggaggtcgaggctttatgagctaggattgcaccactgcactccagcctgg

SEQ ID NO: 638571 - DNA, 473 bp, Homo sapiens
aatttaaaatgcctcattttgaattcattcatatacttgccgttagtaaagcaccctgtttgtattaacacaataatgaaacgtgaaatagacttgcatgcaacactaaaatggtgcatactgctctgaaaagactcaaattcagaattcctgagttattacctagaaggaagagtccattccgacactgcttttctctacttatactaattaatgttttaaccctaacaatatttgctaccaatttggtgtgcttcgttcttttcyatttaacttctcaccattaaactgctgttgccatcatgtcacaaataccctactctacaattatctaagttagagtaatgacattgggagtggaaaggagagagattgcagacataaattggtcatttgattgaatgcagacctgtgagaaaaggaatcacttaaaaatgaattctggattttccttgcaagttacagggaaaaac

SEQ ID NO: 638572 - DNA, 590 bp, Homo sapiens
ttccccactttccttccaactttaacacctcctctatcatttctcttgcacagtggttttattgtgtaggctgggacgccaacattgtgttgggataccagcaatccctggtatcaatatcattcctgatcacaatgaataaaacataagatataatgttttctctaaagtatttttttttgtatttttttttacaggcagcttttatcaagtggcatgattcccctaaattttcaacttatctgagaacatttttctgtgattgcagtaggagttgartattgccaaatgagggttttgaagctgttgaagataaatacataattttttctttagacactaataatgtcagttatataaatagatcttctgatgttaaactaccctgaattttcatttcattctaatgcacgtctttgggtaaatgatggctgaattcaatataaattatataatattttattaatgcttttaaatacatctttggttgtattctgccatctgattttgaaactaagtatatattatcttcctaaaattcactgggcaactatctctgatttttttctggaataacttataaaagacat

SEQ ID NO: 638573 - DNA, 534 bp, Homo sapiens
tttgcgggtttattttggggagatgctgggagtgtgcagtggagatatatatttaaatttcaaaagctgatagtagcaaaaaaaaaacctgcaaataaagctgaaatattaattattcacctaaaaaaaaggaacttgtagatattccagcactgaacaacttaataaagttttgcctaagaataagaacattttctaacataaaaacaatacctttataatatccaagatacaaaatattaatttaattatattacctaatatgttgtccatatttaaatttaaatttatttttcctcaaaaataactgtatctgctcattttcaaaggaaatctaatcaatgttcaraaatagcatttgatcatcatcctttcatttttccttaatctggaagcatcctgcaaagttttttggtcttttacagctgacttttaaaaatattccaaggcagtgttttcagaatgtttttcttagtgtttccacatgattattagatttagttaaactttttttgttgttgcttttggcaagga

SEQ ID NO: 638574 - DNA, 607 bp, Homo sapiens
aaacaggcacaaagaaccagtcactgtaccattaaggccagcctgtgtgccttccctctcttttgccctggccacamtaaggataggttgctggactatacatctctgcttagatagggaaagactgtggtccctgtcctggaggttctggtacatttaaacaacaagtacatttaaattgggaggccagtggtgatggttaattttatgtgtcaacttggctaggccacatgatatagtctggatgtttgatcctccaaatctcatgttgaaatgtgatccctaatgttggaggtggggcccagtgggaggtgttttggtcatgggggtggatccctcatgaatggcttggtgccaccctgtggtaatgagtgagttctcactctatgagttcatgcaagagccggttgtttaaaagtatgacacctccctccagccctgctttgcttcctgtctctctcaccatgtgacatgcttgctcccccttcaagcatgctatgattgaaagcttcctgaggtcctcactagatacagatgctggtgccaggcttcttgtacagcctgcagaaccatgagccaaataaacctctttttgttgtaaattacc

SEQ ID NO: 638575 - DNA, 607 bp, Homo sapiens
aaacaggcacaaagaaccagtcactgtaccattaaggccagcctgtgtgccttccctctcttttgccctggccacaataaggataggttgctggrctatacatctctgcttagatagggaaagactgtggtccctgtcctggaggttctggtacatttaaacaacaagtacatttaaattgggaggccagtggtgatggttaattttatgtgtcaacttggctaggccacatgatatagtctggatgtttgatcctccaaatctcatgttgaaatgtgatccctaatgttggaggtggggcccagtgggaggtgttttggtcatgggggtggatccctcatgaatggcttggtgccaccctgtggtaatgagtgagttctcactctatgagttcatgcaagagccggttgtttaaaagtatgacacctccctccagccctgctttgcttcctgtctctctcaccatgtgacatgcttgctcccccttcaagcatgctatgattgaaagcttcctgaggtcctcactagatacagatgctggtgccaggcttcttgtacagcctgcagaaccatgagccaaataaacctctttttgttgtaaattacc

SEQ ID NO: 638576 - DNA, 607 bp, Homo sapiens
aaacaggcacaaagaaccagtcactgtaccattaaggccagcctgtgtgccttccctctcttttgccctggccacaataaggataggttgctggactatacatctctgcttagatagggaaagactgtggtccctgtcctggaggttctggtacatttaaacaacaagtacatttaaattgggaggccagtggtgatggttaattttatgtgtcaacttggctaggccacatgatatagtctggatgtttgatcctccaaatctcatgttgaaatgtgatccctaatgttggaggtggggcccagtgggaggtgttttggtcatgggggtggatccctcatgaatggcttggtgccaccctgtggtaatgagtgagttctcactctatgagttcatgcaagagccggttgtttaaaagtatgacacctccctccagccctgctttgcttcctgtctctctcaccatgtgacatgcttgctcccccttcaagmatgctatgattgaaagcttcctgaggtcctcactagatacagatgctggtgccaggcttcttgtacagcctgcagaaccatgagccaaataaacctctttttgttgtaaattacc

SEQ ID NO: 638577 - DNA, 551 bp, Homo sapiens
tacatgggtaagccatgatgtgggtgggtttcatctaatcagttgaaggccttaagagaaaaaagactgaccttccccaatgaagagagaattctgccagctgactgccttgtccttgagctgcaatgtcaactcttccctgggtctccagcctgctggctaccctgaagattttggatttgccagactccacattcatgtgaaccaattctgtaaaaccactctctttctctctctctcttcattttccaacccggtggttctgattctctggaaaatgctgactaatacactaggcaaccacttcctctcctctaagagactttcccttctgggagacaaaagcaccatctctagaggcccctctttctttttcttccaacagtttttccttagagccaccctatgatagattttcctcctcttcttcctcctcctcaycatctgtgttatcaccatccccatttataaaattcttagtgtgtgccagatgttgcaagatatttacatacattgtgtaattgattcctcacactatcctcattctacag

SEQ ID NO: 638578 - DNA, 580 bp, Homo sapiens
ttacatacattgtgtaattgattcctcacactatcctcattctacagatggggaaatagtgacctatggaggaagaatgacctgttcaaggtcatgtacctactaagctaaaaaataattttcaaacctggaataactaacacgaaaacaccttgtgagcaatcaccacattgcgatatctgttagaaatctatttgcacaggtactacatgaatcaaaatttaacatacaatgacctccagaagctctgtctacgccagggccagtgtttagaaagcaccagagacacaaagaagttcatgtagtctgggataaggagtagtctatggaattgatcagatgtggggtcaaattctggctccattacacttactatcgtatgaacttgggcaagtttcttaacctctctgtacctcagtttccttattagtaaaatggaaataacacctcttccttcaatttttggaggattaattsagaaaaaatatgcaaaaatacatgtttttagtgatcagctgataatagcctctcaacaaacaaaaatgtttatttatttatttaaaaaaagacaattgaagca

SEQ ID NO: 638579 - DNA, 623 bp, Homo sapiens
cacaatgatacttgggggatgcttcagtgtggatgtatgcccatttggtacacaaagatactgtatcagtctgggttctccagagaaacagaaccaacaggagatatacgtatattatacacasgcataccttattttattacactttgcttttttgcacttcacaggtattgtgtgttttacaaattgaaggtttacagcaaccctgcattgagcaagtctactagtgttgttttcccaatagcatgtgctcactttttgtctcagtgtcacatttggataattcttgcaatgtttcaaacttttgattaggattatgtctgttatgatgatttgtgatcagtgatctttgatggtactattgtaattgtttgagggcaccatgaaccacacccatagaagatggtgaacttgataaatgttgtgtgtgctctgactgcctcactaaccagctgtttccctgtctctttccctctccttgggcctccctattctttgagacacagcagtattgaattcaagccaactaataaccctacaatggcctgtaagtgttcagtgcaggaaagagtctcaaatctctcacttgaaatcaaaagctagaaatgattaagcttggggag

SEQ ID NO: 638580 - DNA, 623 bp, Homo sapiens
cacaatgatacttgggggatgcttcagtgtggatgtatgcccatttggtacacaaagatactgtatcagtctgggttctccagagaaacagaaccaacaggagatatacgtatattatacacacgcataccttattttattacactttgcttttttgcacttcacaggtattgygtgttttacaaattgaaggtttacagcaaccctgcattgagcaagtctactagtgttgttttcccaatagcatgtgctcactttttgtctcagtgtcacatttggataattcttgcaatgtttcaaacttttgattaggattatgtctgttatgatgatttgtgatcagtgatctttgatggtactattgtaattgtttgagggcaccatgaaccacacccatagaagatggtgaacttgataaatgttgtgtgtgctctgactgcctcactaaccagctgtttccctgtctctttccctctccttgggcctccctattctttgagacacagcagtattgaattcaagccaactaataaccctacaatggcctgtaagtgttcagtgcaggaaagagtctcaaatctctcacttgaaatcaaaagctagaaatgattaagcttggggag

SEQ ID NO: 638581 - DNA, 623 bp, Homo sapiens
cacaatgatacttgggggatgcttcagtgtggatgtatgcccatttggtacacaaagatactgtatcagtctgggttctccagagaaacagaaccaacaggagatatacgtatattatacacacgcataccttattttattacactttgcttttttgcacttcacaggtattgtrtgttttacaaattgaaggtttacagcaaccctgcattgagcaagtctactagtgttgttttcccaatagcatgtgctcactttttgtctcagtgtcacatttggataattcttgcaatgtttcaaacttttgattaggattatgtctgttatgatgatttgtgatcagtgatctttgatggtactattgtaattgtttgagggcaccatgaaccacacccatagaagatggtgaacttgataaatgttgtgtgtgctctgactgcctcactaaccagctgtttccctgtctctttccctctccttgggcctccctattctttgagacacagcagtattgaattcaagccaactaataaccctacaatggcctgtaagtgttcagtgcaggaaagagtctcaaatctctcacttgaaatcaaaagctagaaatgattaagcttggggag

SEQ ID NO: 638582 - DNA, 623 bp, Homo sapiens
cacaatgatacttgggggatgcttcagtgtggatgtatgcccatttggtacacaaagatactgtatcagtctgggttctccagagaaacagaaccaacaggagatatacgtatattatacacacgcataccttattttattacactttgcttttttgcacttcacaggtattgtgtgttttacaaattgaaggtttacagcaaccctgcattgagcaagtctactagtgttgttttcccaatagcatgtgctcactttttgtctcagtgtcacatttggataattcttgcaatgtttcaaacttttgattaggattatgtctgttatgatgatttgtgatcagtgatctttgatggtactattgtaattgtttgagggcaccatgaaccacacccatagaagatggtgaacttgataaatgttgtgtgtgctctgactgcctcactaaccagctgtttccctgtctctttccctctccttgggcctccctattctttgagacacagcagtattgaattcaagccaactaataaccctacaatggcctgtaagtgttcagtgcaggaaagagtctcaaatctctcayttgaaatcaaaagctagaaatgattaagcttggggag

SEQ ID NO: 638583 - DNA, 397 bp, Homo sapiens
atatataaaacactaccaaaactcaacaacaaaaaaaccagacaacctgattcaaaaatgagtagacttgaatagacatttctccaaagatatacaagtaaccagtaagcacagaaaaaaaacagcataactaattattaaagaagtgcaaatcaaaaccatgatgagatatcactttacccctattaggatggctaccattaaaaaaaaaaaacacagaaactaataagtattgatgaggatacggaaaaattaaaatccttactggaatgtaaaatggtgccactgctatggaaactagtgtagtggtacttcmaaaaattgaaaacatagttaccatttgatctctcaattccaattctgagtttgtacccaaaggaatcgaaagcagggactc

SEQ ID NO: 638584 - DNA, 595 bp, Homo sapiens
ttgttttttattctttttttcttttgtcttctctgtctgcctattttcaagtagcctgttccaagctcactaattttttcctctccttgatcagttctgctattcaaagactctgatgtattcttcagtaggccaattgaatttttcaggtccagaatttctgctcagtcctttaaaattatttcagtatctttattacgtttatctgacagaattctgaaatttttctctgtattatcttgaatttatttgagtttcctcaagacagctcttttgaattctctgtctgaaaaatcatatatctttgtttctccaggattggtccctggtaccttatttagttcatttgaygaggtcacgtttttctggatcatcttagtacctgtagatgttcatctgtatctggtcattgaagagttacatgtttagtgtagtcttggcagtctgagtttgtttgtacccgtccttcttgggaaggctttccagatattcacatggagtcgggtatcatgatctaagctgtatgtgctttagggaacacccaaagctcagtaacactgtggcttttatagactcatagaggtactgccttgat

SEQ ID NO: 638585 - DNA, 534 bp, Homo sapiens
tgggactagtataataatataagagctaccaaaatgctatatatcactaagtagatgcatgtactttgtaaatctaaaatggaatctcaagttctatttaytggtctaattattatgctttcatatatacttataacagaattatgtaattgatttctaaaaatttcagatagcatccaagaagagtgtcaattagaacataacgacattctaacattatggacaaagatgtagaaagtataataattaacagagagggaaatggtcaaaataaatttagagaatgaactgcttttcttattataccatatttgcaaagcgagttgcaatagttgacctcccttggactcaaaattgtagccatttggattagttcttctcttaacaattataataataattcaaaaacttatttgggcagtcatactacattgaaaagtgtccataaaaactcttggggtcgtcgagtaaataataatctggctttccctttttggtgcatctatgttatcatgtgtgtcttaaagaatataa

SEQ ID NO: 638586 - DNA, 608 bp, Homo sapiens
gacctcccttggactcaaaattgtagccatttggattagttcttctcttaacaattataataataattcaaaaacttatttgggcagtcatactacattgaaaagtgtccataaaaactcttggggtcgtcgagtaaataataatctggmtttccctttttggtgcatctatgttatcatgtgtgtcttaaagaatataatgcaaacaactttgaaattcaaactcaaccctgagtttctcccaaaagaaaatggagagcaaaaaggagaggtacagaaggaaaacaagattgtcatctcgttaggcagaggattgaagaaaaatgtattggaatatgtttatcatgcctaactgcctccacagactgcatatacttgccttataacctggacatgctgaaaaaggcttttagctactgcataaattatttttccttgagaagaagcaataaagaaccagaggagtctcagcaggctgaagtatccagacgaagctagatttatggggaaataactgttactaataattataataattactactcagagaaaaagatatccttcattaaaatcacctccttttcttatgctctgaacatcatttcctg

SEQ ID NO: 638587 - DNA, 578 bp, Homo sapiens
taactgttactaataattataataattactactcagagaaaaagwtatccttcattaaaatcacctccttttcttatgctctgaacatcatttcctgtgtcttctttgaatacattttcacaattttcatcaacttcccacaaccatttaacttgctatcctgtcttcccttctaatttttcctatatattctttccagattgatcttaaattgctctctttagtcactccaggggaaaaatatttaaaatatgaatcataccaagtttaagtcatctagtttgcttttgaagtccttaacggtttgttctatccaatattttcatctgtattttttaatattccctgaaatgagttcttcccactgttctactcaagcctatgtgctaaatgtagttaccaaattctaacgagacagcttcaagtatagtggaggaatattctggatcctctacttaggaatctaacgtcaaattagttcactattgtgctcttaagttacagtgttatcatgtcattttactatttcttatcttttgaatagagtgaccaggaataactagatatgtcatttgtca

SEQ ID NO: 638588 - DNA, 570 bp, Homo sapiens
atatgagtatctttgttgttcacggttagtccttagatcatacctgagtctgtgctgaggagatgactcaggatagggccagaaagatgaatcacgtgattagagggttacagcttctagctacttggtatcagcctaacctctcaactgctgggagaatagaagggctaaagggtgagttgaatcacatggtcaaggattcaatcaataatgcctacataatgaagcyccaccaaaaactctagacactgagctcagtagagcttcctggttagggaagacatgatatgctgggagggtaatgaacccttattccacggggaaaagacactgaagctctgtattctgaaccctctcagaccttgccttgtgtgtctcctcatttggctggtcctgacttgaatcctttataataaaaatgccaccacaaatttagtgcttttctgagtcctgtgagtcattctagtaaattattgaacatgaggcagttgttagtgggaacctccaaatttgtagccagttggtcggaagtattggttgtctggggatacctgaagtgcagcaggtatc

SEQ ID NO: 638589 - DNA, 570 bp, Homo sapiens
atatgagtatctttgttgttcacggttagtccttagatcatacctgagtctgtgctgaggagatgactcaggatagggccagaaagatgaatcacgtgattagagggttacagcttctagctacttggtatcagcctaacctctcaactgctgggagaatagaagggctaaagggtgagttgaatcacatggtcaaggattcaatcaataatgcctacataatgaagctccaccaaaaactctagacactgagctcagtagagcttcctggttagggaagacatgatatgctgggagggtaatgaacccttattccacggggaaaagacactgaagctctgtattctgaaccctctcagaccttgccttgtgtgtctcytcatttggctggtcctgacttgaatcctttataataaaaatgccaccacaaatttagtgcttttctgagtcctgtgagtcattctagtaaattattgaacatgaggcagttgttagtgggaacctccaaatttgtagccagttggtcggaagtattggttgtctggggatacctgaagtgcagcaggtatc

SEQ ID NO: 638590 - DNA, 602 bp, Homo sapiens
atgaagctccaccaaaaactctagacactgagctcagtagagcttcctggttagggaagacatgatatgctgggagggtaatgaacccttattccacggggaaaagacactgaagctctgtattctgaaccctctcagaccttgccttgtgtgtctcctcatttggctggtcctgacttgaatcctttataataaaaatgccaccacaaatttagtgcttttctgagtcctgtgagtcattctagtaaattattgaacatgaggcagttgttagtgggaacctccaaatttgtagccagttggtcggaagtattggttgtctggggatacctgaagtgcagcaggtatctgaagtgagagtcatcttgtgaactgagcccttaactcacggggtctgcagtaactccagtaggttagagccagcactgaattgcagtacaccagttgatgtcagaatactcatacttctcttttcaggtctgatacttctgcctgtawattgctattttactctcccataactttggtttacatgagcccttagcttgatagccacctttggaatattttaatctcttttgttgaggcataacgactgccag

SEQ ID NO: 638591 - DNA, 596 bp, Homo sapiens
gctttcatgcagatcaggttagtgagaccaggagatagaaaaacctattttgagagttgattactatttgcttctccaggatcccagagagaaggcaaatgcattgaagtaggccccatattttatgccacatttcccacagatttcccacattttaaattcataagcagcacgggaaccagaggctaagaagctgtgttgaaagtggtgcctaaaatatgttttaatagaatggaaatgtagacataattcaagatgtacaatgaggctaaatggagtttaaaygtttacttttctagcttcatcaagaaagtgttacaagtaaagattgattgaaagcacttcaaatttctacatagaagctataatgtcctttacactatttaaaaatccaattgttctatttcttactctttatttttaatagtttattctgttttctacattatgtatatgcataattttgtttttcttttttggcctctataaccatgtagcttacagtcaaagtgatatgatttaacaacttaactactctcactagcatattttttctattccagagaattcttgcccaggaaaataaaactgtaaat

SEQ ID NO: 638592 - DNA, 525 bp, Homo sapiens
tatttactttttttactctttatttactcttgctgccccctcgctctctcatgcacatacatataccactatctaaactttaaaggaaaatcacatgttacaagctctcaagttttgtaatcctgtatgttgtgataccttctttcaccactatatgcgggcataattaattaatcattcctcgtaatattttcccataatacactttagatcaggctgttgtgtcacttcttcatgtgcttatacttctaaaagatacatgaattttaccatgtgccttgcacaagtttcttgcctattgttcctataatattgttccagactttcagtacgtcctgaaaaatattattttattgaagatgaggtacctgacactgaattccaaactgtaaacacatgagaaaaagtgattctggaactgtwgaatatggttcataaaggttcaaggttgaaagggaagaaagtaaaaacatagttcagtcagtgcattggagagaacaatacggtagcaggaaggatcaggaa

SEQ ID NO: 638593 - DNA, 622 bp, Homo sapiens
gaatcaaccatttctccagaatgcactgattcctttgattagagaatggcattacaaaccagaattttagtactagttttgcttgttgctactgatgtgtcatttatttgagactatcttagctaacagagcccagaaatatatgtgtgtatactgaacacttgtacatacatacacatacaaatattctatatgtaaccatttacctttattaaactaaacggcattaaactgattagtattaaaccaatcagtatttatatattgattcctgcaactccaatccaccactacttagatctccttgcttatctgtaaattcccactctaatagtgagaaaactggcctccatcatacaaaaccatttacttaattgttcacttccagtatacttgcagagtagtatccaaattgttaacttgcaaccctaggaaacaactttatcaaatagattacagtgcttatgtgcagctgcttttgtctttagtcttatagactccactcatctccaaacttacttaggtcagtactttttccctgctttgccttcagtaaaattgtttcagaaatatgcaataycagtagattatttcatcacattctgcattacccttaaccttc

SEQ ID NO: 638594 - DNA, 417 bp, Homo sapiens
gtaataagcttatgtcttcttactctaaatctttaccattgtgggaatatttcttgtgaaaactagacattagtgtagactgtctcctcttttataagtactatttcaccaataaattttgttaagctatctaaaatgtcacatatttgactttttgctagagtactgtcatctgatctgagtacacactctaggaggctgtggtctgtaactcagaccctattctttcttactagcagcacagggctgccatctgccagtaatacaggaatttgcagttttcctaattgtaacaacacagtagaaaaagaaatgcttttcactgatttgcttttgggctaaatttctagaaatgtgttgaaacgytgaaactattcaacccacacccaaatttgagaatctcaaaacaattaggcc

SEQ ID NO: 638595 - DNA, 506 bp, Homo sapiens
attttttgtaggagaggtctggtgttattgaaatccctcagcttttgtttgtctgggaaagtatttatttctccttcatacttgaaggatattttttgccagatatattattctacagtaaaaaggtgtttatttttccttaagcattttaaatatgtcatgccactctctcttgggtctgcaatgtttccactgaaaagtctgctgccagatatattgcagctccattgaatgttatttgctttttttccctttttgcttttaggattctttatttttgacttttgggagtttgattattaaatgcctaaggtagtattctttggattaaatctgcttggtgttctgtaacctacttgtacttgcatatggatatctttctctgggtttggaaagttctttgatgttatatctgtgaataaactttctacctcartttctcactctacttctctttaaggccaataactcctagatttgtccttttgaggctattttctaaatct

SEQ ID NO: 638596 - DNA, 553 bp, Homo sapiens
aaaaacagccagaggaaaataacacattacatgtaggaaaaaaatggctacaatgactggatttctcctcagaaatccaggtcagaaggcagtggaacattttaaactactgaaagaaaatcattgtcagttcagaattctgtaaccacccgaaatatatttcaagaatacaggtgaaataaagacattctcagatgaaaaaaaaaacaaagaaaattcatkgtcattagacctgccataaaagaaattcttcaaacagaaggcaaatgacaccagaggaaaacttggaacttcaagaatgaagagtagcagatgtgataaatacctaattcagtataataaattaggctttttccttgtgaattctttaaaatatgtgtgataattaaaaaaaaattaaaacattgtttaatggggttttctttagcaattggtgcaaaacatggagaaaatacaatataaggggcaggtaaaggaaaccatacaagctttctataatccactttaagtggttggatagtaattcaaaacagactgtaaaaagttaagtatg

SEQ ID NO: 638597 - DNA, 550 bp, Homo sapiens
gactttgagtgactataagcgaaaagtgaatggaatccaagagggaaaataagaacatagcaaaatactgtctgcctagacctttgatcctagtccacccaagctaactttgaaatgagctgtgtaactcaccagcattggaaatattctggagcagaggcaatttactgtactgcacctgaataaacaaagagccatgagattgcttcctcgttgccccttaatcaaaagcctattccctacttaaaggggatactcatgtttctgaattcatgtttttcctgtcaaagtattgattttatattattttgacgccactagagagaagaggtaaaattcctagacatattggaagaaataatatactctccagaaagaaaagaaactgggaatgtaaaattckgagaaagtgaatagaaataaaacctgaatcaaatgttgttgactagaaccaaaagatgtcagagaaaaaagagaaaaagccagcgagtactggagaaacataactgaaggagcatctacaaaatcttctggaaaagaaacacaggat

SEQ ID NO: 638598 - DNA, 550 bp, Homo sapiens
gactttgagtgactataagcgaaaagtgaatggaatccaagagggaaaataagaacatagcaaaatactgtctgcctagacctttgatcctagtccacccaagctaactttgaaatgagctgtgtaactcaccagcattggaaatattctggagcagaggcaatttactgtactgcacctgaataaacaaagagccatgagattgcttcctcgttgccccttaatcaaaagcctattccctacttaaaggggatactcatgtttctgaattcatgtttttcctgtcaaagtattgattttatattattttgacgccactagagagaagaggtaaaattcctagacatattggaagaaataatatactctccagaaagaaaagaaactgggaatgtaaaattctgagaaagtgaatagaaataaaacctgaatcaaatgttgttgactagaaycaaaagatgtcagagaaaaaagagaaaaagccagcgagtactggagaaacataactgaaggagcatctacaaaatcttctggaaaagaaacacaggat

SEQ ID NO: 638599 - DNA, 548 bp, Homo sapiens
gaagcagcacatttgtaggttgaatggacatttgtgctacctccccaagctaggttcggaataaaccactctgtaccagaccttgctcttgttaactggactctgcatgcagcaagcaactaacctgctgtccggttataaggcaactttcaggggtgaagaaaatgttcagtatctttattttgtgattcttaattttacattttaaatttctgtagtttataccttaacaaagtaattttaagaaagtgaactggttttggcaaaactaagctatagtggttagctttggaggagttgggggtgactggagtgcctgaggagccgggaagatgtttctgggaatgctgacaatgttttggttttttatctgggtgctagttacatagatgtgttgagtttgtgaaaacaaattgagtggtacaattgtgcttgctgtgcctttaggaatgaatgytatagttcaataaaaatgtttactttaaaaaaatcaagctccatctccttttatgtattatttttcctgatatcattcttacacgtctgtc

SEQ ID NO: 638600 - DNA, 578 bp, Homo sapiens
tgtcatcagaacttggacatgggacatgggacagcagtgtggctgtgggaggagatagcctctgacaggactggagacttctctggagacatggccagctgagaccaccccacaggaaggaagcctgggaaaaatatacctggaattcaccctcttcattccttttgagaatcttctgctgttattgaagaaatgggcttgctgcccgaaacacacagaagccaatactatagcaccagcttttgacaraagaaaggtttattgcgaggccagttggcaaggaaagaggagactcagctcaaatcaatttccttgatttggggtctgaggcgggttttaaagggtcacaggttaaggaatttaggaatgttggtttggcagggtctgattggagggcttcacatttgagcatttaaggtaagttatgttgaggtggattttaatcccagatcttctaggccagtggacttctcgcttttgaaagagtcctggaattcacgttctgctcatgtcccagtctttttcgttccacagggaggattcattggcttattgttgttagaggtcaaagtttttct

SEQ ID NO: 638601 - DNA, 600 bp, Homo sapiens
ctcactctgtgtggaatggggttgggtgttccaaagtcagggaaatcacttggtaactggtggaccccaactgtcttacgagggctgtcgctaaggctgtcctgggcttacagacaacagagggtctgtcacccagctgggccatcatgagggagctggccatctttgccattcctggggcctgacatctcacagcctgttggttatccttacgtggcaggctttcagtgatgcggatgcttcttgagaatgctcttgggctttaccaaccggctaacttgctagcagagctgggaaggctgtgtcctcttggggtgttcgggagggctcctgagctgtcctggtggtggcacccagtccatgccaggcctggccaccagggcctgacttctaacaggaaggctgagccagtgcagctctgtggttgtggctgagccaagcatcagtgctctgctagactcctttgtgaagctggagtcaggratatcggctcccactaccatagaatttcctcttgaagatgagcatttgttgatgtttaataatgttgttcagtggtttgaattgctgcccaatacttgtcttcacacattgacagag

SEQ ID NO: 638602 - DNA, 587 bp, Homo sapiens
attgagctcagtattttataaactgctagcctggaagaaaattattttaaaagtcattctttttgtcatcttccattagacaccaatttcctaggcagaatcaaatgtaggacagtgttgtataaatgaaataacagacgtgtggcaagaggttaataactcccattgcccagttctgaaaggaagaaaaatcacagagtcacttctactcttgacattttgttctgtcaccccttgaagcgaacaaagcatctttgtgcattttaaagagacctctgcttatttctttccaaagttctgtagagttttgcctctgaattttttggttggtggtgggcagtgagaaacctaagaaatctgcctgtggtgaggagcaaaacaccasggctattgactataatccacaggcactcttgcctgcccgcctgcacttctaccactgctcctggggctgggggagcaaaccatcagaaatattagggaattctcagtatatgaaatcagcaacatacatcgaaacatataaactcactgcaatacttgttttaagggtgatgtaaattgttacaaaatttcattgaaataaa

SEQ ID NO: 638603 - DNA, 604 bp, Homo sapiens
gcccctctgactatttactagggtttcctttgcagcacatctcacaactgtacttaagcactgtttggcatggttggtttaatgagaaccaggctgtatgctctatgaatgacatggtttggatccgagtcctcacccaaatctcacgtcgaattgtaatccccaatgccacaggcggggcctagtgaaaggtgattggatcgtggggtggattctcatgaatggtttagcactatcctcttagtactgttctcttgataacgagtgagttctcttggcctcaccccccttgctccctcttcttcctcctgctccagtcatgtgaagtatcggcttcccctttgctttccgccatkatggtaagtttcctgaggtctccccagaagcccagcagatgctgtcatgcttcctgtactgcctgcagaatgtgagtcaattaaacctcttttctttataaattacgcagtctcaggtatttctttgtagcagtgcgagaacggactaatacaatcaggacagagacttggtctctcctgtctaccactgtctatccggaatttagcatggtacttggcacattctaggcactcaataaatacttact

SEQ ID NO: 638604 - DNA, 588 bp, Homo sapiens
tatttgccagaaggtagagctggaggaagtttgrcgatttgattatttcctcttaagatgtctttggaagtatcaaattgagaacagcatctatttagaaggcttgtcacagattttgttaagtgcagggggcggggcttagtaaatttttcctaacaataaatatttttattagaaaattattgcagtagaatgattcagatgtttaagacaggtatttgaattttccctaaaataatttcccaagactgggccacggagaattgtttacctacaaccaagcaaaataatgcatgattataattcctaactctctagagtaagccagagtactgaaatccaagagtagtgttcatttttgcctccagtgggcactgtgctcataaatgaaggcagccagttctggcacctactctgtgttgggcttcttctggcaacagttgaactttcaagttgttagatgcattcatgaacgaagaaaagaggagagttttgtgttaacctgacctgagttccacttctgtctgtactactcagtagctgtatgtctgggcaaatcatgaggctggcatggaacagtattccctc

SEQ ID NO: 638605 - DNA, 480 bp, Homo sapiens
gtgttcatttttgcctccagtgggcactgtgctcataaatgaaggcagccagttctggcacctactctgtgttgggcttcttctggcaacagttgaactttcargttgttagatgcattcatgaacgaagaaaagaggagagttttgtgttaacctgacctgagttccacttctgtctgtactactcagtagctgtatgtctgggcaaatcatgaggctggcatggaacagtattccctcccctctctgattacatttccaaatctgagcgtggaaaagaaatgaagaaacagccattgagagataaaacaagtaataacttgcctaatcctgaattggagagatttacagttggaaacaacatattacctggccctgccctgagttctgagacaatatgtaacataacaatcatcatatgtatatgtatatgtgtgtgtgtgtatatatatatatttgtggtgtatttacaacatacca

SEQ ID NO: 638606 - DNA, 480 bp, Homo sapiens
gtgttcatttttgcctccagtgggcactgtgctcataaatgaaggcagccagttctggcacctactctgtgttgggcttcttctggcaacagttgaactttcaagttgttaratgcattcatgaacgaagaaaagaggagagttttgtgttaacctgacctgagttccacttctgtctgtactactcagtagctgtatgtctgggcaaatcatgaggctggcatggaacagtattccctcccctctctgattacatttccaaatctgagcgtggaaaagaaatgaagaaacagccattgagagataaaacaagtaataacttgcctaatcctgaattggagagatttacagttggaaacaacatattacctggccctgccctgagttctgagacaatatgtaacataacaatcatcatatgtatatgtatatgtgtgtgtgtgtatatatatatatttgtggtgtatttacaacatacca

SEQ ID NO: 638607 - DNA, 480 bp, Homo sapiens
gtgttcatttttgcctccagtgggcactgtgctcataaatgaaggcagccagttctggcacctactctgtgttgggcttcttctggcaacagttgaactttcaagttgttagatgcattcatgaacgaagaaaagaggagagttttgtgttaacctgacctgagttccacttctgtctgtactactcagtagctgtatgtctgggcaaatcatgaggctggcatggaacagtattccctcccctctctgattacatttccaaatctgagcgtggaaaagaaatgaagaaacagccattgagagataaaacaagtaataacttgcctaatcctgaattggagagatttacagttggaaacaacatattacctggccctgccctgagttctgagacaatatrtaacataacaatcatcatatgtatatgtatatgtgtgtgtgtgtatatatatatatttgtggtgtatttacaacatacca

SEQ ID NO: 638608 - DNA, 480 bp, Homo sapiens
gtgttcatttttgcctccagtgggcactgtgctcataaatgaaggcagccagttctggcacctactctgtgttgggcttcttctggcaacagttgaactttcaagttgttagatgcattcatgaacgaagaaaagaggagagttttgtgttaacctgacctgagttccacttctgtctgtactactcagtagctgtatgtctgggcaaatcatgaggctggcatggaacagtattccctcccctctctgattacatttccaaatctgagcgtggaaaagaaatgaagaaacagccattgagagataaaacaagtaataacttgcctaatcctgaattggagagatttacagttggaaacaacatattacctggccctgccctgagttctgagacaatatgtaacataacaatcatcatatgtrtatgtatatgtgtgtgtgtgtatatatatatatttgtggtgtatttacaacatacca

SEQ ID NO: 638609 - DNA, 518 bp, Homo sapiens
tgaggcctgggctcttcatcctccagaaaccaacagagcctaaagggaaatctcacaggcacggccacgtgtccagacccagacaagcgcacagggcccatgacacagaagcacccaacatgcacctctgagcccagacacacgtctgctttcaggcacgtgcacaggygtttacacctttagatgcctgcagagtcctcacatcccagacaaacaggcacacactggggccacggagggtggtctctacaagctgaaagtttaccacattagggactccttggctgagcaccagctgtggaggatttccaatctgatgatctcagaactccctaaagtgtcaatatgttcattttcacagctgtttcttcatcaccttcttcccagaaggccttagagagagtactccaggcagaagatgagtaacacagtcctttgggagcttacaatcttctgagagtagcaacaggtaagatggtgttaaggagagaggcaggcagaaagggagaggaagtgta

SEQ ID NO: 638610 - DNA, 570 bp, Homo sapiens
tgtaattcactgagtgagtgagtgagtgagtgagtggggttgggggaagcacacaatactgtctccttgcacatgaaggaagaagcgactcctactagaggttcacagagaaatccacaggacagaattgatgagcaaatastattgcaagtgcatttgaaaataatgtaccaggcagaggtatttttatcacctaactttgataagtatattttaaaatattttagaacatcttatactctctttttggaaactttggcttaatctgtatgcacacgaactcatatccttgggctttgaaatgaggcatagaatctaaccattagtttgaggctctgaaggcatcttattggatctatttcaacactaatagaaatgagaacgaggccaatcatggcctgtatttttaaaggatttgtggttctcatttgtattatcaaacactttgtgagacttctttgggcctgaaattgccatacttcacagtcacagccagctgtgtcctgtcagccagagacagttcacccccaaatctcgctgctctctggcaaggagattctgttgctgaaa

SEQ ID NO: 638611 - DNA, 555 bp, Homo sapiens
tgaatgattttagttaaaattacttatattagttttgcattgctgccataacaaattatcaccaatttaatggcttcaaacaatagcaatttattatcttacagttttggaggtcaaaagtctaaaagaggtctcattgggctaaaacaaggtgttggcagggctgttccaggggagagtccatttccttgtgtttaccaccttgtaggagttgcctatattctgtagctctgggtcccctccaccttcaagggcagcaagtcgcctgctcagacctctgtttccacttcacatctccactgactctcctctttcacttattacaccttttgtgattaagtcaggcccacctggataawcccggataaaatgtcccatctccatagcctcgattgaatcacacttgcaaagttgcttttgccataaaaggcaacatattcacaggtatgggtattaggacatagacatctttgggggcccttttctgcctaccacactgcttaagttaaatgcatgcatactgagaggccatggtattaaaaatatgttccatgt

SEQ ID NO: 638612 - DNA, 398 bp, Homo sapiens
gagagacttctggctatcaagggataaagtggtaggttaattctctttacacaaaaaagaacaaaatcatatacaattgtctcatacaacaatttcagggctctgtaaattgactaaagacagacaacaaattgatcatctttcttcttgaaaaaatatccacggtagagatttgagtaagaacagcagtagtctattgtctttctgcctgggattgtttcccccttctccacaaatcagtaagtgaaaaaaagttttaccagcataagttcagccagaaaagcagcagctttgcaggcaaagggagctgactcagtttggagcaaggaaataaactttgcrgcactgttaactaaaaaatgggtaataccactgaaaacaagcagggcaaacccacc

SEQ ID NO: 638613 - DNA, 492 bp, Homo sapiens
taatgattgaaggagagacttctggctatcaagggataaagtggtaggttaattctctttacacaaaaaagaacaaaatcatatacaattgtctcatacaacaatttcagggctctgtaaattgactaaagacagacaacaaattgatcatctttcttcttgaaaaaatatccacggtagagatttgagtaagaacagcagtagtctattgtctttctgcctgggattgtttcccccttctccacaaatcagtaagtgaaaaaaagttttaccagcataagttcagccagaaaagcagcagctttgcaggcaaagggagctgactcagtttggagcaaggaaataaactttgcggcactgttaactaaaaaatgggtaataccactgaaaacaagcagggmaaacccaccactttgctagcctgagattgtagtatctgttggggtaaatgatacactacccaaaaatagaatgtggaagattctggaaatg

SEQ ID NO: 638614 - DNA, 345 bp, Homo sapiens
caggctggcaggagatcttgagaaatagcgcaaggtgagttccttggcttttctttttgccttttttatgccaagttggggctgaagcagctggcaaccttgagatgtcagtgagcatggtaaaaataaattaattgatttaaaaaagcctcttcaaagccagactctgtcaataaaaggatctggaaagagacgtcctaasacaacagaaaactttatacaataactgctctaatccagtcaaacatcacagccccacctgcccataccagccaatgctgagtggggaatcaagacgttctgagactgtaacaaagcaccccaacccctccagcctggtacaca

SEQ ID NO: 638615 - DNA, 563 bp, Homo sapiens
gcttttttctataaaattgacaagataattttgagtgttataggaaaatgcaatggggcttaaattttaaaaagaattttgaaaaataataaattggaggagttaccctacctgattttaaaacttactataaatgtactataaccaagtcacagctttctctaaattattatggtcagatgtatttgcaaacatggtcatctaggttattggtgagtttccagcttttgttttattttgaaaatgaactgaaagtatactgaataaatttctgaaaataaactgaataaattagtgtcatcttggtagaaccctgatgaatcagttatttaattgtamaattaaaatatgtaatataattttcacaattttttttgcttaatgactcaactggtacaacaatgtgacactgtattttacctttttatgcttctattttatctttctttttgtattttaatatctttgcttcaaggcatcatatctttcatgtaatataatagtctaagggaaagtctgagcaattgacaaagcttaatactgagtcagacaaatgtgttttg

SEQ ID NO: 638616 - DNA, 512 bp, Homo sapiens
agaacaggtcttccttaaatagcactttgtrcctaccacgggcagcttgtttcagtagcaacagcatggacttctgggctaattacttaacttctcaaagcctcactgttttaatctgcaaaatcagcattataaaactcgttcaatcaggctgtggtagaatttaacatttcagattttttctcttttctcctctcattccttcctttttcctttctttcctccttaccatctctccttctcttcgcgaatatttttaaagtagtgactctatcctggatggtgctctgaggcttgaggtttatcagaacaagattaatgaggtctctcacctcatgtatctaatatatctggcacagagttggaaacatatgtttttctttgcatttctcctcccattctctgtctgctgtgctgatactcatcagaatttagccacccaagttttactagcatataaaaaaatactagaactagactcatccaatagttaagagtatttactttgaggg

SEQ ID NO: 638617 - DNA, 512 bp, Homo sapiens
agaacaggtcttccttaaatagcactttgtacctaccacgggcagcttgtttcagtagcaacagcatggacttctgggctaattacttaacttctcaaagcctcactgttttaatctgcaaaatcagcattataaaactcgttcaatcrggctgtggtagaatttaacatttcagattttttctcttttctcctctcattccttcctttttcctttctttcctccttaccatctctccttctcttcgcgaatatttttaaagtagtgactctatcctggatggtgctctgaggcttgaggtttatcagaacaagattaatgaggtctctcacctcatgtatctaatatatctggcacagagttggaaacatatgtttttctttgcatttctcctcccattctctgtctgctgtgctgatactcatcagaatttagccacccaagttttactagcatataaaaaaatactagaactagactcatccaatagttaagagtatttactttgaggg

SEQ ID NO: 638618 - DNA, 512 bp, Homo sapiens
agaacaggtcttccttaaatagcactttgtacctaccacgggcagcttgtttcagtagcaacagcatggacttctgggctaattacttaacttctcaaagcctcactgttttaatctgcaaaatcagcattataaaactcgttcaatcaggctgtggtagaatttaacatttyagattttttctcttttctcctctcattccttcctttttcctttctttcctccttaccatctctccttctcttcgcgaatatttttaaagtagtgactctatcctggatggtgctctgaggcttgaggtttatcagaacaagattaatgaggtctctcacctcatgtatctaatatatctggcacagagttggaaacatatgtttttctttgcatttctcctcccattctctgtctgctgtgctgatactcatcagaatttagccacccaagttttactagcatataaaaaaatactagaactagactcatccaatagttaagagtatttactttgaggg

SEQ ID NO: 638619 - DNA, 567 bp, Homo sapiens
ctgctgtgctgatactcatcagaatttagccacccaagttttactagcatataaaaaaatactagaactagactcatccaatagttaagagtatttactttgaggggtggaattggaggtccaagaagcatggrgatttactgtctttatttgtaaactctttgtttgactttgtcaaaatgtgtatatgcctttctaattaaaatataatcaatgcaataaacagtggtggtaaacacaaagccaaacatattttatcagcaaatctctttccctcatgccttttccctcgccaattgtgcctttctatttaggaatggtaataggttggaatagtctttcgtctaaagagcttgagaacatgtatgcattttagcacacagcactgtccttctgtttgtctctgtctctgtttctctctctctctgtctccccgttctgtctctctgcccttttctatctctctctcctctctctctctctctcaccatccctctctgcttctctgtgtctccttctatctcacacactctttctctgccccctcccatcccaccttccatacac

SEQ ID NO: 638620 - DNA, 567 bp, Homo sapiens
ctgctgtgctgatactcatcagaatttagccacccaagttttactagcatataaaaaaatactagaactagactcatccaatagttaagagtatttactttgaggggtggaattggaggtccaagaagcatggagatttactgtctttatttgtaaactctttgtttgactttgtcaaaatgtgtatatgcctttctaattaaaatataatcaatgcaataaacagtggtggtaaacacaaagccaaacatattttatcagcaaatctctttccctcatgccttttccctcgccaattgtgcctttctatttaggaatggtaataggttggaatagtctttcgtctaaagagcttgagaacatgtatgcattttagcacacagcactgtccttctgtttgtctctgtctctgtttctctctctctctgtctccccrttctgtctctctgcccttttctatctctctctcctctctctctctctctcaccatccctctctgcttctctgtgtctccttctatctcacacactctttctctgccccctcccatcccaccttccatacac

SEQ ID NO: 638621 - DNA, 569 bp, Homo sapiens
gtctccccgttctgtctctctgcccttttctatctctctctcctctctctctctctctcaccatccctctctgcttctctgtgtctccttctatctcacacactctttctctgccccctcccatcccaccttccatacactgcatcatacctgggtttaccttccactagtctctccttctttaatccctgtgcatattcttgaaagttcccttgagttcagtgtgggatctgtgggaaaggaggcatgaagtcaggggcttgaactcatttgtttggctgggaaaagggggattttctctcacttgcattcattttctgtcttctttcattgtccaagtgataaacagataatggggaactctgatgatgatataaccggagtaaaataagccagacaactgcacctgcttcttttttaggtcttaagccagagaggcaaatgagtacctgcatttcacaartatctgggatagcagatgatgcttggctccagtgttaggagataagcaagcaacgactcagcaggtctgctcagccgtggacacccccaggaacctctagccgttt

SEQ ID NO: 638622 - DNA, 585 bp, Homo sapiens
catcacatttcatcagttaatcaacatttattaagtaactagcatggattttgtttttaattatctttgtgtggtgaatcacatatattgatttgcatatgttgaaccaaccttgcatcctaggaatcaagcctaaytgatagttgtgaattgacttttgatgtgctgttagattcagtttggtagtgttttgttgaggatttttgtgtctgcgttcatcaaagatattcacctgcagttttctttttacagtgtgtctttatcaggttttggtatcaggatgatcctggctttgtagaataagttagggaggagtctctctgcttccatttttttggaatcgtttcagtagacatagtactaactcttctttgttatgtctgatagaatttggctgttaatccatctgatccagggctgtaaacaggttttttattacttactcagtttcagaactcaacatttacttgatcagggtttcaatttcttcatgattcaatcttgggaggttttgtgtttccaggaatttatccatttttctctagattttctagtttatatgcataaaggtgttcataatagtct

SEQ ID NO: 638623 - DNA, 526 bp, Homo sapiens
tttgagatttgtctctccctatcgtaactaagttcaaggtytagggaacataaaaagttctccattcagactccatttcctatcacactttcttcctttttttttgtttctttagaacacattcctccctccacacagctcctcaattctaaatattagttttctcactttgggaaagatgctaagtcaacactaaacttctgttttatcatctacaacatacatatgtcaatatctaccacatagggttgctgtgaagaacaaatgataatgtatattaaataaatttaatgatatcttgttacttaaaaatgctggacattatggctattatgtatttttcaagatcctgttcaagcatcacctattttgtgagtatctccagttcttttctcttctctatgcctatactcctctctgaacacagctttcacctttcttataccattgcatttttattgcttcttgtctgtctttcctactgtgaagtccttgaagtcaggggctgcagcaatcacattaccca

SEQ ID NO: 638624 - DNA, 666 bp, Homo sapiens
ttacttaaaaatgctggacattatggctattatgtatttttcaagatcctgttcaagcatcacctattttgtgagtatctccagttcttttctcttctctatgcctatactcctctctgaacacagctttcacctttcttataccattgcatttttattgcttcttgtctgtctttcctactgtgaagtccttgaagtcaggggctgcagcaatcacattacccaacgtaaattcataactcatagaawttttaatatgattaaggttaggaatattttgaggatctaaaggcaacagagatatctggatatcccactaagcaaagaaaggtatgaacatttttagggccaatactgaaaaggattgaattctaaaaccagcagagacatcaaaagcaaaatttgtcattttgggttttctcagggtcagccttcctattaaacatttctgttatcagctaaaaagtatgactattcatcagttatctacagattttagatattctgaacacttcagcttaccatctggtgttagtgtagcaaatgaagaaattgcagcctaacagtcctttaatcagacaatgagcgtgtttaagtcactctgttcagtctttgcttcctttttgttcctttaggcaatgaaacacattgtgtgtcatgatacaa

SEQ ID NO: 638625 - DNA, 593 bp, Homo sapiens
cattacccaacgtaaattcataactcatagaaattttaatatgattaaggttaggaatattttgaggatctaaaggcaacagagatatctggatatcccactaagcaaagaaaggtatgaacatttttagggccaatactgaaaaggattgaattctaaaaccagcagagacatcaaaagcaaaatttgtcattttgggttttctcagggtcagccttcctattaaacatttctgttatcagctaaaaagtatgactattcatcagttatctacagattttagatattctgaacacttcagcttaccatctggtgttagtgtagcaaatgaagaaattgcagcctaacagtcctttaatcagacaatgagcgtgtttaagtcactctgttcagtctttgcttcctttttgttcctttaggcaatgaaacacattgtgtgtcatgatacaaaagtatattctggatsaaaagggttttttgatgtttcagagtctcatttctctcttgggatgatttaataatggtttatgtacgaagtagggcttgcaaggagctggggagaatgagaagggccacccatgtctagggcatac

SEQ ID NO: 638626 - DNA, 614 bp, Homo sapiens
ttgcttcctttttgttcctttaggcaatgaaacacattgtgtgtcatgatacaaaagtatattctggatgaaaagggttttttgatgtttcagagtctcatttctctcttgggatgatttaataatggtttatgtacgaagtagggcttgcaaggagctggggagaatgagaagggccacccatgtctagggcataccagttgctaagctacttcttcagaaaacatgagttagaaacttccaagccttttatgggggaygaaaataccattccaaaggagaggataagaatattttataagaaataaagcttaattccttcagttccaataaaagttgagaaggtttcaaggattttaactttgtatagctagatggcttaagtaatgcttgtaactgttgtgcaaaactaatgaataagaataaaattctaagaatttgggggtactaattatttaatatttcttttcaacttgtgatctgttctcttgagtgagtgagaaatgagcataaattgaccaaaaggaaatgaatttatcttactttttttgccctagctgaaatttagagctatagctaccaccatctggaaaatctctgtcagagatgctaaa

SEQ ID NO: 638627 - DNA, 636 bp, Homo sapiens
tgctaagctacttcttcagaaaacatgagttagaaacttccaagccttttatgggggatgaaaataccattccaaaggagaggataagaatattttataagaaataaagcttaattccttcagttccaataaaagttgagaaggtttcaaggattttaactttgtatagctagatggcttaagtaatgcttgtaactgttgtgmaaaactaatgaataagaataaaattctaagaatttgggggtactaattatttaatatttcttttcaacttgtgatctgttctcttgagtgagtgagaaatgagcataaattgaccaaaaggaaatgaatttatcttactttttttgccctagctgaaatttagagctatagctaccaccatctggaaaatctctgtcagagatgctaaacagcctttccctcctcattttatagtctccattgaggaatgggaatattaagtgacttacgttatagcaaataattttgaaagcatgctttctattataggatggtttataagcaatcactgactgatgatttggtgagtagtttaaaccatttgcttctttttttaaaaaaaaattcaattctttcctctagatccactcttcacagctgtggtctgaaagt

SEQ ID NO: 638628 - DNA, 614 bp, Homo sapiens
ttgcttcctttttgttcctttaggcaatgaaacacattgtgtgtcatgatacaaaagtatattctggatgaaaagggttttttgatgtttcagagtctcatttctctcttgggatgatttaataatggtttatgtacgaagtagggcttgcaaggagctggggagaatgagaagggccacccatgtctagggcataccagttgctaagctacttcttcagaaaacatgagttagaaacttccaagccttttatgggggatgaaaataccattccaaaggagaggataagaatattttataagaaataaagcttaattccttcagttccaataaaagttgagaaggtttcaaggattttaactttgtatagctagatggcttaagtaatgcttgtaactgttgtgcaaaactaatgaataagaataaaattctaagaatttgggggtactaattatttaatatttcttttcaacttgtgatctgttctcttgagtgagtgagaaatgagcataaattgaccraaaggaaatgaatttatcttactttttttgccctagctgaaatttagagctatagctaccaccatctggaaaatctctgtcagagatgctaaa

SEQ ID NO: 638629 - DNA, 434 bp, Homo sapiens
aatgaatttatcttactttttttgccctagctgaaatttagagctatagctaccaccatctggaaaatctctgtcagagatgctaaacagcctttccctcctcattttatagtctccattgaggaatgggaatattaagtgacttacgttatagcaaataattttgaaagcatgstttctattataggatggtttataagcaatcactgactgatgatttggtgagtagtttaaaccatttgcttctttttttaaaaaaaaattcaattctttcctctagatccactcttcacagctgtggtctgaaagtttgtgtttccccaaattcatatgttgaaacctaacactttatgtggaactattgtaaggtgtggtctttgggagatgattaggtcatgaggatgaagccctcatgaatggaatgaatgctgctg

SEQ ID NO: 638630 - DNA, 383 bp, Homo sapiens
ttactgtttcttctctgttcccttaactcttttcacaatgctataagtagtcttatgcttcattcattgctcctctgggttagccatgttcttctttctttataaatgactgatgcagaatttgttaccaagagtagtcctaggaaactgacttccwaagtgggattctgggattgtgttgctcatatatttgatgagctcacacagtaatatcaagactgctgaagtttctctgggtagtgacatgagatggagggaagaatgaaacactcagaggtcaatatcctgtgatatttattcacttcatgggtgtgttagttactcatcactgcataacaaataactgccaaaacttagtggcttcaagtaataaacactaatta

SEQ ID NO: 638631 - DNA, 588 bp, Homo sapiens
ctattttctgcttgacttccatcaatatatgctacctgacattgacacgaattaattctaataggaaaagtttacaaagtgaaattcaaattctttgacactccttttattgagaggtagaatttatttctcctcttctttaaccttggctgaattataactgctttgaccaatagagaattgtagacatgatactatgcaacttcagaaactagatgagaaagaagtaatccttttgggcacttgctttctggatatcccctgtccaaacatttcttttcagaactcagctgccatattgtgagacgctcaagctacctgaagaggttatttacaggtgatctagtgacagtatcasctgagatgaccttggcatccttccagcccaggcaccagggactgtgtaatgtaggagaacaattcattttgtatctgttacttttgtgcacattgtactctccagtcacattatactttttggtatttcttggatgtgtattgttctttctcattttgaataaatattgtcatctttctgccaatgtattttcccaagaagctccttcttcccacctaccagcatgacac

SEQ ID NO: 638632 - DNA, 595 bp, Homo sapiens
aagtactagtaatttctctgtgatgggtggtggtgaccttcagagcctctctactgagaatctttataatttcacccgattgtcttttctcctgccaagtatttactattgagtaaaatttatcttatttatcctagctttgtgattaaattaccaacttyattttattgatttattcttgcaataggtaaaacaatggacaagaggttttatgcagaagcttttagagttacatcctatatgctaaagattaaggtggctatttctttttaaatttatttttatttttatttaaatagtttttggtgaacaggtggtgttaggttacatggataagtgctttagtggtgatttctgaaattttggttcacctgtcacccaagcagtgtacactgtacccatattggtgatttgtttgactttcttgtagattctgaatattaatcctttgttgaacgcatagtttgcaaaaattttctcctactttgtgagttgtctgtttactctgctgattatttctttctctgtgcagaagctttttagtctaactaggtcccatttatttatttttgtttttattacatttgcttttggg

SEQ ID NO: 638633 - DNA, 561 bp, Homo sapiens
aagccaacataatcatttaatgggaaagccctacagaaacagtccaagtcaatggacttggtcaaggtcaatgacaggatgactactatttccactgctatttaagatacttcagtaggtactagctaatgaacttggacttcagaaaacaattggagacataatatgcaaaaaaattaaacatctcaatacacagatgacatgatactattattcatcagaattctattgaaacaatagtaaaagaaaccaaaacacaaaagaagttaaagtagcaatatacaaaattaacataacattaatagcatttgtattcacatataaaaaccagttagaagatacaatgaatgagataatcccatttataatagccataaaaatcataaakcatttggttataaacttaataaaagtgtttaaaatctataaaaaattatcaaatacttcttaaaaattaaaaaaaaggccatgaacaaatagaaagctgtttcttgttcttggttatgacacttctacatcattaagatgtcagttcccctcagttaatttataaatttaatg

SEQ ID NO: 638634 - DNA, 603 bp, Homo sapiens
gtttcttgttcttggttatgacacytctacatcattaagatgtcagttcccctcagttaatttataaatttaatgcagttttaataaaaatttcaatgggaattttttaatgaacataaacaagtttatccaaagttatttgaaaaataaagatacaacaattgctaggaaaacagtaaagcagaagtactccaaatcccattcgttgttaaaagttaataaaaagcctctataaatgtagttgtcgtgcatgcataaacagacacaatagaatacaatgaaaagtttagaaatagatttggctgcacttaaaaatctactatttaataaaagtggtgtctaacatcactaaaaaggtagcaatttgtaaaagatcaaattaggtctattcctcacaccatgtatgacaatcaatttcaaatgtatcagacgtctgtatgtaaaaatgagatctgcaaatactagaagaaaacacacattactcacaacctgggtttcaagaagggatttttaagcctgactagaaatatcagtgcagtaaaaaaattgatagattttactgcatcaatttttaattacaaaacattgtaagcaaagtgaaaa

SEQ ID NO: 638635 - DNA, 603 bp, Homo sapiens
gtttcttgttcttggttatgacacttctacatcattaagatgtcagttcccctcagttaatttataaatttaatgcagttttaataaaaatttcaatrggaattttttaatgaacataaacaagtttatccaaagttatttgaaaaataaagatacaacaattgctaggaaaacagtaaagcagaagtactccaaatcccattcgttgttaaaagttaataaaaagcctctataaatgtagttgtcgtgcatgcataaacagacacaatagaatacaatgaaaagtttagaaatagatttggctgcacttaaaaatctactatttaataaaagtggtgtctaacatcactaaaaaggtagcaatttgtaaaagatcaaattaggtctattcctcacaccatgtatgacaatcaatttcaaatgtatcagacgtctgtatgtaaaaatgagatctgcaaatactagaagaaaacacacattactcacaacctgggtttcaagaagggatttttaagcctgactagaaatatcagtgcagtaaaaaaattgatagattttactgcatcaatttttaattacaaaacattgtaagcaaagtgaaaa

SEQ ID NO: 638636 - DNA, 603 bp, Homo sapiens
gtttcttgttcttggttatgacacttctacatcattaagatgtcagttcccctcagttaatttataaatttaatgcagttttaataaaaatttcaatgggaattttttaatgaacataaacaagtttatccaaagttatttgaaaaataaagatacaacaattgctaggaaaacagtaaagcagaagtactccaaatcccattcgttgttaaaagttaataaaaagcctctataaatgtagttgtcgtgcatgcataaacagacacaatagaatacaatgaaaagtttagaaatagattyggctgcacttaaaaatctactatttaataaaagtggtgtctaacatcactaaaaaggtagcaatttgtaaaagatcaaattaggtctattcctcacaccatgtatgacaatcaatttcaaatgtatcagacgtctgtatgtaaaaatgagatctgcaaatactagaagaaaacacacattactcacaacctgggtttcaagaagggatttttaagcctgactagaaatatcagtgcagtaaaaaaattgatagattttactgcatcaatttttaattacaaaacattgtaagcaaagtgaaaa

SEQ ID NO: 638637 - DNA, 526 bp, Homo sapiens
actaacacaagcttcaactactactactacctctatttctactacctcttgtggactactactatactactattaccattactactattggttacctcttactggttacttaaaaatgytgaacactgagagttttacacacttgcacactggatttcattgaattccgataataggttgacactcttttatgaattgtaattttctgtgtggctaaaacaaaatatgttagatgctcagcacaagtggtggaaataaaattataaccagcatttgtgtccaatatttaattatttggaatctcacatgttatgataatcattacctaatttctacaagtatcatttccaatcttggtcacctcatatgattccaaatatccataatgccaaccaacttagttttctaacaactgtaaattcataaatacttcacatttctatgaattcccaacattggaatatagcccttactgaacatccagtcagttcaagatagcagctgacctggtgctcctaacaaacca

SEQ ID NO: 638638 - DNA, 658 bp, Homo sapiens
actaacacaagcttcaactactactactacctctatttctactacctcttgtggactactactatactactattaccattactactattggttacctcttactggttacttaaaaatgttgaacactgagagttttacacacttgcacactggatttcattgaattccgataataggttgacactcttttatgaattgtaattttctgtgtggctaaaacaaaatatgttagatgctcagcacaagtggtggaaataaaattataaccagcatytgtgtccaatatttaattatttggaatctcacatgttatgataatcattacctaatttctacaagtatcatttccaatcttggtcacctcatatgattccaaatatccataatgccaaccaacttagttttctaacaactgtaaattcataaatacttcacatttctatgaattcccaacattggaatatagcccttactgaacatccagtcagttcaagatagcagctgacctggtgctcctaacaaaccatagtcttgtctggagctggacctccacccctggtctctgtaagatactcctccaggtatcatccagtgaaatctagacctgtatttcagccctttttcactctgtaaaatacttgctgtcaaagtaagactt

SEQ ID NO: 638639 - DNA, 658 bp, Homo sapiens
actaacacaagcttcaactactactactacctctatttctactacctcttgtggactactactatactactattaccattactactattggttacctcttactggttacttaaaaatgttgaacactgagagttttacacacttgcacactggatttcattgaattccgataataggttgacactcttttatgaattgtaattttctgtgtggctaaaacaaaatatgttagatgctcagcacaagtggtggaaataaaattataaccagcatttgtgtccaatatttaattatttggaatctcacatgttatgataatcattacctaatttctacaagtatcatttccaatcttggtcacctcatatgattccaaatatccataatgccaaccaacttagttttctaacaactgkaaattcataaatacttcacatttctatgaattcccaacattggaatatagcccttactgaacatccagtcagttcaagatagcagctgacctggtgctcctaacaaaccatagtcttgtctggagctggacctccacccctggtctctgtaagatactcctccaggtatcatccagtgaaatctagacctgtatttcagccctttttcactctgtaaaatacttgctgtcaaagtaagactt

SEQ ID NO: 638640 - DNA, 596 bp, Homo sapiens
tttattttactaacctggttattccgtcttcttctttaaccagtttacctggtgattcctccatactctcagttcacatgccaactatctgtgaatgttaaaatattgaacccacaaattcataaaggcctgtaaggtcatattatccacattttctctaagttccaagggaaagtccatatttgaaactaatgggaatgttcgaaacttctcagggcaggagactgactacattaagatgcaagctaaccattgactaggtcttcccatttattagaaaatctttcttatgttgacgtcacttgttacttgctcatttttccccagaaaaagagggtttttttttttttgaagccacaaaggagaaacttctcctatataaagtattcccgagtcccgtcatgttgttttaaagtgcactgttctcagagattctccaaactctgccacctctgtaactaaatgaccacactgtgtgggcattgctgtgtgtgaggcccattagctgtgaggaaaagaggttcactctttacctaaaataatggagacttattatgaaaatctatrtagaaatgatgaaggcagaaatctctaat

SEQ ID NO: 638641 - DNA, 376 bp, Homo sapiens
ttaatccattctgtgctgtttgttctgtgtatcttttctctatcctcccttgccttcttttagatcttttatatatacaaatataaattataccatatttatactatatattatatagtaaagtgtatatatactatatatgatatatttacatatagyatatactatatagtttatatatatatgctatatattttagtatatactaaatataatacacttaatacttgcagctatttactcttgtttggaagttatgtatccttatttttatcctataagtcataggcagtttttaaatgtattataatttaatattacttaataactttaaaatctttcaggacaatagaagaaactgagaacactaattccg

SEQ ID NO: 638642 - DNA, 455 bp, Homo sapiens
aacctgtaataccccttagagaaaacatatgtgaactgccttccaaattaagccagtgcgttaaaagaaccagaagccctttrctgacctcacagtgatagatgtccaactaatacacagacaattaaaatcctggactctatccttaaagaattgttgcaaaatcagcttttgccaagaagagagggttctgcatttcccatctattgggatattttaaaaaacaactgttgcaatgactatttaaactaaactgaggatatttaaagttatttttatatttacataattccatgtgcatgagtgctcatcaggtgtctattttctaaaacttacgtcacatatgttttgcacaccatatttctgatgacattcttttcatcttaaatatgaaggtttaaatcatactcagttttgtcacctgcttgctaatgcttggaaggtgagcagaattc

SEQ ID NO: 638643 - DNA, 496 bp, Homo sapiens
ttccacaggttacatcctgtcattcatttaaaagggagactttcatggaagagaaagcaacttggcccatatattcccctttgctctcatctgatgctcctgctttgagtgctaagtattgaatttagcatcgtgtgatgtaaacacaagcaatcaatatggttgctgcatttctacctgaaaagaagtgctgttatcagatttacacttttgctaacatagtcaattattttgcaacacttttggtgaaaacaggttgatayatgacttacaaaaacatgatagatttcttgtttaaaataaaaagttttaatagtgattagctctaaatgtacaaattatataagactaagtgacaaaaagtagaaaaagtttaatgttacttgattattagaagttattatactgatttttttcatggacgtagctaaagaaaataccaaaacacatatttgaatacaggcaaatcttctatacatatgtgaaaaaatttact

SEQ ID NO: 638644 - DNA, 577 bp, Homo sapiens
aaatgtacaaattatataagactaagtgacaaaaagtagaaaaagtttaatgttacttgattattagaagttattatactgatttttttcatggacgtagctaaagaaaataccaaaacacatatttgaatacaggcaaatcttctatacatatgtgaaaaaatttactcagaggggaaattttgtttcttcttttttctacatcraaacagacagatattgtaaagactgccatatgagttacaattagttgtgtctgtttttaacattaacacatggtacttttttccaaaatcagaagtaaccatttcctaagagaacttgaaagacacacccagcagagcctcataaattatttagaatctgataaaacattattttctctgattacaagaaagttctcctgatatgtatgggctcaagaccacttcattctgtgttatggggagtgtgctgagccttgtgttgggagacccatatttgtgaactgctcccatttctgccactatataattttggcaaattatttctccgttttgaatctcatcaagtatcatgaactagatgatagtttatg

SEQ ID NO: 638645 - DNA, 577 bp, Homo sapiens
aaatgtacaaattatataagactaagtgacaaaaagtagaaaaagtttaatgttacttgattattagaagttattatactgatttttttcatggacgtagctaaagaaaataccaaaacacatatttgaatacaggcaaatcttctatacatatgtgaaaaaatttactcagaggggaaattttgtttcttcttttttctacatcaaaacagacagatattgtaaagactgccatatgagttacaattagttgtgtctgtttttaacattaacacatggtacttttttccaaaatcagaagtaaccatttcctaagagarcttgaaagacacacccagcagagcctcataaattatttagaatctgataaaacattattttctctgattacaagaaagttctcctgatatgtatgggctcaagaccacttcattctgtgttatggggagtgtgctgagccttgtgttgggagacccatatttgtgaactgctcccatttctgccactatataattttggcaaattatttctccgttttgaatctcatcaagtatcatgaactagatgatagtttatg

SEQ ID NO: 638646 - DNA, 577 bp, Homo sapiens
aaatgtacaaattatataagactaagtgacaaaaagtagaaaaagtttaatgttacttgattattagaagttattatactgatttttttcatggacgtagctaaagaaaataccaaaacacatatttgaatacaggcaaatcttctatacatatgtgaaaaaatttactcagaggggaaattttgtttcttcttttttctacatcaaaacagacagatattgtaaagactgccatatgagttacaattagttgtgtctgtttttaacattaacacatggtacttttttccaaaatcagaagtaaccatttcctaagagaacttgaaagacacacccagcagagcctcataaattatttagaatctgataaaacattattttctctgattacaagaaagttctcctkatatgtatgggctcaagaccacttcattctgtgttatggggagtgtgctgagccttgtgttgggagacccatatttgtgaactgctcccatttctgccactatataattttggcaaattatttctccgttttgaatctcatcaagtatcatgaactagatgatagtttatg

SEQ ID NO: 638647 - DNA, 577 bp, Homo sapiens
aaatgtacaaattatataagactaagtgacaaaaagtagaaaaagtttaatgttacttgattattagaagttattatactgatttttttcatggacgtagctaaagaaaataccaaaacacatatttgaatacaggcaaatcttctatacatatgtgaaaaaatttactcagaggggaaattttgtttcttcttttttctacatcaaaacagacagatattgtaaagactgccatatgagttacaattagttgtgtctgtttttaacattaacacatggtacttttttccaaaatcagaagtaaccatttcctaagagaacttgaaagacacacccagcagagcctcataaattatttagaatctgataaaacattattttctctgattacaagaaagttctcctgatatgtatgggctcaagaccacttcattctgtgttatggggagtgtgctgagccttgtgttgggagayccatatttgtgaactgctcccatttctgccactatataattttggcaaattatttctccgttttgaatctcatcaagtatcatgaactagatgatagtttatg

SEQ ID NO: 638648 - DNA, 564 bp, Homo sapiens
tcctcagacaaacataagttgaaggaattaatcacaagtggaaatgacacgcaagaaayattcgaagtttttcggggtgatagaaaatgacacaggtcagaaactcacgtctacgtgatgcaattgcagtggggaagagataaatgaaggtaaaataatatattttactttttctttgttcttaatagatctaatcggtaattatttgttcaaataatagtgacaatgtagtaggcaattatacagaaaaatgaaatgaatgacagcaatattataagaaacaacagcaatattacaaggaagagaagagaagaggagcattctataatcttacggttaaatatcagtctcatagtggcctgtgtccctgggcaatcaccaacacacgttgctccccttccccacacaggaaggctagatggggatggagctgagtaattgctcttctactaggtctgaagaggccctggtaaggtcttttcctttgcagagtaggcgtttgtcatgatgaatcctccatgtgtacattaaaattgttgctttttcccttctcctgccagatac

SEQ ID NO: 638649 - DNA, 564 bp, Homo sapiens
tcctcagacaaacataagttgaaggaattaatcacaagtggaaatgacacgcaagaaacattcgaagtttttcggggtgatagaaaatgacacaggtcagaaactcacgtctacgtgatgcaattgcastggggaagagataaatgaaggtaaaataatatattttactttttctttgttcttaatagatctaatcggtaattatttgttcaaataatagtgacaatgtagtaggcaattatacagaaaaatgaaatgaatgacagcaatattataagaaacaacagcaatattacaaggaagagaagagaagaggagcattctataatcttacggttaaatatcagtctcatagtggcctgtgtccctgggcaatcaccaacacacgttgctccccttccccacacaggaaggctagatggggatggagctgagtaattgctcttctactaggtctgaagaggccctggtaaggtcttttcctttgcagagtaggcgtttgtcatgatgaatcctccatgtgtacattaaaattgttgctttttcccttctcctgccagatac

SEQ ID NO: 638650 - DNA, 581 bp, Homo sapiens
atctttctcttttcttttcttctttttccttttgtttttgtttgttttttgtttttttgcttagtctgtctagaggtttatcaactttattaattttttttagaaaaatgttgatttctattgctttcctgtttttttctgtttcattgatttctgcactaatttttgctgctacatttcttctgcttgctttaggcttaattagttcttctgtttctagtttccaaaggaaaacacttaggttaacaattttagactttttgcttttctaatatatatatttaatactataaaacctctataagtattgctttactgcatccttcaactttcattgaaatttgatatttcaaggaattttttaatttcaaatttaaatatattgaaaaataattcaaaaataaaaatattttaacatagtttatttttcattttttcttgatactttttgatccrtatgttactagaagtgtattgtttaattttcagtatttagagatttgtttatctttctgttattgatttctactttaattttgttgtggcctaagaacatattttatgctgtttctattctttta

SEQ ID NO: 638651 - DNA, 307 bp, Homo sapiens
atttcacattgcatcactctgacctacccttctgccttcttttccagtgttaagaagccatgtgataatattgagcttacctagacaatccaggataatcttttattccaactttcatcacatctgcaaagtctcttttaccrcatgaaatgacatattcacaagttacagtgattaggatatgggcactgggccaagtcacttgtggtatagtccctttcaccagtaaccccagtttctctggtgtctgtggttgaaaaaaggggatgaaatccttagggacaaagaggctaactgagttgggaca

SEQ ID NO: 638652 - DNA, 604 bp, Homo sapiens
actgtgttgatcctccactccttgagcccctaactagttcctctttcctttaatatatttcagagacgtcttttagttgcctcttttgttatttccaaagcttaaatttatacttaggaggatagcggggagagacaagtctactacatctcgtctacacaagaagtcatctgttcygtttcttatatttcgaagctctctccttgagttatgcacatattgaggacatttatatcttctggttgaattgaccagttttttcaatatgcaacattactctttatcaatggtaagattttttccagatgcttattttgtctgatattaatatagccactacagttttatttctgcatgatatatctttccccatcattttacttctaacctatgtcattggaaggaaaaaacctgattaaaaatgggtaaagaatctgaatagacatttctcaaaataagacacatgaaaaactacatgaagaaaatgcccaacatcattaataataagggaaaatgaaaattaaaaacacaatgagatatcaccccatatctgttagaatggctactataaaaaagacaaaatataataagtgttggagagaat

SEQ ID NO: 638653 - DNA, 572 bp, Homo sapiens
tttcttcagccaggtcaagtctactgataagactatcaaaggaatctttcatctctaggatttccattctactttttcttgtaatttctacctctctgctgaaatccctcatctgttcctgaattgttcatctgttccactgggttatttaatatacgtcacattcattttactttccattctgacagttttagcatctgggtcatttctacatctggatctgttaattgttttattttgacaataggttgtgttttaagttggtatgtctctgttttgactraatgttgaatagtatgtaaggagtatcagagactgaaataaatagtattcatatctagaaatgaacatgcttcttctgttttaagctaattagcattgaaagtgacatcaatctggtgagaatctgggctggatttgggatttatggttgctatggttatgcttagtgcatcaaaatcttcacatgcttctaactgtaggttgtttattgtattgttcctagaatagtggctgcggctactgggagtttttctaaatgtttctgtttcatccccagctgtgggcatttt

SEQ ID NO: 638654 - DNA, 585 bp, Homo sapiens
ggaagaaaagaaagaaattagaaaactattgaatagtccagaaaaataatataatagcatacactaagagagtgggaatggaagggagatgacagagcatcaaaaagatataccagtcaagagtgtttaacttggccccaccccggcccccttccgtgcctcgggagcccacactgtggccacatctctcacgtggtcatctatgaagagttccccttctgaaatctttagctccactaaaccgccttgtgcgtaaattattattctctagaatcactcctgttatatcacttctttgacctcatcaaagccacctacacctttgctttttctctaaactcctgtgtttggtsgttcatttaatgctgcctctatcagctggcatgcgcatctctctgcagtgctcttcaagcagtccaaggagtccaggagacccatctgccttctccattcaaacacccaatgtgatgagtactgttggagaaaatcaccattatacttttctctggatttccaaggcctgcataaatacctgtttcctggtgatctccacctttaattcactatatccaaaaattagctcaa

SEQ ID NO: 638655 - DNA, 608 bp, Homo sapiens
tattaaattgtacatggtgtatatagatacttgctgttattaagatgcatggctggtaaaaggaacaaataatgtactcatgccctttgtttcttagaaatagctacagctgggcaaagcccttggatgtcagaaaaaaaatgaagttgtatttttcatgccttctgattaacttccaatgcctcccaagcaccagtaaagcaaatgaagagtgcyatcttaagctaaacattttgttagtaaaaaaaaatctaataattgtcagaggacacaaatcaaaagctaatcatgaaaagagtttccatattctgttttcaccctaattcagtacattaagcataaggtgagaaaaataattgcaagaatgaattttttgaatgtattatttctataaccaagaatgactctgacttcagtgtttgtgtgatgtgtatgtatgtgcgtgtgtgtgtgttgtgtaacttcaatgtcacaatattttatgtcaggttgtttggattcagacctcataaattacttgctgtggggccttgagaaagtcaacccctgtgagctgagtttactcttatgtaaaatcgggacagtgatacctatctcagaaactgcag

SEQ ID NO: 638656 - DNA, 554 bp, Homo sapiens
atcactatgagttataacactcacaagcttctagtggtgggcctgcaagaactatctagtacgactcccacttcagagacagccagagctaggaggagcatcaccaagagtgcagctatttcactctcccggtgtctagttcattgtccctgctggtctacactaattctaatcccttggaactcaacattcagcttccgatctgatgttatccagccttttaggaaagcaattgagtgtcatgagaaagaayacaaatcacccattctctgtcacattaatgcagccagtctctgagggaatcggatggtggtaatgtcataaggctcttggcatgtgtttatatctaaggagctcataccaaggtatggtaaattcaattacagacacggatcttcagaacacctgttttatttcttcccaaatttcagattgaggaatgtatgtcagaaagagttgcttatttgaattaaatgtatattgtggacagaataacaaatgagcagaatatcagtacacttatccatgtatctttacctagatcaatttctatt

SEQ ID NO: 638657 - DNA, 554 bp, Homo sapiens
atcactatgagttataacactcacaagcttctagtggtgggcctgcaagaactatctagtacgactcccacttcagagacagccagagctaggaggagcatcaccaagagtgcagctatttcactctcccggtgtctagttcattgtccctgctggtctacactaattctaatcccttggaactcaacattcagcttccgatctgatgttatccagccttttaggaaagcaattgagtgtcatgagaaagaacacaaatcacccattctctgtcacattaatgcagccagtctctgagggaatcrgatggtggtaatgtcataaggctcttggcatgtgtttatatctaaggagctcataccaaggtatggtaaattcaattacagacacggatcttcagaacacctgttttatttcttcccaaatttcagattgaggaatgtatgtcagaaagagttgcttatttgaattaaatgtatattgtggacagaataacaaatgagcagaatatcagtacacttatccatgtatctttacctagatcaatttctatt

SEQ ID NO: 638658 - DNA, 593 bp, Homo sapiens
ctaacagctgaattataattactataatcatcaaccttgcacaactcagaaaaagccttcctgaaaactgtatttgcattacccttatctaaattccgcatcgtcaagctgcgaatcatattctctcctctcgtctcaccctcactcttgctttcttagttctcttcatcctcaggaacactattctctccttcctccttccttccmttcctatgcacgcttctttacatataatagcttagaacgggagaagaggaagtaaaatgggtgcatattttggattgtgctttgatgtgtatatgtgcagacatgtgtgtccagtcatttaaaccaaagtcataaaatactaactcaacaaagcaggggttctttttagaagagtcctttatcatctcttggacaaacagactaatgggaaaaactagacagcagccgaggctcaggagtaactagcagctggaagtgaccataacttctttactcttcctgtatgtgaactccaaaggctcctgagctttattgagcagagcgtcagctccgaggttgagacaggatctcttggtgggtcacagtccaaccctagaggaaagcac

SEQ ID NO: 638659 - DNA, 594 bp, Homo sapiens
gtatatgtgcagacatgtgtgtccagtcatttaaaccaaagtcataaaatactaactcaacaaagcaggggttctttttagaagagtcctttatcatctcttggacaaacagactaatgggaaaaactagacagcagccgaggctcaggagtaactagcagctggaagtgaccataacttctttactcttcctgtatgtgaactccaaaggctcctgagctttattgagcagagcgtcagctccgaggttgakacaggatctcttggtgggtcacagtccaaccctagaggaaagcacgatgttcagaaaccccctcagcaaagtaagtactggggccatgttaaatatcacaatattgatatcataaaataatcctttacataaatatcatgagcaagttttatgttggctgggccagcatggtattaagcgaatgtctctgagtaaaagctggatgcagagaggtcaactagctgagtgggcatttgctcagaagcttcagctcctggtggcttggctgaacttcacagctgatggtgcataaaggggtttcttccagttaatgcagatatggatccactcagctctccagg

SEQ ID NO: 638660 - DNA, 573 bp, Homo sapiens
ggatttatctcaggaatgtaagtgcggctcaatgtaagaaaattgatcaatgtaatatgccatattaatagaataaagtacaaaagacacatattcatctcaactgatgcaaaataagcatttgacaaagtctaacacccatttatgatagaaactctcaacaaatagaaatataaggtaacttcctcaatttgataaagggcatctctgaaaaaaccatagctattatacttaatggtaagggattgaaagagctcctctaagattaggaacaacaaaataatatctgctcttaccaccaccacctccttctactagaggttgtagagagggcaattaagaaagaaaatgaaataaaagycaacttcttataagactaccatctctccgttcccacagtgaatgaaacatgcatcacgtcaatttcccttggataaagccattacccctgactaagggtgccaggtaacacagaaggtatctcccagcacccctgtagaaactggcatctaagctcacactccttgatttctgagcacacagtgcatattcctcacatccaaggatgctatc

SEQ ID NO: 638661 - DNA, 573 bp, Homo sapiens
ggatttatctcaggaatgtaagtgcggctcaatgtaagaaaattgatcaatgtaatatgccatattaatagaataaagtacaaaagacacatattcatctcaactgatgcaaaataagcatttgacaaagtctaacacccatttatgatagaaactctcaacaaatagaaatataaggtaacttcctcaatttgataaagggcatctctgaaaaaaccatagctattatacttaatggtaagggattgaaagagctcctctaagattaggaacaacaaaataatatctgctcttaccaccaccacctccttctactagaggttgtagagagggcaattaagaaagaaaatgaaataaaagccawcttcttataagactaccatctctccgttcccacagtgaatgaaacatgcatcacgtcaatttcccttggataaagccattacccctgactaagggtgccaggtaacacagaaggtatctcccagcacccctgtagaaactggcatctaagctcacactccttgatttctgagcacacagtgcatattcctcacatccaaggatgctatc

SEQ ID NO: 638662 - DNA, 573 bp, Homo sapiens
ggatttatctcaggaatgtaagtgcggctcaatgtaagaaaattgatcaatgtaatatgccatattaatagaataaagtacaaaagacacatattcatctcaactgatgcaaaataagcatttgacaaagtctaacacccatttatgatagaaactctcaacaaatagaaatataaggtaacttcctcaatttgataaagggcatctctgaaaaaaccatagctattatacttaatggtaagggattgaaagagctcctctaagattaggaacaacaaaataatatctgctcttaccaccaccacctccttctactagaggttgtagagagggcaattaagaaagaaaatgaaataaaagccaacttcttataagactaccatctctccgttcccacagtgaatgaaacatgcatcacgtcaatttcccwtggataaagccattacccctgactaagggtgccaggtaacacagaaggtatctcccagcacccctgtagaaactggcatctaagctcacactccttgatttctgagcacacagtgcatattcctcacatccaaggatgctatc

SEQ ID NO: 638663 - DNA, 573 bp, Homo sapiens
ggatttatctcaggaatgtaagtgcggctcaatgtaagaaaattgatcaatgtaatatgccatattaatagaataaagtacaaaagacacatattcatctcaactgatgcaaaataagcatttgacaaagtctaacacccatttatgatagaaactctcaacaaatagaaatataaggtaacttcctcaatttgataaagggcatctctgaaaaaaccatagctattatacttaatggtaagggattgaaagagctcctctaagattaggaacaacaaaataatatctgctcttaccaccaccacctccttctactagaggttgtagagagggcaattaagaaagaaaatgaaataaaagccaacttcttataagactaccatctctccgttcccacagtgaatgaaacatgcatcacgtcaatttcccttggataaagccattacccctgactaagggtgccaggtaacacagaaggtatytcccagcacccctgtagaaactggcatctaagctcacactccttgatttctgagcacacagtgcatattcctcacatccaaggatgctatc

SEQ ID NO: 638664 - DNA, 519 bp, Homo sapiens
tgtgatttgagaaggccttggattaggatccaaattatagccgtaccatctgctgttcctgagctgtttttaacagtaaacactttcattagtctaatatattcattatttccaggtattgctaaaaagttgcgagctatcatgtaatcaatattcatttgtacattttataggtttacatattttgtttttaatttatttacatgtatgtatctctatattatgttttatattcatttacacatwttatataaatactcaccttctttcctcagctctttgaagtgtgtacttacaatggattatgttgagagagttgccaatattttctcagccctatgagtaaatatcagggtcagggaaggaaagtaatatttactagcgtgtgatacagtgttaggtatattctgtatatcacatctttacatcttacactaaccctctgaagtaggtacatttatcttcattttgacaaataaggggatagggatattaagtagcaggcctagtagaagcaag

SEQ ID NO: 638665 - DNA, 519 bp, Homo sapiens
tgtgatttgagaaggccttggattaggatccaaattatagccgtaccatctgctgttcctgagctgtttttaacagtaaacactttcattagtctaatatattcattatttccaggtattgctaaaaagttgcgagctatcatgtaatcaatattcatttgtacattttataggtttacatattttgtttttaatttatttacatgtatgtatctctatattatgttttatattcatttacacattttatataaatactcaccttctttcctcagctctttgaagtgtgtacttacaatggattatgttgagagagttkccaatattttctcagccctatgagtaaatatcagggtcagggaaggaaagtaatatttactagcgtgtgatacagtgttaggtatattctgtatatcacatctttacatcttacactaaccctctgaagtaggtacatttatcttcattttgacaaataaggggatagggatattaagtagcaggcctagtagaagcaag

SEQ ID NO: 638666 - DNA, 519 bp, Homo sapiens
tgtgatttgagaaggccttggattaggatccaaattatagccgtaccatctgctgttcctgagctgtttttaacagtaaacactttcattagtctaatatattcattatttccaggtattgctaaaaagttgcgagctatcatgtaatcaatattcatttgtacattttataggtttacatattttgtttttaatttatttacatgtatgtatctctatattatgttttatattcatttacacattttatataaatactcaccttctttcctcagctctttgaagtgtgtacttacaatggattatgttgagagagttgccaatattttctcagccctatgrgtaaatatcagggtcagggaaggaaagtaatatttactagcgtgtgatacagtgttaggtatattctgtatatcacatctttacatcttacactaaccctctgaagtaggtacatttatcttcattttgacaaataaggggatagggatattaagtagcaggcctagtagaagcaag

SEQ ID NO: 638667 - DNA, 519 bp, Homo sapiens
tgtgatttgagaaggccttggattaggatccaaattatagccgtaccatctgctgttcctgagctgtttttaacagtaaacactttcattagtctaatatattcattatttccaggtattgctaaaaagttgcgagctatcatgtaatcaatattcatttgtacattttataggtttacatattttgtttttaatttatttacatgtatgtatctctatattatgttttatattcatttacacattttatataaatactcaccttctttcctcagctctttgaagtgtgtacttacaatggattatgttgagagagttgccaatattttctcagccctatgagtaaatatcagggtcagggaaggaaagtaatatttactagcgtgtgatacagtgttaggtatattctgtatatcacatctttacatcttacactaaccctctgaagtaggtacatttatcttcattttgacaaataaggrgatagggatattaagtagcaggcctagtagaagcaag

SEQ ID NO: 638668 - DNA, 603 bp, Homo sapiens
tgcatatgcaacagtggtcccgtaagactatcagccatcatggagctgaaaatttcctgtaatctagtgatgctgtagccatcgtaatgttgtagcgtaacatattactcatgcacatccgtggcagaaaaaagaaacaaaccaagcaaaccaccctgaacatatttcaggaaagggcagcacctcatcaagaagaacctcaggcaggtccttcaggrggtgtccagaagaaggcattgttatcacacgagaaggttccatgcatgttatgactcctgaagaccttcctgtgggacaagatatgaaagtggaagatagtgatattgatcatcttgacgtgggtagatgtacgctaatgtgtgtgtgtgtgtgtgtgtgtctcttagttttttaatgaaagaagtttgaaaagtaaaaaataataagcaacttaaaaattagagataagcttatagaataagggtataaaggaaaactttttttgtatagttgtacaatatgtttgtgttttaagctgaatgttattacaaaagggtcaaaaagtttaaaaaaattaaaacatttataaagtaaaaatgttacagtaagctaaggttaatttat

SEQ ID NO: 638669 - DNA, 603 bp, Homo sapiens
tgcatatgcaacagtggtcccgtaagactatcagccatcatggagctgaaaatttcctgtaatctagtgatgctgtagccatcgtaatgttgtagcgtaacatattactcatgcacatccgtggcagaaaaaagaaacaaaccaagcaaaccaccctgaacatatttcaggaaagggcagcacctcatcaagaagaacctcaggcaggtccttcagggggtgtccagaagaaggcattgttatcacacgagaaggttccatgcatgttatgactcctgaagaccttcctgtgggacaagatatgaaagtggaagatagtgatattgatcatcttgacgtgggtagatgtacgctaatgtgtgtgtgtgtgtgtgtgtgtctcttagttttttaatgaaagaagtttgaaaagtaaaaaataataagcaayttaaaaattagagataagcttatagaataagggtataaaggaaaactttttttgtatagttgtacaatatgtttgtgttttaagctgaatgttattacaaaagggtcaaaaagtttaaaaaaattaaaacatttataaagtaaaaatgttacagtaagctaaggttaatttat

SEQ ID NO: 638670 - DNA, 603 bp, Homo sapiens
tgcatatgcaacagtggtcccgtaagactatcagccatcatggagctgaaaatttcctgtaatctagtgatgctgtagccatcgtaatgttgtagcgtaacatattactcatgcacatccgtggcagaaaaaagaaacaaaccaagcaaaccaccctgaacatatttcaggaaagggcagcacctcatcaagaagaacctcaggcaggtccttcagggggtgtccagaagaaggcattgttatcacacgagaaggttccatgcatgttatgactcctgaagaccttcctgtgggacaagatatgaaagtggaagatagtgatattgatcatcttgacgtgggtagatgtacgctaatgtgtgtgtgtgtgtgtgtgtgtctcttagttttttaatgaaagaagtttgaaaagtaaaaaataataagcaacttaaaaattagagataagcttatagaataagggtataaagraaaactttttttgtatagttgtacaatatgtttgtgttttaagctgaatgttattacaaaagggtcaaaaagtttaaaaaaattaaaacatttataaagtaaaaatgttacagtaagctaaggttaatttat

SEQ ID NO: 638671 - DNA, 539 bp, Homo sapiens
acttcaaaattgctcattttttttgttgttcttgttgttggaaatagctcataattatacacagcacaaaattttctgcattgtcactaaaatgatcattcttggtaaaaagaaattaccttcactttctgcacttttgtggtgacagtttattacaaaaccccataaggagtgaagaatgagttctctaagactcattataaatatgacatcagcagttgaagtagaagaatcttaaaaagtttgagatgcttcatttgtattcgctgggccatttggttattcaccaaatttatctttcaactagcatttaktgaatgcacttttatactggactataggaaaaacagagtggaataaaacaacttcctcccaaggaaataataatccagatggaaagacgtgacatgttcctaaaaaatgataatacaagacagagccagataaatatcataagggatgtttggaccaagtgctataagacttgcaggagcaaatgttttcctctagctagaaaggaaggaactcagactaagcag

SEQ ID NO: 638672 - DNA, 472 bp, Homo sapiens
acataggtaacaaagatgagtggcaggtacaagtgccctagaaatgtcatcaccaatccaggcgattctaaatcaatggattgtgaaattcttctgtcagggaaattgattatgactctttaggccctatgataaaattattcctgtcatccatatattaaaaayattctttccatcatgtagttttcgtagtagctttgttcatttaaccttgactgtcagacggtgttatgtacagcgtggttctgcaggcaaggcagccaagtgcggagcgtgggcatcgcaccgtcacgaggaaaggtctaaccctcattagtgaaaggaaaattaaaacaaccgtgagaatccatttgtcatctgccaaattggaatagagtaatgaaaagtacctggtgttgctagatcatgtgtgaagagagtagagtgctggttcccagctggggggactgtaattggagagtttttgttgagg

SEQ ID NO: 638673 - DNA, 472 bp, Homo sapiens
acataggtaacaaagatgagtggcaggtacaagtgccctagaaatgtcatcaccaatccaggcgattctaaatcaatggattgtgaaattcttctgtcagggaaattgattatgactctttaggccctatgataaaattattcctgtcatccatatattaaaaatattctttccatcatgtagttttcrtagtagctttgttcatttaaccttgactgtcagacggtgttatgtacagcgtggttctgcaggcaaggcagccaagtgcggagcgtgggcatcgcaccgtcacgaggaaaggtctaaccctcattagtgaaaggaaaattaaaacaaccgtgagaatccatttgtcatctgccaaattggaatagagtaatgaaaagtacctggtgttgctagatcatgtgtgaagagagtagagtgctggttcccagctggggggactgtaattggagagtttttgttgagg

SEQ ID NO: 638674 - DNA, 535 bp, Homo sapiens
tttcttcttacctcaaaatgttgttatgagatgactatatccraagaatgacattgtccaaaaaggatatttataatggttatataataatgttttactattaatgaagaatcactagaaaaatgacccaatattatggccataaacatgaatcgacactcactatcaatctagaactgtgttggcatagtacctgtttcccacaaaatctccaactcaggtctgcatctgtaattgtgactgctacactgaacttacaattttgcataactagacactctggggaacacagggcgtggacagtgttggaaaggctgctaacaactccagtttggaaccatgctcatctcataaaccacaacttttgaaatataagatatcaacatcacatcatgttacctgattttttttcaagttgattttttaaaaagtttacaatttgaaaaatcaatgacaaaagacacaatggaaaatggtggtaatatcacatggaaatcaatcaatgaatctgtctaatgagttacaatttcacact

SEQ ID NO: 638675 - DNA, 572 bp, Homo sapiens
taaatcctatctgtgtgcttcagctcacttaaggatctaagagcaatttttcttcttacctcaaaatgttgttatgagatgactatatccgaagaatgacattgtccaaaaaggatatttataatggttatataataatgttttactattaatgaagaatcactagaaaaatgacccaatattatggccataaacatgaatcgacactcactatcaatctagaactgtgttggcatagtacctgtttcccacaaaatctccaactcaggtctgcatctgtaattgtgactgctacactgaacttacaattttgcataactagacactctggggaacacagggcgtggacagtgttggaaaggctgctaacamctccagtttggaaccatgctcatctcataaaccacaacttttgaaatataagatatcaacatcacatcatgttacctgattttttttcaagttgattttttaaaaagtttacaatttgaaaaatcaatgacaaaagacacaatggaaaatggtggtaatatcacatggaaatcaatcaatgaatctgtctaatgagttac

SEQ ID NO: 638676 - DNA, 478 bp, Homo sapiens
attttgcataactagacactctggggaacacagggcgtggacagtgttggaaaggctgctaacaactccagtttggaaccatgctcatctcataaaccacaacttttgaaatataagatatcaacatcayatcatgttacctgattttttttcaagttgattttttaaaaagtttacaatttgaaaaatcaatgacaaaagacacaatggaaaatggtggtaatatcacatggaaatcaatcaatgaatctgtctaatgagttacaatttcacactgagaagataagtaaaaatggaaaattctgatgatatcaagttttggaaagtttaaggagcagaggaaaccattttatacactggtggtggctatatatattggaacatccactttccgagcaatttgcatccagtcctgggcatcacagagatgcccatatgtacgtaccatgaggcatatattactatgtccacagcagta

SEQ ID NO: 638677 - DNA, 506 bp, Homo sapiens
cgcaagctccttgcttgggccttaagggaacattggtggtagtctggcagtactccccatggacctatgatggcagtgaccacggggtgaggctcctctgcctttggaaaggggaggaaaaagtaggaagggctgcatcttttgstttgggtgccagctcagctgcagttcaatagaacactgggtagtttctgactcttgtccctggctcctggatggcaactctggacccacctggggcctggggaaacttttcatcttgaagggaaggaaacaggcctggctggctttgttacttgctgattatagagccccagggacttaagtgaacataggcggtaaccaaagagtggttacagcaggacttggggtagacccaatgctgtgctggcttcaggtctgatccagcatagtcctagtgctggtggccacaggggtgcttgggtcaatctaaccgcatccccaggtggctcagaacagagagagaggctccatttgtttgggag

SEQ ID NO: 638678 - DNA, 506 bp, Homo sapiens
cgcaagctccttgcttgggccttaagggaacattggtggtagtctggcagtactccccatggacctatgatggcagtgaccacggggtgaggctcctctgcctttggaaaggggaggaaaaagtaggaagggctgcatcttttgctttgggtgccagctcagctgcagttcaatagaacactgggtagtttctgactcttgtccctggctcctggatggcaactctggacccacctggggcctggggaaacttttcatcttgaagggaaggaaacaggcctggctggctttgttacttgctgattatagagccccagggacttaagtgaacataggcrgtaaccaaagagtggttacagcaggacttggggtagacccaatgctgtgctggcttcaggtctgatccagcatagtcctagtgctggtggccacaggggtgcttgggtcaatctaaccgcatccccaggtggctcagaacagagagagaggctccatttgtttgggag

SEQ ID NO: 638679 - DNA, 593 bp, Homo sapiens
ccagcatagtcctagtgctggtggccacaggggtgcttgggtcaatctaaccgcatccccaggtggctcagaacagagagagagkctccatttgtttgggagaaagtaaggaaagagaacaagagtcactgcctggtaatccagagatttcttctggatcttatctaagaccatcaaggtcgtacctctatgagtctgaaagaaccacagtgttagtaggcttgggatgccccttaaagcagatacagcttagatcaaaacactcaaggcctttcaaatatctggaaagccttcccaagaaggatgggtacaaagaagtccagactgtgaagactataatatatacctaactcttcagtgcccaggcatagacaaacatctacaagtatcaagaccatccaggaaaacgtgaccttgccaaatgaattaaataaggcaccaaggatcaatcctgaagaaatagagatatgtggcctttcagacagaaaattcaaaatagctgtactgaggaaactcaaataaatttaagataacacagagaagaaattcagaattccatcaggtaaatttaacagagattaaaataattaaaa

SEQ ID NO: 638680 - DNA, 550 bp, Homo sapiens
gctgcagaatacatattcttttcctcagcrcatggatcattctcaaagataggtcatatgtgaggtcacaaaacgagtcttaaaacattcaaaaaattgaaataaaatcaagaatcttcagtgaccacatgacataaaactagaaatcaagaagaagaggaattttgaaaactatataagaacatggaaattaaataatatgctcctgaaggaccagtgggtcaataaaaaaattaagaagagaattgaaaaatttcttgaaacaaatgataaaggaaacaaaatacaccaaaacctatgggatacagcaaaagcagtgcacagagggaattttatagctataagtgcctaacatcaaataagaagaaaaacttcaaataaacaatacagggcaaaaaacttcaaataaataatacagggcatccaaattggaaaggaagatgtcaaattatccttgtttgcagatgatgtgatcttatatttgaaaaaaacctaaagatgccacaaaaaaccattagaactgataaattcagtaaagttgcaggataca

SEQ ID NO: 638681 - DNA, 614 bp, Homo sapiens
agcttgccaaagggcctgatcagcaatgcaaagtatgaagaaatgtatatttatttgatctttgtatcaggctaatgattaccaattttcagaagctgaaggaaaaatgttttgcatggtacagtatgttgtagtatttttatcagtattgagaggaagaggaatactaaagaatctaagggaggtaaatcttaaataacaaagtatgctgcttctatcatttgagtttttctaaaaatagactgtactttttagggcagttttaggttcacagcaaaactgggaggaaggtacagagatttcccatatagcttctgccccacraaaccataacctctcccattattaatatcctgcactagagtggacaatgttgacatgtcataatcacacaaggtcctaccatagtttatggcagggtttactcttggtgttatatatttaatgagttttgacaaatattaatggtctgtattcactattacagtagtatacagagcagtttcactaccctaaaaatcctctgagcttcacctattcatccttccctcctccctaattcctggcaaccactagcctttttgctgtctccatactttttccttttttagaat

SEQ ID NO: 638682 - DNA, 614 bp, Homo sapiens
agcttgccaaagggcctgatcagcaatgcaaagtatgaagaaatgtatatttatttgatctttgtatcaggctaatgattaccaattttcagaagctgaaggaaaaatgttttgcatggtacagtatgttgtagtatttttatcagtattgagaggaagaggaatactaaagaatctaagggaggtaaatcttaaataacaaagtatgctgcttctatcatttgagtttttctaaaaatagactgtactttttagggcagttttaggttcacagcaaaactgggaggaaggtacagagatttcccatatagcttctgccccacgaaaccataacctctcccattattaatatcctgcactagaktggacaatgttgacatgtcataatcacacaaggtcctaccatagtttatggcagggtttactcttggtgttatatatttaatgagttttgacaaatattaatggtctgtattcactattacagtagtatacagagcagtttcactaccctaaaaatcctctgagcttcacctattcatccttccctcctccctaattcctggcaaccactagcctttttgctgtctccatactttttccttttttagaat

SEQ ID NO: 638683 - DNA, 595 bp, Homo sapiens
ataattggattgtttgtaacacaaaggataaagtcttgaggggctgaatactccattctccatgatgtgattattacacattgcattgcaaatatctcatgtactccataaatatatacacctacaatgtaaccacacaaaaataaaaaaattaaaaacgattaatgaccttttaaaaagttaggaatcgttctcacattaaaagcagaatgtctaccaggaagggttatttaatgttacagaaacttataaggaatccgtgtagaatcttatttgtagggcatttaaaaaataggacatttttrttgatacggtttttatgtattactgttgagagttgttttaataagtcatctagtccaccttcttgtctttaggaaggattgtatttaagccattttagatatattgttgctcagctttccatgagaaatctcttttagtatatcatttatcagctgacatgctttctttattgtgtacttttggacataagaaatgtttaagacaatataagggaaatcatatggtccataaacttcctaccaaattctcccatacagaggcctgttctcagtgccatattttagagcta

SEQ ID NO: 638684 - DNA, 598 bp, Homo sapiens
gagtctttatgctactggcagaagacaaatgttttytgtagggtgttttgtggagtgccaggaagctacaacccagtgcctgcaatcctgacattatactgtgagataattttttcttaggagtagggcacattctgcattaaagtacaaatatatctgttaggtggcaaattgcttcactattaccagtagtaacatctttgtatgaattagttgtttaaatcctttatgatacacattgagggtaggttgtgatgagagaggagacacaggatcaggacaagggtcactgtatgtgggacagctggtagtttacaatccaaactagtccatctggggaactgtgtgtgttgggggcagcacttatgttatccactacagcaggcatcaaccaagattgtctgctcagcattttgccaaggtgagggcgaatattgtctgaggccacactttttcaacctcacagtcatttcaggctatattttggggagtggagatgggagattgatggacatctgtgtgggatttttggtccacatatcacacagggggctcaggtaaccattagggtcctagcacaaacagcttgtctgcacag

SEQ ID NO: 638685 - DNA, 623 bp, Homo sapiens
tgcaactgtccttgttttacagatgaacataaaaggaagtgcagacaggtgagttgatccctcccgggtcactggatgggatgggaagatcaaggacacggtgcttcctgacctctgggctgctcagwttcttgctacttgattttccagattgtggactgcatttttgttccctgctgctggacagttctctgggtagccttgggctgactcagttctccctgctttctcacttgttctcaagaataaatatagaatgtggcgggtatgcaaccttcagaggtaggaagggactggcagaacagccagggctctgtcccagtaccctctagagagagggtgcctgtgaacactttcgccagtgagcaacacgaccctgggataggaagcccgtggtgggctgctctttggggtccgtcaccttcagtgcaagtaggccatgtgcaaatgcaagtccatccacccagcggctttctggagatggggggactggctggcaacgagtcctgggcttaggttttcctccctgtctatccagaagtaagaaatctgcttcatgtagcctgtgcctgggtgttctgtctcactggactcagacggagtgatccccagtgcacagcggc

SEQ ID NO: 638686 - DNA, 585 bp, Homo sapiens
ggaaaacttgccttggtctctccttctgccttatgcccctcggctaaattctttcttctgaggaggcaagaactgaggttgctgcaggcccatacagattcgccatccatgacaatcatgtgggtagatacagatttttctctgactcagaccagagaaggcacttggttggcaaatcttttttccttagagtaatcagttaattatcatgataataatgtttatgtaaagtctggatttcctttgaaaagctgactttgcactcattctattaaagagtctatgcttataatttctttttctgaggctttcagcctggggttccaagtacacgtgtgtgtgtgtgtgtgtgtgcgygcgtgtgtgtgtgtgtgtgcaggcaatagaaatttcagttttctcttacacaattttaaataaatactttctcctgttatcacaatgattccttttagtgagtccaggtatttttgtgatttcaacaagacataccatcccccttcactgatgtgccatggccactgtaaacagaaagtacacactcggggggtgccttatgttgtgcttttagaacagagaaagctt

SEQ ID NO: 638687 - DNA, 535 bp, Homo sapiens
agcaagtattccctttgcttctatcttttgaaagagattttagagaattgatattatttcttccttaaatatttggtagaatttaccagtgaacccatttgggcctggtgttttctgttttacaaggttattaattattgattcaatttctttaatagctataggcctgttcagattatctatttcttcttatgtgaattttggcagatggtgtctttcaaggaattggtccatttcatctagattatcaaatgtgtgggcattgctttgttcatagtattctcctattatctttttaatatccatgggagctacactgatattcccatttttcatttctgatattaacaatttgtattctcttgttttttcttagtttaccttgctagatgcttattgcttttattgttatttccaaaaaaaccagcttttggtttcatrgatttttctgcattgatcttctgtttttaattttactgattattgctttaatttttattatttcttttttttcttcttagtttggatttaattt

SEQ ID NO: 638688 - DNA, 443 bp, Homo sapiens
tgtcccagccacgctgctgtggtttctcaagtcctgccctggagtgttctaatccagcaggcacccagccaactcaatgcaatgcagacagctgccctcgattttctgctgctcrtgttagaagcaagagttctatatggctgatagggaaatccttgttttaccacacacctgagtaggtaaaggacttccagcttttgatacagttaggtggtaccacatggtgtgttcgctgggaaattctctcccactactttgtgctacttcccagtgaactggaggctgtcctgagaagcttctagttatcctctgaccagatcctcctgaggcaggaggtgcaggagaacagaagtgtgccctgtgctcttctgagcagagaagcaccatgagctggggcaggcaaaccccactggggctggcatggctcgctggggctggcacgt

SEQ ID NO: 638689 - DNA, 443 bp, Homo sapiens
tgtcccagccacgctgctgtggtttctcaagtcctgccctggagtgttctaatccagcaggcacccagccaactcaatgcaatgcagacagctgccctcgattttctgctgctcatgttagaagcaagagttctatatggctgatagggaaatccttgttttaccacacacctgagtaggtaaaggacttccagcttttgatacagttaggtggtaccacrtggtgtgttcgctgggaaattctctcccactactttgtgctacttcccagtgaactggaggctgtcctgagaagcttctagttatcctctgaccagatcctcctgaggcaggaggtgcaggagaacagaagtgtgccctgtgctcttctgagcagagaagcaccatgagctggggcaggcaaaccccactggggctggcatggctcgctggggctggcacgt

SEQ ID NO: 638690 - DNA, 516 bp, Homo sapiens
tcttggcatcagtttcctttcaaaatcctttcaaaacttttttatcttgctttctacagaattttaatataaattggtatctttttaaaagttctacatgagtctcttaggggctgtgagggagcacatmaaatacaagatatttctgtttatgggagacttagactcatttcaacctgtcgatcaacaactgtttattgagaacctattatttactgtgactcagtgttagtaaggctcattttctgcccccaagaagtttatcttttacagtgggagagagatagtaaacatgtaagcagccagtctttttttcctgttcccttgcccctgcagtatttatcaggatctagcatactgtatcatttacctagtatatttgcttattgctacccatgtcccaggagaatgtgagttctagctttgtctttttgtgccctgagatgctgagaacattgtaggctctcaataatgtctgttgaattaatgataattttcctctcatgggcacgagat

SEQ ID NO: 638691 - DNA, 587 bp, Homo sapiens
ttatgcttcacacatattgcatttaaaaaatattttgggggccaggcacagtgtctcatgcctgtaatcccagcactttgggaggctgagatgggcaggtcacaaggtcaggagtttgagaccagcctgaccaacatgctgaaaccctacctctcctaaaaatacaaaaaaaaaaccataagctgggtatggtggcacacacctgtaatcccagctactcaggaggctgaggcaggagaatcgtttgaacctgggaggcagaggttgcagtgagccaagatcatgcaactgcactccagcctgggtaacagggcaagactccatctcaaaaaaaaacctttgggaaataatttttttaaattgatgcctaatagatgtacatattttcaggatacatgtgataatacatttatataacttttgcagatcaaataatatacttgtgaggttcatmattttaagggtttttatgttagaaacatttgaattatttaattctaactattttgaaatatataataggcaatcatagactgtagtcactctactggtctaacactaggttttatctcttctgtcaaactatg

SEQ ID NO: 638692 - DNA, 587 bp, Homo sapiens
ttatgcttcacacatattgcatttaaaaaatattttgggggccaggcacagtgtctcatgcctgtaatcccagcactttgggaggctgagatgggcaggtcacaaggtcaggagtttgagaccagcctgaccaacatgctgaaaccctacctctcctaaaaatacaaaaaaaaaaccataagctgggtatggtggcacacacctgtaatcccagctactcaggaggctgaggcaggagaatcgtttgaacctgggaggcagaggttgcagtgagccaagatcatgcaactgcactccagcctgggtaacagggcaagactccatctcaaaaaaaaacctttgggaaataatttttttaaattgatgcctaatagatgtacatattttcaggatacatgtgataatacatttatataacttttgcagatcaaataatatacttgtgaggttcatcattttaagggtttttatgttagaaacatttgaattatttaattctaactattttgaaatatataataggcaatcataractgtagtcactctactggtctaacactaggttttatctcttctgtcaaactatg

SEQ ID NO: 638693 - DNA, 614 bp, Homo sapiens
tcaatctgtttgctaaatttctctgatacatttctgaattgcttttctttttttaaaaaaattttatttccacaggtttttgggggaacaggtggtatctggttacatgagtaagttatttagtggtgatttgtgraattttggtgcacccgtctcctcagcagtatacaatgaacccaatttgtagtcttttatccctcacccacttcccaccctttccccttgagtccccaaagtccattgtgtcattacgcctttgcatcctcatagcttagttcccacttatgagtgaaaacatgtgatgtttggttttccattcctgagttacttcacttagaataatagtctccagtcccatccaggttgctgcaaatgccattgattcatccctttttatgctgagtagtattccattgtatacatatacaccacagtttctttatccatttgttgattgatgggcatttgtgtgggttccacatttttgcaattgtgaactgtgctgctataaaaatgcatgagcaagtatcttttttgtataatgacttattttcctctggttagatacccagtagtggaattgctggatcaaatggtagttctacttttagttc

SEQ ID NO: 638694 - DNA, 368 bp, Homo sapiens
ctgtttccaggcagtggctgtgcagggctgagaacttgccccagcctacctgcctctcaactgtgaaagcaaggagggctttcgtgcctcccaacctgtggagtctgcacaccggattcacaccctcccccaagttctggccargagacattgcgttcagctggagttgttacaaagtttagctggaggtttccttttccttttggtcttttcccagttcctctggcaaccctccccaaggatccttcctaggcaaggcagaaatggcttccttgtggatccagagagcccacagggcttttcccactgcttcctctgccccagtatttcactcggctctctaaactgactcagctccaggtaaggac

SEQ ID NO: 638695 - DNA, 612 bp, Homo sapiens
tctgctgtataaatgagacaacacagccgagatgacagcatatctgtttatagcatggtttactgaataagtccactattgagacccacttctcagaaagcaagattcctgtattagtctgttctcacattgctaaaaagaaatactcaggattaggtaatttataaagaaaagatattttattggctcgaggttctgtaggctrtacaggatatagaatggcatcagcttttaaggaggcctcgggaagcttacaatcagggtggaaggcgaagtggggagtaggcacatcatatggcaaaagctggagcaagagaaaggaggggagaggccacatacttttaaacaaccagattttgcaagaattcactcactatcataagaatagtaccaagagggtggcactaaagcattcatgagaaatctaccctccaatacagtcagctcccaccaggccctacctccaacactggagattacatttcaacatgaaattttggcagagatacatatctagactatatcaatttctttcaaggtattactgctcattgagaatacatctagtcatgcaagagctctgatggagatgtacaaaaagattaatgttgt

SEQ ID NO: 638696 - DNA, 586 bp, Homo sapiens
tctggcaccacccatcagagtgttgtgaccagcattctgggaacactttggctcttctgacacagcaggtttccatcctgaggggggtcaaagaacaaagctggggtcatgatatcagtcttccagagttaaaacatgcagcctaggggtgctgagctgagcgttggcccccacaaaatctaccagaaatgaaacgagtcaactcagcctaccttacgtcacaatcatacccccacggacatcaaagataaaagcaaaaacatacagctatccaaaggacagcaacttcgaagattgaagaaacatcagcccacacagatgagaaagaaccattgcaagaactctggcaactcaggaagccagagtgtcttctcacctccaaacgaccacactagttcccccacaatggttcttaaccaggctgaaatgactaaaatgacagaaatattattcagaatatggataagaacaaaaatcatcaacattcagaagaatgtcaaaacccaatccaagaaatctaaggactacartaaaatgacacagaagatggaaaatgaaatggccatgtaagaaagaaccaaactga

SEQ ID NO: 638697 - DNA, 596 bp, Homo sapiens
cagctgtggtattttttgtcttttaaggaatttgtccattttatctaagttgctgactttattggcataaagttcttcgtaatagtcccttattatctttttcatgtctatagaatctagtgacatgatgtgattcctgatattggtaattcatgtatttctgtatttcttttttttcctgatcagtgtggctggaagtttatcaattttattcatcttctcagatacctaacttttggttttattgcctttttttctgtattattttgttttgtatttcattgatttgcatgttgatttctattctttctactttttttctgcttatgttgtaatttkctgtttttctagtttctaaagggagaagtggaaattattgatttgagaactttcattttatcatattgagacatttggtgctatgaacttccacctaagtattgctttagtggcatcccacaaaatctgatatgttttatttcattttcattcactttaaaatactttctaatttcctttttatttcttctttgatatatgggttagatagaagtgtgtaatatagtttccaaatatctgaggattttctagagatc

SEQ ID NO: 638698 - DNA, 486 bp, Homo sapiens
acgtggggaaaatgcagcttccttttcagtattcaatacagcctattttttaagtattgascataacagttgatctcaaagcatagcaagtcctcaacaagtgtgtggaaaggagaaggtaggagataaatcacagggccaggagagctgtagacagagggagccacaagtacaagtaggatgagaactggagaaaaagaaagagctggggttcggctttgggtagaggccaaaaagacaccaggcaaggtggcccggagctgaggagggcccaggggaaagtggaatgggcaggctcctttcttgcaaggcccagtgttttcctcttctttgcctaaataatccaaatattttaatattcttgttacaaagtcttttactcatagatattattgatatgggtataacaatatccatatcagtaatcccagtatgattctttattttttcaatccatgcatgctgcttacatagcctataccttat

SEQ ID NO: 638699 - DNA, 513 bp, Homo sapiens
tgaggtgagatggctgcctggtcccagccacagctgctcctcagagctctccttcccctttaaaccttgtgaaccrttacagagccctgtgtgtccccactctgcctcccccacctcagcccacactgctgccatcccctctctggccttatccttttctgtcctccccactctagctccgctgcagctttagtgagttcctctctgttccttgactgtatcaggctttctgtggcctcacattcttggtgtgcccctcctgcctgcagtgttactgccccagatcttagcgtgggtcctgggggtcatgtctctctgagcctgattcactgacagcttctcagtgaggctttacccactttgctacacctagaagccctcactctccccatttctcacctgcctgcctcaatttttcttcatagcactgtctatcacactgagtttacttatttaggtagtttatatgtttaagagaagtaacttccatggggcagtattttggtttatttt

SEQ ID NO: 638700 - DNA, 559 bp, Homo sapiens
tgtgaggggaaaaccacctatcagtcctcagtaatggcagatgcccctttcctcgccaagctagagtgtcccaggtcgacttcagactgctgtgctggcagtgagaatttcaagccagtggattttagtttgttggactctgtgggggtgggatccactgagcaaggccactcagctccctggcttcagcccccttttcaggggagtgaaggttctgtcttgctggtgttccaggtgccactggggtacgaaaaaaaactcctgcagctaggtcagcgtctgcccaaatggccgcctagttttgtgcttgaaagcyagggccctggtggtgtaggcacccgagggaatctcctggtttgtgagttgtgaggactgtgggaaaagcatagtgtctgggctaaatagcactgtcgttcatggcacagtccctcatgacttcccttggctaggggagggagttccctgaccccttgcacttccaaggtgaggtgacgtcccacgctgcttctgctcaccctccatgggctgcacccactgtctaaccagtcccaatgagatg

SEQ ID NO: 638701 - DNA, 555 bp, Homo sapiens
ctcattgaaatagattaatatccccctttgaaagtcatgactagatgacagactccagggtaatgacagatatttggtcagggcgggaagactttccctgtttgtatctgccctgaatcaaccaggtgatgtgtgtccatctccctgagaaactgcagctagcagaaggagctacacagcagaaaatgtgtctatgrggtctacattcatgcgttcattcattcatgtacaaaactctcattaagttcctagggtataaaaggcattgttctgtatacatgggggatagcccagatcctcactgccttcaagactcacacaacctaacccagggactgttgaaactgtgatcttagtgtgggcagaggcagcactctgtctgagctaaggaatctatggatctcttagcggtcagacggagcagcactgactgcaggacaggaaccatcctgccttggacttgggaatatgctgcctgcctgcgggacatcccaggtgatcaatgccaaaaggttactgttgtttatcctggcattccatgctgagcaatgatat

SEQ ID NO: 638702 - DNA, 552 bp, Homo sapiens
tgtataaaaacttgcagggtgatagagtagagtgtggatttactagcttgcaatgacaaacacacagtaacactcttaatgcacaaagatatattgtgtctgcacactccctgtctcctctctttcctccagaaacattaacagggctaattttctgggaaaatattccataagagttcygaaccttaaatcaaggccatcaggatttcaccctgaggtagataattgtgtgctcactctcccattggtgcagtgtacagaatgacaaatcacattgtaatgagaggagaatcccttgtggggctaatgcatgtccttagaaagtctgttggaggacagggttcaatactgagaaacacaggagaaactacagctaggagcgagtgaaaagaactgcttttattcacactccttcccaagttattacattcaacaaatatttactgagtacataacaggtgtaaattattacctgtctccctacagtatttactctatcacactctataataagatctgtctgtgattcaatagtaatttcactgttttcaa

SEQ ID NO: 638703 - DNA, 590 bp, Homo sapiens
tccctgtctcctctctttcctccagaaacattaacagggctaattttctgggaaaatattccataagagttctgaaccttaaatcaaggccatcaggatttcaccctgaggtagataattgtgtgctcactctcccattggtgcagtgtacagaatgacaaatcacattgtaatgagaggagaatcccttgtggggctaatgcatgtccttagaaagtctgttggaggacagggttcaatactgagaaacacaggagaaactacagctaggagcgagtgaaaagaactgcttttattcacactccttcccaagttattacattcaacaaatatttactgagtacataacaggtgtaaattattacctgtctccctacagtatttactctatcacactctataataagatctgtctgtgattcaatagtaatttcactgttttcaaccatcactgtctatttaactttaagataasgcctaaattttcagagcccaaattaaagttcctgggcaacttgcggcgaggaaatagacactttctatgaattaaaaatgggttcatgattctgtttttttcacttgccatgttg

SEQ ID NO: 638704 - DNA, 559 bp, Homo sapiens
ttcctgctcatgtgggtgcctggccagcatggagataggacatctgcctgtgaaccacagccacttctgagagcttgtgacctctgcttctccccaggaccttcttcagtgcagggacagagcctgtcttctgactttgtgtacattttagctatgagggtttttttcatgccttccttgttggatggatgccaagccatttgggcaatatgctaggccgagaggaaccagaaaagagggatggctcagccaggaggggaggcaaaatcagaggtagacggctcatttcctttgaaaagtggcagctattttgtgttttkggggcagtgatgagaacactgcaggacttctttagagtccttacccagtctgtgcagggggtgacgacatccttctttgctcactgaaggccggggggtcttcaaagagtgagggcaaggctggagaatgtctttccagggaaggcaagcagagcctacgagagaggagtgagtggaagaggccacctgggctgcgaggacaagtgaggacatgcagaaacaaacagggaggtcattgc

SEQ ID NO: 638705 - DNA, 559 bp, Homo sapiens
ttcctgctcatgtgggtgcctggccagcatggagataggacatctgcctgtgaaccacagccacttctgagagcttgtgacctctgcttctccccaggaccttcttcagtgcagggacagagcctgtcttctgactttgtgtacattttagctatgagggtttttttcatgccttccttgttggatggatgccaagccatttgggcaatatgctaggccgagaggaaccagaaaagagggatggctcagccaggaggggaggcaaaatcagaggtagacggctcatttcctttgaaaagtggcagctattttgtgttttgggggcagtgatgagaacactgcaggacttctttagagtccttacccagtctgtgcagggggtgacgacatccttctttgctcactgarggccggggggtcttcaaagagtgagggcaaggctggagaatgtctttccagggaaggcaagcagagcctacgagagaggagtgagtggaagaggccacctgggctgcgaggacaagtgaggacatgcagaaacaaacagggaggtcattgc

SEQ ID NO: 638706 - DNA, 575 bp, Homo sapiens
gctttggctcctttacacacccccatgtacaagaactttcaagcctctgctatatcatgtttgctaatatcttatcggcaaaagcaattcaagtggccaacctgagagtgtgtaaagatgggtatgcatacagggaggtgcaattcatcaggagctgttgctgtaacaacctaccacagacattgggataccttwacatcctgctacccaaacagatggataggctagtacgtgagtcttacaaatctgtttgagttgtgtgtgtgtgtgtgtgtgtgtgtgtgtgtgtgtgtgtgttttctgggaattatagctaggagtgagactactggatcctggagcatatatatatatactttctttaacaaaattgtaccactttgcatttgagagctgtgataacagtttccatttcaccagttgtgcacagaatttctacctcccatctttctcacctatatagtatatgatattatctgtcttactaaaactttaccattttgatggttgtaaaattatacactatttattccgtatttctttgattacttgtatgagatcaagtaacagttcat

SEQ ID NO: 638707 - DNA, 575 bp, Homo sapiens
gctttggctcctttacacacccccatgtacaagaactttcaagcctctgctatatcatgtttgctaatatcttatcggcaaaagcaattcaagtggccaacctgagagtgtgtaaagatgggtatgcatacagggaggtgcaattcatcaggagctgttgctgtaacaacctaccacagacattgggatacctttacatcctgctacccaaacagatggataggctmgtacgtgagtcttacaaatctgtttgagttgtgtgtgtgtgtgtgtgtgtgtgtgtgtgtgtgtgtgtgttttctgggaattatagctaggagtgagactactggatcctggagcatatatatatatactttctttaacaaaattgtaccactttgcatttgagagctgtgataacagtttccatttcaccagttgtgcacagaatttctacctcccatctttctcacctatatagtatatgatattatctgtcttactaaaactttaccattttgatggttgtaaaattatacactatttattccgtatttctttgattacttgtatgagatcaagtaacagttcat

SEQ ID NO: 638708 - DNA, 612 bp, Homo sapiens
tttggcactgtaagtgtggtcagggtaggctgttgacttgctggagtaacatttaagccaattttgtgttaacgttaataaaccccttgatggttatatgattgttataacgcataagaggttaagttaaatgagggagaatgggaaactgagttaggaataattsgccttttgtgattttccccccagtaaaaagatgacaaagtaggatttccaaggtggactcaaatatatttctacttcccatggttgcactactaggagtcagcagagggtgctgttgccatcagagtgtctttgtaacatttttaaaagtattatacaaatagaatgtcctctgtagtttttgagaaactctcttgtggtaccatgtggtatatttagtaaatttcagctatgtcattgcgtttgggtataaatcactttgcccccattttttaaaaaagcctttctccctatcaaggataaaatgttctgtcgtcacgtctgtggaatgtaggtggctctctgctctcttcatcctccgagagacctgtgaagcctggctcgacgctaaccaggcaggctgtagggagctgcaggaagtaaagggatgaggctgggtcttctggg

SEQ ID NO: 638709 - DNA, 612 bp, Homo sapiens
tttggcactgtaagtgtggtcagggtaggctgttgacttgctggagtaacatttaagccaattttgtgttaacgttaataaaccccttgatggttatatgattgttataacgcataagaggttaagttaaatgagggagaatgggaaactgagttaggaataattggccttttgtgattttccccccagtaaaaagatgacaaagtaggatttccaaggtggactcaaatatatttctacttcccatggttgcactactaggagtcagcagagggtgctgttgccatcagagtgtctttgtaacatttttaaaagtattatacaaatagaatgtcctctgtagtttttgagaaactctcttgtggtaccatgtggtatatttagtaaatttcagctatgtcattgcgtttgggtataaatcactttgcccccattttttaaaaaagmctttctccctatcaaggataaaatgttctgtcgtcacgtctgtggaatgtaggtggctctctgctctcttcatcctccgagagacctgtgaagcctggctcgacgctaaccaggcaggctgtagggagctgcaggaagtaaagggatgaggctgggtcttctggg

SEQ ID NO: 638710 - DNA, 585 bp, Homo sapiens
ctaaatgaaaccaaaagattatgtgcaatgtgcagacttgttagatgtatattactggaagtttactgcattatttaaaatttaaatatatctgcttatatttcatccagttgtatttatcattttgagaagggtatgtttaaaaaattacaatgtaaatttctttaagtatttattgcttcccgttttttgacaattgtttttataaattttaaaatctgtattgttaggtatagatcagttcataatcattgtttttttatgtactgctccttttagcagaagacagtattcctcttacttaacaacattttgttttctttgcattccatttcttctaatattaagcttgttacctcgattgtattttagttaaaataaaatttggtgtatcattttattcatgtattttaaacttttatttaaatttttttrtgcacaatatattactagatctagtttttctgttttttttttaggtttaatctgagagtttctatcttttgattggctaatttaatcctattttatttatcatgactactataatattaggaattatttataccttcttatttcctattt

SEQ ID NO: 638711 - DNA, 617 bp, Homo sapiens
aaaataaaaactcttttgaattgcaaataaagaaataaatggaagtggtgtgtgtgtgtgtgcacgagagtgtgtgtgcgtgtgtgtgtgtgtctgattgtatttcagaaccccaggcagacctggtgtgctagcatatgtaaaattctaaatgctgcacaaaacactactaaggctaagttagttttgttcctgacaataaagccaggaacggaggaagctggtgatctaatattgcttaatggactattgcacagtgcacaatgtcattgtaattgctctgtagttaatttgtggtactctgtatttgttccatctatgactacgttaattttcttgccaaacattatcataattcatgtgtaaatcttctgttgaagaaattggacattagagactcagcaggacacagatttcagatagcacttttgcaaattagttactctaggtgaatgcttcaggtttttcagatttccttttgcttcgtccaacatatgagaggacaagcaaatcttttctctcagtgggacgcccccaygctattttcagaaatagatgaatttgtgattatgtaaataatcctttgaagtaacattttatgattctagaaatataaa

SEQ ID NO: 638712 - DNA, 629 bp, Homo sapiens
ccccatttaggaatgatatctacttcagaatattgtgaaattaaaagcagctgggcgcggtggctcacgcctataaccccagcactttgggaggccaaggcgggtggatcacctgaggttgaaagttcgagaccagcctgaccaacacggagaaactctgtctctattaaaaatacaaaattagccaggcatggtgtcacatgactgtaatcccagctactcgggaggctgaggcaagagaatcgcttgagcctgggaggcagaggatgcagtgagccgagaytgagcattgcactccagcttgggcatcaagagcaaaactccgtctttgaaaaaataaaaaagttaaaagcaatgtgtgtcaaactcttacggcagttcttggcatactctaactattgccatacagtaagttcttggcatacagtaagtattgccatatagtaagttcttggcatatagtaaatatggcatttgttgccagaaatagcaaatgaaaacactagatgcccagttggatttaaattttagataaacagtaaataattttctaatattgtatggcctgtgggaataaatgaaagaaataaatgagaataagcaaaggctatttattcatagcaagagag

SEQ ID NO: 638713 - DNA, 602 bp, Homo sapiens
ctcttagtagctatgtgaccagggacgagtcatttgacctccttgaatttcagttttctcactataaatttaagcctcatgccccttaattgccatggaagattagaggtagtattacatgacatacagccagagatcttggcataarcatacactaataataatagtaatttttattgttataattattattagaaaatgaagaagaacttctagaagttattttaaaaatccatcaggattccagtccatcatgttttttaaccaaaaatgatatgcagaataaagttttggggaagtatttacaaaaagactgaaaaagtagaagggctatttcttgaaaccttactctttcttgcggagaagaacttcacataaatcctatgcagttatataaagaaaaaaaaacatatgcacaaactctgcctttggtgagcttatttaatctgcttggagaaatgaaaaagcaataaaatatataaagcaattaaagagtagtgcagtggaatgtgtaatgaagaatccgattttgtagtgggatctgggaatttcagcactttagagatggggttaatcagtgttgagctggtcaggtttttata

SEQ ID NO: 638714 - DNA, 625 bp, Homo sapiens
ggtttgtcttatttccaaaatgatgctttaactgagtttgatctacattaattatatgactagatatttgaaactccattatttatacctgcaatgatgggagtggggtagaattttgttatcatactctctgtctctctctaaaacacacacacacatacacacatacacacatacttctatgatagctttgagtagttttcaaaatgttttgcagaagtaaaataagattatataaaaattaatttttactgagtagttagggaaatgaattagaattacatgaataaatgttttaaaacagttgaaaaatatttaaacatgcaagtatacagtgaggcactatactattttttcaaacaatatcacagtccaataaatacatttaatattttgyacacttaaatatgtacctacaaattaagctaaaagtagttcatgccagagtgaattcattgcatcctttaggatgtttttggcatgcttgacataaattagtctcataacagacatgattgttaaacaatgcaagcacagaacaaaattcatttaattttgctgaatgagctggtcaagcaggagtcctcaaactgtcctcacattaccctttgacataaggagtcaa

SEQ ID NO: 638715 - DNA, 625 bp, Homo sapiens
ggtttgtcttatttccaaaatgatgctttaactgagtttgatctacattaattatatgactagatatttgaaactccattatttatacctgcaatgatgggagtggggtagaattttgttatcatactctctgtctctctctaaaacacacacacacatacacacatacacacatacttctatgatagctttgagtagttttcaaaatgttttgcagaagtaaaataagattatataaaaattaatttttactgagtagttagggaaatgaattagaattacatgaataaatgttttaaaacagttgaaaaatatttaaacatgcaagtatacagtgaggcactatactattttttcaaacaatatcacagtccaataaatacatttaatattttgcacacttaaatatgtacctacaaattaagctaaaagtagttcatgccagagtgaattcattgcatcctttaggatgtttttggcatgcttgacataaattagtctcataacagacatgattgttaaacmatgcaagcacagaacaaaattcatttaattttgctgaatgagctggtcaagcaggagtcctcaaactgtcctcacattaccctttgacataaggagtcaa

SEQ ID NO: 638716 - DNA, 641 bp, Homo sapiens
ttaataatttggtagttttcttctttagtttcaaaaatgtcagtgtctgtcacagaaattgaaactataaaaatgatatttctcaagggtagtggaaggtaaagaagaggcagaacattgaaaagtagaataaatgttctctgtggctaattcyccgtgccattctttagtacagggagtagtccatctagtgaaaatggagtttaaaactgtgagggtttggattttccactacgcttaccagggatagcaagattttaaaaaaatcgaaatctctgaatttcttaagaacttaacatcaaatattttaataccatgggatagtagctcattttcacaaaatatcaaatgatgtgggaacaaagaattaaatgtacctataggggcataatgctggcatttaacaatgtatttcttagctatgacttattacttcttggctattacttattagaaaaaaaaaacctgtactaaaattaacatgaatctttaaatacataaacacaaaagatacatttttcaaaattgccagggaacgtgttttctggtgttatttactaactttacaatttcagtaataatgttattcatggtttttgcttttattttttcatccccatgtgattacttttctcacaagt

SEQ ID NO: 638717 - DNA, 545 bp, Homo sapiens
gaggtcaggagttcgagaccagcctggtcaccatggcgaaaccctgtctctactaaaaatactaaaattagctgggcatggtggcgcgcgcctgtaatcccagctactcaggagactgaggcaggagaattgcttgaacccaggaggcggaggttgcagtgagccaagattgagccattgcactccagccagagcgaaagaatgagactctgtctcaaaaaacaaacaaacatttgcaaagactttaaaagtttgagttcaagcagagttgctcttaatatcaggtgataatatatgaaagctatggaaagaggaccatctctgcacttctgtatgaatacctgttctgctctggaatctaagagctctcaggagtagaggcactttgcactctcccagtgagccccaatagcagtgtgctattttcagaagcttcactagaagagggacaaaaatgtatgactaggcacaagaacgggagaggagaaacccacagaagtagacagtgcagcgtkaatgccacaaaggagtcccctgaatggaaa

SEQ ID NO: 638718 - DNA, 618 bp, Homo sapiens
gctatggaaagaggaccatctctgcacttctgtatgaatacctgttctgctctggaatctaagagctctcaggagtagaggcactttgcactctcccagtgagccccaatagcagtgtgctattttcagaagcttcactagaagagggacaaaaatgtatgactaggcacaagaacgggagaggagaaacccacagaagtagacagtgcagcgttaatgccacaaaggagtcccctgaatggaaacttgccccattagaattttttataaaagatgtattggaatgtaattaacataccataaaattgacccacttaaagtataaagctcagtggtttttattatatttaaaaaattgcgcaaacctcaacactatgtaattttagaacatcattatcgcattcaaaagaaacttcatagacatttgaagttgattcyaattccccattatctggtccctgaggctgtggcaaccacgaatctactttctgttcttgtagacttcccaattctggaattttcatataactggaatcataatatgtggtcttttatgtctgtattgtttcatgtagcataatgtttgcaagattcatccatgttgtaccatttatcagt

SEQ ID NO: 638719 - DNA, 575 bp, Homo sapiens
agcctcttgtttataccatcttgtgttaccacctcagacagttgcacagttgaacaaatgtcactgattatttttgatgaatatcctggggacaagtcttttctcacaaggagctccaactccaacccaggacaaataaagacaaaccatgtgagtgagacttttcttgggaaatttcatgtgagtcatgcagtgctgtagagattaagtttctagggagctcaaaacctgtytccctctctggtggctgctaggctacagtttttaacagataccatgtttctaagacagttgttttaagaccatggaactgagaagaaggagatgggaatggggcaagttaaaaatgccacaaagcttgttgttcttacagagattcagacatttttctttaataagtactcatagaattgttgcaagcatttggttaattttcagagttttgaaaaagttgattttaataattttttccagtgttctcattgcttttatggagaagcagatttttagacatccttacttcaacattctggaagtactcttctgttcctttagaacttgaacaaaaatgatgc

SEQ ID NO: 638720 - DNA, 452 bp, Homo sapiens
tcttgctttaaaaataatttatttgtaaacatttggtggacatgagagctggattataattctaacaagctgatggaaggtaaaatttatatcaactccatgatggcaaggtcatttgttattccttattgggtaacatattacagatacttgtttctgaaaccttcaattaatcaccataactcagcactcatgtacttctagatattaaggaaaactttcaggggaagacattttcaaagaattaacaatggcaaaaccatgctttccttgttcactagttatttggagtgagggtagttgtacacacttcccactctcctaccatacacagttctaccatagttctaccattttattcacattatatttgcccatctcccttttgcatatctaatattgtgcatatttttcaaggccmaactcaaaatatggtagctacataaaccctt

SEQ ID NO: 638721 - DNA, 628 bp, Homo sapiens
atatgttaacataaataacttttgaaaaaagtaattacaatttgcaaacaaaaatatttgtttagaagagtgtcattgttttacatttttccaaatgcgtctggtttaatacaaaacagctagattcttatatctgcttcttaatgaaatatttgctaatatattgtttagttaaaatatacggagaaaatctgagatcacacagacactaagttgggagagggaaaagtattttaatagcttcttcaggtagttttggatattctcttttgatactacaccaatacttggcaagatgatagttttctgaagttctattgcaatgtggaaatccagaaccaagttaataaatgctccacattttrttacacttagaattcattggtcaatcttgcaatttgaatgaatctttatccatgaattgttttgaaatatcctgcatttgtcatttgaaatcatggtttactctcaagtgaatgttgatgtattttattatgtaatttcaaaaatgagattcattaatatcaccaccaatttgtcagaaaagtttttaagtattggaaacctctccagctccatgtagtagatgtaaatttccaaaattctaattactatttgaaagtttgat

SEQ ID NO: 638722 - DNA, 398 bp, Homo sapiens
tataaataaaaagcagtgctctaaacaaagtggctaattttgcatgccactcaattgcccaagtgcttttcctgtggacaaccatgtaacatcagtatggggcagaactggcttatgtatatttaccatttcttcatacagaatattatagagctatgtagtcaagggtagagatttaataaaattaataatttctaagaattattcaaagacattcttttatttttgtcagtttgtcagkgtgaatcaaagacattcttaagtgaaactggcatatctttaccgtgtgttgtgatcaataataaaatgaccgctagtagaattgggtgccactatgtttgttcattctaacgcaccaacaattttacctaccataatttctgtaacatcagtacaaa

SEQ ID NO: 638723 - DNA, 506 bp, Homo sapiens
gtgaacaaagtcccaggtctaaatctcactggatcacattggatcatgagcctgtccttcaacgagttactgaaactaaactcacgggatatgccattcacttaagcctgggtcagaggcccgctcctggaggagtcagcactcccaactatgtggactaagggtgctctctataaagaaaaactggatggagttaacacaagaagtaatgctgaacagcagaaacaacagaagtctagtcactcatgttgagaacataytgccattccaattaatagcaagacacagtaacaggagtgaggcacatcttaggggttggcccttccattctatcccttcacagccctgtaggaaatggctctcctctgctctctggccagctctccaaaggctgtccccaagatcaatcccttccgacccagaatggggcccacagcagtcacctttcctccaaactttccagcccaaaagcctatagttgcctacccagtaagagtggtcactct

SEQ ID NO: 638724 - DNA, 530 bp, Homo sapiens
tgaacaaagtcccaggtctaaatctcactggatcacattggatcatgagcctgtccttcaacgagttactgaaactaaactcacgggatatgccattcacttaagcctgggtcagaggcccgctcctggaggagtcagcactcccaactatgtggactaagggtgctctctataaagaaaaactggatggagttaacacaagaagtaatgctgaacagcagaaacaacagaagtctagtcactcatgttgagaacatactgccattccaattaatagcaagacacagtaacaggagtgaggcacatcttaggggttggcccttccattctatcccttcacagccctgtaggaaatggctctcctctgctctctggccagctctccaarggctgtccccaagatcaatcccttccgacccagaatggggcccacagcagtcacctttcctccaaactttccagcccaaaagcctatagttgcctacccagtaagagtggtcactctgacccatgaaagaccagtcagatct

SEQ ID NO: 638725 - DNA, 697 bp, Homo sapiens
ctagaaattctgttaacagaacaataaccaaaactgtatttcctccctttatcttatttcctttgcgagcttttttctgagtcaagtggtttttacctgaacagaactagtcatagtgcttagagcaaagatggtagcacagtctttcacagttgactggctgtcaaatgccccctgggtatccatcagaacaactgcaacctaaaaaaaaggaaaatacaaacaaaagagattaaactaagaaggaggaaaccgtaaaggagaaattgaaaagtacaggtaatatatacttaagtacaggtaatgtttatgtgagccttaagcacctgcttgtaggttctgtacaactatttaggtgctttgctttgactacagcactctactgaagattatccagcgttatacagagcaatatggaaggcaaaaattgccccaccaattgaaacagacaaaagttgaaagcaattagcttatcacccagccaggcatttggatgtttcctgttgttgaaaaagaaactaaaaaatattcatcttggccaggtgcagtggctcacacctataataccaacagtttgggaggccgtggcagcagcakcacttgagcccagttcaataccagcctgggcaacatagtgagacccagtctctacataaaatttaaaaaattaggtcaggcgcaatggctcatgcctgta

SEQ ID NO: 638726 - DNA, 598 bp, Homo sapiens
cttctgtcgttaagttgaaccttcttctagatttatgatgcttccttacattttgtagcagtcccaaacaccaagaatatatgagagtaggttcaaggtaatttcaactttctcataatcttcatttcgttggtagcttttcagttatattctttatcaccttgttagagtaaaatayaacatgtggttattctaaaagacctttcttcagcctttttctgagactgtaataacctcaaggctaaaatccaagagctcatagaactgtatttattaacgtttatacagaacccattttgaagttcaggctcagtagaaacaatcctttcagagttgagataatttttccagagggataaaacatggacatcatttctttttcacttatcttaactactctgtatcattttcattgtagctcatgatgacttcttcactagagcaagcggaaagagagcgcagttatatatgcagatggcctggctttattgtcatgaaatagaatggattttgttgaaaactagtcatgttatttaattactaacaagaaaaaataaaatacaaccaaatattctaaataaagcttcatcattttggg

SEQ ID NO: 638727 - DNA, 598 bp, Homo sapiens
cttctgtcgttaagttgaaccttcttctagatttatgatgcttccttacattttgtagcagtcccaaacaccaagaatatatgagagtaggttcaaggtaatttcaactttctcataatcttcatttcgttggtagcttttcagttatattctttatcaccttgttagagtaaaatacaacatgtggttattctaaawgacctttcttcagcctttttctgagactgtaataacctcaaggctaaaatccaagagctcatagaactgtatttattaacgtttatacagaacccattttgaagttcaggctcagtagaaacaatcctttcagagttgagataatttttccagagggataaaacatggacatcatttctttttcacttatcttaactactctgtatcattttcattgtagctcatgatgacttcttcactagagcaagcggaaagagagcgcagttatatatgcagatggcctggctttattgtcatgaaatagaatggattttgttgaaaactagtcatgttatttaattactaacaagaaaaaataaaatacaaccaaatattctaaataaagcttcatcattttggg

SEQ ID NO: 638728 - DNA, 572 bp, Homo sapiens
gagagtgcagagagacaaagtaattttagcataattgaattacttacagaatgttctattaattattttaagtacttctttttctgtacatttaaaaaaaggaaattgctctgaaagaataaagcttgaagttttaggtctagcctttagtttcattactccctctctacctcttttcctgggtaaaatgatctttggcatttaagttctcttactacctacagtgttttacmataatcattctgctgcctcctaagaaccatactgtcaactttaaatgtgataagcagcctcataaactcagaggtttccttaatttcatgcagcgacttttaatagttttcccaacatgcaaactgaatgctttattcagttgcaaatggttttggaatatttttttgcagcaaatatgagtcaaagtcaataatatgtaatgaagtgctagcatgttactacttatgagcattaagtccagatttctgccaagattatcatacaactataccatatatcagatgcagattatttttctttatagtgtaatgggagtgtgtgtgtgtgtgtgtgtgtgt

SEQ ID NO: 638729 - DNA, 572 bp, Homo sapiens
gagagtgcagagagacaaagtaattttagcataattgaattacttacagaatgttctattaattattttaagtacttctttttctgtacatttaaaaaaaggaaattgctctgaaagaataaagcttgaagttttaggtctagcctttagtttcattactccctctctacctcttttcctgggtaaaatgatctttggcatttaagttctcttactacctacagtgttttaccataatcattctgctgcctcctaagaacyatactgtcaactttaaatgtgataagcagcctcataaactcagaggtttccttaatttcatgcagcgacttttaatagttttcccaacatgcaaactgaatgctttattcagttgcaaatggttttggaatatttttttgcagcaaatatgagtcaaagtcaataatatgtaatgaagtgctagcatgttactacttatgagcattaagtccagatttctgccaagattatcatacaactataccatatatcagatgcagattatttttctttatagtgtaatgggagtgtgtgtgtgtgtgtgtgtgtgt

SEQ ID NO: 638730 - DNA, 540 bp, Homo sapiens
tgcccaccacagcctcccaaagtgctgggattayaggcgtgagctaccgcacgtggccttttgttttgtttttaagcaggcttgagtcttgattgtgtgagtcccatgccgaaaatctttaactggctttgcattgctcttagaagattattacatggttcacattgcttgcatatctggaccttgtctacatttgcaacctcatctcaattctctcaccctcctctggcttggtcttccacttgcatttggcccaaactctctttgcctgcagtgcctttacccagatggtctcttgtgcccagaattctctttctctcactctttgttgaattatctggctaatttctactcaagcttcaggttgcagtttaaatattgttttatcagagtgcccttccttcattagagaatccttagttaaaactaaaatcatttctgtttataccatatattttttaaccatagctataccttaatttttaataatatgtattttggcaattgcatgtttagtatttatcatgctcactaaaatgt

SEQ ID NO: 638731 - DNA, 540 bp, Homo sapiens
tgcccaccacagcctcccaaagtgctgggattacaggcrtgagctaccgcacgtggccttttgttttgtttttaagcaggcttgagtcttgattgtgtgagtcccatgccgaaaatctttaactggctttgcattgctcttagaagattattacatggttcacattgcttgcatatctggaccttgtctacatttgcaacctcatctcaattctctcaccctcctctggcttggtcttccacttgcatttggcccaaactctctttgcctgcagtgcctttacccagatggtctcttgtgcccagaattctctttctctcactctttgttgaattatctggctaatttctactcaagcttcaggttgcagtttaaatattgttttatcagagtgcccttccttcattagagaatccttagttaaaactaaaatcatttctgtttataccatatattttttaaccatagctataccttaatttttaataatatgtattttggcaattgcatgtttagtatttatcatgctcactaaaatgt

SEQ ID NO: 638732 - DNA, 540 bp, Homo sapiens
tgcccaccacagcctcccaaagtgctgggattacaggcgtgagctaccgcacgtggccttttgttttgtttttaagcaggcttgagtcttgattgtgtgagtcccatgccgaaaatctttaactggctttgcattgctcttagaagattattacatggttcacattgcttgcatatctggaccttgtctacatttgcaacctcatctcaattctctcaccctcctctggcttggtcttccacttgcatttgrcccaaactctctttgcctgcagtgcctttacccagatggtctcttgtgcccagaattctctttctctcactctttgttgaattatctggctaatttctactcaagcttcaggttgcagtttaaatattgttttatcagagtgcccttccttcattagagaatccttagttaaaactaaaatcatttctgtttataccatatattttttaaccatagctataccttaatttttaataatatgtattttggcaattgcatgtttagtatttatcatgctcactaaaatgt

SEQ ID NO: 638733 - DNA, 553 bp, Homo sapiens
ttgttttgtttttaagcaggcttgagtcttgattgtgtgagtcccatgccgaaaatctttaactggctttgcattgctcttagaagattattacatggttcacattgcttgcatatctggaccttgtctacatttgcaacctcatctcaattctctcaccctcctctggcttggtcttccacttgcatttggcccaaactctctttgcctgcagtgcctttacccagatggtctcttgtgcccagaattctctttctctcactctttgttgaattatctggctaatttctactcaagcttcaggttgcagtttmaatattgttttatcagagtgcccttccttcattagagaatccttagttaaaactaaaatcatttctgtttataccatatattttttaaccatagctataccttaatttttaataatatgtattttggcaattgcatgtttagtatttatcatgctcactaaaatgtaagctccgtgaagacatggaatggagtcatggtcagaagctaagttttaaagttgggcaggggtcattcaaaa

SEQ ID NO: 638734 - DNA, 622 bp, Homo sapiens
tcactaaaatgtaagctccgtgaagacatggaatggagtcatggtcagaagctaagttttaaagttgggcaggggtcattcaaaaattggtctcacgcgtcatgctaaggaatttggatctgattttacaggcaacagagaaataatgaaaaattttaagtaaggtggtggcatgtacagagtttgatttcacaaggttttgtggttcttcaatagaaaatgaatcagaaagtagtaagaaagggcagaggcaaggaggttaggtaagacattcttgaaatggtacagatgaggaatgtcaaagggctgaactaagacacagcatagaacagaaatcatatttaatccatttgaataaggtgtcagtcaatggttgggttccctgagcatgagactctgaggcagagattagtatgcattatgtttattatgagatcaacaccttaggaaaagaaggtaaggaagaggattggccatatggagtttagttgggatacagggctaatgaaggccttatctgaccatacagtgagctgtggagctagaatagcccctgagtgttaaccccayggggctaacagggctagcggtcaggaccatattgatgagtcactggatatgg

SEQ ID NO: 638735 - DNA, 554 bp, Homo sapiens
tgtgactatcatgtcttcaaaacaccccccaaatacccagagtactatgaattctctctgaagcactatgaagcaccaagagggaatgaaacttgttcatcaactcaaatgtggataattctggtgcatgacataacaaactgcttaataaaggagggttgtgccttggattaacccagaacaaaatttttcattgaggcatctttgatctacagactgatatcaacccaactttattttaattctttcataatcaaaattgatttgttcattagctctgtttccaattatatgtttrtataatatacaaaatcttgtggaatacttttcacttaaaaataaaattacatacaaaagtaaaagtcatctaaaacccctgcctcaaagagataagcaatattaacatgtcaatatttgattttaaatgatcactcttcccaaacatagtcaataatcagaaaggaaaatatgaacatattattaatcattgcagccgtggtagccaatcttttcataaggcatacactctgtgattggactttacaaaaatagcc

SEQ ID NO: 638736 - DNA, 594 bp, Homo sapiens
actttggggtttaaaaagataaatgatggttttgtaattctcccttcttttggggtttaaaaagaataaatggtgattttgtaatttaactagtttttttttctgttttttgggatcagagagatggtctttagagactgtctatatttgaactgggagaggaatcctatatattkctgcttaaaaggagaaaaaaagtatagcataagaggacagaattatgaagaacacactccctaaacagcggtggaagtttttcttcaagcatccacaatccagttcagtctgagaggtccttccaatcctctactatttctcaagtcttggcattgataggccctcctaaccttagcatcaatgtcctaaaatttcatttctctaaaaattacccagcttggcaatttagaagatctagtccttcattcagcaagtatttctggatggtctgcacttagctcagagtcagagattcaccagtcttcctgggccagtctggagagctccagcatcactccccaggtcagttctgcaaaaacctcttcagttgtctcttcatgaggaaattcacaaatttaaatgttagacccttacatg

SEQ ID NO: 638737 - DNA, 594 bp, Homo sapiens
actttggggtttaaaaagataaatgatggttttgtaattctcccttcttttggggtttaaaaagaataaatggtgattttgtaatttaactagtttttttttctgttttttgggatcagagagatggtctttagagactgtctatatttgaactgggagaggaatcctatatatttctgcttaaaaggagaaaaaaagtatagcataagaggacagaattatgaagaacacactccctaaacagcggtggaagtttttcttcaagcatccacaatccagttcagtctgagaggtccttccaatcctctactatttctcaagtcttggcattgataggccctcctaacyttagcatcaatgtcctaaaatttcatttctctaaaaattacccagcttggcaatttagaagatctagtccttcattcagcaagtatttctggatggtctgcacttagctcagagtcagagattcaccagtcttcctgggccagtctggagagctccagcatcactccccaggtcagttctgcaaaaacctcttcagttgtctcttcatgaggaaattcacaaatttaaatgttagacccttacatg

SEQ ID NO: 638738 - DNA, 604 bp, Homo sapiens
tgaatattttgtattgtttagtggttgtaaaaaaaaaaagagagacagacacacctccctctaataaagaaaattcagaaaagggcatgatttatcaagactctttattatggctgatgtcatgggacagaacaatattaataagagaacagataattgtaccatggcctgagaaacaaagacttaatacagattatctarccttacatcattctcaagagaaagggaaggagcaggtgtaacatctgcacttggctgtggggaaaaagtgagaatacagagtagctcactgacttggccaaaaacattctgtaaatcagtaactagaaaaatgtctgtatttttgtttttgagcattcttctttgaattaataataattcttcaggaacaaactgatagtattcttggcaattctagcacttacattttcaagtgttttttacaagaatattgtgcttttccaatggctcaaactaaatatacttaactgacaaataaatatttatgaagtatcaacagtttatctagctctctgcaaataccctgtgttgaagaagtttgcccatctacctaaagaagcaggatgtgtagtatttaagggat

SEQ ID NO: 638739 - DNA, 604 bp, Homo sapiens
tgaatattttgtattgtttagtggttgtaaaaaaaaaaagagagacagacacacctccctctaataaagaaaattcagaaaagggcatgatttatcaagactctttattatggctgatgtcatgggacagaacaatattaataagagaacagataattgtaccatggcctgagaaacaaagacttaatacagattatctagccttacatcattctcaagagaaagggaaggagcaggtgtaacatctgcacttggctgtggggaaaaagtgagaatacagagtagctcactgacttggccaaaaacattctgtaaatcagtaactagaaaaatgtytgtatttttgtttttgagcattcttctttgaattaataataattcttcaggaacaaactgatagtattcttggcaattctagcacttacattttcaagtgttttttacaagaatattgtgcttttccaatggctcaaactaaatatacttaactgacaaataaatatttatgaagtatcaacagtttatctagctctctgcaaataccctgtgttgaagaagtttgcccatctacctaaagaagcaggatgtgtagtatttaagggat

SEQ ID NO: 638740 - DNA, 425 bp, Homo sapiens
ttaataaagcttctttttgtcctctcacctcaaatcaaagaactatgagagctattcactagatgaacatctggcccatggattccatttctgtgtcccaagacaaccttgattcttacttagatttgcaaaacattattaatccacatgcatggtaatgttaaaagagctctgggtaccaagactcttttacctgatttatacagaggattgctctctgagtatatgcttcaaaatgctttcagtatatgcttcaaaatkcattctcatgttgacatgagaatggtctagttttaaatgtcctgctttatgactgtgaccactctctgctacactgatcttttccatgcttcaataatgcagagatacgtgacttttgtagtggggggatgaagatatccagccaccacatgatccctgtgaaa

SEQ ID NO: 638741 - DNA, 476 bp, Homo sapiens
ttcaaagaaagactaatctgacaattgtggataaaggatttaaaagagagaaggctagaagcaatgaaactaattgaagtggtaatgcaatggtgcatgtgataggtttgaaagacttatttaagagactggcagtggaacaagagtcagacacagctttgagacatatttacaatgaaggtgtgacaaggattattaactgacggaattagagattacagaagaggaatccaggaagtcctcagatgtctgtcttatgtgactcagtagatgatggtgcctttcagcaagttaggagatacattatgagaagcaaaatgaaggataaaaacaattatttcagtcatatgtaggttgaattgatagtgcataaagattgaattgatagtgcatraagatatatagatggatacaacttgtaggcagaaatatgagtctaaattttggaaaaatagtctgggtgatgaaagagactt

SEQ ID NO: 638742 - DNA, 603 bp, Homo sapiens
atttattccacttttaaaaattaatagaactagaggtttctaattgtattgatcttacaaagtatcaaaattgcctttgttagctttctctaaaatttctttttcatttcattgatttttgctatttgttatttcctacctttcacttgctttgaaattacttttgtttcctaccttcttaagatgaaatcttaattcacttaattttagacttcaaaactttttaaatacagcaaatctagtatttttcttaaaacattggctattttatttctaaattttttatttggttcattttttaayactttctgttccactgctgagatttaccatcctttcatttattttattttattttatttttgagatcaagtctcactcagtctgtggcccaggctggagtgcagtcgcacgatcttggctcactgcaacctctgcctccctgattcaagtgattatcctgcttcagcctctcaagtagctgggattacaggtgtgcaccaccacacccagctaattcatttattacaaacttatttcctttatctcattgaactggttatactagctattcaaacatttttttcgtgccaattcaatatc

SEQ ID NO: 638743 - DNA, 526 bp, Homo sapiens
gaattcagtcgaaaagaatcacatactcattatcgaatttatatcaaatgtccataattggaaaacctataaagaccggaaatagaatagtagcagttgtccaatgctggggctggaggcaggatggtagggagggagggatcagaggagtgatagctaagagatggggtcatggaaatattttaaaattgattgtggtgatgatggcagaatcctgtgaatatattaaaagccactgaaatacactttaaatgggtgaattgtatagyatgtgaattataacttaataaagctgttacatttaaaaggcggtgagggtgggtattaaggaagtttcctggcaaggcattacaggtttctcagacaaggagaggctaatctcatcagaaagggaagaaaaaattgctctcactggcaaaggagacttgatcagattgggagttaaggtctctaaactcataagaaactgcctatatgaccctattcccgtatttttaatggtctcacttctttccaaatttaatag

SEQ ID NO: 638744 - DNA, 540 bp, Homo sapiens
ctggggctggaggcaggatggtagggagggagggatcagaggagtgatagctaagagatggggtcatggaaatattttaaaattgattgtggtgatgatggcagaatcctgtgaatatattaaaagccactgaaatacactttaaatgggtgaattgtatagcatgtgaattataacttaataaagctgttacatttaaaaggcggtgagggtgggtattaaggaagtttcctggcaaggcattacaggtttctcagacaaggagaggctaatctcatcagaaagggaagaaaaaattgctytcactggcaaaggagacttgatcagattgggagttaaggtctctaaactcataagaaactgcctatatgaccctattcccgtatttttaatggtctcacttctttccaaatttaatagataagattccataaggttagtgttgagaattcttgactttgtagcaccaggaaatggggatttctctcagggtagccatagacatttcatggtttataattggaccttgatatagacagt

SEQ ID NO: 638745 - DNA, 559 bp, Homo sapiens
ggtctgggattaccagaggtaccaaagggcgcccctcttacaaaacacacataggcatttggtttccagtgctctagccataactttttattaagaatgcataccacgtatttgyttattacatggttaagtagccaccttattcttcaattacacaaaattcaccactgaaaagaaactgtttgaaagaatgtgtttgaaagaatgaatatctttagactggatacctgcactagcttggatattgaagtgtatgtaaactttcagttgaatcaagatagaggcatatgtcagagctgaaagaactttgttgtttattatagttggtttagatctcttatatgcatttacatgagaactccagagtgtcttaggaaagtatagaaattagaccgtagatgcaggaaaatccctcactcaattaaggactcaaatataatcaatactaatgtactagcgataaatacaaagtgtaggaaaacactctttccatagcatttcattctccacttgctgcaaatcaaattacagacatatgcatctaatactaaactacttt

SEQ ID NO: 638746 - DNA, 606 bp, Homo sapiens
ggcatatgtcagagctgaaagaactttgttgtttattatagttggtttagatctcttatatgcatttacatgagaactccagagtgtcttaggaaagtatagaaattagaccgtagatgcaggaaaatccctcactcaattaaggactcaaatataatcaatactaatgtactagcgataaatacaaagtgtaggaaaacactctttccatagcatttcattctccacttgctgcaaatcaaattacagacatatgcatctaatactaaactacttttgtaaagtgctttcctctttgacacactatctagagtttcttaaagtgacagtttaactgttttgaaatatatatatttttgctgccactttcaactcactaagctatcaaaacgcatctttctcacccatgtttgctatgacacactggaatattaactccaagaggaatatcaataaattcctcctccagaatagcaagtattaaaaggctcarctgtggaggagtgaaaaatccgtacaggcaagtccataacagtaagatcttatacttgaagagtcagaggcaattgaaaccagagtgactccatcttgaatagcagctgggta

SEQ ID NO: 638747 - DNA, 611 bp, Homo sapiens
aattgaaaccagagtgactccatcttgaatagcagctgggtaaaataaggctaagacctactgggttgcattcccaggaggttagtattctaagtcacaaaataaaataggaggctggcacaagattcaggtcataaggaccttgatgataaaacaggatgcagcaaagaagctggccaaaacccaccaaaaccaagatggcaatgaaagtgacctctagtcatcgctcactgctcattatatgctaatcataatacattagcatrctaaaaaacaccctccccagtgccatgacaatttgcaaatgccacggcaacattggaaagttaccctatatggtctaaaaaggggaggaaccttcatttgttggaattgccactcctttcctggaatactcaggaataatccaccccttctttagtatataatcaagaaataactgtaaaaatagccaaccagccaccctaggggctgctctgcctatggagtagccattttttaaatttctttactttcttaataaacctgctttcacttcactctgtggacttgccccaaattctcccttgtgtgagatgcaagaaccccatcttagagtctggatcagcacc

SEQ ID NO: 638748 - DNA, 493 bp, Homo sapiens
aaggtataataataaggagcagagtttagagggtctagatatcagtgtgtccctgggagtagcctggtggccactccctagtccagttcctggggactggggcccaggggaataataaactctcagatgggttcgagaatccaagggcagaaatgatctgtgtcctaactcaggtggagctgaggatgtcaacaaagtattccctgtgacctcacagtgctggaggataagtgacatctctgtgaagtatttagtctgacagcctaaaagataatcttgccacgttccccgcagctggaatgccatgggagcagaagaacatttcctacccatccgagaggggcacagagcatgccagacccaaaaaggtctagtggctgggactagatgagacacagcagtcatgcacatggacaagcagctggcccatccatgyctgcatgccttcagatccgctccttcactcctctgtctaatctgtatcctgtggagg

SEQ ID NO: 638749 - DNA, 489 bp, Homo sapiens
gaaatcactattgaaataaagttgttctaaagtaacttttgacattttctgtaaaactagtaataacatgggttcctgacttagaaayttgaagtaggtatagtacaccatttaggctttcttaaattatattaacgtaataaactgacacttgttgaaagttatgtggaaaatgtaaaaattcagtatcatcacctggccaattcttatgggggaaaaaaactgaatttctaaatagtcaagtttcttcaagattggagtataaattgagaactgaatttatgaaatcatctataccactactcatttgacatcaactctgggacttcactagaaccatagtaagtaccccctaaaacactgatgttcttattggctaccttctccacttctattctctccactcgtattgagcaagtactcattttctgttactcctacattcatattccaaatgagaggccttgcttggttttagcactcaccatc

SEQ ID NO: 638750 - DNA, 531 bp, Homo sapiens
aaaagtattgataaataaaaggcatagataaaaactaaaaaatgtgaaaaagagaatgaattcctcttctcacatcatrcattaaaatttatatgggcagatcttcctgagaactagaatagttatagaagaatgtacagaggaagtcaagaaaaatagaaagcataagggaaaatattaactgatataactgtaatacatcagtattatataaatactgtatgaagtttgtatatcaaaagaaagcataaataaaattaaaaggcagacaataaataaagctatttacgtggatttagatttcatattcttatttctgctatataaagagttactataaataattttaaagcatatatgccaaaagcaaaaatgatcaaataaaatgaatacgttgaagagacatgaaaaatagttttgcctcgccagtaagcaaagaaatgtcatttctaacaatgagaaaatacaatatttcacttgttaaattgaaatttttcgttgtatcataacagtgatggtgaagaaacagag

SEQ ID NO: 638751 - DNA, 577 bp, Homo sapiens
gtgggatccgtgattggtggcagagtgcagaatgaagtcttggggcggggagaggaagaaactgcattatcatcctgatttcattcttctctggggctcttcaaactggtagcgtcaggcttctgctggcatccaggatctgaagaacatcttgaacaattcttaaacaaaagccttatgattctaactttggaaatcctatctatggaaacagtgggcatgcaaatcgtccgtatctggtgctatgtggcttttagttacaaggaaatgggccaaagggcagactgatgaatgcttaattataactgtatttctgttcagaacctgacatgtagttcttgttaaccctgtgaatacagtatcatagtcagagcagggcacaatgctgagtcatgtttttttttcttttttcttcctttaataaaagtaaaagagcactgtattaagattcagggygggctgcagttgaaccaggaggataggcttccttttcctctgagggtttctcagctttaaagctggagagcagtttgatttccaaagtatttttttaactttaatatctaataaaatacag

SEQ ID NO: 638752 - DNA, 611 bp, Homo sapiens
acataggactacatggcattccattttataartgtgttataatttatttaaagagccttttacgttgtcagacattggagtgttttccagatttctgctgttataaacaactgtgtcacactctctttataacaactaattgtgcactttattcatgaatatatttcaataattcttaagcatggctgtgcatcagaattattctgcctaataatctctttaaatcctttgagaccaaatttaaattttaccttttctagaaataatttctaaggaagcctgtcatctgtcctacagagaattattatactctctaatattccccatagactttttatatatttttgagggacgttaaactatttttaatgtatctacttcaataaccaagtattgtattaaaagtggcttttaaccaagaatgtgcatcagaatgctatatttgtgaaatacactgtgagttctgcttcccctaaggatgcagaaaacctcaagagaatggagctcctgatctgacataagaaaaagctgggtaacttacaaaataatacctattttatttttaggttaccagattagtgaggtccatcccatggcaacaaaatgaatga

SEQ ID NO: 638753 - DNA, 550 bp, Homo sapiens
ccagctggtctcaaactcctgacctcaagcgatcttctagcccctgctttccaaagtgccctaattacaagtataggccactatgcctggcctagtgaccatttcaaatgggaagattcgaggccagtggatcacgaggtcaggagattgaggccatcctgtctaacacggtgaagccctgtctctattaaaaatacaaaaaattagctgtgcgtggtggcatgtgcctgtagtcccagctactcaggaggctgaggcaggggaatcgcttgaacccgggaggcagaggttgcagtgagccaagattgtgccactgtactccagtgtactccagcctgggcaacagaacaagactccgtctcaacggaaaaaaaaaaaaaaagggggacgggggcaagttctgctcccaagtgtttcccacacccgggcactgtcaggttagcacgctttggatgtgaggatataggcaagctcaggcttyccctctagactttgatcctgagtatatttataacaataagaagctggttggagatcaagttcacaaaag

SEQ ID NO: 638754 - DNA, 397 bp, Homo sapiens
acctatctgtccctatgttttctctgtaatatgggctgtcgtttagacagatgtttcctacttattattcrtttattctacatttaataaatatatgttagttgttaggcatggtgccaggtgctgggggtgttgtcgtgaataaaaacaaaaatctctgcccttacgaagtttatattctagtgggtactattatctaggacaatctcagattccaggtgatatttaagagtgttagcccttttctgctattttattaggcagttttcaccaatgaacatatgctacataatcttactaaaaccaggacctgtcttctctttgaataatttccacacataaaaccccaatatattctttccaattcatatcactatgaatcagaatgaagttgttg

SEQ ID NO: 638755 - DNA, 597 bp, Homo sapiens
tatcctgtactagaaaattattttataacaatatcatgtacttcattcattctctttcccgcattgaaccagatcttcactgtcattatgaccttcacttcttctataaatgttttttcttatcatctttgagaactcccctagctttatttcttcatttcctggttttcaccatgaatcatttcaacaataattttactaaggacttagaatcaatcccttgtcttctaatagtttgcaatattttacaaatacacgcacaatcttgagtaaacattatctcatatacctcagctatcaaacattgttgtgagtaaaaaagaacaataaatgaatcatcaataaacaamtaacaatgtcaattctcataatttaaaaaactggcagcatcttcactttttctcagcattcctgtgacaattagctgagttgatgtttgaaaaagacagaataggctgtgttttccttcatgaacaatctcaaaatgttgctggcttaaaataacaaatgctatagatctcatgctcgttcatgtaggtaggggatggttttgctgacccagggagatggactctgtgccctttaatagtgcgtctg

SEQ ID NO: 638756 - DNA, 616 bp, Homo sapiens
ttttgaagaaaatttaaatcctccagtgaacacacaaatgataataaagggaaaccgtcttactgctgatgtgtagaaatttttaatgatctgtatagaagattaaacaagccacggttttctcctaagccaaggctaatctagagcaaaatcctaactcttttataaattctacaaatgctgaaaaacttgaggaagctgcagaaaaaaagttggaagctagcaagtttggttaatgaggtttaaggaaagaaaccatctccataacatagaaatgcgagatgaagcarcaagtgctgacgtagaagctgcagcaagttatctagaactacctagggtaattgatgaaggaggactacactaaacaataggtttcaatgtagacaaaaagggctgctattggaataaactgccatccaagacattgctagagatacgtcagttcttggcttcaatacttcaaaggacaggctgactctcttgtttggggctaatgcatacaatgactttaagccaatgctcttctaccagtctgaaaatccaaagactcttaagaattatgctaaatctgttctgcctgtcctctataaatggaacaacgaagcctagatggcag

SEQ ID NO: 638757 - DNA, 454 bp, Homo sapiens
accctcatgggatgacttggaagagttcaagacttcagtagaggaagtaactgcagatgtggtgaaaagcatgaaagaactagaattggaagtgaagcctgaaaacgtgactgaattgctgtaatctctttataaaactttaacagatgaggagttgtttcttatggatgagcaaagaaagygatttctggaaatgcaatctacttctagcaaagatgctgtgaatattgctgaaatgacaacaaaggattgagaatattccatcaacttagttgataagacagtgacagggcttgagaggattgactttcattttaaaagaagttctactgttggcaacattctatcaaacagcatcacatgctacagagaaatctttcatgaaaggaagattcagtcactgctacaaatcttattgttgtgtttttttttaaaattgccacagccaacccag

SEQ ID NO: 638758 - DNA, 454 bp, Homo sapiens
accctcatgggatgacttggaagagttcaagacttcagtagaggaagtaactgcagatgtggtgaaaagcatgaaagaactagaattggaagtgaagcctgaaaacgtgactgaattgctgtaatctctttataaaactttaacagatgaggagttgtttcttatggatgagcaaagaaagtgatttctggaaatgcaatctacttctagcaaagatgctgtgaatattgctgaaatgacaacaaaggattgagaatattccatcaacttagttgataagacagtgacagrgcttgagaggattgactttcattttaaaagaagttctactgttggcaacattctatcaaacagcatcacatgctacagagaaatctttcatgaaaggaagattcagtcactgctacaaatcttattgttgtgtttttttttaaaattgccacagccaacccag

SEQ ID NO: 638759 - DNA, 612 bp, Homo sapiens
acctctaaaaacttgatattaaaatcgttgggtacagtaagtaaagtaaaatctgtacaatgaaatgaaatatagactcaagtagcaagagtttatcaaataagcaggagtatttgaaacaaaacaaagcagrtagaaatttaagaaatattaaaataaaaaactgaaaaattgtttttacaagagataaaaaataattcattatttggaagatacatttaaagaattatttacacataacaatggaaaataaagttgaatggtaagaaaaagtttgagtgttctggaggatagaaaatgtccagcatcagccaaagtggggttatatttaactcgaattaatatatacaatggggaaggtcatattcaacatgaatgataatttttcagaaagtcagattctgaaattagaattcccaagttgtcagaattaggaagcatgtttaattctaagcagagaaaaatatattctttgccagatgtgttgtgacaaactacagaacatcaatgacaagacagaaaaatgttaatacaagttgagggaaagaaagacagtttgcttacaaaggaactacaactagaattatagctgcctattcaacagcaaaaatt

SEQ ID NO: 638760 - DNA, 537 bp, Homo sapiens
gcgtggttcacaaaatgcaggctgggaattttaatctaaaatgaatttaggttaatagtgcccaaaggtaagtaacaaaaacaaacgaaacatttctctgagggaatcaatgaattctcacagatagatcaccactagacaggattcacaatcacaaatcccaaaatatacaaggaaatatcaagatatgtgtgaactacacaagcaaaaaaacagcagaataagacctctaaaaacttgatattaaaatcgttgggtacagtaagtaaagtaaaatctgtacaatgaaatgaaatatagactcaagtagcaagagtttatcaaataagcaggagtatttgaaacaaaacaaagcagatagaaatttaagaaatattaaaataaaaaactgaaaaattgtttttacaagagataaaaaataattcrttatttggaagatacatttaaagaattatttacacataacaatggaaaataaagttgaatggtaagaaaaagtttgagtgttctggaggatagaaaatgtccagcatcagc

SEQ ID NO: 638761 - DNA, 570 bp, Homo sapiens
aaacatggtggatatattttcgacagtaatcataattcttgtccagatgatgtgaagggttataaaataagcctgttaggtttcccaagcacttgtgtgtcgagtatatgtaaaatgcttcattaaaacatcttagactttacagtggatattttgctggtattaagcttgtgtttgtaaatagaagtgctaattatttaggcatgcaattgctcacacgaatagcctatgggtcagagtagttttagactttacttttttctataattaaacatatagcatttaaagaacatttttttaaaaaacatgaaaacacagtattccctggagcatatcacatgtgaatttagaagccagattataacgcaatttttgcctgcaaataaatgagttcaacattaacaataattagagacataaggtcctctgaattctaaaaagttacccccaaatctaaatattatttaataaatttaatagttgcataatattgatttccccaaaatcacgggtaaaaggtttttcttgaagcagttataagctatatygtggcaaaaattagccatatac

SEQ ID NO: 638762 - DNA, 588 bp, Homo sapiens
cttcttttgattttccaaactttctccaatgagtctatattaattatatagtcagaaaacgtaactattagttgggtgcagtggctcatgcctgtaatctcaacacgttgggaggccaaggtgggaggatcacttgagcccaggagttcaagaccagcttgggcaacatagtaagttcctgtctctacaccaaaaaaattttaaaattatccaggcacagtggtgcacacctgtggtcccagagactcacaggagggatccttgagcctgggaggatcccttgagcctgggagtttgaggctgcagtaagccatgatcaygtcactgcactccggtctgggcaacaaagcgaggttctgtctaaaaaaaaaaaatgatattttttccattcacttaatcaagtttttatatactcaaatgtgcaagtttttcagcatcgctggagctaggaattggaaatgaataattcaattgtctgtggcagattttacccaaaggagataccttaaatccagttctggagtctgtgtatttaagaaatctttagaacaattggaaatgtttatcctggacaagtgattatgtgaa

SEQ ID NO: 638763 - DNA, 561 bp, Homo sapiens
gaatgcattggcctgttttgattaagttgcctatctytgaaccagtgactatacccaaggaaatgggaaaaaattttggtgacttgccttgatccatgtatacttccaagagttgacacacaggaagcaaataatcaaaagttataaagcacacatggcagtcaaaagcaatttcggtccaccgtaatctcttatccttttctccttcatgattttttccacttactatttcattgtatgtagttatgaaagttatagccaaatgcattggcgctatctacaactgaaaaaaacctgcatatttattttctcttcataaatatataacacattttaaaatttcacttgctttgagaggtataattcttttaattttagttacctgtgtagttttaaaacagcataacaaaatcaatatgattgaaaggtttggttattaaggagcacaaccctaatcttaatagcgtttcaattgataaacaattccaatcacactcactaccacagaaaatctgtgaaggggctccaacgaatgcctctgtgagccttggccaggagccc

SEQ ID NO: 638764 - DNA, 462 bp, Homo sapiens
tccctgtcttctctttctgtttgtttttctttttcttattgtgtgtttcagtttggttaatttctattgacctaccttcagatttacttactcccccctcagtgctatccaattggcggaataacccatcaaagagattcatcttggatatcatgtattttgtttctagcattttcatgtgactgttatctctgtgctgaaattctccagggtctgtgcattttgtctactttttctactagatcccttarcatatcaattattaaaattatcatctgagagttccaatatctccgagtctgattttttttatctgtgtgtgtgtgtgtgttctaatcttttatccagtaccaaattttatgtgtagtgtatcagtagagactgaggcaaatagtatttatgcccaggaaaaggcatgagtgtatgtctttcagtcaagttgaggtttatgcctgtgcgtgc

SEQ ID NO: 638765 - DNA, 627 bp, Homo sapiens
aattagctttcaactagcttactagtgaagtacaaaagattattaagctggaacaattcactcattttatagatgaaaaaaataataaaaaatgtataattatacataagaagaaatatagtattaagcttagaaggcattagtcttagtatatatatatatattaagtacaggaataactaattttttcaaacatactgaattaaaaatgtattctttactatgcagccattaaaaaaaaacaagatcatggcttctgcaggaatgtgaatggagctggaggtcattatccttagcaagtcaacacaggaacaggaaaccagataccacatgttctcacttatgagtaggagccaaatgataagaacttacgaacacaaacaaggaaactggggtgcacttgagagggagggtgggaggaaggagaggagcagaaaagaggcctcttgagtactggrcttaatacctgggtgatgaaataatctgtacaacaaacccccatgacacacatttacctatgtaacaaactttcacaagtacctccaaacctaaactaacaataaataaataaataaaatatgtattcttatattttaaaagtgtaattccataattttgtagttattc

SEQ ID NO: 638766 - DNA, 599 bp, Homo sapiens
ctattataggtaactaagtaatattctattgaatattaatgcaaccagcaaaataacaacctgtaccataaagatacaaaattattttaaatggaattaagaaaatgatgaataataagattttttatacataaaactgatcaagtcagaggctatgaactgtcaatcataacgaattgggacaggggacaaaagtcctgcctatgggttaacaaagtaagcctgagtcctctctgccctctggatgatgcagcagtgtgtcctaacactgtatccttatggtcactggcctggcttctattgygcatggtggggatgaaagaaaatgtacccattgtgagttgcctaacagagcaagtacttattaggcactcagtaaatatcagcctcatatttaaagagatcaacaaaataaattaatttctactatagactaatataataaaatctaggctcaaaatgcatttttgcagattcagcctttgcattgcttacttttaattattgtcaaattcaagaaataaaatgttattttcagagcattatcaccatataaatggttatgaaagtatttaataagtagaaacacatgtcttttt

SEQ ID NO: 638767 - DNA, 594 bp, Homo sapiens
tctaatctgcctcccaggtgagcctacaggtactggaactctaactgcaactatgagggcacagggaaaatgcatgtatgtaatatgcttgtcagcttcagcaacaactcatgtgtacattcacatttactataagtaaacaggtcccgtataatacttaaaacacaagttttgatctataaatatttgattcttaatatttaaaatgcttctaatgttttaaaagacaaaactcccccatgatatcaccttgaacattaaaattattcccacagcaacacttatttcagagaaacaactgatgtcagttatcttagtaaccgctaaaggcacctggtgaaaaaaatgtcaactaaattttaaatattaaaaaattaaagagacatctaatgcagagttcaaacctgaattgttaaagagtcattactgatttcatgacactgataaatgtttgaattgaaatgattttttaaaatgcagagaaaatgctaacaaaagattatatagttcccctaaagatgcttcttctagcctccaagtattaaakaagacagatctaaatattaactacatataaagtatatatttgttagt

SEQ ID NO: 638768 - DNA, 529 bp, Homo sapiens
aatcagccattaaaaaatattttgggaatatttctcagaagtctcatccccatatttttgttcttaaaacatctcaccacaaactcaaccacacctatggtttgcaaactttgggaaatgtcagtatatgccattatcatggttattagtaccattatttgttaaagccctttgaaggcaatttatgtgacttatatatatttggtattttaatttggacattctctagttctatgcaaagatcaaaactaggcagcttcrttttatagaattgacaccttttatatgtctatggggactgcttggtgtctataaattatgtatatgtgttggactgaaatcaaacttaaaatcttccatatttcaagtgtttttattctgagcagtaggtacaaaaaataatgacatagttgtgtctaattctgtatagttcagcaccctccacaggctgtcaatctctgatttgatctacttttaccagatttaacagatccttgaatttactttactgtatatacttccttcttgc

SEQ ID NO: 638769 - DNA, 560 bp, Homo sapiens
agtgaatttgaagataaagcaattgaaatgatccagtctgagaagaaaataaaaataatgaggtaaaaatgaacagagcctaacagacctattggacaccatcaagtataccaacatacacattacaggagtaccagaaggaaaagagcaagaagggggcaacaaaatatttgaagaaataatgccagaaacttcccaaatctgatgaaagacatgtatgtaatcatccaaaaagttcaatgaactccaagcaggataaaggcaaagagattcacagtgaaacacattatactaaattgtcaaaaccctaagacaaagagggagtcttgaaggcagtgagaaagaagtgacttgtcacatacagtcrtccctcagtatccatgggggattggttccaggaattcccacagatacccagatccatggatatgcaagtactgctgtcggccctgtagaacctatagatagaaaaagttgtccctccataactacaggttctgcatcctgtgaatactgaattttgaatctgtggttggctgaatctgcagatatggaacctg

SEQ ID NO: 638770 - DNA, 619 bp, Homo sapiens
tcatatcttccatttcatcgagagggactagaaattcagatttttatgcaaaatcttccagtcttcaaatactgtcatgcaatagtgcagtggcataatcatggctcactgcagcctcaactgccccagctcaagtgattcttccacctcggcctcccaagtagctaggaccacaggtgggcatcatcacacccggctactttttttttattatttgtagagaccaagtcttgccatgttgcccaggctagtcttgaactcctgggctcagcctcccaaagtactggggttacaggtgtgagtcaccaattcaattttgtttaaaaaaattatatagaccacaaaacayaacagtggcctggaggtggcctgagggccgccactatgcaatcacagctttagatcatgagcttgtgttcctttctgactcactctccctgcctgtgaagcggcgttgaatatctcacacatctgctgggaggcagaagaattagaccgtgtgagggattaggcttatcaacttcaggatctaccgaaacagagtggcgttactgctgtgggttattaaagccatcaagcctgcggtgcaatatcccttcatgaatctttgttgacaccg

SEQ ID NO: 638771 - DNA, 619 bp, Homo sapiens
tcatatcttccatttcatcgagagggactagaaattcagatttttatgcaaaatcttccagtcttcaaatactgtcatgcaatagtgcagtggcataatcatggctcactgcagcctcaactgccccagctcaagtgattcttccacctcggcctcccaagtagctaggaccacaggtgggcatcatcacacccggctactttttttttattatttgtagagaccaagtcttgccatgttgcccaggctagtcttgaactcctgggctcagcctcccaaagtactggggttacaggtgtgagtcaccaattcaattttgtttaaaaaaattatatagaccacaaaacacaacagtggcctggaggtggcctgagggccgccactatgcaatcacagctttagatcatgagcttgtgttcctttctgactcactctccctgcctgtgaagcggcgttgaatatctcacacatctgctgggaggcagaagaattagaccgtgtgagggattaggcttatcaactycaggatctaccgaaacagagtggcgttactgctgtgggttattaaagccatcaagcctgcggtgcaatatcccttcatgaatctttgttgacaccg

SEQ ID NO: 638772 - DNA, 476 bp, Homo sapiens
gatagatgcatagatacatasatacatacatatttacatgtatacacacatacatactgtgatggttaataaagggtgtcaacttgattggattgaaggatgcaaagttttgttcctgggtgtgtctgtgagagtgttgccaaaggagattaacatttgagttaggggactgggagacgcagacacatcctcaatctaggtgggtaccatctaatcagctgccagcgtggccagaagaaaagcaggcagaggaacatggaaaagctagactggtttagtcttctggcctccatcttcctcccatgctggatgcttcctgtccttgaaaatcggactccaggtttttcagctttaggattcagacaggcttccttgctccttgccttgcagatggcctattgtgggacctcaccttgtgatcgtgtgagtcaatactccttaatacactccccttcatatagtcatctatcctatta

SEQ ID NO: 638773 - DNA, 460 bp, Homo sapiens
gatgcatagatacatacatacatacatatttacatgtatacacayatacatactgtgatggttaataaagggtgtcaacttgattggattgaaggatgcaaagttttgttcctgggtgtgtctgtgagagtgttgccaaaggagattaacatttgagttaggggactgggagacgcagacacatcctcaatctaggtgggtaccatctaatcagctgccagcgtggccagaagaaaagcaggcagaggaacatggaaaagctagactggtttagtcttctggcctccatcttcctcccatgctggatgcttcctgtccttgaaaatcggactccaggtttttcagctttaggattcagacaggcttccttgctccttgccttgcagatggcctattgtgggacctcaccttgtgatcgtgtgagtcaatactccttaatacactccccttcatatagtca

SEQ ID NO: 638774 - DNA, 473 bp, Homo sapiens
caatcaatagatagatgcatagatacatacatacatacatatttacatgtatacacacatacatactgtgatggttaataaagggtgtcaacttgaytggattgaaggatgcaaagttttgttcctgggtgtgtctgtgagagtgttgccaaaggagattaacatttgagttaggggactgggagacgcagacacatcctcaatctaggtgggtaccatctaatcagctgccagcgtggccagaagaaaagcaggcagaggaacatggaaaagctagactggtttagtcttctggcctccatcttcctcccatgctggatgcttcctgtccttgaaaatcggactccaggtttttcagctttaggattcagacaggcttccttgctccttgccttgcagatggcctattgtgggacctcaccttgtgatcgtgtgagtcaatactccttaatacactccccttcatatagtca

SEQ ID NO: 638775 - DNA, 634 bp, Homo sapiens
cagagacttacatttctgatagtgtggcagactaggaaacatagaaagctttctgctctaaaaacacctagaagtggtagagaaaaggtaatgaacaggctttcaaatgcactaactgagctttgctaaagaaagggaaatcctgcagccaaaaggaaagcaaagcaaactgaaaccaaagaagyaggagatcgtgggggcagctgcactggatgcaggggaggtggaaggggagagctgccaatcttgatacctaagaagctttggatgtaatggccaccaacagggacaggagctgaggcctgggcctagggcacgcatgcgtcaaagctgtgaatcctgcatacagccaagaccttccaaggcttccactctacggaaaaaagtgacagaaaaaacaatctcctcacttgcaatgagagataatgaaatagcttatctagcttgtccagggctctagatagaaaacatatctcccctgatcattcatgagggctctgccttcatctaggcctgagattcaaatgtatatgatctacaggatccattaagctcccacctcaccccagttggcacggagacaggggaggcgctttgtagctattttttaaaagagtttaagggtttttatttt

SEQ ID NO: 638776 - DNA, 621 bp, Homo sapiens
ggccacaggtgggagcccagactcctccctagcagggtctcctgaatggagaggggctttcctcatagcacagtgcggtgactccccagccccgaggtaagaaagcaagaaagcaaagccatgagccaggcctatgcaagacaattttttttttttttgagagtytcgctctgttgccagcctggagtgcagtggtgcgatctcagctcactgcaacctctgcctcccaggttcaagcaatttccctgcctcagccacccaagtagctgggactacaggcacacgccaccacacctggctaattttttgtgtgtgtattttagtagagatggggtttcaccatgttggccacgatggtctccatctcctgacctcatgattcacctgcctcggcctcccaaagtgctgggattacaggcatgagccaccgcgcccggccaagacactttcaagtgttgtctccgttgccttcacacaaaccccaggagggagacagcccccgtttacagaggagcagcctgaagcctagtcttcatcaatttgaccatcataaagctcacaagtcgcaaagctgggatgaaaatccaggtcttctgactttcactctgccgcaccgaattc

SEQ ID NO: 638777 - DNA, 621 bp, Homo sapiens
ggccacaggtgggagcccagactcctccctagcagggtctcctgaatggagaggggctttcctcatagcacagtgcggtgactccccagccccgaggtaagaaagcaagaaagcaaagccatgagccaggcctatgcaagacaattttttttttttttgagagtctcgctctgttgccagcctggagtgcagtggtgcgatctcagctcactgcaacctctgcctcccaggttcaagcaatttccctgcctcagccacccaagtagctgggactacaggcacacgccaccacacctggctaattttttgtstgtgtattttagtagagatggggtttcaccatgttggccacgatggtctccatctcctgacctcatgattcacctgcctcggcctcccaaagtgctgggattacaggcatgagccaccgcgcccggccaagacactttcaagtgttgtctccgttgccttcacacaaaccccaggagggagacagcccccgtttacagaggagcagcctgaagcctagtcttcatcaatttgaccatcataaagctcacaagtcgcaaagctgggatgaaaatccaggtcttctgactttcactctgccgcaccgaattc

SEQ ID NO: 638778 - DNA, 607 bp, Homo sapiens
gaattcgcccctcactttggccacaggtgggagcccagactcctccctagcagggtctcctgaatggagaggggctttcctcatagcacagtgcggtgactccccagccccgaggtaagaaagcaagaaagcaaagccatgagccaggcctatgcaagacaattttttttttttttgagagtctcgctctgttgccagcctggagtgcagtggtgcgatctcagctcactgcaacctctgcctcccaggttcaagcaatttccctgcctcagccacccaagtagctgggactacaggcacacgccaccacacctggctaattttttgtgtgtgtattttagtagagatggggtttcaccatgttggccacgatggtctccatctcctgacctcatgattcacctgcctcggcctcccaaagtgctgggattayaggcatgagccaccgcgcccggccaagacactttcaagtgttgtctccgttgccttcacacaaaccccaggagggagacagcccccgtttacagaggagcagcctgaagcctagtcttcatcaatttgaccatcataaagctcacaagtcgcaaagctgggatgaaaatccagg

SEQ ID NO: 638779 - DNA, 621 bp, Homo sapiens
ggccacaggtgggagcccagactcctccctagcagggtctcctgaatggagaggggctttcctcatagcacagtgcggtgactccccagccccgaggtaagaaagcaagaaagcaaagccatgagccaggcctatgcaagacaattttttttttttttgagagtctcgctctgttgccagcctggagtgcagtggtgcgatctcagctcactgcaacctctgcctcccaggttcaagcaatttccctgcctcagccacccaagtagctgggactacaggcacacgccaccacacctggctaattttttgtgtgtgtattttagtagagatggggtttcaccatgttggccacgatggtctccatctcctgacctcatgattcacctgcctcggcctcccaaagtgctgggattacaggcatgagccaccgcgcccggccaagacactttcaagtgttgtctccgttgccttcacacaaaccccaggagggagacagcccccgtttacagaggarcagcctgaagcctagtcttcatcaatttgaccatcataaagctcacaagtcgcaaagctgggatgaaaatccaggtcttctgactttcactctgccgcaccgaattc

SEQ ID NO: 638780 - DNA, 543 bp, Homo sapiens
gcgccactcaatgcacctgcaccgtctgtagagcccattgccatttccttgttcagaatttgatcctcagtcaaaatcaggtgactggtttaaactttgaaactttgacacgtggtattaaaggcttttagcatgtatatggtagagcagttgttctcaactggagacaattttactccccaggggacatttggcaatgtctaaaaacatttttggttgtcacaattcagtttgcagggtgctgtggctgactgccactactactacttgagaccgtcattacagcagtcactactgttactgcttgcaaccttcattacaagactgaaygaagggacaaacatagaaatgataacaaaaaaacaaaataactattttaaggaaaggcaacatggggaagaagagagctccctgcttctagtgagcaaaggcagttcctgagcttctacggccctttgtatttattgggtaacaagagcaaggaggaggaggtaatgattgatcagctgcttaactgatcacaggttcatattgttcctgaca

SEQ ID NO: 638781 - DNA, 277 bp, Homo sapiens
ttcatattatcacccattctgaaataatccttaaatgctttttctccttgacatccttgtcaggtgtttgttgtgtctcttgttctgttgcatgaaagggtgctttataaataatacacgctctataattttttaaggtgacaatggtggtaacaatcrtgatgatgaccatgctttaattagccaacttcttacttcattttccttgaacacattttagatctcagtcttcttgacctgttttgacagttaacatgcagcagggaaagacgtggga

SEQ ID NO: 638782 - DNA, 640 bp, Homo sapiens
ccagcacacacacgtgcacagggacatgcaggcacacagacagacatgcatttctagagcagagcatggagtttggcccacagcaagctagatggatggggtggcagggcagcagtgaattgttttttctctcaacacttccaataccaaatatatgggagytttttcccatctcagccaattctccaactctctgacaccaaatgggtatcctagaactcaattcaattctgccactaactactagagttagcatagaccttccatggtaaaggctcagtcctataaactccccacttcacatggggactcttgaaagtctcaggttgccgcatgttctttggacccactggctataaatcaggggtacccatgaccccctcctcaggtctgagaacttgctagaacagttcacagaactcattaaaacacctcattacatttactatttattataaaggaaacaactcaacaacagccaaatggaagagatgcacagggcaaggtatgggggaagcgccatggggcttccatgccctctccaggtacacggccctcccagcagctccatgtattcaccaacctgaaagctctctgaaccccatcctttagggggtttatggaagtttctttctgcaga

SEQ ID NO: 638783 - DNA, 501 bp, Homo sapiens
agttctgcctaaattaatttttgaagttactgtacatttcatatcactgacagttttaaatccaattaaacttaatgtcaagtatgttgagaaatgctaacacatacacactgctaataaaagtggaaagaaatatcaaaagtgcacatattctacaatccagcaccatcgctcttagacacttatcctatccctcaggtcttcaaaaggaaatatgtacaaggatagtcactgcagcatgatttataacaaaagcaaagacaaaagacctgggaaacagcctagatgcctgtcaaccagatggatacattgtggtattttcacataatggaatactatacagcagtgaacatgaataaactacaactacatgtatcaacacattgtgtgtgtgtgtgtgtgtgtgtgtgtaaataaaatttagaaacacctacacatgtagcaaaaaaataaagagatrcatgggaatgataaataacaaattaattagagtggttaccc

SEQ ID NO: 638784 - DNA, 545 bp, Homo sapiens
ggagttttgaaacgagtctttaaagcgttagaaccagaccatatcctttttttaagaaaattattttttaaattggcaaataaaaatggtcaaataaattgacactaaaatgtcctttgcctatatgcctagtcgtgggattgctggatcatatggtagtcctatctttaactttttgaagtacctgttttccataatggacgtactcatttccattcccaccaacagtgtgcacatgttcccttttccccgcatcctctccaacatgtcctatcttcatctttttgatcatagccatcctaaccggtgtgaggtgatagctaattgtgattttaacttgcatttccctgatgattagtggaccacattgttaattataaattttatttgcactgagctttgaatgaaagcaccttcctctctatcatgttttctcaattgtcctcttatcatctcattccattcattttcccaaagctgtcttagctgctctatwtttttttgaagattttaaatttaatttttattatagtaaaatatgcata

SEQ ID NO: 638785 - DNA, 540 bp, Homo sapiens
agttgtaatgaaaccatacggcccacaaaacctacaatatttattatctggcctttaatggaaaaagttacctgacccctggtctagggcatattgggttctatctgtgctttctaaaaagataaactccctctcaaaaaactaaattctattatgatgttccccaaatcctacctcaactgttctaccaaaaattccagcgtccaagcctccacatcccyctccagcacctaaggaagtcacagcacttctgcaagcactgctcccttcatctatcatagcaagaccagaaacagccacctcttaggccactctggggatgaggcccaagaaatgagtgagtagccaggaataaaaggaatgagcttgaatggtgagaattctgtgaaaccgccagtatgtgtatacattttaaatcatgaaatagatgcgttttctctgctagatgacacacttggttaacaacaacaacacattgcagacgggttttcagtgcaagttaagctgtttatttctgggggtccccagggtcccaggcag

SEQ ID NO: 638786 - DNA, 467 bp, Homo sapiens
taccaaaaagttctaagacaccactttctccctcaagggccatataatccagctaagaaaacagatatatgcacgtaaaaagatagcactgctctgtgtatataattgggattaagttcagttgtgactaaaaccctcaagacaagccaaaaagtccagggctgatggggcctctctctcccacggagccctctgggrcttgggctccttcctctaagccctccaccatctctagggagtgtccccatcctcttggttaatggcacagctgcattccaggcagcagggagaggcaggaactaagaagggaccaaataaagtcgttcaattcaaagtttatttgggagtcaagtaaagtttacagtgggagtacaaaactagagatttgtttcaggtcacacactttgcttgtacaacctctagattgcgtaagttatgccttcatttatatctttaacaccctaagc

SEQ ID NO: 638787 - DNA, 467 bp, Homo sapiens
taccaaaaagttctaagacaccactttctccctcaagggccatataatccagctaagaaaacagatatatgcacgtaaaaagatagcactgctctgtgtatataattgggattaagttcagttgtgactaaaaccctcaagacaagccaaaaagtccagggctgatggggcctctctctcccacggagccctctgggacttgggctccttcctctaagccctccaccatctctagggagtgtccccatcctcttggttaatggcacagctgcattccaggcagcagggagaggcaggaactaagaagggaccaaataaagtcgttcaattcaaagtttatttgggagtcaagtaaagtttacagtgggagtacaaaactagagatttgtttcargtcacacactttgcttgtacaacctctagattgcgtaagttatgccttcatttatatctttaacaccctaagc

SEQ ID NO: 638788 - DNA, 606 bp, Homo sapiens
gttgggagagagacatctgggtggggttttgtgtccctcctgctgtggctgctgtcccagtccctcaggcctgtatcatgagggatgcattctcgtaccctcccccacccgcctggggtcatgggggaaagcctggaaaagggtgcaaactcttgcttcagacttcccactttcttgcccacccacactccatccctaccagttcattaagtattccagctgaatcccacactccatccctaccagttcattaagtattccagctgaatcccacactctatccctaccagttcattaagtattccagttgaatccttactgctgtgcatctgcggggccccaggtgcaccagtgttcacgtcccatctcttcttgtgggcacctgtctcttcttagatttcaggatagttgattgaacctgagctctctgatggcttcaatgagagctctaaacttgcaggttttccagcttttttgttgttgtaaakgtgtgggcaatgttctttccagattgctgcatctagagcagaaactgggagtcagaattgagttaacttaaaggaaaagatagggaaaaatcagtgtttgtggactaaattggtaacc

SEQ ID NO: 638789 - DNA, 498 bp, Homo sapiens
atattttctctctcccattaacctagaaccctgcaaagtgtctggcacatcacaggccttcatcagtctgtgaatgcttctcacttcttgctgtggtttctgacgagggggaaccaggctcccctagtttgcaccctggttttctttggaggatatgaggctggagagaggataccattagtgccactgagggggatgcatgctattcctgttcccgtcttcataggaagatgctcccaaggacagctccttttgctggagtttggagttgaagggggaagtatgggtttcataccgagaaaagccacacacctayaattgcaggcactttcccagaaacttgagcctgaccccaggactgcaccctgccgagctctgctgggtcacagccagcctctgcatttccaggagggcttcctgactctggggaaacatgggcttcctgatgcgagggcaaaaaatgggttagggactgccaaggggacagctaaggagctg

SEQ ID NO: 638790 - DNA, 578 bp, Homo sapiens
aacgtagatttggtcttttcacatagtcccatatttcttggaggctttgtttgttcctttttattcttttttctctaatcttgtcttctcgctttatttcattaagtggatcttcaatctctgatatcctttcttccactagattgattcagctattgatacttttgtatgctacacatagttttcgcgccatggttttcagctccatcaggtcatttatgttcttctctaaactggttattctagttagcaattcaaccttttttcaaggttcttagcttccttgcgttgggttagaatatgttcctttagctcagaggagtttattattactcaacttctgaagcctacttttgtcarttcgtcaaactcattctccatccagttttgatcccttgctggcaaggagttgttatcctttggaggaaaagaggcattctggtttttggaattttcagctttttgcactggtttctcctcatctttgtggatttatctacctttggtctttgatattggtgacctttggatggggtctccgagtggatgtgctcttcctttctgttgttagttttcct

SEQ ID NO: 638791 - DNA, 505 bp, Homo sapiens
aatccaccctgctttggctcaccctctgtgggctgcaccaactgtccaaccagtcccagtaagatgagccggttacctcagttggaaatgcagaaaccacccaccttctgcgccaatcttgctgggagctgcagacgggagctgttcctattcaaccatcttgccagcaatcgaataattattattctttaaatctgtctcttttttctttttctgcgatggaatttcactcttgttgcccaggctggagtgcaatggcacaatcttggctcacagcaacctccacctcctgggttcaagtgattctcctgcctyagcctcctgagtagctgggattacaggcatgtgccaccacacctggctaattttgtatttttagtagagatggggtttctccatgtttgtcaggctggtctcgaactcccgacctcaggtgatccgcccgccttggccttctaaagtgctgggattacaggcatgagccactgcacctggccttaaatct

SEQ ID NO: 638792 - DNA, 579 bp, Homo sapiens
tatttcttaatttctttataattagtatgtgtattatattaaattatattacacatacgtaaatatataaatattttatatatgtattatataamtataatatataaaatataatatattttacacataaaatatatcatattagttatattaaaataatcacacacttaaagaaaataaagcgatggacaaagagataccaaacagatatgcttagaaggaaagcaggaatagacagatctactaacatcaggcgaagtagaatttaaagtcagaagcattcattggagttatgagagacattatggtatggtaaaatgtacatattggaaaaaatataacagctataaattttgatattccaaatagcatagttatacataaaacaaaaactactgcaatataagaagaacttaaagtatacgcacgcacacacatacccccacacatatactgtagtaaaatactttagatatgcctacttttgaattttatttatttatttattttctgagacagggtcttgctctgtcacccaggctggagtgcagcggctcaatcacagctcactgcagtctc

SEQ ID NO: 638793 - DNA, 579 bp, Homo sapiens
tatttcttaatttctttataattagtatgtgtattatattaaattatattacacatacgtaaatatataaatattttatatatgtattatataaatataatatataaaatataatatattttacacataaaatatatcatattakttatattaaaataatcacacacttaaagaaaataaagcgatggacaaagagataccaaacagatatgcttagaaggaaagcaggaatagacagatctactaacatcaggcgaagtagaatttaaagtcagaagcattcattggagttatgagagacattatggtatggtaaaatgtacatattggaaaaaatataacagctataaattttgatattccaaatagcatagttatacataaaacaaaaactactgcaatataagaagaacttaaagtatacgcacgcacacacatacccccacacatatactgtagtaaaatactttagatatgcctacttttgaattttatttatttatttattttctgagacagggtcttgctctgtcacccaggctggagtgcagcggctcaatcacagctcactgcagtctc

SEQ ID NO: 638794 - DNA, 467 bp, Homo sapiens
aacaaacaaacaaaaaacaccaagatctgcatcagcggcggtactgaacacaggtacaatttcacggcttcctaatgtgttgtatccatttacagtcctaacagcaggatgtgaaatcgctcatattttctaracctttcctacacttggttttatcactctgtttattctttgccaatctaaaactgttccaatacaatgtaaaatttaaatttaaataaaatgtgcatttcgctgattaatgtaagttggaatatcattatcttttcatagttcttgggcaattatatttcttctctcagatttacacagtcatgtcctccccatttttcaatgtgaccatttagttcttactgaaaagtaagtgcacattttataacaggaatattaaccctttgtcttttttttttctttttgtagaattttgcaaaatctttgtggctggtctctccactctgattttaatg

SEQ ID NO: 638795 - DNA, 559 bp, Homo sapiens
tgtgcatgtagctctgctacttgggagggtgaggtgggaggattgtttgagcccaggagtttgaggctgcagtgagccatgattgcaccactgcactccagcatgggcgtcagaccctgactcaaaaaaacgtaaaaataaataactgtaataccattattaaaccttaaaatttatcccctccttaaaatkatttttttttttttttgagacagggtcttgctatgtctctcaagctggaatgtagtggcataatctcagctcactgcagccttgacctactgggttcaagcagtcttcccacttcagcctcctgagtagctgggactatagacacatgccaccgtgcctggctaacttttatacttcttgtagagatggggtttcaccatgttgcccaggctggtcttgaactcctgggctcaagtgatccacccacctcggcctccctaagtgctgggattacaggtgtgagccactgtgcctggctaaaatgacttttaaggaaaattattttaagcctgtttctctatttcatggtaggagaaaataaagggca

SEQ ID NO: 638796 - DNA, 475 bp, Homo sapiens
tagaacagctgacccctaaagtaacttgttttctctttctattcctgttatttgtccttatttcctaacacatattttcttctgttctttttgttctactaattttcttgattctatgctaattcyattttggtaagagagaccataatcatgtctaatctacatacacaatgttgaaaatctaaagtttaatgctgcctagtaacaggatgatatcctaattgtttctcattatattttttgtacttgatttcttcaattgtccatgttttgaaataggagaaatggcttaaaattccccctcattcttttttccagttcaaatgacttgctggggtgaatatgatgaagttttagatggaaagtggacatttagcttttgaaaatgatccttcataacaactgaactatctgtatacagtattgtgattcaccaaaccatatataggacaatgcttactcttctgcaaagggt

SEQ ID NO: 638797 - DNA, 494 bp, Homo sapiens
ttgggttataccctttaaacgcttatttcttgttttcagaataggtgtttcaatatactatgccagcaatctgttatcctcttaaaattaactgcgaaatgggccaggcgcagtggttcaagcctgtaatcccagcactctgggaggccmagacaggcagatcatgaggtcaggagttcgaggccagcctggcccatatggtgaaaccctgtctctactaaaaataccagttagccaggtgtggtggcacacatctgtagtcccacctactcgggaggtggaggcaggagaatcccttgaacccgggagacagaggttgcagtgagccgagatcgtgcccctgcactccagcctgagcgacagagcaagaccctgtctcagggtaaaaaaaaaaaaaattaactgcaaaatgatattatccactctacatgaagtttcactggaaatttacctttttcagggcatactttgggtcttcaggaagaaccattatt

SEQ ID NO: 638798 - DNA, 494 bp, Homo sapiens
ttgggttataccctttaaacgcttatttcttgttttcagaataggtgtttcaatatactatgccagcaatctgttatcctcttaaaattaactgcgaaatgggccaggcgcagtggttcaagcctgtaatcccagcactctgggaggcccagacaggcagatcatgaggtcaggagttcgaggccagcctggcccatatggtgaaaccctgtctctactaaaaataccagttagccaggtgtggtggcacacatctgtagtcccacctactcgggaggtggaggcaggagaatcccttgaacccgggagacagaggttgcagtgagccgagatcgtgccmctgcactccagcctgagcgacagagcaagaccctgtctcagggtaaaaaaaaaaaaaattaactgcaaaatgatattatccactctacatgaagtttcactggaaatttacctttttcagggcatactttgggtcttcaggaagaaccattatt

SEQ ID NO: 638799 - DNA, 441 bp, Homo sapiens
ttccctctacttctcaccaaaaatggagtcagagggtctatatgggaggtgaaggccagggacccataggcccacctctggttcttgcttttctctgcagtgagtgtgtcttcgtcctgcactggcattgatgacactgacaatcatggatccagtcacttgctccagacctctgcagtaccgctggccttcccagcacctctgagtaccatcatggggtgggatgcacaattttgcttccaggagacatttggcaatatcgggagacatttttggttgttacaactgggaggtactactggccagagttgctgctaaacatcctacagtgcttgggacagacggccaacaacaaagaattatctgggccaaaatgtcaatggtgctgaggttgacaaatatctgatgtagagktacacaggaccccccaggccacaccca

SEQ ID NO: 638800 - DNA, 364 bp, Homo sapiens
ttgttgaacatcttggagagagaaacttacttcttttaacagaacctgaaagttaagagaatgtactaccactactgccaactgctactactactacaactactgcccatgaaacttgagacttaagccaatgatagcagaagacagagccgagaaatggagagaaaccgagtcctgattatcctgttgagtcctgaatccwgctgtgcccaatgctgctttccagtttgtgtaagcccatgaattccctttttgtttaagccagtttaggttaggattttgttacttgcaaattaaagtgacctaatgatatagagatccagtatcaaaaataaacaaacgaaatcaagaaatacctaaattt

SEQ ID NO: 638801 - DNA, 497 bp, Homo sapiens
gaattcttaatgtttccttgaaagcatctcattattaaatgatttttaatacaaagtgtgacaaaacatgggacgatgaaatcgatatttaaagcaaagaatagatgtaattgattttatggggaggcaaatttggagaaagaaggaagtcaaagatttcctttcacaaaaagaaagggttatraagaaggaggcatgaaatcagcagtacagtcttgaaatgcttcttagaaaatatactactatttggggacttttaagatttgactcaacccagcattgatcctcaaaaccacacataggccaacctccttcagtgccatggaatgtacactgggactcgcctcacccagacacactcacacttaaaaagggggaacacagtcccacaaggagtttgaaaataaccctttccacatgaggtgagccacttttctttgatttaggacgcagaacaatgaagattcacagttgaataggaaatagacactctcaag

SEQ ID NO: 638802 - DNA, 482 bp, Homo sapiens
cagcattataatcatcagctgctaatagagcactaagatttagaaggctcaagcattaaatacttacaatcaaaagctacagaagttgccgactctccaaacagaaattaacatttgttttgaagtaagcactgtagctgcctcagattcatggtcatgacagttgtaaccattaataggttaaatgtacttatttaaagaaaaagattgtcataatgggtcacatccaactacatgctgcttatcataacacgcatttttaaaaataaattctatctcaattgtgttggtctctctatgattgacatggtttggctgtgtcctcacccaaatctcatcktgaattgtaatccctataatcctcatgtgtctagggagagaactggtgtgaggtgattggatcatagggttggtttcccttcatgctgttcttgtaatagtgagtgacttctcatgagatctgatggttttgtaagaggttc

SEQ ID NO: 638803 - DNA, 417 bp, Homo sapiens
tgaggtagaggtggtaaggactgaaatgtgaaaataagacaaaggatgaattaatgaatctgtgttgtatagatggtaaaaggaaaatccagtacttccagatccactctcgtccccatatttgtgtttcatggcacacctagtctgaatctagtagattattaacaatctgcctttcttgtctactatgtaacctcggcctcagtgactatatttmtgatcagtggatgctttaggaaaggcagggcaacaggatattttaaaaatccagttcttcctttatctcaattgccttaagactgaacaaaggcaagggaccaatgcacaaagaaaatggtgttgctgaaaacattctgatgcttttgttctccacggcctctgagcattgataccttggtggccaacaagctacctgac

SEQ ID NO: 638804 - DNA, 526 bp, Homo sapiens
ccttaacagtttactctgcattctaagtgtggtttccgtaagaacatactgtatacaactttgttcctaaggttatttctgttggtgccaaattgacttcaattcacaacaatcatrtggtgcattcccatgtaacttggatgttctgttctaaagaaaacatagggttttttcttaagcaaccatttctgtttatggaagattcacctccaccctggggattatacttagagtccgtctccaaatgtggatttaataattaaaagacatagcaaatactttgatttctacctaagaatagactgaagaccatgtcctatcagtagcagactggtggggcaccttagagcattgtggttaaaaagtatgggctctcctgccaaagtcctggggtaccaaaatcattgggttcaaatcctgtctctgacctttaatctctatgtgactgtaaaccaattatttaatctctatatttcccagtttgtaaaacaaagataatattacctaaattcaaagactattctga

SEQ ID NO: 638805 - DNA, 526 bp, Homo sapiens
ccttaacagtttactctgcattctaagtgtggtttccgtaagaacatactgtatacaactttgttcctaaggttatttctgttggtgccaaattgacttcaattcacaacaatcatatggtgcattcccatgtaacttggatgttctgttctaaagaaaacatagggttttttcttaagcaaccatttctgtttatggaagattcacctccaccctggggattatacttagagtccgtctccaaatgtggatttaataattaaaagacatagcaaatactttgatttctacctaagaatagactgaagaccatgtcctatcagtagcagactggtggggcaccttagagcattgtggttaaaaartatgggctctcctgccaaagtcctggggtaccaaaatcattgggttcaaatcctgtctctgacctttaatctctatgtgactgtaaaccaattatttaatctctatatttcccagtttgtaaaacaaagataatattacctaaattcaaagactattctga

SEQ ID NO: 638806 - DNA, 605 bp, Homo sapiens
tcaacttgtcaacttacacatagacacagacacactcgtgcacacacacacatagagacagagagagcatgctgggattttgatgggaatttcattgagtcttacaatctaagaatagtgtatatttctccacatattaaatatatattctttaatttatctcaayaatagtttataactttatgtatgggaagtcttttgtacttcctatacataaattacttcaaaatgtattaattacatgaattattttaatatgtatttattaactttctaagatatgggaattttctagctatctttttcttatgtttctggcttaaatacattatgacctgtcagtcagttgctgagaagtgtgttctaatctcccaacatgatgtggatttatcacttttcctactttcagattttgctttatgtattctgagaccacaatattatatacatgtaaatttagaattgagagttgtttatcttcctggtcaggggtcaactcctcctactgttagttagagaaaaattgtacaaaaacctgacaatctagatacaaaggcctacaggcaaggtcatctccttagaagggagagtgagtggacaaatgc

SEQ ID NO: 638807 - DNA, 572 bp, Homo sapiens
tgctagaactgagacccaggaggcagaggtagcagtgagccaagatcatgccactgcactccagtctgggctacagaagagcaagactccatcttagaggggraaaaaaaaaaaaaggctccatctctcaatactgccacattggggattaaattccaaaatgagttttggaggggacagatagtcaaattgtagtttatactcacatgcttatttctatttttatacctctgatttccttataagaagcatcatgaagactaatattgtggcttattcaactttgaattttctacagatgatacttctgtgttctacacctcagtttgaaccaatttagagattgacagaggagtaagacataaatagagatcagaatgtcacttgtattacttgggtgagattataatttatcctcaaaataggatgcttctgagagtgaaagtggcactaacctgatgagatactggcccaacatgcatgaactgggatatatagtcatgctgttcattactggaaaggaaaaacagctcttggaggacatggtttatctgaaccttagaattaggcag

SEQ ID NO: 638808 - DNA, 546 bp, Homo sapiens
caagaactgcatgagggtaactgcccccatgagtaaattacctcccactgggtccctcccacaacatgtggggattatggaaactacagttcaagatgagatttgggtggcagtgcagccaaaccatatcaccatccatatgccctagggaggaatgaatgacagagcagaatgattccaggaatatgtgttagtagagctttctgggcatggaaggaaacaccaaaaatkgggcaataacattcctctcctctattcaacattatacactcaacatgtacttgttaaattaaatcaattctctaaattatgattgttcatcagcttctctgaatctcacttttacttatgtttttgatatgatgtcttacacattctgactgctacaaaaattagtttcatatatacctatgttcccactaaattgtaaaatttttgagattctaggtcctgtgttattcatttttattccccatggagcctaaaagataattgcatttaattttccttttattaaaatctggcattggttatgttaaccaaaaa

SEQ ID NO: 638809 - DNA, 546 bp, Homo sapiens
caagaactgcatgagggtaactgcccccatgagtaaattacctcccactgggtccctcccacaacatgtggggattatggaaactacagttcaagatgagatttgggtggcagtgcagccaaaccatatcaccatccatatgccctagggaggaatgaatgacagagcagaatgattccaggaatatgtgttagtagagctttctgggcatggaaggaaacaccaaaaattgggcaataacattcctctcctctattcaacattatacactcaacatgtacttgttaaattaaatcaattctctaaattatgattgttcatcagcttctctgaatctcacttttacttatgtttttgatatgrtgtcttacacattctgactgctacaaaaattagtttcatatatacctatgttcccactaaattgtaaaatttttgagattctaggtcctgtgttattcatttttattccccatggagcctaaaagataattgcatttaattttccttttattaaaatctggcattggttatgttaaccaaaaa

SEQ ID NO: 638810 - DNA, 617 bp, Homo sapiens
cctacgcctgatttgcactgcggactctgcttgaccttgaagctcatctgtcacctcccagaggcctttctggccccactctgctgcgccatctctcttagcacagctgccctcctcatgccactctccccctgatctcgcctcctcgcttgtgcaatactgtagaaggcccttggttactccttcatggtttctcatttacattgaaagcaggttaatcttttctttcatgctctgatacatagcagtgtcaaagacctgaaactaaacccagtgtttaccgtgttttargtttcttcattagaccattttacaagatgatgttgggaaagcagataaccctgaatgacatggaatctgtggtaagtaaatgcacgtcacacactggccatcaccgggcactcgtgtcttatgagaaggtattggagagccatatttgtagtctcagccacttttatgggtgttgcattccatgtgaacaacaggagacatttaattgcttgaaaagttcattgatctaattcttgtaataaatcattgttcacatttcctggaaccatggtacctagggtggatacatccaaatcccagttgcctctgcttacccggcataggac

SEQ ID NO: 638811 - DNA, 532 bp, Homo sapiens
caggtacatgtgggtaaccctgggaactcttctttagctttcaaggggcatttttcttcttgacgggctgtaacacaactttgctggaccatcagaaacaaccagcaggagctgcaggtgttaattttcatctcattgtagcagcaccttyttgtcatgccaagacgccacactccaattacaaccatttctctcttccagcaaagttacagaaattccaagaggccttggggcatgaaccagcacctcttctaatccaaagcaaatgtgaatgtttcatttgtgcctcggttttagaatttaggtacttgaaaaaatagtgagattgttgacttagcgatgtaaatacatgaccaggagtgggtgatgttggaagggccattggtttttctctctgttttatggttctgttgtcatggcgacatttgtcttgtgaggctcagcatggcaggctccggtttttctaccattccctctgctttgcccccacgctgttattcaggctggactaatcctcaaagtcagtttcaga

SEQ ID NO: 638812 - DNA, 532 bp, Homo sapiens
caggtacatgtgggtaaccctgggaactcttctttagctttcaaggggcatttttcttcttgacgggctgtaacacaactttgctggaccatcagaaacaaccagcaggagctgcaggtgttaattttcatctcattgtagcagcacctttttgtcatgccaagacgccacactccaattacaaccatttctctcttccagcaaagttacagaaattccaagaggccttggggcatgaaccagcacctcttctaatccaaagcaaatgtgaatgtttcatttgtgcctcggttttagaatttaggtacttgaaaaaatagtgagattgttgacttagcgatgtaaatacatgaccaggagtgggtgatgttggaagggccattggtttttctctctgttttatggttctgttgtcatggcgacatttgtcttgtgaggctcagcatggcaggctccggtttttctaccattccctctgctttgcccccacgctgttattcaggctggaytaatcctcaaagtcagtttcaga

SEQ ID NO: 638813 - DNA, 464 bp, Homo sapiens
cagaacattggagatttgtttcacagtagtagcaataattcagaagctttgcttctgatgcgattatgctgaaaaatattttacagaaatagtttttaaagtttcrtgtgtttgtttgtctttccttgaatgatgtggaccagatattgaattctcacatctcatgagtaaaatgtttggttcagaaacaattttctgtgtgttcattgccatgactactggtagatgcttcgtaatactgatggaggacattaggtcgctccataactacaggtttttgtttgagttgatgttcttcagcatgcatttatctgcagttacacaaccagcctttagtgtcatttattcctgtgcttttcagacttttttgactcacatggaatatattttatgcagtgacctcaacaggcatgtgtttctgtcatttttctttacactcacagatattcacatgtagacacaca

SEQ ID NO: 638814 - DNA, 566 bp, Homo sapiens
cacaggtcaatgtaagaaaataggtaagcagttaaaactaatattaatagaaatgaaatatgtgacaagggagaaatatgtgacttgaagtcagaaggaaaagtagtctatttaaaaattagcaaaaatgwgtatggataaggaaaaaaataatttgaacatttccatcatgccatatatttgtaaaatgctgatatttataaatctaaatatttactgcaatattcctgtacttgatatgtcaaaaacaaatgaaaaaataacaaacagtgaaacaaaaacctggaaacaaactgaatacttttccttggagaaaaaaaataaacttagtacagccatcctttggaatttcatgcggacactgaaagaaagaaagcagcagtctactagttgctttgggaagatatggataggttaaaaaaataaatatgcaaacacatgtataatatggatctaattttttacaaaagaatcagtgacaattgtttttgtttgtgtgtgcacattctgatgtaaatatatacaaaagcaagttactaagcatgcgccacaatttaagtccagaa

SEQ ID NO: 638815 - DNA, 575 bp, Homo sapiens
atcatcatgtctgtacatggtgwgtgggtgtgtgtcatgaaaaggtagatgaaaatctgttcaataacctgataatgataacaaggatgggaattcagacggtttttactttttccttacacagttctgaaattgttgtaatctattacaacagcatatattttaaaaacactcctactctacggtagttttagacttacagaaaaattgtgaagacagtagagagatttgccacatagcccacatccagcttcctctgtgattaacaccttatcttagtatggtagatctgttgtaggtaattaaggcatccaatgcattgttattaactaaggcccacactgttcagtacctgctgttctttcggccctaggatcccgttactgtttgctgtcatgtctccttactccttaggcttgtcttgaatgtggcagcttttcagacgtatctgttttatgtgtgtggattacagagcaggtctttcatagaataagccttgatagtgatttctctgatttttttctcatgaggaggttggggttatgggtttggggaggaccacggaggtaaaacac

SEQ ID NO: 638816 - DNA, 575 bp, Homo sapiens
atcatcatgtctgtacatggtgagtgggtgtgtgtcatgaaaaggtagatgaaaatctgttcaataacctgataatgataacaaggatgggaattcagayggtttttactttttccttacacagttctgaaattgttgtaatctattacaacagcatatattttaaaaacactcctactctacggtagttttagacttacagaaaaattgtgaagacagtagagagatttgccacatagcccacatccagcttcctctgtgattaacaccttatcttagtatggtagatctgttgtaggtaattaaggcatccaatgcattgttattaactaaggcccacactgttcagtacctgctgttctttcggccctaggatcccgttactgtttgctgtcatgtctccttactccttaggcttgtcttgaatgtggcagcttttcagacgtatctgttttatgtgtgtggattacagagcaggtctttcatagaataagccttgatagtgatttctctgatttttttctcatgaggaggttggggttatgggtttggggaggaccacggaggtaaaacac

SEQ ID NO: 638817 - DNA, 575 bp, Homo sapiens
atcatcatgtctgtacatggtgagtgggtgtgtgtcatgaaaaggtagatgaaaatctgttcaataacctgataatgataacaaggatgggaattcagacggtttttactttttccttacacagttctgaaattgttgtaatctattacaacagcatatattttaaaaacactcctactctacggtagttttagacttacagaaaaattgtgaagacagtagagagatttgccacatagcccacatccagcttcctctgtgattaacaccttatcttagtatggtagatctgttgtasgtaattaaggcatccaatgcattgttattaactaaggcccacactgttcagtacctgctgttctttcggccctaggatcccgttactgtttgctgtcatgtctccttactccttaggcttgtcttgaatgtggcagcttttcagacgtatctgttttatgtgtgtggattacagagcaggtctttcatagaataagccttgatagtgatttctctgatttttttctcatgaggaggttggggttatgggtttggggaggaccacggaggtaaaacac

SEQ ID NO: 638818 - DNA, 474 bp, Homo sapiens
cctctccatttatatacttatttatttaatcatttatttagatcagtatggactcatggatattaatttgcacctttgattataatctaactttatttattgttgctcatattatcccagttttggacatcagaggcattttcagttgcctcttgtgtctcaatcattatttttgcagcctttttttttttctagctctacaggatgctccaggctgacttgtatatttcctgccccaagactcaccgtttacccacggatgcccagttccttttatgtgagaatggtatgagaaactgaaatcaggttccagattgcttgggggctccttgctactgcattcttattgcttctggccctctcagcagacacagggaggaaatacttgtgtgtatactaacctgtgtacattcayacgcccacaaatgtttctggatgtacctgtccgtatcaatactcaccggaatcagaatt

SEQ ID NO: 638819 - DNA, 411 bp, Homo sapiens
atctgtcctcctcaacctcttcctcctcctcctccacctcttcctgatcttcttcctcaaacatttttctagtggtaaaatatacataacataaatttaccattttaaccatttttaagcgtgcattttgctggcattcagtacattcacatttttacgtaaccatcatcactatgtatctccagaactcttccatcttcccaaacccaaaccctgtcctcattaaacactctctacccgttccccctttgctcagtccctggcacctgccactcgctttctctctctatgactttggttacactcaggacgtcacgttaggggaaccatgtgtatgcrccctgtgtcgggctcactgcactcagcaccatgctctcaggctcctccaggccaaggcaagtgtcggaattc

SEQ ID NO: 638820 - DNA, 570 bp, Homo sapiens
caactatttaaaaaataattcctctaaactatattatatcttgtgcaaaattatttagaaatagttaataagacaatttaaccaaaactttgccaaaaacttcagcttttgagccacactattgcctggctcccaactcacccgctccaaacaaacaagcaacttgtaaagaaggcatagaaacatatccccaaaaagtaaggcagaaggtraacaaattaaatgctgagaactcaaagagtgtagaagatttaattttgaaattaagtaattgcattcagaataaatcaacttttaataaatgccttctgattcattttctgtaataattagattcagttatattcagggaagaaatgaaattgtaaagccctgtaattgcacttcatccaaatttggcagaatttacaaaggagtcatagaaccttaatttcagagcttttattatgttttattatgtttattttttatttttcctcctgaatagaaagggaaaggcagtagctgagaaaacagaggcttaaatatgtgtatatttcaatatgaaaacataaaatggagactatcatt

SEQ ID NO: 638821 - DNA, 570 bp, Homo sapiens
caactatttaaaaaataattcctctaaactatattatatcttgtgcaaaattatttagaaatagttaataagacaatttaaccaaaactttgccaaaaacttcagcttttgagccacactattgcctggctcccaactcacccgctccaaacaaacaagcaacttgtaaagaaggcatagaaacatatccccaaaaagtaaggcagaaggtgaacaaattaaatgctgagaactcaaagagtgtagaagatttaattttgaaattaagtaattgcattcagaakaaatcaacttttaataaatgccttctgattcattttctgtaataattagattcagttatattcagggaagaaatgaaattgtaaagccctgtaattgcacttcatccaaatttggcagaatttacaaaggagtcatagaaccttaatttcagagcttttattatgttttattatgtttattttttatttttcctcctgaatagaaagggaaaggcagtagctgagaaaacagaggcttaaatatgtgtatatttcaatatgaaaacataaaatggagactatcatt

SEQ ID NO: 638822 - DNA, 570 bp, Homo sapiens
caactatttaaaaaataattcctctaaactatattatatcttgtgcaaaattatttagaaatagttaataagacaatttaaccaaaactttgccaaaaacttcagcttttgagccacactattgcctggctcccaactcacccgctccaaacaaacaagcaacttgtaaagaaggcatagaaacatatccccaaaaagtaaggcagaaggtgaacaaattaaatgctgagaactcaaagagtgtagaagatttaattttgaaattaagtaattgcattcagaataaatcaacttttaataaatgccttctgattcattttctgtaataattagattcagttatattcagggaagaaatgaaattgtaaagccctgtaattgcacwtcatccaaatttggcagaatttacaaaggagtcatagaaccttaatttcagagcttttattatgttttattatgtttattttttatttttcctcctgaatagaaagggaaaggcagtagctgagaaaacagaggcttaaatatgtgtatatttcaatatgaaaacataaaatggagactatcatt

SEQ ID NO: 638823 - DNA, 371 bp, Homo sapiens
gaaatggatggcagtcatggacctgtcatgattccmtatgtagtcataccacttaggcttattttgtgtagaaataattaatatgtagaagaattttgtacaatttgctataatgtattataatgtatacagatatatgtagtttatatgtttcaaaagctattttagtcttaacatagtttttgaattgaattctattacaagtttatccataaaattataccaaataaacactttataatgatgtgacttgttatttttatcctttccttttactctgaaaaatattgctgattgcctgataaatttcatggtcatatacctttataccagaccctgttgcagcaatatgtttaaaagaatgcacccag

SEQ ID NO: 638824 - DNA, 371 bp, Homo sapiens
gaaatggatggcagtcatggacctgtcatgattccctatrtagtcataccacttaggcttattttgtgtagaaataattaatatgtagaagaattttgtacaatttgctataatgtattataatgtatacagatatatgtagtttatatgtttcaaaagctattttagtcttaacatagtttttgaattgaattctattacaagtttatccataaaattataccaaataaacactttataatgatgtgacttgttatttttatcctttccttttactctgaaaaatattgctgattgcctgataaatttcatggtcatatacctttataccagaccctgttgcagcaatatgtttaaaagaatgcacccag

SEQ ID NO: 638825 - DNA, 481 bp, Homo sapiens
taagtgtgcagtgtttatagaggctacagcagtgtccagtgatgtctaagaccttctcattcactcaccactcattcatgactcacccagagcagcttccactctggaaaactccactcatgctaagtgccctataacaagtttaccatttttaaaatcttttatatcatagctttacggtaccttttctatgtttagctgtttggtccacaaataccattgtgttcctgctgcccacagcattcagcacagtaacagctgtgcatgtstgtaggctggcagcaacaggctacgccatacagcttatgtttgtagtaggctgcaccatctaggtttgtgtatgtgcattctgcgatgctcacacaatgacaaaaagttgcctaataacgcatttcttagactgcatccccgtggttaaatgatgcatggctgttcaccagtgatttagcaccaaatagtctcaaaactataacattagcct

SEQ ID NO: 638826 - DNA, 505 bp, Homo sapiens
gaattcattattgaagaaagaaaatgtagtgtagcctaagtgtgcagtgtttatagaggctacagcagtgtccagtgatgtctaagaccttctcattcactcaccactcattcatgactcacccagagcagcttccactctggaaaactccactcatgctaagtgccctataacaagtttaccatttttaaaatcttttatatcatagctttacggtaccttttctatgtttagctgtttggtccacaaataccattgtgttcctgctgcccacagcattcagcacagtaacagctgtgcatgtctgtaggctggcagcaacaggctacgccatacagcttatgtttgtagtaggctgcaccatctaggtttgtgtatgtgcattctgcratgctcacacaatgacaaaaagttgcctaataacgcatttcttagactgcatccccgtggttaaatgatgcatggctgttcaccagtgatttagcaccaaatagtctcaaaacta

SEQ ID NO: 638827 - DNA, 481 bp, Homo sapiens
taagtgtgcagtgtttatagaggctacagcagtgtccagtgatgtctaagaccttctcattcactcaccactcattcatgactcacccagagcagcttccactctggaaaactccactcatgctaagtgccctataacaagtttaccatttttaaaatcttttatatcatagctttacggtaccttttctatgtttagctgtttggtccacaaataccattgtgttcctgctgcccacagcattcagcacagtaacagctgtgcatgtctgtaggctggcagcaacaggctacgccatacagcttatgtttgtagtaggctgcaccatctaggtttgtgtatgtgcattctgcgatgctcacacaatgacaaaaagttgcctaataacgcatttmttagactgcatccccgtggttaaatgatgcatggctgttcaccagtgatttagcaccaaatagtctcaaaactataacattagcct

SEQ ID NO: 638828 - DNA, 555 bp, Homo sapiens
gatctaaacccaacagggcctgtctgctcagacttttcttggcgtctctgtgcactgtaccttcctccagagtgtggagcaggaccatctctggaatgagcctcttctgacccacaaccagattagagtcttgccttgggtaggtaaaaggaagaaggagaaggtcagaaatactgtttctcaaggactgcttctgaggcgtaaagtacccaaacattataacaaaagactgtaacaaggactgttgggattatgaacaaaaacaatatatatacaaccaaaacatcacagggacaayggcacattattggaatcaagaggaagtagaggaagcaaagcagaagaaatactgaaaagaactgtagtttagaactttccaaaatcagtgacagacacagaaccacagatccaggtgcctcagaagagaccagtcagcattaatacagatcatataaaattatagaacaacagtgacaaacagtaaatcttggaaaataaattacctgcagaagaacaaagacaagaattacagccaacttcttactaggaattatg

SEQ ID NO: 638829 - DNA, 554 bp, Homo sapiens
agggagtgaagttcagccccggtgtctgcgcctgccgggtcctcccaggagtggccgaatgattgtgcaaccctgcttcagctctttcatgaaccccagtgtgccttcacttagtgactagagtgggatgaagccctcctcctgatggctggtgaacccacattttcccagcctgaaactaattggctggtgtggtgatccgtgacccaggacttattagggtcatgtttgaggactccagcctcagagtcatatggtcatcaaggggaaaggacacacatcataagtccargagagaacctagagctgaatcccctctctggaaaacattgaacacagaattgagagaatgtgccatttatgataaaaccgagagacaaattccagtgagagaacaggaaacttccacttctgacagttttgctgaatttcatcaattgtaagtcagcaacatattgacggtagaaaaaaatcagattccctgataaattatcagggcttgatctgtaatcgaatgctctcatggtagatatgtgttaataaaagacagccaa

SEQ ID NO: 638830 - DNA, 599 bp, Homo sapiens
gaaaaataactcatttcctaaatgcatatcgtatataataaaaaggttgttcaaatatgtattatgctgcaactcagattattttaatgggaaaatgttggggtaataaatcaatgtttcaatttcacagaaaatagctttaattgcacagatatcatgttattctagttaygtttataggaatctgtgaaaaataaaattgcttttctaatagtttgttaggtggttgtgaatctttagtaaatggatttgacaaacgaggaactggtaatcattttctaaatacatgtgtctctgttgggattcccgtttcagaacacattgagaaataggaggagctggggaataagaaggccgtgtcttcgttttggatcatatctaatgatttgtgttaagcgaatagaactttcaagagtgctatgcccgcatttgcccatgcattgctgtttatgttggctgtttacggggacaacttacaagacactaggtctctggaaacctgcgtttcgtggggctctgcagctcccgtgtcttttaggggaaatgattttggatggcaggaaaaggtccaactagcagtttttcattctgaggaccta

SEQ ID NO: 638831 - DNA, 486 bp, Homo sapiens
tagctttcacagttagctctgttgtccacctcaaatcatttgtayacatgtgaagaaggggaaggcttgattgttttccaatatccagttcttcaagcaccaattattgagattttaaaaaagtttcacctctgatttgcagtggagcctttgctataaatcaggtagctgtcctcatgtcctcatgtgggttttctagactccattttaattccattggcatattgttttctcataggccaataccaagctgccttacctgccagaaattttattaatttatgcaatttcatggagtcacttgtcttgtttttcattgtgaatactacctaagtaattctttggtgctgcatttgtttataaatttagaatcagtctgtccattgccacaaaaaatactggaatattgattgatattgcatttaatgtatatccaatttgtaaaaaatgacatcttaaaaatgttgcttattaaaattcatgaac

SEQ ID NO: 638832 - DNA, 486 bp, Homo sapiens
tagctttcacagttagctctgttgtccacctcaaatcatttgtacacatgtgaagaaggggaaggcttgattgttttccaatatccagttcttcaagcaccaattattgagattttaaaaaagtttcacctctgatttgcagtggagcctttgctataaatcaggtagctgtcctcatgtcctcatgtgggttttctagactccattttaattccattggcatattgttttctcataggccaataccaagctgccttacctrccagaaattttattaatttatgcaatttcatggagtcacttgtcttgtttttcattgtgaatactacctaagtaattctttggtgctgcatttgtttataaatttagaatcagtctgtccattgccacaaaaaatactggaatattgattgatattgcatttaatgtatatccaatttgtaaaaaatgacatcttaaaaatgttgcttattaaaattcatgaac

SEQ ID NO: 638833 - DNA, 486 bp, Homo sapiens
tagctttcacagttagctctgttgtccacctcaaatcatttgtacacatgtgaagaaggggaaggcttgattgttttccaatatccagttcttcaagcaccaattattgagattttaaaaaagtttcacctctgatttgcagtggagcctttgctataaatcaggtagctgtcctcatgtcctcatgtgggttttctagactccattttaattccattggcatattgttttctcataggccaataccaagctgccttacctgccagaaattttattaatttatgcaatttcatgragtcacttgtcttgtttttcattgtgaatactacctaagtaattctttggtgctgcatttgtttataaatttagaatcagtctgtccattgccacaaaaaatactggaatattgattgatattgcatttaatgtatatccaatttgtaaaaaatgacatcttaaaaatgttgcttattaaaattcatgaac

SEQ ID NO: 638834 - DNA, 486 bp, Homo sapiens
tagctttcacagttagctctgttgtccacctcaaatcatttgtacacatgtgaagaaggggaaggcttgattgttttccaatatccagttcttcaagcaccaattattgagattttaaaaaagtttcacctctgatttgcagtggagcctttgctataaatcaggtagctgtcctcatgtcctcatgtgggttttctagactccattttaattccattggcatattgttttctcataggccaataccaagctgccttacctgccagaaattttattaatttatgcaatttcatggagtcacttgtcttgtttttcattgtgaatactacctaagtaattctttggtgctgcatttgtytataaatttagaatcagtctgtccattgccacaaaaaatactggaatattgattgatattgcatttaatgtatatccaatttgtaaaaaatgacatcttaaaaatgttgcttattaaaattcatgaac

SEQ ID NO: 638835 - DNA, 443 bp, Homo sapiens
taaaaatgttgcttattaaaattcatgaacatagaatagtctctatcttttaagtcatccttaatttcactcaacaatgttttggaatttctagtgtagacgttttcaaaactttggttatatttattctaagtacttctttttttaaattacattatatataatactgttttttcattttcttttatttttaaatgttggtaatagagacacttaactgattttggatattgacttcgtattcaggaaacttttaacttgtcatttctaagtgttttttatggttctttaggtttctagatacacagttataacaacttaggagaaagatggttttatgtcttttgttccagtgttaacatcttttccttttctctttctgtttctttgttacagtgctggggtrtctatgacaacattgagcataaaacccaatggtggat

SEQ ID NO: 638836 - DNA, 317 bp, Homo sapiens
gtgatctaatcacttaccaccaggtcscttcctctacacatgtggattacaattcaagacgagatttgggtggtgacacagagccaaaccatgtgaatgttctaactggttaacttaatacataacatatacacaattggtttatttcttccttggaagaggcagtgtagacagagtctaggaacccctgctgtggagacagaggatcctgagtttgaatccaagcccctccatttaccgacggcatcctacatgtgtgatggcaccctacgcagggtcaggattatcaatatcactgtctttcacctccacatttt

SEQ ID NO: 638837 - DNA, 317 bp, Homo sapiens
gtgatctaatcacttaccaccaggtcgcttcctctacacatgtggattacaattcaagacgagatttgggtggkgacacagagccaaaccatgtgaatgttctaactggttaacttaatacataacatatacacaattggtttatttcttccttggaagaggcagtgtagacagagtctaggaacccctgctgtggagacagaggatcctgagtttgaatccaagcccctccatttaccgacggcatcctacatgtgtgatggcaccctacgcagggtcaggattatcaatatcactgtctttcacctccacatttt

SEQ ID NO: 638838 - DNA, 317 bp, Homo sapiens
gtgatctaatcacttaccaccaggtcgcttcctctacacatgtggattacaattcaagacgagatttgggtggtgacacagagccaaaccatgtgaatgttctaactggttaacttaatacataacatatacacaattggtttatttcttccttrgaagaggcagtgtagacagagtctaggaacccctgctgtggagacagaggatcctgagtttgaatccaagcccctccatttaccgacggcatcctacatgtgtgatggcaccctacgcagggtcaggattatcaatatcactgtctttcacctccacatttt

SEQ ID NO: 638839 - DNA, 576 bp, Homo sapiens
caagcatgagaatcacttagaggccttgttaaaacgcaggtgctgggcgccacctcgagtttcgaatttcagactcaggtatgaggcccaagagtctgcattccttacccgtttccaggtgaggtggatgctgctggccggatgcacatcctgataagactttgttaagacccagagctatccttccgtctcatgtcccacattgaggtaatatttctyaatacacacatcaagtctccacacacgcatgaatctctggtgttttactttctgttccactgatctatgccacaatgcctggttactactgttgtattgtaagtcttgacacatgacaagtgcatgaaatgccctcttgtctgtgttggccactttgctgtaaaagcgacttggttatctgtgattcttttttcatatagattttagagtcatcttggtaatgtctgtaacaaaccttattggtattgtgagtgagtagcactacaaattttgatatattttgtagaaattggtatttttttcttccacaatatttccttctataaataagacatatcccttcatttatttacctgt

SEQ ID NO: 638840 - DNA, 576 bp, Homo sapiens
caagcatgagaatcacttagaggccttgttaaaacgcaggtgctgggcgccacctcgagtttcgaatttcagactcaggtatgaggcccaagagtctgcattccttacccgtttccaggtgaggtggatgctgctggccggatgcacatcctgataagactttgttaagacccagagctatccttccgtctcatgtcccacattgaggtaatatttctcaatacacacatcaagtctccacacacgcatgaatctctggtgttttactttctgttccactgatctatgccacaatgcctggttactactgttgtattgtaagtcttgacacatgacaagtgcatgaaatgccctcttgtctgtgttggccactttgctgtaaaagckacttggttatctgtgattcttttttcatatagattttagagtcatcttggtaatgtctgtaacaaaccttattggtattgtgagtgagtagcactacaaattttgatatattttgtagaaattggtatttttttcttccacaatatttccttctataaataagacatatcccttcatttatttacctgt

SEQ ID NO: 638841 - DNA, 576 bp, Homo sapiens
caagcatgagaatcacttagaggccttgttaaaacgcaggtgctgggcgccacctcgagtttcgaatttcagactcaggtatgaggcccaagagtctgcattccttacccgtttccaggtgaggtggatgctgctggccggatgcacatcctgataagactttgttaagacccagagctatccttccgtctcatgtcccacattgaggtaatatttctcaatacacacatcaagtctccacacacgcatgaatctctggtgttttactttctgttccactgatctatgccacaatgcctggttactactgttgtattgtaagtcttgacacatgacaagtgcatgaaatgccctcttgtctgtgttggccactttgctgtaaaagcgacttggttatctgtgaytcttttttcatatagattttagagtcatcttggtaatgtctgtaacaaaccttattggtattgtgagtgagtagcactacaaattttgatatattttgtagaaattggtatttttttcttccacaatatttccttctataaataagacatatcccttcatttatttacctgt

SEQ ID NO: 638842 - DNA, 527 bp, Homo sapiens
gggaaatgtagcaaactcataattgccacttaaacaccacggccacctcctatgtgcaaccacctctgcgtgctgctgcctttcaaggcctggatcgctcatttctatcagaagctgttactctttyttatcaaagctatggagctgaatacaaaaacagtttgtttaaattatgatatcaaaacttttagctaattcaacagtgaagacaactttcaccaaagcaatgcttatctcttgacttcttaaaatcatttaaaaatatattcagaaatcatttaaatgcaaattttaaaagacataggacacagactgaatttccatgaggtccgaccactctggaatcccctggaaaaataatacgatacaccaatatcaataatatttcttaatgtttttatcaccggtcatttgtcaaaagatttcaaagatgcttttaaataagtatcacgaaatttcaaaatttatacataaatacgaattgtaaccctcatatgtattgttcactggtggtatagaatatttaa

SEQ ID NO: 638843 - DNA, 527 bp, Homo sapiens
gggaaatgtagcaaactcataattgccacttaaacaccacggccacctcctatgtgcaaccacctctgcgtgctgctgcctttcaaggcctggatcgctcatttctatcagaagctgttactcttttttatcaaagctatggagctgaatacaaaaacagtttgtttaaattatgatatcaaaacttttagctaattcaacagtgaagacaactttcaccaaagcaatgcttatctcttgacttcttaaaatcatttaaaaatatattcagaaatcmtttaaatgcaaattttaaaagacataggacacagactgaatttccatgaggtccgaccactctggaatcccctggaaaaataatacgatacaccaatatcaataatatttcttaatgtttttatcaccggtcatttgtcaaaagatttcaaagatgcttttaaataagtatcacgaaatttcaaaatttatacataaatacgaattgtaaccctcatatgtattgttcactggtggtatagaatatttaa

SEQ ID NO: 638844 - DNA, 530 bp, Homo sapiens
gcaaactcataattgccacttaaacaccacggccacctcctatgtgcaaccacctctgcgtgctgctgcctttcaaggcctggatcgctcatttctatcagaagctgttactcttttttatcaaagctatggagctgaatacaaaaacagtttgtttaaattatgatatcaaaacttttagctaattcaacagtgaagacaactttcaccaaagcaatgcttatctcttgacttcttaaaatcatttaaaaatatattcagaaatcatttaaatgcaaattttaaaagacataggacacagactgaatttccatgaggtccgrccactctggaatcccctggaaaaataatacgatacaccaatatcaataatatttcttaatgtttttatcaccggtcatttgtcaaaagatttcaaagatgcttttaaataagtatcacgaaatttcaaaatttatacataaatacgaattgtaaccctcatatgtattgttcactggtggtatagaatatttaaatctaggaatttt

SEQ ID NO: 638845 - DNA, 614 bp, Homo sapiens
tcccactgcgtcctctgatgccagcagcactgggctcagctgtcccctgatggcaggagattccagctgtagccaccactcgggcctcagatggtggtcattgtcctccttagccactctgtaccagaacrccctagaccctgttcccagcatcgcagagcacagatgtcaccaaggcagggggtacttggtgaaaggcccaaagggagaacctggcagggaggagcaggcaccggtgctgagcacatgccctgcctctctgggtgcctctgggctcctctcctctgcccaccatggggcaggtgtcagcctctctgcccagccccagcctgtggacagaaagcctcggcacaggactgtgagggctaggatgagacggcacgtcggcctgagactatcccaggtctcaaagtccagatcacacacttttcaacaagcctcctgtggaagttccaccacaggccattctggggcgtcctcacgccagcccctgggtccctctcacccacagtcactttcttccacggagatcctgcctggtccctcaggacagcctcgaagcatccatggctcctccctctccacccacctcacaccaccccctgcccagttct

SEQ ID NO: 638846 - DNA, 587 bp, Homo sapiens
ctattcaggaggctgaggtaggagaattacttgaagccaggaggcacaggtttcagtgagccgagatcacaccactgcactccagcctgggcgacaragcaagactccatctcaaaaaatatctatatatttttttccattttttctaaaagtttacagtcttagctttaatactaggttcatgtatgatgtattttgagtttacttttgtatgagatgaggtaaagataaaatgtgtgtgtgtggacaaatatacatttgtataaagatatccaattgtttcagcaccatttattgaaaagattatccttatttattgaattgactttctgcatttggcaaagttcagttgggcctttacatatcagtgtattctggaatattctgttctactcacctatattcctatctttatgcctgtatcatactgtcttgattaaggtagctttataataagcctcaaatcttatcataaggtggtataagtcctctgactttgttcttattttttaaaatgagtttgattactctggcccatctatatttttatacaaatttaaacatcagcctttttacccaaaaaaacc

SEQ ID NO: 638847 - DNA, 616 bp, Homo sapiens
tttaatgtaaagggagcatggctctaagttaatttaattaatcaagcctctactgcaagaaacaattgggtgctatggacagagccatgacaagacaattccactaccctaatatgacggctgcggttgagattttagttagatatttaccatggtgattttaagaagtgatgtcttggaattacagtaratatttatatgtatatgtataaatatatataaatacatacatatatacatatatatgtgtgtatgttacctgaattccaaaaatatgactattgcttagtgcttaaatcttattaaggtattaaaccttcaccactctacttaaacatcatggcttccaacatgaattaggactctaataagcattaagaaataatcatatttttggaaatcaggtaatttataaggttttggtttggttggttgggtggctgggtgggtgggtttttggtgggttttttttgataatttcttatctaactagctaaattattatttattgtggatattttggtaatataaggtctaaatttcaatttaagacatagtcattcacatgtttgatttgcagcgcctctcaactgcttctattcatttgtagcaacta

SEQ ID NO: 638848 - DNA, 616 bp, Homo sapiens
tttaatgtaaagggagcatggctctaagttaatttaattaatcaagcctctactgcaagaaacaattgggtgctatggacagagccatgacaagacaattccactaccctaatatgacggctgcggttgagattttagttagatatttaccatggtgattttaagaagtgatgtcttggaattacagtagatatttatatgtataygtataaatatatataaatacatacatatatacatatatatgtgtgtatgttacctgaattccaaaaatatgactattgcttagtgcttaaatcttattaaggtattaaaccttcaccactctacttaaacatcatggcttccaacatgaattaggactctaataagcattaagaaataatcatatttttggaaatcaggtaatttataaggttttggtttggttggttgggtggctgggtgggtgggtttttggtgggttttttttgataatttcttatctaactagctaaattattatttattgtggatattttggtaatataaggtctaaatttcaatttaagacatagtcattcacatgtttgatttgcagcgcctctcaactgcttctattcatttgtagcaacta

SEQ ID NO: 638849 - DNA, 616 bp, Homo sapiens
tttaatgtaaagggagcatggctctaagttaatttaattaatcaagcctctactgcaagaaacaattgggtgctatggacagagccatgacaagacaattccactaccctaatatgacggctgcggttgagattttagttagatatttaccatggtgattttaagaagtgatgtcttggaattacagtagatatttatatgtatatgtataaatatatataaatacatacatatatacatatatatgtgtgtatgttacctgaattccaaaaatatgactattgcttagtgcttaaatcttattaaggtattaaaccttcaccactctacttaaacatcatggcttccaacatgaattaggactctaataagcattaagaaataatcatatttttggaaatcaggtaatttataaggttttggtttggttggttgggtggctgggtgggtgggtttttggtgggttttttttgataatttcttatctaactagctaaattattattkattgtggatattttggtaatataaggtctaaatttcaatttaagacatagtcattcacatgtttgatttgcagcgcctctcaactgcttctattcatttgtagcaacta

SEQ ID NO: 638850 - DNA, 570 bp, Homo sapiens
ttgaaggaagttggttttggttttgtagttgctgttgtttgyttttttttttttttttttttgagacagagtcaccctgtgacacccaggctggagtgcggtggtgcaatctcagctcactgcaacctccatctcccgggtttaagcgattctctcgcctcagcctaccgaggagctgggactacaagtgtgtgcaccaccacacccagctaattttgtatttttagtagaaatggggttccaccgtattggccaggttggtctcgaactcctgacctcaagtgatccacccggctcgccctctcaaagtgctgggatgacaggtgtgagctaccacacccagcctgaaggaagttataaaaattgacttgatcccctggtgtgcatacatctgagtgttttcctctgaagatctcctgtagcttcctggttgagaccccgcttagcaattcccgtgccgaggttcaccatttagtgaggaacgtgggaactctgagcctgactttggcccctgagtgccctgctggagttgcacagtggcagagtcaagtcaaagggtgccggagcctc

SEQ ID NO: 638851 - DNA, 570 bp, Homo sapiens
ttgaaggaagttggttttggttttgtagttgctgttgtttgtttttttttttttttttttttgagacagagtcaccctgtgacacccaggctggagtgcrgtggtgcaatctcagctcactgcaacctccatctcccgggtttaagcgattctctcgcctcagcctaccgaggagctgggactacaagtgtgtgcaccaccacacccagctaattttgtatttttagtagaaatggggttccaccgtattggccaggttggtctcgaactcctgacctcaagtgatccacccggctcgccctctcaaagtgctgggatgacaggtgtgagctaccacacccagcctgaaggaagttataaaaattgacttgatcccctggtgtgcatacatctgagtgttttcctctgaagatctcctgtagcttcctggttgagaccccgcttagcaattcccgtgccgaggttcaccatttagtgaggaacgtgggaactctgagcctgactttggcccctgagtgccctgctggagttgcacagtggcagagtcaagtcaaagggtgccggagcctc

SEQ ID NO: 638852 - DNA, 570 bp, Homo sapiens
ttgaaggaagttggttttggttttgtagttgctgttgtttgtttttttttttttttttttttgagacagagtcaccctgtgacacccaggctggagtgcggtggtgcaatctcagctcactgcaacctccrtctcccgggtttaagcgattctctcgcctcagcctaccgaggagctgggactacaagtgtgtgcaccaccacacccagctaattttgtatttttagtagaaatggggttccaccgtattggccaggttggtctcgaactcctgacctcaagtgatccacccggctcgccctctcaaagtgctgggatgacaggtgtgagctaccacacccagcctgaaggaagttataaaaattgacttgatcccctggtgtgcatacatctgagtgttttcctctgaagatctcctgtagcttcctggttgagaccccgcttagcaattcccgtgccgaggttcaccatttagtgaggaacgtgggaactctgagcctgactttggcccctgagtgccctgctggagttgcacagtggcagagtcaagtcaaagggtgccggagcctc

SEQ ID NO: 638853 - DNA, 570 bp, Homo sapiens
ttgaaggaagttggttttggttttgtagttgctgttgtttgtttttttttttttttttttttgagacagagtcaccctgtgacacccaggctggagtgcggtggtgcaatctcagctcactgcaacctccatctcccgggtttaagcgattctctcgcctcagcctaccgaggagctgggactacaagtgtgtgcaccaccacacccagctaattttgtatttttagtagaaatggggttccaccgtattggccaggttggtctcgaactcctgacctcaagtgatccacccggctcgccctctcaaagtgctgggatgacaggtgtgagctaccacacccagcctgaaggaagttataaaaattgacttgatcccctggtgtgcatacatctgagtgttttcctctgaagatctcctgtagcttcctggttgagaccccgcttagcaattcccgtgccgaggttmaccatttagtgaggaacgtgggaactctgagcctgactttggcccctgagtgccctgctggagttgcacagtggcagagtcaagtcaaagggtgccggagcctc

SEQ ID NO: 638854 - DNA, 619 bp, Homo sapiens
caatgctctttatttcccatttgccaaatgacctttattttaaataattattattttatgcaatatttaacatttaaatattaaagtaataacattactttacaaaacaatagtatcattatcatcttcaccataatctccttatcactataaagtcaygtgatgcagtcaccccaaattttcttttcacactgtgttcattctgtattcattctgaaagaaaccggaagcatatctagtgcagacatctcatgattaaaactataaataatttttaaacgttttttctgagtatgattaacagataagaatggaagaattatttatttaatgactacacatgtttcaatttgttcctgtgatttgaggttgtttaaatttattgaatgtaaccgaccttataataatgatctatccacctactctgctagctaagtataattccatatatttaactctgtgtgtaggtctgagcacttctttaaaatagattactgacaccggaattaatatggaaacatgcaagaatgctgttaagctgggtgtattagtccgttctcatactgctatgaagaaatacccaagactcagtaatttatacaaaaaaagaggtttaatg

SEQ ID NO: 638855 - DNA, 684 bp, Homo sapiens
cctcgtggttttggcctcgtgggcccctgaaagttctcacagtcccccagacatccttgaaccatactcagagagtggtttatctaatcaataattccacaaaaacaatgtttattaattcctgaagaacctccatgactaggtcccaggcatgcttctgttatcaactgggggaattctctccatggtgaaacaacctcttctcttagcttctgttccaaaggttctccaggtttcctcttacccttctagaaaattttatgttttctgatgtaaargtttacatcttcccttatcagacattgaattctcaggttcttcagatgtctgcccaggtcctctctactcactctgtgctgtcccctaggagaaaatctgattttacttcctgcccaagcaaagagaaggaactcactcacttctctcctaggcttctcccagctctaggtctggctaaactccacctgtgacatagttgtgtgcacatcgtaaagttgagatcccctcctcagctcccaaacttggtcacttttaccttcgttactagctgcatcacctcatcctgtctccaagccattcttgaagtctgctccttcgctcctctcccaggtcattgctagtctgagcccctctcttccagcctctgagtggtcttctcagtggactcctcaagttggctcttcc

SEQ ID NO: 638856 - DNA, 659 bp, Homo sapiens
ctggattgctctgccctcttcagcccttaaccctgcaaattccaccatccgcggcctccacagactcagatgttcgtctctgcaactctcagcaaaatacactttgctagagttgcccttccttgtcctgagactcagaaaggccccagggagacagcgggcaatttcagggctcacttcttttgtgtccctctctcagcaatggcggttctgtgctgcttgcaatccactgtctaaacagttgctgcaaagtgtgtccagtacccacttgttcagagcaggaagcaaatcctgtccctggctctccctgactgcacagaaggctcggtccctctgattgtagtttattcagtgtgtgattcatctcatcattcagtcagaaaggagttcaagtctcttccttgaacatagaccttgcaaagtgctgtkagctcttaccataaaggaaatacaatttatttgtggtgatcagccacacacacaggaagtcacctaggagcaatataagagttaacttttcctggaacatcaaccagtgctgcttagagaagagggagaggtgacttacactgaaccctgcaggatgcggggatttgggagaaacagagagaagggaatgaattccagatgacagaaacggtgctagtgaacatgcagac

SEQ ID NO: 638857 - DNA, 496 bp, Homo sapiens
aaatcagcatccagagtgctccatggtaaactgatgcagcatggggagctgacgttgcacagttgagtatcagctgtgasgggctctaactttctcttatggtgttgggagacatgaccgtctctcctgccttggtgttcctttaagtggtaatacggcctgtgagacacagaaactgctaaaccacccatagtcaggagcagtgagaagcgtgagaaatgaggggtcaggtggatgcaagtgtggaaatcagaagctgtgagtaatgtgaacttcttatctacagtggctttgtcagctactgtatgttatgagtctgtagctctttatttacaatattattagttgttaatgcttgatttttttgcaataatctttttggatcccagaatttttaaaaccacatatgtaatttaaaaatccagtgtttggctcccacctgtaatcccagcactttgggagactgagccaggtggattacctgaggtcaagaatt

SEQ ID NO: 638858 - DNA, 497 bp, Homo sapiens
aaatcagcatccagagtgctccatggtaaactgatgcagcatggggagctgacgttgcacagttgagtatcagctgtgacgggctctaactttctcttatggtgttgggagacatgaccgtctctcctgccttggtgttcctttaagtggtaatacggcctgtgagacacagaaactgctaaaccacccatagtcaggagcagtgagaagcgtgagaaatgaggggtcaggtggatgcaagtgtggaaatcagaagctgtgagtartgtgaacttcttatctacagtggctttgtcagctactgtatgttatgagtctgtagctctttatttacaatattattagttgttaatgcttgatttttttgcaataatctttttggatcccagaatttttaaaaccacatatgtaatttaaaaatccagtgtttggctcccacctgtaatcccagcactttgggagactgagccaggtggattacctgaggtcaagaattc

SEQ ID NO: 638859 - DNA, 598 bp, Homo sapiens
ggactgcttccagcttttgccccttctgtatgatattgggtatgggcatgtgatcaatggctctatttagtttgayggctctattcaatttcctaacttggtggtattttgcccaggttttcattttcttcctgacagcaaaaagaacaaagtcagatgaatcacattgcccaacttcagactaaaccctcacaccttcaatgcctaatatgttcatgttttttatcgttaagggatgttggatgttatcgaaagctttttctgtgtctcttgagatgctcacatgatttttgtttttaattcagtttatgtcatgaatcacattcatggatgtgcagtctttcatcccagaaataaagcctaattgatcgtggtgaattaagtttttgatatgctattcgataggtttgctaggatcttgctgaggatttttgtggccatcttcatcatagttattggtcccaggttttctttcttcattgtatttctgccagattttggtatcaggatgatgctggcttcatagaatgaaggagaaatttatcctcttcaatttttgggaaatgtttcagtaagattgatatcagttcttctttgt

SEQ ID NO: 638860 - DNA, 598 bp, Homo sapiens
ggactgcttccagcttttgccccttctgtatgatattgggtatgggcatgtgatcaatggctctatttagtttgatggctctattcaatttcctaacttggtggtattttgcccaggttttcattttcttcctgacagcaaaaagaacaaagtcagatgaatcacattgcccaacttcagactaaaccctcacaccttcaatgcctaatatgttcatgttttttatcgttaagggatgttggatgttatcraaagctttttctgtgtctcttgagatgctcacatgatttttgtttttaattcagtttatgtcatgaatcacattcatggatgtgcagtctttcatcccagaaataaagcctaattgatcgtggtgaattaagtttttgatatgctattcgataggtttgctaggatcttgctgaggatttttgtggccatcttcatcatagttattggtcccaggttttctttcttcattgtatttctgccagattttggtatcaggatgatgctggcttcatagaatgaaggagaaatttatcctcttcaatttttgggaaatgtttcagtaagattgatatcagttcttctttgt

SEQ ID NO: 638861 - DNA, 598 bp, Homo sapiens
ggactgcttccagcttttgccccttctgtatgatattgggtatgggcatgtgatcaatggctctatttagtttgatggctctattcaatttcctaacttggtggtattttgcccaggttttcattttcttcctgacagcaaaaagaacaaagtcagatgaatcacattgcccaacttcagactaaaccctcacaccttcaatgcctaatatgttcatgttttttatcgttaagggatgttggatgttatcgaaagctttttctgtgtctcttgagatgctcacatgatttttgtttttrattcagtttatgtcatgaatcacattcatggatgtgcagtctttcatcccagaaataaagcctaattgatcgtggtgaattaagtttttgatatgctattcgataggtttgctaggatcttgctgaggatttttgtggccatcttcatcatagttattggtcccaggttttctttcttcattgtatttctgccagattttggtatcaggatgatgctggcttcatagaatgaaggagaaatttatcctcttcaatttttgggaaatgtttcagtaagattgatatcagttcttctttgt

SEQ ID NO: 638862 - DNA, 398 bp, Homo sapiens
gggctttttgggaaaatgaaatgtagttttctagtttccctcccaggctatgatctcgagtcccttctgactgaaaatacccygtagatgtccttggactgggactcttgagtggcagagaaactgaggccaagagaggaaggtgcgtgtcctagatcacccatgagctgctagcaggggtagttgaagagtcctgcctccctgcaccccaccttcctggcaccagataaagggcccctggtgcccttgacctcagtcccaagagctgtaacagaatctctggccctgtactgactctctggaaggcccaggagcctcctggcctggccacaagagttctgcctcttgggccccctctcccacgccttcctctcttcctttgtcaagtaggtggggag

SEQ ID NO: 638863 - DNA, 595 bp, Homo sapiens
ctgggactacaggcacatgccaacacacttggctaatttttaaattctgcatagagacgtggtcttgctcaagcagtttcctcacctccacctcccaaagtgctggaattataggtgtgagccaccgtaccccactgtaagtttgacttttttagagtccacacgtaagggagaccatgtggtatttgtctttctttgcgtggcttatttcacttaccataatgtcgcccatgctcaaccatgttttcacaagtgacagaatttccttctttttaaaggctgaatagtattcctttgtatgtatatattacattttctttacccattcatctgtttgatggacacttaggttgattccatatcttggctactgtgaatagtgttgcaatgaacatgggagtacagatatctctttgacatattgatttcacttcctttggatatatactcagtagtgggatttctggatcatatgtatgttagktctatttttagttttttgaggaacctccactttgttttccataatggctgtactaatttacattcccaccaacagtgtgtaagagttcccttttctccacatccttgccag

SEQ ID NO: 638864 - DNA, 624 bp, Homo sapiens
agaattctatttttgttgctattgtaaatgggattattttcttactttcatcagttaggtagttgttagtacatagaaagaaatgctactggtttttgtatgttgattttgtatcctgcaactttgcaaccgataaactgaatgtattagttttagtatttttgtggattctttargattttctatataaaaggtcatgtcatctgcagagacaatctgacttctttcttatttggatgccttttctttctttctcttgcctaattgctctggctaagacagtactatgtcaaaaagaagtggtgagatttggcatctttgtcttgttcctgatcttagaggaaaagctttcgactgttcaccattgagtatgattttagttgtggccatgtcctgaatggcctttattgtattttggtatattccttctatacataatctgttgagagtttttatcatgaaagggtgttgaattttgttaaacgctttttctatatctattgagatgatcatatggtttttgtgtttcattctgttaatgcagtgtgtcacatttattgatttgcatatgatgaaccctccttgtatcacggaggaatcccacttgattatggtgaatgattc

SEQ ID NO: 638865 - DNA, 419 bp, Homo sapiens
gtgatttgcaattggcttaggaagcaagactgtctaaaaacctggggtccacagataggagagttaagcattggcttatgggtgtgactctttacagaacccttgggaagaaatttaaagaacagccctcagtttccccttatctgaggcctaagtgacagctgtgaaaaacaattcagggacataggtcaagatgttatctttagtttctatagggaaccagacatcttgtggctctaacttatttgggtggcccttgtttgaagcttcaattaccttcttgcttgtcaaggtgctyatttacttctcaaagctagctagctgcctgaaattccccctgaaaagactcatgattttcctttatttccactaagaggagtctctgcctcacctcactctcagtcacctggacttctcta

SEQ ID NO: 638866 - DNA, 419 bp, Homo sapiens
gtgatttgcaattggcttaggaagcaagactgtctaaaaacctggggtccacagataggagagttaagcattggcttatgggtgtgactctttacagaacccttgggaagaaatttaaagaacagccctcagtttccccttatctgaggcctaagtgacagctgtgaaaaacaattcagggacataggtcaagatgttatctttagtttctatagggaaccagacatcttgtggctctaacttatttgggtggcccttgtttgaagcttcaattaccttcttgcttgtcaaggtgctcatttacttctcaaagctagctagctgcctgaaattccccctgaaargactcatgattttcctttatttccactaagaggagtctctgcctcacctcactctcagtcacctggacttctcta

SEQ ID NO: 638867 - DNA, 510 bp, Homo sapiens
tggtggggccaaggtttcccctgcaaggccaaagttcctggagggcagaggccaagggtcattgtcaggaagacagcagcacttggtagagccaagtagatctgggctccagtcctcactctgccagttactggctgtgtgatctgggcaggtcctctatccttttccctgtctgtaaaatgggcttctagctggagtgtgtgatgaccaggtacaggcaagtcacggggatcgataaaggcccggttgtgtaggatactgggcagcattgtctctgggctgggcaactcccatgtgttccaaggtggggctggggttgtgtctgagaaggcatgtttgcctcagcccacaaaacagtggggttcagaggatgctcagacccccttctgtatctcaaagcattggagccacaagagggtattgtgcagtagttgcaagcatggrctctgcctgggctcatattagctgagtgacctcagacaagtgacccaacctcactgtgccagtatc

SEQ ID NO: 638868 - DNA, 541 bp, Homo sapiens
gagggcttccctcaattaaaatgagggctttttaaagggcagagactttgtcttgtttgccactacatatacagtgctcagaagtgtttgtcacacagtaaatgctcaataaacaatttctgtccaacagaaaaaaaaattagatggtagatacttctaataatggagctaggagatcaagaccaatccttctaccaaagacaaattaaaaactggatgatatacaaaaacaagaaaacatcttaaaattatctatgcgtttacaatatacagagaaattgcatggccaaaatctagaagagtgtgagaatctaaagcccagaactcaggttttgttttctgcttagatttaccttttatttttattaattaatttttaaaagttttttagttgttataaatattcaaagctttttttttaacctgagtgtaattcratctggaagaaacagctacaaacatgagcttccatttttttttttgtcagctttataggagaaagggaatttttattggatttgaatggaatttttagatcaat

SEQ ID NO: 638869 - DNA, 638 bp, Homo sapiens
ctcgcctctcctcacgagccccctgaagtaggcggtgtccatccaggagcctgaagagtgcctggttgcagtcaggctcaccccagcctgagctaatgatggctcacagaggagcactcagcccaaacgtggaaagcaggaggctgtgagccaagccagcctggcggaagattccctcccactcaccttctcacacctgtactccccaaacttgactcctcgcaccacctgctggtagatgaggttggtggccacgttgtcctcggaggggctgtgccagggcgtgaagacctctttgcggaagaagagcctccagggggcgttgcgctcctgggcgccctgctccttggcgtactgctcgcactgggagatggcgtccatgacgtggtcactgccgctgcccagggaggacacctgtgggcacagaggggaggggagcaggcacagagtcagggaaggactatgaggagcctcaacggggccaacggtcagttcagacagaaaacsgaggcccagcgaggggcagggacacgtccaaggcccccaggaggcagaccagattctagccctgggctctaagccgcacccccaccattgccttcctagcctcagttctgggcacggtgacgtgggaattc

SEQ ID NO: 638870 - DNA, 434 bp, Homo sapiens
gccagtgctgtgagaatgagatggtgttatcaatatcagttgttgaatgtgggtgagagatggtgtgaacagtgtcagcggctgagagtgaggtagagaaataatgggtgaggccattgtcaattaggaggccattggcgtcttttgaaagtagttagtgtctgtggagtggcatgtattcaggttacatgaaaagcagctgagaagcaaactggcaatcagagtggcagcaacaaattaagaatattcatattcataaagaccattttttataatgaaaaagtaatacatgcagatgggggaagatcacctgaaccttgagaggtggaagatgtagtgagccgtgatcaaaacattacactccagcctgggtracagagaccccatctccaaaaaacagaaaagaaaagcatttataagttcatgttgaacag

SEQ ID NO: 638871 - DNA, 431 bp, Homo sapiens
aggcttttgacagcaccaactttcttagaacttttttggggatatctgctgctttggcttttcatattcattttctttgtttttctgttgctaactctagttcaataaaatgatgaatttatattcaagttcttctttgtctctaacaggctttttgataaccacttttatttcattgctgctttgtcataacttgttaccagctttgaagaaactggccatcattccctattgtatattcttcactctattatggagacrtttatcataatataaaaatttcttctgttcttaaaattttgtacttcacacagctgacatcactcttaatcataaaagactgaatgtgttccccttaaacttaggaacaagggtgtttgctcccaccagttctgttcaacattgtatagggcagttagttaagaaaatga

SEQ ID NO: 638872 - DNA, 521 bp, Homo sapiens
tgccatttattagtaaaataaccctgagcaagtgacccagctgtttggaacctgtttccttgtctgtgaaacgagcatgacacctccatctcacacactttgtgaaggtcacttgagataatttatgtagagcttagcgtaaatgctagatacagaaactcctctttgaatgacaacagtgacaagaggaagtttgaaggactctggaattagactgcccggacccaagtgcttctatcattttctagctagttaccatgggcaagtttttctgtaccttgattttgcctctctaaaatggggatagtggcaaggcgaggtggttcacacctgtaatcccagcactttgggagtctgaggagagyggatcacttgaggtcgggagttcaagaccagcctggccacgtggtgaaaacctgtctctactaaaaatacaaataattagctgagcatggtggcgggtgtctgtaatcccagctacttggaaggttgaagcaggagaatcgcttgaacccaggagg

SEQ ID NO: 638873 - DNA, 601 bp, Homo sapiens
aggttcttatcttccttgccttgggttagaatatgctcctttagctcagaggagttattacccaccttctgaagtctacttctgtcaattcatcagtctcattctctgcccagttttgttcccttgctggagaggagttgggatcattggagagaagaggcattctggtttttgcaattttcagcatttttgcactgatttttcctcaacttcttggatttatctacctttgattgttgaggctgatgacctttaggtggggtttttgtgtggagtcctttatgttgatgttgatgttgatgttgtagctttctgtttgttacttttccttctaacagtcaggtccctctttggcaggtctgctgcagtttgtttgaggtccactccagacccttttcacctgggtatcaccagtggaggytgcagaacagcaaagattgctgcctgcttcttcctctggaagcttcatcccagaggggcaccagcctgatgccaactggagctctcctgtatgaggtgtctgttgaccccgttgggaggtttctccctgtcaggaggcgtgggggtcagggacccacttgaggaggcaatctgtccctta

SEQ ID NO: 638874 - DNA, 599 bp, Homo sapiens
tgcatcttctcactcataggtggcaactgaacaatgagaacacttgtacacaggaaagggaacatcacacaccggggcctgtcgtggggtgggaggagtggggagggatagcattaggagataaacctaatttaaatgacgagttaatgggtgcagcacaccgacatgtcacgtgtatacatatgtgacaaacctgcasgttgtgcacatgtaccctagaacttaaagtataataataaaaaaaaaaagaattggtggcagaaattgccagttaacttccaatattcattttcccattcttccataatagatttttggccaccaagaaaaaatgcaacatttcacagtctttcttataggaaagtgtagccatatgacacctcagcaagcagtattttccggacaatgggatgtgagcagcagtaatgtacatctcctccctccccctcctattttaacccaggcagcctacctgtagggggcaggaaggaatggcagggggtactaagttcttaaccatagtgatttatgtgttatatggccatttgatccagcttgctcttctaccatccctaggtggttgccctcatatcatcatg

SEQ ID NO: 638875 - DNA, 599 bp, Homo sapiens
tgcatcttctcactcataggtggcaactgaacaatgagaacacttgtacacaggaaagggaacatcacacaccggggcctgtcgtggggtgggaggagtggggagggatagcattaggagataaacctaatttaaatgacgagttaatgggtgcagcacaccgacatgtcacgtgtatacatatgtgacaaacctgcacgttgtgcacatgtaccctagaacttaaagtataataataaaaaaaaaaagaattggtggcagaaattgccagttaacttccaatattcattttcccattcttccataatagatttttggccaccaagaaaaaatgcaacatttcacagtctttcttataggaaagtgtagccatatgacacctcagcaagcagtattttccggacaatgggatgtgagcagcagtaatgtacatctcctccctccccctcctattttaacccaggcagcctacctgtagggggcaggaaggaatggcagggggtactaagttsttaaccatagtgatttatgtgttatatggccatttgatccagcttgctcttctaccatccctaggtggttgccctcatatcatcatg

SEQ ID NO: 638876 - DNA, 586 bp, Homo sapiens
acatgtatacatacgtaacaaacctgcacgttgtgcacatgtaccctaaaacttaaagtgtaataaaaaaaatcatatagagaatataaaaaataaaataaaataaaaataaaaaacatagataaataaaataaataaatatgaataaaataataaaaccgatataaataaatagctattctctataatatctattataaatattatctatttataatagataaattaaaaaataaataaatagataaataaaaacgatagaccattagagctcaattagaaatgaaaggtgagatattataatggataccagagaaatacaacagatcattcaaggctactatgaacacctttacatgcatcaactagaaaacctagaggagatggataaattcctggacatctacaaccctcctacattaaacaaggaagaaatagaaacaagacagattctcagctgaattctatcagacattcaaagaagaattggtaccaattctattgacactagytcacaaaatagaaaagaagaaatcctctctaaatcattctatggagccagtatcaccctaatgccagaaccagg

SEQ ID NO: 638877 - DNA, 527 bp, Homo sapiens
gtttctgggtcaaatgcattgttgatgttgcaagttgtctccactgctttacagcccattttgaactcaaataagaaaatcactcggwtttgctttttgtctaacatcatttccatagtcaaaaataaacataaaataaacagcaagtaataagtcattagcaaaaaaataaagcgagaaatgtccattgcaatgactgataacataaccacattatttaagaatgtattccaatatcaaatggcaaattccaacaatgcaaaaaccacaattacatttgcaccaacctaatattaagcgaattaattaaacaaactaaacataaacctgttactatgtcatttaatctagggagaaagacctataatttgtaaagtatttggaatgctgttaggcaaatgttatgctaggtcgccccagttttgagtgattctcaatacttaaaaaactgatacccagagtaagtaaatcagaacctctgggcacaggatctaggcatcggtatttttaaagctgttcaggtgatt

SEQ ID NO: 638878 - DNA, 527 bp, Homo sapiens
gtttctgggtcaaatgcattgttgatgttgcaagttgtctccactgctttacagcccattttgaactcaaataagaaaatcactcggttttgctttttgtctaacatcatttccatagtcaaaaataaacataaaataaacagcaagtaataagtcattagcaaaaaaataaagcgagaaatgtccattgcaatgactgataacataaccacattatttaagaatgtattccaatatcaaatggcaaattccaacaatgcaaaaaccacaattacatttgcaccaacctaatattaagcraattaattaaacaaactaaacataaacctgttactatgtcatttaatctagggagaaagacctataatttgtaaagtatttggaatgctgttaggcaaatgttatgctaggtcgccccagttttgagtgattctcaatacttaaaaaactgatacccagagtaagtaaatcagaacctctgggcacaggatctaggcatcggtatttttaaagctgttcaggtgatt

SEQ ID NO: 638879 - DNA, 579 bp, Homo sapiens
tttctaaatgataagaaaactaagcacctgagataagtaatatatcaartggcagggctgaaattccaagccagacttgtgcaagcctaaaaccatctcctttccaacaactatatttcacttcttcaaatatctggcttaggcaaaaatcatactccaccaacacatccccaacttttttccttgccttcacttctgtgcactccactcatgaggggacccagcaatcccattactgggtatatacccaaaggattataaatcattctaccataaagacacatgcacacatatttttattgcagcactgttcacaatagcaaacacttgactggcatatctagagaataattgctcagaagctaatcataaagtggacccagctttcaagaaagctattgacttataaaaataaacaccttctctcataacaaaggaaggacaagtatttcatgcccagtggataagaaagaaacctttaacctttaaacaaataccgtttcatttcctccgatttataatgcaaatatttttgttaatgcttttacctatcactggctcagtgtttaacctggtttt

SEQ ID NO: 638880 - DNA, 579 bp, Homo sapiens
tttctaaatgataagaaaactaagcacctgagataagtaatatatcaaatggcagggctgaaattccaagccagacttgtgcaagcctaaaaccatctcctttccaacaactatatttcacttcttcaaatatctggcttaggcaaaaatcatactccaccaacacatccccaacttttttccttgccttcacttctgtgcactccactcatgaggggacccagcaatcccattactgggtatatacccaaaggattataaatcattctaccataaagacacatgcacacatatttttattgcagcactgttcacaatagcaaacacttgactggcatatctagagaataattgctcagaagctaatcrtaaagtggacccagctttcaagaaagctattgacttataaaaataaacaccttctctcataacaaaggaaggacaagtatttcatgcccagtggataagaaagaaacctttaacctttaaacaaataccgtttcatttcctccgatttataatgcaaatatttttgttaatgcttttacctatcactggctcagtgtttaacctggtttt

SEQ ID NO: 638881 - DNA, 579 bp, Homo sapiens
tttctaaatgataagaaaactaagcacctgagataagtaatatatcaaatggcagggctgaaattccaagccagacttgtgcaagcctaaaaccatctcctttccaacaactatatttcacttcttcaaatatctggcttaggcaaaaatcatactccaccaacacatccccaacttttttccttgccttcacttctgtgcactccactcatgaggggacccagcaatcccattactgggtatatacccaaaggattataaatcattctaccataaagacacatgcacacatatttttattgcagcactgttcacaatagcaaacacttgactggcatatctagagaataattgctcagaagctaatcataaagtggacccagctttcaagaaagctattgacttataaaaataaacaccttctctcataacaaaggaaggacaagtatttcatgcccagtggataagaaagaaacctttaacctttaaacaaataccgtttcattkcctccgatttataatgcaaatatttttgttaatgcttttacctatcactggctcagtgtttaacctggtttt

SEQ ID NO: 638882 - DNA, 575 bp, Homo sapiens
tttttgtggtgatacttttgaaagtcacccttctagttatggtgaaataaacaatacatcattattcttgactgtagccatcatgctgtgaaacagatctcaaacgtattccacccatctagctgaaactttgtaccctttgatcagtaactccccattcctttccccagccccttccccscgagcttttggtaaccatcattctactctctacttctgtgaattggacttttttttaaagataccatatataaatgagatcatgctgataaccctcttgattccttcctccctctcctactccacaatcacttgatcttcaagattctagctttttgatatttcttgaatctggattcttctatttccaatactactgccttagtgtaggcctcatcatcttgcacttagattaataatgacaactgatatttattgagggtgttctaggtactgggcactgttctaagctctttccatgttttaactttaatcttcacaataaccttattatgtaggtgctaatatcatgctattttacagataaagaacctgaggcccagatgaggctgctg

SEQ ID NO: 638883 - DNA, 475 bp, Homo sapiens
gcaaatttttatttcattttagtgtacatttctttgatcactactaaatttgaacaccttttcatatttttcacgtatttattatttatgtggccttttcccctgaaaattactcgttcttgctctttgcctgtttttgtaccgaagtatataattttaatcctaatgatatgttaaatatgtacacacaaatatatgtgtacattttgaaatcacttatatcaattatcctttagtttttgatgtttatatttttaaatgattcctattagttgtttaaaatataaagccagaaagaatgcaaagaaaaaacaataaaattttatcaccaaaggaaaccagtgtcatcagttttgtgaattcatttccaaagggtcaattaaaactattgattacattatctttcaatttataagagattyctggtgccaaaaattttatatattaaatgtttatacaagcggacttgaaggag

SEQ ID NO: 638884 - DNA, 617 bp, Homo sapiens
ttgaaatcacttatatcaattatcctttagtttttgatgtttatatttttaaatgattcctattagttgtttaaaatataaagccagaaagaatgcaaagaaaaaacaataaaattttatcaccaaaggaaaccagtgtcatcagttttgtgaattcatttccaaagggtcaattaaaactattgattacattatctttcaatttataagagatttctggtgccaaaaattttatatattaaatgtttatacaagcggacttgaaggagttataaaaaatggcatttaaaaaataaaaataaaaatataaatgttatttttttaacatagactctgtcaaatccaagacacttttgtgagagatgataccagccatttggcccttctatagagaattgaggtcctgagaatktaaacatggcgatgcagtgtttttttttttttccaccttattaactgaggaaaatggatgcctctcaaatattttctaagattaggcaacaaaaaagaagtcagaagaagctaaatcaggatggtaaggtggatgcctaataatttcccattgaaactctcacaaaattcttttttgatgacagaaatgagcaggagcattgtca

SEQ ID NO: 638885 - DNA, 449 bp, Homo sapiens
tctgtgcacctccagtggggcatagaactatatatagataataactgaggagtttgtgagccatgtcttgagcagtttagagctaagaatgtgggaacaattttagatatgggacagatattctaccrtatagtaagaaaaggactgggtttatttgggagtggacagtgtggagagacataagctctgaataattcaggattgtaaaacctaacattataaaacctaactcctatttggaaataaataatatcacactgggaaccattgacactgaaaattcaaaaaggtactttttcatcaataaaaatatcaaaataggattttaaaacagtggagaaggctctcctataaggcagaaaacttacaccagcaggaggcatggagcccaccagtctgggaatcctgcaaaatatgttcctgctctgggagatgagtggaatatagtg

SEQ ID NO: 638886 - DNA, 646 bp, Homo sapiens
taccatatcaaccaccaaggtcagcttgaactacagaaacagagaatctctaactctgaatgaatatctaaccttctttaccttaccttagtgaggctgcaagggcactgtaggcaagagctttccatgtgtttcctggacttgagtgcagtggcctgacatttctaagcagtctaagagctacaagcartgggttattaaatcatcagaattgagataaaggggctggcaggtaaatatacttccagtaaaataaggtagggatgcctgtatttgctcgcaggttgtataggctctgaaagagagagcttgtatggaatcattttaatccctctgtggaaagaggaaaggagaaaagagtgttggggtggggaaggcgaccagcaataaggcaatgcaaagccaaattgattagcagggcctagagagaaaatgtatgcaggagccagaggaaaatgcatttcttgcatcacaagaaatggagtgaatgccaagtggttacagtggaggcctccaaggaatttacataaaggcacccagggaaaggagtctgatttgatcatccaccatgcccagcatccaacagttaccaatgcccgacctttgctttctttccccctctctaggtatgtagagtgtagaaacc

SEQ ID NO: 638887 - DNA, 646 bp, Homo sapiens
taccatatcaaccaccaaggtcagcttgaactacagaaacagagaatctctaactctgaatgaatatctaaccttctttaccttaccttagtgaggctgcaagggcactgtaggcaagagctttccatgtgtttcctggacttgagtgcagtggcctgacatttctaagcagtctaagagctacaagcaatgggttattaaatcatcagaattgagataaaggggctggcaggtaaatatacttccagtaaaataaggtagggatgcctgtatttgctcgcaggttgtataggctctgaaagagagagcttgtatggaatcattttaatccctctgtggaaagaggaaaggagaaaaragtgttggggtggggaaggcgaccagcaataaggcaatgcaaagccaaattgattagcagggcctagagagaaaatgtatgcaggagccagaggaaaatgcatttcttgcatcacaagaaatggagtgaatgccaagtggttacagtggaggcctccaaggaatttacataaaggcacccagggaaaggagtctgatttgatcatccaccatgcccagcatccaacagttaccaatgcccgacctttgctttctttccccctctctaggtatgtagagtgtagaaacc

SEQ ID NO: 638888 - DNA, 375 bp, Homo sapiens
acttttgtttatctaataaaggaggtatttgaagttgccccttcagctttaatgtttttaaaaacttttgactctagggcttgcctgatgggttaaaggctgtcccaattttagccgcaggtcagttgtttcacctgcacccttctttgccctcaggtatggattaagaacctggaggctggaggggtttttcctttagcaagtgttcctmtgacaaaatactgagctgttgactggggctgggaagaggggatatccttatcccctgtagagggtttattccaaggtgtctctaaagcctcttgggctttatctctatgttaaaactctcttttgggcttttgggatgtggactgacagaccctgcatgcctgg

SEQ ID NO: 638889 - DNA, 614 bp, Homo sapiens
cataactgctaatcatcccatctttaaataaaaactgcaraaataattgctaaatttttgaaaaattatataacaaacttttccaaaaaccttgaaagttggttcaatgtttctatcatcatactgattaagatcctgatcacaggatttcagtcttgtacaactgaaggcttctccaaagaactgtaagttttttcaattcagaatattaccacctcttcatcctcactatccatgaccttcaaaagggaaacagcaagaaaggtcacctaaaggtttattactgttttaattttagcaagaaaatataccaaaaatggaatttcacatactagaaaataaaactactttccttaatctgaacctgaaggaagacatctaaaaatactcagtattagctaatatggttactcaacagcgaagttagaatttttaaaaagtatttgtccctaaagttttaagttttgaaatgcacaggataaatgaagggctattacatgtaagaatgaaaaaaagccttatacattttaacctagtcttaatttgacaatttcattccctactagcagaacgcatggatgaatcagaaaaaaatcataggcaaaaactagtat

SEQ ID NO: 638890 - DNA, 555 bp, Homo sapiens
actcaaaaatcaaaggtcactaatgatgttttcagtcatgaattgaatagtcaatgtgattaatttctagaatttacaaacttgtgtgcttcagtattcttaacatgagtattattttaacgaacaatttaagacaatgctcctggccacctgttcatgtttcctctattacgtctaggtaataaaggaattcctctcagatgattctaatttcaaggatgaagttcctacatytaaaaacacgaaacacaaagataaaacatatgctacttagtaaaaacaaacattaaagaatgctcatataattttatatgaaagactccatacttaaaatcgtagcagtgggcttttaacctgaccataataagtggcaaatttctcaaaagaatgagaagggttgcgaaaaatttagaaaagtgaaaaaaaaaaaaagctacataaacacactagtacatctggctcttgagctaacgcgaaggcgggggggaatcatttttgaaggctatgatcgggctgtgtattccctaaagggcatgtgatgtaatactggagagc

SEQ ID NO: 638891 - DNA, 454 bp, Homo sapiens
gtgtgtgtgtatatatatatatcttacatactataataacatttctggaagaagtacaagaaattcttaagtactggttacttccaaggtaggtccaaaaatatgtgtagtaatttcacctttaagtatatgccctagaaatataaactaccacatggaggttaactgtattatgtttataatagcaaagaacagaaacaacctaaccctctgtcaaagataaagtgcttaaataaaccatgataccttagtatgattgaatactatayagaggtaggtttatgttaaaaatgacatggaattatcagcaaaaatattgttaaatgtataaaaaagacacaaaactatatatacagtatggcaacatttttgcttaacattaaaaaatagtttactatggagcaatgtggtgactataggctattttagctttaattacactgaaagttttatg

SEQ ID NO: 638892 - DNA, 552 bp, Homo sapiens
ctaaatccaatggaataggtagtaaaatgctgagttttctattattccttccatatttattagctgagttctacaaaaactttctatcatcagttattgggttatcttggaatatatctcatacaggaaaggtgagataagtgtttgacactttctattaataagagtaatgaattaattataagggtaatgaatgggttcattaacaatatccagtggagactaataaatttttatttttaaaaaatcattatgaactcatggagttatatatacttggtataatttgatctattgaattagtattttttaatgctcaaatttttttatctgaggtcagaggtagccccttcaatttggttactgtatctttctgatatgatcccagtaatcttcctatttccttggcacagcaagatatatcaggcctaacttgtcaactctgccacatacttggaatcatccatttctccaaaaagactgcttcattgaggatatttaaaaattagsagtgttcattatttctgggatgtcatttcttctaggtttttc

SEQ ID NO: 638893 - DNA, 591 bp, Homo sapiens
tcaagtcagcttcacagaattctacctatgctcaaagactatggaaagaggaggatgatatacgagttctaataataaacacttgcaaagcaaattatcacccaaacaaagattgataacaattatctactaactttaatttttaaaagcatttaatagaaaaaaaaatacctgtagacattgagctcctggatattggtagtatacacgagctgcgcctaagatatataagtgacaagagaagagcaaagaataaatttttgttatcagaatgttgaggcttaatgatacccacagttaatagatgtttgtagcttttaaaggggactgacaagtggcatatctatgagctcttctttcacaagccagaggaattaccagccatcccacaaagaaaagccaaattctaaayagagtagttggcatgtgaacaaacactagcagcccctccttgcctaaaaaccacccaaatagagaagttgatcctccttagataagaaccataaatcaaataaaatgggtcagagctaagcccctttaactaaacaggatggtgcctaggaggagactataatgttattaaacttgaca

SEQ ID NO: 638894 - DNA, 591 bp, Homo sapiens
tcaagtcagcttcacagaattctacctatgctcaaagactatggaaagaggaggatgatatacgagttctaataataaacacttgcaaagcaaattatcacccaaacaaagattgataacaattatctactaactttaatttttaaaagcatttaatagaaaaaaaaatacctgtagacattgagctcctggatattggtagtatacacgagctgcgcctaagatatataagtgacaagagaagagcaaagaataaatttttgttatcagaatgttgaggcttaatgatacccacagttaatagatgtttgtagcttttaaaggggactgacaagtggcatatctatgagctcttctttcacaagccagaggaattaccagccatcccacaaagaaaagccaaattctaaacagagtagttggcatgtgaacaaacactagcagcccctccttgcctaaaaaccaccsaaatagagaagttgatcctccttagataagaaccataaatcaaataaaatgggtcagagctaagcccctttaactaaacaggatggtgcctaggaggagactataatgttattaaacttgaca

SEQ ID NO: 638895 - DNA, 576 bp, Homo sapiens
tcttgcctcctggtaatttgccctttacttttcctctgtttctccagctttgaaatcacacgccattttttttaagacaatgtaacaatgtgcaagatattttttgttgttgttttttgcacttttgacataccctatccccaaacacaccccaaaccaggacactgtggaattaatacagtttggaaattgggtatagtttagtgactcagtgttagttaagatgctggcaacagatgttggcaaaggctatggaatgagtcccaagaatgacaaaccttacattactccaaaggtttgaaatccaggatttctctggttaatatggttaatagttccactgctggttttaattgtcttagagtggaaggaggtgtcrtattttcaggccctagtaatctcttccttcagaattcttctgaataaaaagcttagcaacaaaatcactagagttagagtgctatgccttcttgatttaatactaaaacatggaacaaatgaaaccactctggcctttttccaacctctacagatccctcattcttatacttctagtccgtcttttcttcctcataa

SEQ ID NO: 638896 - DNA, 615 bp, Homo sapiens
ggggagggggtatctaccagggttacaacatgtgagcacaggctctgtaacagcttggccccttcccattggtggccagttattctgagcctcagtttcatctctgtgctatccatgcctatggatgatgagatctacacagtctagatgggattaaatgagatgaggtatctgcagcccttagaagagggccagggagccgaacgtggtggctcacacctgtaatcccagcactttgggaggctgagccgggtggatcacttgaggtcaggagttcaaaaacagcctggccaacatggtgaaacccctttgctactaaaaatacagaaactagccaggcatggtggcaggtgcctataatcccagctactcgggacgccaaggtgggagaattgcttgaactgtggaggcggaggttacagcgagttgagatcatgccactgcactccagcctggacgacagagtgagactctgtctcaaaaaaaaaaaaaarggccaggaacatattgggaaacaaaacttgaatggaaaacagctctttatttagtctagaaatgccttcagggccaggtttacttaggaataagacttgatcccttccttgagctacagtc

SEQ ID NO: 638897 - DNA, 449 bp, Homo sapiens
ttggtcaaataaaaatttaattaaaagttaaaaaaattaaaagccatatcaaattttaatattgacaggagggataaaactctgtaacgctgactgtcttagattaggtttccctgaaacatacctataataaggctttgtgtacaagcaatcaattttagaaatactcccaatagaaattgggaaaggggagcgtggtttcagcttgaaccctcagggaaacttgacagtgaaaaccacacaagggaagctggcctgcacactctcactcccacctgtcagctgttggctaaggggaacagggagtgaactcccagatatttcctggtcttttcctgggcagacaaagctttagtagccaaggagacgtctccaacaaaagtcctaggtgtgggccttggaagccayagtgcagggaagccaagagagggagtgcagaagaggaacgg

SEQ ID NO: 638898 - DNA, 552 bp, Homo sapiens
gcagttccttccacccctgcagaaaaccttgatgcaattcctgctttatagcctctgccaaatgaagcacaaacttaattacatcacctccccgacaggacggggagcagcgtgctgggcttcttcagccccctaatctaatcactggcgtgggtcatttcaattacggacaccagagtgtggggggagcgtggctgctcataaaagcctccatgctgttgctcagctaattatgaagctcttactgtctccgcaggtaaataactcaggactgagcagttccggctgctgagatggagtctgatcgagggaacaggacaaggtaggctaagctcgacagggtgatggctgaggyggagcccagggtcacagagggggttgcaaggaaggaagcccggccttcccgaagggctctctgccctgaggagacaatccaccatgcaagaattgattggtggattttaccttaaaacccaagctctgaagtttcctagaagcctcagagccacagggcaggataaaattcagactccacccacttctactaacctt

SEQ ID NO: 638899 - DNA, 610 bp, Homo sapiens
cgtctaattcttttgtaatgatgcartttgcaaaattagaaatgaacatctcaaaaatcaaagaaccaatctaacaagaataaccctgtgcttttgcctgtgattatttttcagtcataatttgcctagttcatgaaattctcacagtttcttaatgcctcctctacattctcacttttggttttcattttctccttctgaagctcatagagatctgcataataggttacctgtcttgagagagagcaataacaaagcagactgtctcaactcccactgaaactaagagtcttaataaatgagaaatgaaaaataaaaaaatcaagtctgaggagcagagaacagtatcagataaatctcacttgaggcaaatttcactaccaggataacatttgaatgtttttatgtgtgaattcaagctcaatgtcccttttgattacatagtcccagggttgaattttttctcttcttttgttctttctgtacgtcccttctctcttagtgttagggacaagactagtacataatacaaggtgttgggaataggcccccaaaatctggccataaactggccccaaaactggccataaacaaaatctctgcagcactg

SEQ ID NO: 638900 - DNA, 610 bp, Homo sapiens
cgtctaattcttttgtaatgatgcagtttgcaaaattagaaatgaacatctcaaaaatcaaagaaccaatctaacaagaataaccctgtgcttttgcctgtgattatttttcagtcataatttgcctagttcatgaaattctcacagtttcttaatgcctcctctacattctcacttttggttttcattttctccttctgaagctcatagagatctgcataataggttacctgtcttgagagagagcaataacaaagcagactgtctcaactcccactgaaactaagagtcttaataaatgagaaatgaaaaataaaaaaatcaagtctgaggagcagagaacastatcagataaatctcacttgaggcaaatttcactaccaggataacatttgaatgtttttatgtgtgaattcaagctcaatgtcccttttgattacatagtcccagggttgaattttttctcttcttttgttctttctgtacgtcccttctctcttagtgttagggacaagactagtacataatacaaggtgttgggaataggcccccaaaatctggccataaactggccccaaaactggccataaacaaaatctctgcagcactg

SEQ ID NO: 638901 - DNA, 554 bp, Homo sapiens
atgcaaagcatttttggaaagtgtactcaggcagaatacccggtgatagaaatgcacaagggaaatcttaatagaaaatcaagcaacaagcccagttaataaagagcctccttcactttcttgccatgaaataatatggcataataaaaggaaggcaggttttagcatctgacgcatttgagttaggatcccacctgtactactttaataactctatgaccttggacaaattgtttaatcactctgagtcccaattaacttatctataaaatggagaaaayatatataaacctcaggattattctaaagaatcacaataatattaaataacttatagaaataacaaagtaggctaggcatttacgtttttagaattaacagtaaaaggaacacaaacttctattactttaccctttctagtgacaaatatccaaagagtaattctgtcacttgagagagttcagtttttcttttgattcacaatctagaatgttaggctttcctgtttcaagttattccccttgtaccacaggttcctcagctaacacaggcaa

SEQ ID NO: 638902 - DNA, 573 bp, Homo sapiens
attttactctctataatcctcactcaaagagaacaggtttgcctcctgtttttgatgcatagcaatctgcctgttctcagattgctcttcaaaatccatcactttcttggaacatcttaggtcttccttctacagtggtgactcaatatggctttgggttttactgagatagcaaaatccccagagcagagaactcacctataacaaactataaaaatacgacatcttttagagagacatgtaaaataacctatccaaaatgtactagaaatyatattatgcaatgattcagactacaggaactagaaggaaaaggtcacaagttcaaaccctggctctgccagttattagctgcctaagcttactaaaaaattactgacaaattactgactagttgacatctgttccttcatcaggaaagggaaatgtaattcctgccccaaagggtggatttgaggactaaatgaaaggatgcatttaaaatactttaaacaatgatttacataaagtaagctgtcagaaaacatcagctagtattattgttgtttttaaaagttatctgcaaaactagat

SEQ ID NO: 638903 - DNA, 573 bp, Homo sapiens
acatctgttccttcatcaggaaagggaaatgtaattcctgccccaaagggtggatttgaggactaaatgaaaggatgcatttaaaatactttaaacaatgatttacataaagtaagctgtcagaaaacatcagctagtattattgttgtttttaaaagttatctgcaaaactagataactctagaggaattctgtctaagaaagtacctcatgcatatgcagatttagtgacttctgagaaaacatatgtcaaaatgtggggtgctgattttatcatagtctatccacagataaaactttactaggtgttattctcctgagtgattgatagtggtatgtatgatcaaatatgatagataaccacagatgttctatttcaagcaattmaaggcattaatctcatactaagtggatcgctccaagacatgctgacacaaaataagaaaaataatacatatcccctttttgtccagagcaaaatgtcaatttcttttagatttcttagacatcagtagaacacttgatttaagagttagttaccactgcttgtcagtggaagcagaaagatatagt

SEQ ID NO: 638904 - DNA, 563 bp, Homo sapiens
ggccagcaccagtaatcctttgcatcaaggaatagccaattaaattgtcttcaaaaaattattaattaatctcatttgaatttttcagaggaacaacgtttttgtttttaagtggcaatatgtacgtgctaggaagaagggtgcttgaaagaacatatgtcctggatatttcatagctttttctttgtaatatgtgaagctaccttctatagaattattcactackgcaaaattaatgtgataagatatatatatatatgcatgccatctttgtctttgattcttaagttctttgtatttgattctgtaatgcatgccatctttgtatttgattattaaggtgagaacaaacctcaggagaaatagaatcctttgaacacatttttacaatgattcagtatagcaaggagaatagaaccacgatactattgcctcactattaagatttgtaaatcaacaatgaaattatgagctccccagctaagaatgtaccctccacctcttggccaagaggatcccaaagaaagcctgaaatgagttcagttcatgatgcgaagggaggt

SEQ ID NO: 638905 - DNA, 375 bp, Homo sapiens
agaaatagaatcctttgaacacatttttacaatgattcagtatagcaaggagaatagaaccacgatactattgcctcactattaagatttgtaaatcaacaatgaaattatgagctccccagctaagaatgtaccctccacctcttggccaagaggatcccaaagaaagcctgaaatgagttcagttcatgatgcgaagggaggtcaggcatacctcattacaactcytccctttggagtttaggcacaactgaccaccactaacattaaactagaaatcataagactgacaaagcagactttttgtagcaataagatatccaactctaatctgactccagtattgtaccacatgacagataacaggccctgaaa

SEQ ID NO: 638906 - DNA, 561 bp, Homo sapiens
ccaccactaacattaaactagaaatcataagactgacaaagcagactttttgtagcaataagatatccaactctaatctgactccagtattgtaccacatgacagataacaggccctgaaaaatatcagtgttttaccccaaaatatatttatttggcrtatcttgaaagggtcatctcttgtggatgaatttgcattatccagagaatctccttccctttccaggtcttttcttgatccaggagagatttacctaagaatctgatatcttttaagatctaataagagaaatttactgtgtattccctctgaagcctactactggaggcttcatttacatcacaagaaccttgggttccacaaccctccccactctccttatattaactcaagcatttctttctactgacttttactttttaggcaaggctttactttttcagccaatggccaatcaggaaacctctgagtccacctatgacctgtgagacccatcatcctacttcaagaagtcctgcctttccatgccaaaccaatgtattcctcacatgtattggttta

SEQ ID NO: 638907 - DNA, 561 bp, Homo sapiens
ccaccactaacattaaactagaaatcataagactgacaaagcagactttttgtagcaataagatatccaactctaatctgactccagtattgtaccacatgacagataacaggccctgaaaaatatcagtgttttaccccaaaatatatttatttggcatatcttgaaagggtcatctcttgtggatgaatttgcattatccagagaatctccttccctttccaggtcttttcttgatccaggagagatttacctaagaatctgataycttttaagatctaataagagaaatttactgtgtattccctctgaagcctactactggaggcttcatttacatcacaagaaccttgggttccacaaccctccccactctccttatattaactcaagcatttctttctactgacttttactttttaggcaaggctttactttttcagccaatggccaatcaggaaacctctgagtccacctatgacctgtgagacccatcatcctacttcaagaagtcctgcctttccatgccaaaccaatgtattcctcacatgtattggttta

SEQ ID NO: 638908 - DNA, 525 bp, Homo sapiens
ttttcttgatccaggagagatttacctaagaatctgatatcttttaagatctaataagagaaatttactgtgtattccctctgaagcctactactggaggcttcatttacatcacaagaaccttgggttccacaaccctccccactctccttatattaactcaagcatttctttctactgacttttactttttaggcaaggctttactttttcagccaatggccaatcaggaaacctctgagtccacctatgacctgtgagacccatcatcctacttcaagaagtcctgcctttccatgccaaaccaatgtattcctcacatgtattggtttaagtatctgcccgtaacttctgtccccctaaagtgtataaaaacaagccgtaacccagacactttgggcatgtgttsttgagactgtatcctgggccatgatcactcatgtttggctcagaataaaactcctcaaatattttacagagtttggctttttttcatcaacaggttcaactattataatttatatt

SEQ ID NO: 638909 - DNA, 532 bp, Homo sapiens
gtcctaaattccagctgtggtgacaagatgccaggacatgttttccaactgataaaatgatattaataaataaataaataaagatgtgaaagcatgtaggtttaatgaaaatgtgaataacagatggtagggtagtaagcctctgtaagatatggggtatcacagaggcggaggagcagaaagcttttaattttacatatacccttcyatactgtgaataatttaaaccaggaacatgtattattactataaaaccataataagagtatcaaaaattatataaattgtatatatacatacacatacacatttatgtgtgtctggctttttgtcaatctatgtatatacatatgcatgtacatacatatgcatgtacatacatatgcatgtacatacatatgcatgtacatacatatgcatgtacatacatatgcatgtacatacatatgtgtttatggaaacatgcatatacatgaatatcatgcatacacatttagatatatattttctgagtctgtagaactcaaaccta

SEQ ID NO: 638910 - DNA, 560 bp, Homo sapiens
tcctgatttgcatagttttytgatttgggttcctaaggaatctccttgtctgcttgtggaaactaaattgggatgatcacggatggaagcagagagaaccacaagcagactggtacactgatttgtgtaaacaatagttgtggtttagactatagtagtagaaaagatgaaaaaatatgaggaacatgtgatatattctggaagaaaaattcacacacctagatgatgggtagtaggttggcaagtgaaacaaaagtagaactgaaaaatcattaaccagcatccagatggataatggtagttttactgagatagggaggtctggagtaacaacatgtttggagtcagagaggaaattaataactttatatttacatatatcatatccctaataaaataaaatgtcttaagaatcctatgtgtgacatgtggctaaaagaataattcatttaagaatcaggatataggactaagacaattaattttatttaagttatataaagtgattttaatgtaagttatatagttcaatatagaggaaatccgtggccatacataat

SEQ ID NO: 638911 - DNA, 496 bp, Homo sapiens
aatcacaaacacttctaccacctcactggattcaagcagtgtctcaatctaagcctcttacaaaacaaaaaataagggagaaattttcaccaaagaaatctaatttaaaaataatacaggatcacctccacagttgccttgcaattctacactttatagcaccatgcccttacaccattagtggaggaagaagtggrcaaaattctgaggccatcttgtctagaaattttatatctcaggatacatggcacaaccagtaagactgacattgttctttgaagataccaagttgcataaattttgcctttcagcatacttcattcctatcagaacagatatgagaagacaacaagaggaccctaaagcaaataaagaaacaagaagaacaaagtgaaaattaaggaagcagtattagtataggcttagtgccagaagtaggcaacattttaagcagcatgagttttaatacaaaaaaagtgtttacaaaatgtttgaa

SEQ ID NO: 638912 - DNA, 496 bp, Homo sapiens
aatcacaaacacttctaccacctcactggattcaagcagtgtctcaatctaagcctcttacaaaacaaaaaataagggagaaattttcaccaaagaaatctaatttaaaaataatacaggatcacctccacagttgccttgcaattctacactttatagcaccatgcccttacaccattagtggaggaagaagtggacamaattctgaggccatcttgtctagaaattttatatctcaggatacatggcacaaccagtaagactgacattgttctttgaagataccaagttgcataaattttgcctttcagcatacttcattcctatcagaacagatatgagaagacaacaagaggaccctaaagcaaataaagaaacaagaagaacaaagtgaaaattaaggaagcagtattagtataggcttagtgccagaagtaggcaacattttaagcagcatgagttttaatacaaaaaaagtgtttacaaaatgtttgaa

SEQ ID NO: 638913 - DNA, 457 bp, Homo sapiens
aagtgaaaattaaggaagcagtattagtataggcttagtgccagaagtaggcaacattttaagcagcatgagttttaatacaaaaaaagtgtttacaaaatgtttgaaacagcaagcagtgtaatctcaaagctaaggaatcctagaagtacaccaagaacaccatgaagtttattctctagcawaattgatgattgtacttctaacagagatattcaggacctaaactcaacattgaaccaaatggatctgacagacctttacaaaactctccaccctaaaacaatagagtatacattcttctcatggccacgtggcacatactctaaaatcaaccacataactggacataaaactattctcaataaatgcaaaagaataaaaatcataccaaatacattctcagaccacagctcaataaaaatagaagccaagactatgatcatcactcaaaata

SEQ ID NO: 638914 - DNA, 574 bp, Homo sapiens
tttttattagcaggtatagcaaagaaaaacagatgccttatactaaatagaacctggtgttcttaaaaaaaaaaaaaaawtagagaagcaagaacaaatcaaccccagggctagcagaagaaaagaaataaccagaatcagagctgaactgaaggaaattgggacatgaaaaaagattcaaaagatcaacaattccaggagttggttttttgaaagcattagtaagatagctaggccactagctagactaataaagaagaaaagagagaagatcccaataaacacaattagatatgatgaaaggaatgttgctattgaccccaccaaaataaaaacaaacatcagaaactactctgaatacctctatggacaagaactagaaactctagaagagatggacaaattcctgaatacgtacatactcccaatcaataaatatgatttatcacataaacagaactaaagcaaaaaccacatgattatcttcttactgagtcagtaagaaattgattccctgaacaaaccaataatgagctctaaaatttaatcagtcaggaaacagcctacaactcct

SEQ ID NO: 638915 - DNA, 526 bp, Homo sapiens
atagaacctggtgttcttaaaaaaaaaaaaaaaatagagaagcaagaacaaatcaaccccagggctagcagaagaaaagaaataaccagaatcagagctgaactgaaggaaattgggacatgaaaaaagattcaaaagatcaacaattccaggagttggttttttgaaagcattagtaagatagctaggccactagctagactaataaagaagaaaagagagragatcccaataaacacaattagatatgatgaaaggaatgttgctattgaccccaccaaaataaaaacaaacatcagaaactactctgaatacctctatggacaagaactagaaactctagaagagatggacaaattcctgaatacgtacatactcccaatcaataaatatgatttatcacataaacagaactaaagcaaaaaccacatgattatcttcttactgagtcagtaagaaattgattccctgaacaaaccaataatgagctctaaaatttaatcagtcaggaaacagcctacaactc

SEQ ID NO: 638916 - DNA, 526 bp, Homo sapiens
atagaacctggtgttcttaaaaaaaaaaaaaaaatagagaagcaagaacaaatcaaccccagggctagcagaagaaaagaaataaccagaatcagagctgaactgaaggaaattgggacatgaaaaaagattcaaaagatcaacaattccaggagttggttttttgaaagcattagtaagatagctaggccactagctagactaataaagaagaaaagagagaagatcccaataaacacaattagatatgatgaaaggaatgttgctattgaccccaccaaaataaaaacaaacatcagaaactactctgaatacctctatggacaagaactagaaamtctagaagagatggacaaattcctgaatacgtacatactcccaatcaataaatatgatttatcacataaacagaactaaagcaaaaaccacatgattatcttcttactgagtcagtaagaaattgattccctgaacaaaccaataatgagctctaaaatttaatcagtcaggaaacagcctacaactc

SEQ ID NO: 638917 - DNA, 526 bp, Homo sapiens
atagaacctggtgttcttaaaaaaaaaaaaaaaatagagaagcaagaacaaatcaaccccagggctagcagaagaaaagaaataaccagaatcagagctgaactgaaggaaattgggacatgaaaaaagattcaaaagatcaacaattccaggagttggttttttgaaagcattagtaagatagctaggccactagctagactaataaagaagaaaagagagaagatcccaataaacacaattagatatgatgaaaggaatgttgctattgaccccaccaaaataaaaacaaacatcagaaactactctgaatacctctatggacaagaactagaaactctagaagagatggacaaattcctgaatacrtacatactcccaatcaataaatatgatttatcacataaacagaactaaagcaaaaaccacatgattatcttcttactgagtcagtaagaaattgattccctgaacaaaccaataatgagctctaaaatttaatcagtcaggaaacagcctacaactc

SEQ ID NO: 638918 - DNA, 526 bp, Homo sapiens
atagaacctggtgttcttaaaaaaaaaaaaaaaatagagaagcaagaacaaatcaaccccagggctagcagaagaaaagaaataaccagaatcagagctgaactgaaggaaattgggacatgaaaaaagattcaaaagatcaacaattccaggagttggttttttgaaagcattagtaagatagctaggccactagctagactaataaagaagaaaagagagaagatcccaataaacacaattagatatgatgaaaggaatgttgctattgaccccaccaaaataaaaacaaacatcagaaactactctgaatacctctatggacaagaactagaaactctagaagagatggacaaattcctgaatacgtacatactcccaatcaataaatatgatttatcacataaacagaactaaagyaaaaaccacatgattatcttcttactgagtcagtaagaaattgattccctgaacaaaccaataatgagctctaaaatttaatcagtcaggaaacagcctacaactc

SEQ ID NO: 638919 - DNA, 422 bp, Homo sapiens
caataaatatgatttatcacataaacagaactaaagcaaaaaccacatgattatcttcttactgagtcagtaagaaattgattccctgaacaaaccaataatgagctctaaaatttaatcagtcaggaaacagcctacaactcctcccatccaaaaactgaggacttratggattcacagccaaattctaccagatgtgcaaagaggaactagtaccattcctacagaaaccattaccaaaaaaaaaaaaaaaattgaggagaagggactcctccccaactcattctgtgaggccagcatcatcttgatgccaaaaccttgcagaaacacaacaacaaaaaaaacttcaggtcatccttgatgaacatcaacacaaaaatcctcaaaaaaatactgaaaaactgaatccagtatcacaccaa

SEQ ID NO: 638920 - DNA, 422 bp, Homo sapiens
caataaatatgatttatcacataaacagaactaaagcaaaaaccacatgattatcttcttactgagtcagtaagaaattgattccctgaacaaaccaataatgagctctaaaatttaatcagtcaggaaacagcctacaactcctcccatccaaaaactgaggacttgatggattcacagccaaattctaccagatgtgcaaagaggaactagtaccattcctacagaaaccattaccaaaaaaaaaaaaaaaattgaggagaagggactcctccccractcattctgtgaggccagcatcatcttgatgccaaaaccttgcagaaacacaacaacaaaaaaaacttcaggtcatccttgatgaacatcaacacaaaaatcctcaaaaaaatactgaaaaactgaatccagtatcacaccaa

SEQ ID NO: 638921 - DNA, 553 bp, Homo sapiens
gtttatagtcagaatcagcatcgtgaaaaatgcttaagaatgtaagtaattgaataaatgaatttaagactgttggcttttaaaaaactctgctgaacagaagtcatgttctcttatatcacagctcattctcccacaaaactgatggcctatagattaggcactctaattggtgttgttagcagaaaaataactgacaygactcctatcttccaaagctgatatggaggtcagcaagatgatggattaggagatatcagccttcatcccccttgatcaacaaggagacagctgtccattcacaagaatagccttggggagaaggagctcaaagatttcaattaaaaacctgcagcaacagagtggaggaaaaatgaataactacacagaaaggatcactagagagatcagcatatctgagatatccagagacagctaggaacaaagaagagtgggggctatcattatcagccatgacatgagtgccactgcagtccctagtggcctactccacataggacaggagcagcttgtgaccccaaagtaacccaca

SEQ ID NO: 638922 - DNA, 567 bp, Homo sapiens
tcaattaaaaacctgcagcaacagagtggaggaaaaatgaataactrcacagaaaggatcactagagagatcagcatatctgagatatccagagacagctaggaacaaagaagagtgggggctatcattatcagccatgacatgagtgccactgcagtccctagtggcctactccacataggacaggagcagcttgtgaccccaaagtaacccacagccattgccaccacaaactctccagggagaaagatgttattgcacctaattcacaagaatggccactgttttacagtcctagtaccagggatgccaccctccctaccccacttgcactcatttttttctgtcatggaaaggcaaattccctgagcaaaactgaatctgaagtgtattgtagaaatatttgagtgtaattttagtgacttattgataaaagggatggcaatggggcagatgtcacttttgaatgccatagcctcccagacataacttagatcatcaaccaagcatatatgtagagtaattatatcagagagtccaaagataagtcagcagtaagtaataata

SEQ ID NO: 638923 - DNA, 553 bp, Homo sapiens
gtttatagtcagaatcagcatcgtgaaaaatgcttaagaatgtaagtaattgaataaatgaatttaagactgttggcttttaaaaaactctgctgaacagaagtcatgttctcttatatcacagctcattctcccacaaaactgatggcctatagattaggcactctaattggtgttgttagcagaaaaataactgacacgactcctatcttccaaagctgatatggaggtcagcaagatgatggattaggagatatcagccttcatcccccttgatcaacaaggagacagctgtccattcacaagaatagccttggggagaaggagctcaaagatttcaattaaaaacctgcagcaacagagtggaggaaaaatgaataactacacagaaaggatcactrgagagatcagcatatctgagatatccagagacagctaggaacaaagaagagtgggggctatcattatcagccatgacatgagtgccactgcagtccctagtggcctactccacataggacaggagcagcttgtgaccccaaagtaacccaca

SEQ ID NO: 638924 - DNA, 553 bp, Homo sapiens
gtttatagtcagaatcagcatcgtgaaaaatgcttaagaatgtaagtaattgaataaatgaatttaagactgttggcttttaaaaaactctgctgaacagaagtcatgttctcttatatcacagctcattctcccacaaaactgatggcctatagattaggcactctaattggtgttgttagcagaaaaataactgacacgactcctatcttccaaagctgatatggaggtcagcaagatgatggattaggagatatcagccttcatcccccttgatcaacaaggagacagctgtccattcacaagaatagccttggggagaaggagctcaaagatttcaattaaaaacctgcagcaacagagtggaggaaaaatgaataactacacagaaaggatcactagagagatcagcatatctgagatatccagagacagctaggaacaaagaagagtgggggctatcattatcagccatgacatgartgccactgcagtccctagtggcctactccacataggacaggagcagcttgtgaccccaaagtaacccaca

SEQ ID NO: 638925 - DNA, 561 bp, Homo sapiens
taaacatgatttcatgccaagaaaatgttccttaacattttgtgctattggcttgccacacaaaggcaatcctaaataataaaatcttaataatattcaaaacattcttattcactgaaccagtccagtggctctattattgtctaagtttagtatcaatatgcagtctactaacaacaygtaaaggcccttgcaagttagtgaaatagtatgcaattacaattaatattatcatcttgtggaagaaaactttcaggaaacaatcctagtcaactttacaaatctcaaagtaaatatagtaattaattcacttattctttcactgaagtcaaatgatgggggctattttaacagttcattgcaacagcataaagttattttcctcaagtcatcatggaagttcaggtaagtgagacagagggtgttgtccaaactagaatttaagctggaaaataattagtaatcctactacacataaaattgccaatgtttaaaaccaattaatagttaaaaacttggttttaatgtaaaatgaataaaagtcatgatctttgatactat

SEQ ID NO: 638926 - DNA, 561 bp, Homo sapiens
taaacatgatttcatgccaagaaaatgttccttaacattttgtgctattggcttgccacacaaaggcaatcctaaataataaaatcttaataatattcaaaacattcttattcactgaaccagtccagtggctctattattgtctaagtttagtatcaatatgcagtctactaacaacatgtaaaggcccttgcaagttagtgaaatagtatgcaattacaattaatattatcatcttgtggaagaaaactttcaggaaacaatcctagtcaactttacaaatctcaaagtaaatatagtaattmattcacttattctttcactgaagtcaaatgatgggggctattttaacagttcattgcaacagcataaagttattttcctcaagtcatcatggaagttcaggtaagtgagacagagggtgttgtccaaactagaatttaagctggaaaataattagtaatcctactacacataaaattgccaatgtttaaaaccaattaatagttaaaaacttggttttaatgtaaaatgaataaaagtcatgatctttgatactat

SEQ ID NO: 638927 - DNA, 602 bp, Homo sapiens
actttcaggaaacaatcctagtcaactttacaaatctcaaagtaaatatagtaattaattcacttattctttcactgaagtcaaatgatgggggctattttaacagttcattgcaacagcataaagttattttcctcaagtcatcatggaagttcaggtaagtgagacagagggtgttgtccaaactagaatttaagctggaaaataattagtaatcctactacacataaaattgccaatgtttaaaaccaattaatagttaaaaacttggttttaatgtaaaatgaataaaagtcatgatctytgatactatgttgacagttctttaagtttccttagtgaggggagaggaattggtacaatgatatttgaaactacttagagggctcttattaagtaatcaaagagtcattagctgaaatctacaacaattaaaaatgctagaacagcatcaccaaatggcacctctctgactcctatttgaagaacaaaatttacaggaagaagtatatttgactgctgcattagaaagcttgcatctattttacaacccatttcagtagccttgcaacttttaatccaatatttctcatcaccaaagt

SEQ ID NO: 638928 - DNA, 602 bp, Homo sapiens
actttcaggaaacaatcctagtcaactttacaaatctcaaagtaaatatagtaattaattcacttattctttcactgaagtcaaatgatgggggctattttaacagttcattgcaacagcataaagttattttcctcaagtcatcatggaagttcaggtaagtgagacagagggtgttgtccaaactagaatttaagctggaaaataattagtaatcctactacacataaaattgccaatgtttaaaaccaattaatagttaaaaacttggttttaatgtaaaatgaataaaagtcatgatctttgatactatgttgacagttctttaagtttccttagtgaggggagaggaattggtacaatgatatttgaaactacttagagggytcttattaagtaatcaaagagtcattagctgaaatctacaacaattaaaaatgctagaacagcatcaccaaatggcacctctctgactcctatttgaagaacaaaatttacaggaagaagtatatttgactgctgcattagaaagcttgcatctattttacaacccatttcagtagccttgcaacttttaatccaatatttctcatcaccaaagt

SEQ ID NO: 638929 - DNA, 602 bp, Homo sapiens
ggagttttttgatgtgtaagcaggaagggatgctggtaatgtttaattttttataattgtggtaaaacatacataatataaaatttggctattttaaccatttttaaatgtttagttctatgacattaagaacatttacaatgttgtgcaaccatcatcaccatctatctccaaaactttttcatcttcccaacctgaaactatatacccattaaacatagtcttcactccatcctgcacccattccctgacaatcatcattttactttatgtctttataaaattgaccactgtaggtacctcatatatgtacrttaatacttttttttttttttttcagatgaagttttgctcttattgcccaggctggagtgctatggtgtgattctcggctcactgcaacttctgcttcccaggctcaagcgatcctcctgcctcagcttccagagtagctggaattacaggtgcctgccaccatgcttggctaatttttgtacttttagtagagatggggtttcaccatgttggccaggctggtctcatactcctgaccccaggtgatctgcctgccttagcctcccaaagttctgggattacaggca

SEQ ID NO: 638930 - DNA, 576 bp, Homo sapiens
tgtggaacgaatgacccttcctctttgtaatagtttcttatgcttatgtttattacataagtatttgcatcactgcaacaagataatacccaaatttgcatcaactgattacaaggattccaatttcaaccattattctgtaacaaaaatgctgtttagaacaatcataacagttatattacatttttaacttttctaaaacaatgccatatatcttacttatccccaaaattttattaccaaatataataactatgtctatctgttcccatttggtatacaaaaacaagtgcagtggggcttgttttagagctggggaatgattatgatatggtagaaagagaactgcaaaaaaagttaataagagctgaatccatagcctgtgtgttcccagttcctcctctcaatcttttcctaccactttatacattttttgcttatggtttcctggaggccatgccctttgctgactactgccccagtagtcagtattgcttgagcaataacagcagcagcagyccttgaagttgtagtacataacacattgactcacaaaaataaatttacagagagaca

SEQ ID NO: 638931 - DNA, 562 bp, Homo sapiens
tgaatatcaaatagaagaagctagaaatgtcaaagtatcatggtcttgggcagctctaccactgtggctttgcagggtacagcctccctcctggctgctttcatgggttggcattgagtgctggtggcttttccaggtgcaagggcaagctgtcagtggatctacctttctggggtctggaggacagtagtcctcttctcatagctccactaggtggtaccccagtagggactctgtgtgggggctctgtccccacattttccttctgcactgccctagcagagggtctccatgagggcctcactcctgcagcaaacttctgcctgggcatccaggggttcccatacatcttctgaagactaggcagaggtgcccaaacctcaattcttgacttctgtgcacctgcagggtcaacaccacatggaagctgccaaggcctgggggcttccaccctctgaagcaacagccgaagctgtacyttggctccttttaatcacagctggagtggctgggacacagggtaccaagtccctagagtgcatacagcacagggattctgggc

SEQ ID NO: 638932 - DNA, 484 bp, Homo sapiens
tcagcagcaccccactctactgttaccaatttactgtattcgtccattttcatgctgctgctaaagacatacctgagactaggcaatttaccaaaaaaagagatttaattggacttacagttccacgtggctgggaaagtctcacaataatggtggaaggcaaggagaagcaagtgaagtcttacgtggataacagcagacaaagagggtttgtgcaggaaaactcctccttacaatgaccatcagatctcgtgagaattattcactatcacaagaatagcatgggaaagacctgcctccatgattcaattacytcctaccgggtccctcccattatacttgggaatttaagatgagattttggtggggacacagcaaaaccatatcactatctatagagatgttttggtcagaatgaaatttggtttccttgaagattatgggtgctgagagaacaggtaacacacgtgcttcattatgctaa

SEQ ID NO: 638933 - DNA, 534 bp, Homo sapiens
cagtggattgctgcaaacttttccaagtagtagtcccattgaagttgctatgctagatgtggtgtatttgttacaaaaaattaacacagtccccagtaaatggtacaaagcaactgatctgttgaatgcaatcttttctatcaagctgggctcttggaggtaaagcatataaactatgtccacaggttctggtaaccagtgatttcttttgaggtttggccattgagaatcagaaggaaggattgggggcctacctataaagccatcttgagctggcttgattgaaagttactgatcttctaatcaactgtatgtctccactttccagtatcctctccctcactttattgctttgagcctaaggatgttaataacttggttaccacaaagtttcaggttatggtactaaatctacacttttgtaaatakttccttaataaataaacctgttggaattatctaatactgcatgtgctctctatttctttgggactttgactccttgttacaagaagtcatcaaatctgcctgaga

SEQ ID NO: 638934 - DNA, 571 bp, Homo sapiens
cctggggtttggtctaggttttgctgcttggcacacagaaagccaatcaataagacaacaagtattgccaaggaagaaggctttaattgggtgctgcagctgaggagatgggagctcagtctcaaatccatcttcctgactgactaaaagcaggggtttatatagcagggaagtaatgtaacaatgtgtaagaaaacaggaactaggaggggcaaggaagcaatcatgatgaatgagggatctggcatctggtatggtgatctggtaagtttcagttttttgatagtttttttgagaagcttgaaggtcatttcctgagaaaggaactcagataaaacaaatataagtttcaagctttaaaatgagaaaggtcaattttgaagtttatccaaaaaaacagtctgtggaactactgggtcagtttacatgtgaaaagcaaaataaatgtgattacaattttggaatatatgaattatcacattttttacatttaatctatttattatatttakaaagctcatctagatacttcaaatagttctgttaggcagttgaaatacttcagaaaaaa

SEQ ID NO: 638935 - DNA, 575 bp, Homo sapiens
agcttccagctgggtttggctattgggagctaccagccaaataattaggttgtaaaagacctcgaggtcatggtacccttggtgttctttgcagggtaactagaaattgactacataccttttaaaaatccatagctcctctcagctcttgcctgaagcttctagtacttcttgggtaacaacaattaattaaggcatgctaaggactatgggtaatagtgtatccctgctgttgccatttccatggtacttcacacactctgttgagtttctatccctgcctacacatatatcaatagtttccgtattgcaagcctcaattattctgtttgagcatgccaggtccttcctgccasgtccctaactgtttcatttatcaatatttataaaataaagtgagcaagcaattaaggaaggctgtaagttcttttaaatgattttgtttatacaaatagaatgcctttaaaaatattttagctaaaattaaattttgacggtaaaatggccataaattaaatatcaagtaataagactttagttatggtatttttttatagagagacttgtattcacat

SEQ ID NO: 638936 - DNA, 544 bp, Homo sapiens
tacttcttgggtaacaacaattaattaaggcatgctaaggactatgggtaatagtgtatccctgctgttgccatttccatggtacttcacacactctgttgagtttctatccctgcctacacatatatcaatagtttccgtattgcaagcctcaattattctgtttgagcatgccaggtccttcctgccacgtccctaactgtttcatttatcaatatttataaaataaagtgagcaagcaattaaggaaggctgtaagttcttttaaatgattttgtttatacaaatagaatgcctttaaaaatattttagctaaaattaaattttgacrgtaaaatggccataaattaaatatcaagtaataagactttagttatggtatttttttatagagagacttgtattcacatgagttttttcatggatttggaagaagggattgcatcactcataagaggcaaaggaaagagaacttctgggtataactgagttcattctcagtgtgcttggttgttcatcttcaccccttctttttctctatccc

SEQ ID NO: 638937 - DNA, 545 bp, Homo sapiens
ttctcattattttctaatccttttattgttgctatccatcwccattaatcctgcctagatctgctcgtagcacctacttagacccagttattttttggtcctgttttagcattttgaacttctttgggacctaatccctggtttgggacgagaagatcatttgtcagtcttacccaaaaggagaaacagaagttaattggtatttcacttaaataatgttcttcacccaagattaaggctattgaattttataatatactattgaattttataattttcatatgatagagagaaaatgactaacttaaatgttgggtacaggattgactgaatgaaatgattgttttcagcaatgattctcattctttgtggaatttttagagttttaaagttttaatcaattattatggcctaatatatttgattttgttttctccttgtttccttatttcctgtaaagtattatttattatataaataaatcaatataacaaaaggaaattttattttaatactaaactgaatatattattttaagatttttc

SEQ ID NO: 638938 - DNA, 637 bp, Homo sapiens
ttaattccattttatatataacaaattgagaatatgcctattttcttgtagytgacaagtgtctacttacttttaattatagatgtttctttgtaataatgatgacaggtcctttcttatatgatttatgtaaaagtaattgctattaatcttaacataaggcactaactgtaatattgagcacaaggaaaactggatttaggacagcattcaggttggattggggaatagatggacatttctgtttcccttgaatcagtaacttaatcgattgccatttttcacatatgaacaaaatcattcatctacttgttcttgggtgggacattttaatttttaaaagaaaaatgacagaaaataatacaaagtacatgctcagaaagttggtctaaacatagcataatgatcacatgtgcttatgttttttcccatatctaatcaaaatcacaagagaaaaaaagaaattgtgaacttttaagaacaaagagaatagaaggatgatggcagaggatgaaacagaacaacatggtatcacgatgtgacagccagcaaaggagaataaaagggacttcccaggatagcaattgtactctagacagcaaaagtaatctttctagacttgctgctgtaagatgga

SEQ ID NO: 638939 - DNA, 606 bp, Homo sapiens
agtaggagtcagggaagattattcctaggctttgaaacctataaaccaataactatggctggaatttgtccgcatgaatgtcaaaactgtaatggaccagtgactcctttttaccttcacttttccatttctgatccagaataactatagctattgttctatacatgtcccattattgattagctgtgtttgggaatgaccatttttctctttagttttacaggtccacagatggtaaataattgtacccaaaaagctgtagttactagtttataaccaggagtctcatctctacctggacttgatctagatgatgagattatggactttgagcaaatgctgtaaggggatgacactgttaggaaacttgstaggtgatgagtgcatttagcatgtgaaaggactgtgaagcactgggggctggatggcagaatgtggcagtctctaagtttacctatagtgattccttcctctttatgttcacacctttattgctctggttctgagatataggaaaccatgtgcaaggaacagggagaagcatctaaaagtaaagaactgtcatcagctgatatccaagaagaaaatgagaatcttggaatgctg

SEQ ID NO: 638940 - DNA, 590 bp, Homo sapiens
aaagtgttcaaagggatttaccccagagatcacaaatgagggtggtataaaggtttaaagctgaggactgcttttagcattatttgccttttaaatgtatgtatatatgcaaatcaataaatgtgattcaccagataaacaattaaaraaaaacccatatgatcatctcaatagatacggaaaatgctttggataaaatccaaatctcttcatgataaaaaccctgaacaaaccaggcatcaaagaaacaaacctcaaaataatgaatcatccataagaaatctgcagccaacattatactgaataagtaaaagctggagacattccccttatgaacaggaacgagacaagaaagccctctcaccaactcctattcaacatagtcctgaaagtcctagccagaacaatcaggtgagagaaggaaataaaagatatccatacaggaaaataagaagtcaaattatctctcttcactgatgatatgattctatacctagaaaaccttaaagggtctgccaaaaggcacctagaactgaaaaatgacttcagaaaagatttaggatacaaaatcaatgtacaaaaattggtag

SEQ ID NO: 638941 - DNA, 640 bp, Homo sapiens
ttttcctttcttttcctcttgttatcagatggattaacaaaattatcttgtggaataaaacagagaatcaaattgcagctawgcaggcaatgagcaaaactgtagatattctttcaccttcagtttctctatatagatatttgtggtttctcatagttaattgaaaacacatagcaagcccacttggtgccaaactggagagtagtataatcctctttgcataacagttattggcagcaatttctaagaatcgatattagaaattaataatttattctagctttttataattgttacgtagtttttctgtcatagtattgttttgggtttgacaatgagggataggattggagaggatacagaatatacagtttggtggggatatttttcatctttctaagttgcattttaggtgaaggaagagtttaaaaacttagtctagttatgcttattcagtagatattactggcaaaggaaagagtttctctttgaaaagagacaattgagctttttgaaatactttcattttcttaacaataagaatgcatttcacaaaggcctcaggccattctgattacacctagacaataaaatttctccacatctcaggtgacaccactagtgtttctgctaagtgcaa

SEQ ID NO: 638942 - DNA, 640 bp, Homo sapiens
ttttcctttcttttcctcttgttatcagatggattaacaaaattatcttgtggaataaaacagagaatcaaattgcagctaagcaggcaatgagcaaaactgtagatattctttcaccttcagtttctctatatagatatttgtggtttctcatagttaattgaaaacacatagcaagcccacttggtgccaaactggagagtagtataatcctctttgcataacagttattggcagcaatttctaagaatcgatattagaaattaataatttattctagctttttataattgttacgtagtttttctgtcatagtattgttttgggtttgacaatgagggataggattggagaggatacagaatatacagtttggtggggatatttttcatctttctaagttgcattttaggtgaaggaagagtttaaaaacttagtctagttatgcttattcagtagatattactggcaaaggaaagagtttytctttgaaaagagacaattgagctttttgaaatactttcattttcttaacaataagaatgcatttcacaaaggcctcaggccattctgattacacctagacaataaaatttctccacatctcaggtgacaccactagtgtttctgctaagtgcaa

SEQ ID NO: 638943 - DNA, 419 bp, Homo sapiens
gtttgaagaaaaagatgtttcttgtgttgacacatgccagtactatggactttttaatcaatcttctaatggtttttttacacttccagtaactgagggtctctaattaggaagcacaagattacrtgcaaatcagacttattgatgtagctaaattggaactagagaatatgcatacgatatctgggttcctcactcatgattaaggttttttaaagctcaatttacatttttaatatagaaaaatatgtaatcattacaaaatgtcttttgtttccttcagtataatttatacttagctaaaaatagattataattgaagagtttaataaatttgaaaatgcatacaatcatgtcaagttatagaacattcacgtcacaagataaactttcctcatgcctcttcccagccaatcatg

SEQ ID NO: 638944 - DNA, 580 bp, Homo sapiens
ccctgctataactcaatgactccaccagaggtcatagtactataaatggaaccatgaaatcgctggtaaatatcttttaaattccccttgaatttctaaaatattgagacacaaactacaagagccctgagaactatcacacttactgatataagatgaaaccaaacacctcccttggggattatgtgaaaggtaagccagagagagtcatctgaacattgtagaaaaattagatatgcaaataatgtccaccactatgtaaatcstgtttcaatacaaaggaaaacaattacaatagcagtatttcccatttctgcacatttttattaatatttgttcatttgactttacaacagtcctaggaagaaaagagagttattattattctcatttttttaaaaagtaacaacgttccaggagattcagtcaatttccaccctagttctatggctatggtttacttttataagccctagtcataaatggtaaaatatgaaacaaaaagcatttataaatctgatttttatttgctgctgcattgatgacataaataatggtttttaaagaactcaaacagaat

SEQ ID NO: 638945 - DNA, 596 bp, Homo sapiens
tgagacacaaactacaagagccctgagaactatcacacttactgatataagatgaaaccaaacacctcccttggggattatgtgaaaggtaagccagagagagtcatctgaacattgtagaaaaattagatatgcaaataatgtccaccactatgtaaatcgtgtttcaatacaaaggaaaacaattacaatagcagtatttcccatttctgcacatttttattaatatttgytcatttgactttacaacagtcctaggaagaaaagagagttattattattctcatttttttaaaaagtaacaacgttccaggagattcagtcaatttccaccctagttctatggctatggtttacttttataagccctagtcataaatggtaaaatatgaaacaaaaagcatttataaatctgatttttatttgctgctgcattgatgacataaataatggtttttaaagaactcaaacagaatttagaacatagagacctgtaggttttctttaaaacaataaatagaatgctcttgggagaaaagcatatagacacaaattttttaatctaataaactgtactcctcaaagtcatctatctt

SEQ ID NO: 638946 - DNA, 634 bp, Homo sapiens
ttctttactgaaacttttcgcccactgcttggtagtaactcctatttgcctcttcccccagctcctagcaaccaccattccrctcttttttttttttgacaaataaaactatacgtatgtactatgtacaacacactattttaaaggatatatacattgtgaaatgactggctttagctaattaacatattcattagctcgcattattatttttatggtgagaacactttgcatccagtctgttaccattattcatggttgcaaaaaagtagatctcaaaaaagtagagggtagaatggtggatgtcagaggctggagtgggtgggaggtgtggaattggggagatgttggtcaaacgataccaaatttcagttagaaggaaaaagttcaagaggatctattccacagtatggttactgtagttaaccacatattgtgttctattctattctgtgattccataaatttgaatatttttgatatctcatatgtcttggtgctgttataacaaaatagcatagactatgtaatttataaacaacataaacttatttctcacatttctggaggcctagaagtccaagatcaaggtgctggcaggttcagtgtcaggtgagggctgcttgcaagatga

SEQ ID NO: 638947 - DNA, 583 bp, Homo sapiens
atgctagtggtggagttgataagaagtagcatattttggattaggttacagttgagccaatgacttatgtgttaattagagaaagagaggtgtcaaggatggctctagggcttttggcctgtgcagctagtaaagtagagtggccatcaactgaaatggagaaagtgatgggcaaagtaggcttgtgaggaaaaactcagagcttcttttggacatacagaacttcatatatctattaaacatcaaagtggcaatgtcggttacgcagttagacatgctagcctggatttgggatggagaaataaatgtgggagttgttggcatgtggatggtgtttaaaggcatgagagcaaatgaaatcaccgagggagagagggtagttmgggaagaaaagaagacaaaggactgagtcctggagccctccaatgtgaagaggaaaaagcttcaagcctctgagcagcaacaaccaatgagattgagggaaaggcaagaggtgtggtattgtggaagccatgtgtggaaggcacatgaaagaggagtagctgcatgaccaccacattgagcttccggctgaggaattctt

SEQ ID NO: 638948 - DNA, 537 bp, Homo sapiens
aattctctggcaaagtcagttgatgctctttctggggctgactttcattgttatgggttctggagttccaccacaataaaaacagaaatgagaggccagacagctctctcagatagtccagcctggatacatggaacaaaagcaaamgtggccttcctttcttaagaatacctagtgagttctattgattggaaacttagccattaggttcactgtctttgagaccttttcgtgttggccattcactaacttagagagttgaatactgggcttgtgggagaagtttctgggatataagaaaaaaaggaatttcattttggttatcatctacattattttttgactttgtgttttcagaattagaacaatttacttctcatccttacagtatcctagtgaggaaggtctacttttatattctcagtttacagataaggaactccaaacatagtaaagatcacattcaattagcaagtggcattataagttctgtagatcccagttataatctatggtttccaaactaccctagaatat

SEQ ID NO: 638949 - DNA, 523 bp, Homo sapiens
gaattccttcatgcatgatcaacacagcaagagaagagagtgagatataatctattttttttttcttcttcytcttcttttgagacagggtctcgctcttttgcccagccttgagtgcagtgatataatgatagctcactgcagcttcaaattcctgggctcaagtaatcctcctgcctcagcctcccaagtagctgcgactactctcagccaggcatgggtacaggccaccgtgcctggctgagatacagtcttatactggtaattaaatgccccttcccacagtccattggccagaagtagtcatatggtcttatccaactgcaggcacaggatcatttgtggaaaaacaaaaatgtccactgtgccccggtggagaggaagacaaaatgggaaagcactagcaatctctactacagatgctccatttcagtgagaagtgtttctgggaacagattaactgtgatgtgaggcaatgattttcactagggtaaagggaaaatagggtatctaggctttttat

SEQ ID NO: 638950 - DNA, 572 bp, Homo sapiens
ccagacagtttaaatgactggcccaaaggcaaactgctggttakgaagggagccaggacactcaggcctacagccttcaagcttggagagtctttttgctagaccacactttggtgtgcaactccaggtacatgaattggtaacagattctactctattattcattttttttaaaaatcctaccaagatgtcttggtcaaagtttccctttactgcttcttgctggatgcccaagaagctggtggtatctttttctgtatcaggtgaactataaacctcttctccttccctttcaggctcttccaggaacctgggttttgtaatttcccatttctcccaatctaaactacctacctattttgccacctacctaaagagtctgtcttctgacctaattctcacagtaatgaactcattttacctccctctgtatctttctcatgccctgccaaggatccatggtccttatatttcctggccttccatggcctttccccattttaaatccttctaatggagacagaaaattgtccttatctgcacatttaaaagttttcggaaaaaaaatagag

SEQ ID NO: 638951 - DNA, 503 bp, Homo sapiens
taagagtgcaaacaaaaaagaggaatgtttttaacctattttaagagaacaaaatgctttcaagtgcttaacggtatctatttttacacatatgggatcattaaartatcaggggagccagctgccatcaggcaaatgctttggatgttctcattgcaaacccttctgacccactgtacttagaaagccccttctctggtgaacagaacttcccttcaagtaggtaacttcaaagaggcaacgtggtacactggcaagccctcagatctcttatctgaaaaaccagtaaatgaatttaatgatactgaggaagtctaatataatagtagaagcagctcccactcaatcaggcctttgctattctggtagatccctaaagaacattgcactcctatacctggtgtgatgggggagcgccaggatcaagagccacagatctgggtttaagtgttcctttcctctgtcactcactggctatgtgacatggaccaattaacttgctt

SEQ ID NO: 638952 - DNA, 520 bp, Homo sapiens
ttttgttaagcaaattaagagtgcaaacaaaaaagaggaatgtttttaacctattttaagagaacaaaatgctttcaagtgcttaacggtatctatttttacacatatgggatcattaaaatatcaggggagccagctgccatcaggcaaatgctttggatgttctcattgcaaacccttctgacccactgtacttagaaagccccttctctggtgaacagaacttcccttcaagtaggtaacttcaaagaggcaacrtggtacactggcaagccctcagatctcttatctgaaaaaccagtaaatgaatttaatgatactgaggaagtctaatataatagtagaagcagctcccactcaatcaggcctttgctattctggtagatccctaaagaacattgcactcctatacctggtgtgatgggggagcgccaggatcaagagccacagatctgggtttaagtgttcctttcctctgtcactcactggctatgtgacatggaccaattaacttgcttgc

SEQ ID NO: 638953 - DNA, 503 bp, Homo sapiens
taagagtgcaaacaaaaaagaggaatgtttttaacctattttaagagaacaaaatgctttcaagtgcttaacggtatctatttttacacatatgggatcattaaaatatcaggggagccagctgccatcaggcaaatgctttggatgttctcattgcaaacccttctgacccactgtacttagaaagccccttctctggtgaacagaacttcccttcaagtaggtaacttcaaagaggcaacgtggtacactggcaagccctcagatctcttatctgaaaaaccagtaaatgaatttaatgatactgaggaagtctaatataatagtagaagcagctcccactcaatcaggcctttgctattctggtagatccmtaaagaacattgcactcctatacctggtgtgatgggggagcgccaggatcaagagccacagatctgggtttaagtgttcctttcctctgtcactcactggctatgtgacatggaccaattaacttgctt

SEQ ID NO: 638954 - DNA, 520 bp, Homo sapiens
ttttgttaagcaaattaagagtgcaaacaaaaaagaggaatgtttttaacctattttaagagaacaaaatgctttcaagtgcttaacggtatctatttttacacatatgggatcattaaaatatcaggggagccagctgccatcaggcaaatgctttggatgttctcattgcaaacccttctgacccactgtacttagaaagccccttctctggtgaacagaacttcccttcaagtaggtaacttcaaagaggcaacgtggtacactggcaagccctcagatctcttatctgaaaaaccagtaaatgaatttaatgatactgaggaagtctaatataatagtagaagcagctcccactcaatcaggcctttgctattctggtagatccctaaagaacattgcactcctatacctggtgtgatgggggagcgccaggmtcaagagccacagatctgggtttaagtgttcctttcctctgtcactcactggctatgtgacatggaccaattaacttgcttgc

SEQ ID NO: 638955 - DNA, 638 bp, Homo sapiens
aaccctgctatctcctaagtttcatctgcaaagcacatgagggcaccatatcactcaaataacttacacatttttttaacctttacagtaaatttaatttagatgctgcctgttttgtcagccttgctaaactagatttttcagaggaattattttttaaatcctgaagtttgaacatcattgccctaagaagagacataataaataacatttctgctgaaagtgtgaaatagtgtctcattgctaaaaagaagttgtttctgggaaacagccttagattttgattcagaccttgatttgtttctggccttgtcactgtctacatctgctctaatgggctgtccacatacctgcttgagcccacatttcttggtctataaactgaaatgagaaaatatgcctcacagagctgtagggaggatccagagggaagctgtatatcagtatttctctaaataatgtccttacaaagggaaatattttcagggaatctgcaatgttgatgtagattgtttttattatagtgttacatacatatgaacaaagttaacactgggtataaatttttaagcttatagctcttataaaactagaaatyaaaatcaatttgtaaattgtacatataaaccaaagaaatt

SEQ ID NO: 638956 - DNA, 486 bp, Homo sapiens
acattggattagagcccaacctaaggacctcattttaactcgattacctctgtaaagaccctatcttcaaataaaatcataatgttaggtaccatgagctggaaaatttaacatatgattttagggggacacaaggccacttataacggtgaccctgagaattgctagctgagtggatgcagacccagagttctaaagccagcctggcaggaatgacaggcaattttcagtgaagtgtgggcctctgccttgagtccatcccytaacctcagtacaacttcattatgctactggagcatttcagagggacagatgctgaggacactccagaagacgcagacaaatatttatataacctgtgctgttttaggtcctcctagggcaaatgaacccaaaatcatggcaagagagacacaggtagagaaatgaggtgagagagaggcagagcaacaggaaataaacctacttctaaataaaggctgattt

SEQ ID NO: 638957 - DNA, 359 bp, Homo sapiens
ctcatgacagagcaggtttatatatgttaaaatcagaaagggtcttaygagccattgaatccaatcttccttcccttgttccaggatcccagcgccttcttccatcttagtgagtgtagttatagctttgaggctaagcagatgctgattctagaagtttcgtgcaggctaatgtcatactgtcatgaattcaggattgatgatgttcagggttcttccctgtcaatctctttaaccactgggccagaaaaccaccaaaattctaaatgatttgacatgacaaggcttaggtttgtattggatttttagtgatgataacagtagttgtggtcatcactattataagtcctactgactca

SEQ ID NO: 638958 - DNA, 391 bp, Homo sapiens
agatctggaaggtgatggggaaaacagtatggctatgagtagctcatgacagagcaggtttatatatgttaaaatcagaaagggtcttatgagccattgaatccaatcttccttcccttgttccaggatcccagygccttcttccatcttagtgagtgtagttatagctttgaggctaagcagatgctgattctagaagtttcgtgcaggctaatgtcatactgtcatgaattcaggattgatgatgttcagggttcttccctgtcaatctctttaaccactgggccagaaaaccaccaaaattctaaatgatttgacatgacaaggcttaggtttgtattggatttttagtgatgataacagtagttgtggtcatcactattataagtcc

SEQ ID NO: 638959 - DNA, 494 bp, Homo sapiens
tgtggcaggctgagaagtgcgaaacctgaaagccctgcttgctttcccagtggggttaccttgtgcctggggcaagtcctcagtcctgctcaggcaaccataatccccctgggaactcattggcctgagaagcacaacccccatctcctacagcagctgcagcaagttctgcctaaggagagtcgaagctcagacatgcctaactttgcccccacctgatggtctttctctactcgccctggtagctgaaaacaaaggacataatcttttcgaggctgtatggccccacccaccractgagaaacttatccaggctatcctagggcaagcttacattctccctatactactgcagctgatgcttccttgaaagtgccacctcctggctggaggccaaccaacacaaaactatcaatacaataatcaaaaatacaaccaaggccctcacagagtccacttcacccccctgctacctttactggagcagttgctgg

SEQ ID NO: 638960 - DNA, 670 bp, Homo sapiens
  misc_feature 664, 665, 666, 667, 668, 669, 670: n = A,T,C or G
gctttatatgctaagggaagaaggtaagctctatgagggcaggatttttgttgtttattaactgttttatccagagcacctggaaaagcccctgacacacagcaggatatgctcttctttccgggatttcttttgttacaaaagaccccttgtttggcagagaatagattgatttttgccttccttaggtaattctcatgggtggtgaggatttggagaatgtggaaatggtgtctcaattctttcaatggtttataatttctaatgataactttatgaaaaacattaaaataaatgtaatgtggtatttttttccccaacgaaaacgtgagtccatagaatgaactctttcatcccaaagacagcttcccagtttcatgtcctgaaagcagtcactattgacaggctgtgtttttaattttactggtaaccactcaactttagaaaatatactygcccttctgtttcttgttatcatcagctggagagaattattgactatgaaagatcagaaagtaacactacatcattgcccactctcttcctgcttgtctactgttttttctttcatattttactttttaaaacacttttttgatccacattttgggagctttttttgactttatttttttgagtatctaaattattttgaggtattttnnnnnnn

SEQ ID NO: 638961 - DNA, 492 bp, Homo sapiens
ctgatgctttttcttaccttagaaataaaattcagtgtacattaaaccttttaatcaaaacacatcataggtggacctgaaagcctgctgttatttgctgttgctgttgttgaacagtggatacaggtattgtggtgatgctactgtgctgctgagttaccctgaacacattgagttttcactgcattaatggtatatcactatattaatggtaagtcatgttgtttactgttaaatacttaygtgtgaataattgtaagaaagtgattgcttattggtagcatataaattcagagtcaggaatgatgctgctgccaaacaaccacagatcatccatatggatggctgagatagtgacgcctttgctttctaatggttcaaggtaacaaactttgtttcatgcacaaaaattatttaaaatattgtgtaaaattacctctaggctatgtgtataaggtgtatctgaaacataaataatttgtgtttagactt

SEQ ID NO: 638962 - DNA, 466 bp, Homo sapiens
ccttgctcccccttcttactaatacacttgactactctgaaaaataaaagaagtattagagttgattccaaagtttatatagaagtgtgatataaatacacttggtaaatgtttggatgcgaatagccaaaagaattttgaaaattggtgacaagttttgggactcacattacctgaatccaagataaattacagtgctataaaaatcaagccagtttggaagtggtgtaaagctagataaaatatatcaataggatagaattaagagtgtagagataratccaaacatatacagtcaatcaactttcaacaaaatatgcaagtgattcaatggggaaaggtaagtctttttaacaagtaatgttggaatgactggataaccccatggaagaagaaaacaacaacaaacaataaacctctacccctaccttataccacacacagaagttaattctacgtgaatcac

SEQ ID NO: 638963 - DNA, 568 bp, Homo sapiens
ttaagctaataagcaacttcagcaaagtctcaggatacaaaatcaatgtgcaaaagtcacaagcattcctttacaccaataacagacacacagagagccaaatcatgagtgaactcccattcacaattgcttcgaagagaataaaatacctaggaatccaacttacaagggatgtgaaggacctcttcaaggagaactacaaaccactgctcaacgaaacaaaagaggacacaaacaaatggaagaacattctatgctcctggataggaagaatcaatattgtgaaaatggccatactgcccaaggtaatttatagattcaatgccatccccatcaagctaccaatgactttcttyacagaattggaaaaaactactttaacgttcatatggaaccaaaaaacagcccgcattgccaagacaatcctaagccaaaagaacaaagctggaggcatcacactacctgacttcaaactatactacaaggctacagtaaccaaaacagcatggtactggtaccaaaacagagatatagaacaatggaacagaacagagccctcagaaataac

SEQ ID NO: 638964 - DNA, 623 bp, Homo sapiens
actgctcttattttcaactcaatttaacaaggctttattgtgtacctagtttttgctaagtactatacagtgcaatgtaatatcatgagcataagtttaaaattagacctagtttcaaattctgaccctgctatttactagttgcatgatttttaagaaacttctagaatcactgtttcctacataataactttsgtcttttaggattttgttaaaactgtatcttaatgcatgcaagtcacctagtacagtgcttagtagacattggatgaatgatgcctttgttattctaggcattgtgaagactacagaaatgagcaagagataatccctgcttttaaagagttcattatataattataaacaacaatgccagagctgagtaaaggtgacccaggacatttttccacttaaatttaatttgaatttggttctgcatttacttttgaggctacaaagttttgtacttctgttttgtgaggcaaaactataccaataaccaaggggcaaactcaaaatttcaacacctttctttttactactactagacctagcatatatgggatggcagaagaatgtgtgactcaggataaatggaaatgaagctcagctgatcttttgtc

SEQ ID NO: 638965 - DNA, 265 bp, Homo sapiens
agaaggaaagaaggaaggaaggagggagcaagggagggaaggaactgtactggcccatactatctctgcttccattgaacaattgtatttatagtcacttcctaatggtagaactgaaggcttcccactgttttacctgtgtgtgacaaccccttgaaggcagagaattctacttcactatttaatacccttccagttcctattaggwccttagtaaatactcaagtgaaagaatggcttgtttagaggcctcagttatgggctg

SEQ ID NO: 638966 - DNA, 583 bp, Homo sapiens
ggactgtgatggagccattggagagcaggctagaaatcagccttgtaagcaggatacaaagtttggacttggtatttgttgtgactctttcaattacaagctaaagaaacccaagaccaaactcagctaagtaatggtaataataataatggttaacacttagcaatgttctaagctttctgtatgcattaactcatttggaactcattacaatcctgtgagggtgttattattatgcccattttagagatgaggatattggtattcagaaaggttaaataatttatccaaagttacatagccattaagtgccagcactggattctaacatggaaaatatattgacccctgtgactggtaaagtccacgagtaargcccacttcatgggcaactaaatcatccaggagctcaaacaatttcctaaggctctgtcttgactgggtcagcttcttttcatgcactgccttcacatttggagagattctcccaatgtggagaaaaagaaacaattcgtatttcagagcaagagtgagaccctttccttccccatacttatacatgacagttcttcttggcctcttc

SEQ ID NO: 638967 - DNA, 570 bp, Homo sapiens
ctggtaaagtccacgagtaaggcccacttcatgggcaactaaatcatccaggagctcaaacaatttcctaaggctctgtcttgactgggtcagcttcttttcatgcactgccttcacatttggagagattctcccaatgtggagaaaaagaaacaattcgtatttcagagcaagagtgagaccctttccttcccmatacttatacatgacagttcttcttggcctcttcttgcccattctgaaactcatcactatggccaggtgcatggaggacataagaaggcggttggagctggaccaaccacatgaattgggctctcacgaaaagacccattatcagaagaggtggggtgtcgccagttagatgccccaccggaggatataaagaggggagggcacaatcgagtttgcactttagaaaaaaatggtgtcgcagatggattagaggcatgtagaactggagacagggaagccagctagaaagccgaccaggttttccaggtgggaaatgaatccaaggctgtggtgatggcaagaagggaacagagtcaagaggtatgtaggagatac

SEQ ID NO: 638968 - DNA, 550 bp, Homo sapiens
gcagtaagtgctatttagagaagtagagtgataatacagggaatattttagtttgaagggttaaggaagacttgcctaaggaactggcatttaagctgtgaataagagaccagtcatgcaaatgggagtggggtagaaaaggcagagtcttgatagaggaaccagctgctgtgaaggccttgaggcagaagcaaacttggccggatagaggagatgmaaggtcaagcagttgatatgtggtgggtgaaaggaaggaaggaattaaatgaaaccagagaggtaggtagagttcagatcagccagggctttggaagtcagagtgaatggattggtgttagtttctgagtgtaatcaaaagttgctggagtgctttaaccagggaggcactttatatgacttatgtttaagaaataccactctgaataatgtgtgcaaaatggaaaggtgggaaagtggaagcagggttatgagttccaagcttactagggagagatgaagtggggcttgtgttaaattagcagtagtggagaaggagaaacatagatgaatt

SEQ ID NO: 638969 - DNA, 606 bp, Homo sapiens
tcatttggggatgtctttgcatttggactgtctttcctgctagagagtaacttctgtgagccagagaccccatctgccctgttcactayaatatctgcaataaccatgtagcacctggcacatattaggcacttccctattaaatgcacaaagaaaggtgtctacctgatatccaagtgcatgcaccagtcaggttgttggaaagtcagaagagatgcccagccccacagtgtgaatttgggggtcacagggatatgggcaatagagaaaaatgggggcattaaagagatggttcagagtgagtgtggaaggagagactgggcatagaatgcctgcatgtaaggggctagcagacgaagatgagcctgggatctgttggaaagtgaatgatgagagaaggagtaaaagaagcctagggtggtaacagggaaacttggtgtggaaagggagagctgacagtcagaacaatgtccactcttctacttgctagctgtgtgaacttgagcaagttatttcacttctgtgtgcctcagtttccctcttttaaaatgacaaaaataatactgcctatcttaggtatagttgtgaaacattttaaaaataagt

SEQ ID NO: 638970 - DNA, 622 bp, Homo sapiens
cccttctccatccaacaaaagcttactcatccttccagacctacctctgaagtagcctcctttggggagacttccctaattgcttgggaagaggcagttagctccttgctcttctctgmacttcttctcctttgctcaatgtcagttttgtgcaatatcaaaatctcatgttgtaattatttgtttattccatgcttcattaggatgtggcttttcacaaatggaaatcgtgtgttaagcaatttaatgggtactgcctatgtgctagatgataacatttatttcttttccatacaataatcctgcaaagcataagatttccattttacaaatgagaaaactgattctctgagtgttcagataaattccctgaggttaagtagttgataagcagtaagctgtatgactccaaagtcaggactttttctactataataaactgtctttctttaccttttttgtatgggcacatgcttggtaccaaacaaatgagtgaattttatttatactaatttttataggaattataagtaccttgagagcaggaccatgtcttttcctttcaatccatccctgggactagttcaaggtatatacactctccctaaatattttgaatgag

SEQ ID NO: 638971 - DNA, 516 bp, Homo sapiens
ttagatttaagtatttaatccattttgatttgatttttgttatatggcaagagatacgggtctagtttctttcttctgtatatggatatccagttttcctaacattatttattaaagataccgtcttttccccagtgtgtgttattggcacttttgtcaaaaatgagtttactgtaggtgtgtggatcgtttctgggttctctattctgttccattggtctatgtgtctgtttttatgccagtaccatgttgttttgtttactatccatctgtactataatttgaagtgaggtaaygtggttccatcagttttgttctttttgcccaggataattttggttattctgagtcttttatggctccacatacattttaggattgtttcttctatacttgagaagaatatcattggtattttgataggggttgtattgaatctatagattgctttgggaaatatggacattttaacaatattgattctttcaatccatgaacatggaacatttttccatt

SEQ ID NO: 638972 - DNA, 516 bp, Homo sapiens
ttagatttaagtatttaatccattttgatttgatttttgttatatggcaagagatacgggtctagtttctttcttctgtatatggatatccagttttcctaacattatttattaaagataccgtcttttccccagtgtgtgttattggcacttttgtcaaaaatgagtttactgtaggtgtgtggatcgtttctgggttctctattctgttccattggtctatgtgtctgtttttatgccagtaccatgttgttttgtttactatccatctgtactataatttgaagtgaggtaatrtggttccatcagttttgttctttttgcccaggataattttggttattctgagtcttttatggctccacatacattttaggattgtttcttctatacttgagaagaatatcattggtattttgataggggttgtattgaatctatagattgctttgggaaatatggacattttaacaatattgattctttcaatccatgaacatggaacatttttccatt

SEQ ID NO: 638973 - DNA, 516 bp, Homo sapiens
ttagatttaagtatttaatccattttgatttgatttttgttatatggcaagagatacgggtctagtttctttcttctgtatatggatatccagttttcctaacattatttattaaagataccgtcttttccccagtgtgtgttattggcacttttgtcaaaaatgagtttactgtaggtgtgtggatcgtttctgggttctctattctgttccattggtctatgtgtctgtttttatgccagtaccatgttgttttgtttactatccatctgtactataatttgaagtgaggtaatgtggttccatcagttttgttctttttgcccaggataattttggttattctgagtcttttatggctccacatacattttaggattgtttyttctatacttgagaagaatatcattggtattttgataggggttgtattgaatctatagattgctttgggaaatatggacattttaacaatattgattctttcaatccatgaacatggaacatttttccatt

SEQ ID NO: 638974 - DNA, 385 bp, Homo sapiens
tgctgtagctgtgacttccagtactgtgttgaataacagtggtgacagtgagcatccatgtcgtgttccagatcatagaggaaaggcatgcaggttgttctcattcagtataatattaacctcgggtctgtcatatatggcttttgttatgttaaggtatgttccttctatccccagcttttggagggtttttataatgaagtttttatgttgaattttgycaagtgctttttcagcattgattgacatgatcataagattttcatctttcattttattgatatgatacatcacattgattgacttgcatatgttgaaacatccttacatcccaggaataaataccacttggtcatgataaatgatctttctcattgttgaattc

SEQ ID NO: 638975 - DNA, 413 bp, Homo sapiens
gaattcttcttttctaatttggatgccctttctatctttctcttgtctaattgctgtagctgtgacttccagtactgtgttgaataacagtggtgacagtgagcatccatgtcgtgttccagatcatagaggaaaggcatgcaggttgttctcattcagtataatattaacctcgggtctgtcatatatggcttttgttatgttaaggtatgttccttctatccccagcttttggagggtttttataatgaagtttttatgttgaattttgtcaagtgctttttcagcattgattgacatgatcataagattttcatctttcattttattgatatgatayatcacattgattgacttgcatatgttgaaacatccttacatcccaggaataaataccacttggtcatgataaa

SEQ ID NO: 638976 - DNA, 385 bp, Homo sapiens
tgctgtagctgtgacttccagtactgtgttgaataacagtggtgacagtgagcatccatgtcgtgttccagatcatagaggaaaggcatgcaggttgttctcattcagtataatattaacctcgggtctgtcatatatggcttttgttatgttaaggtatgttccttctatccccagcttttggagggtttttataatgaagtttttatgttgaattttgtcaagtgctttttcagcattgattgacatgatcataagattttcatctttcattttattgatatgatacatcacattgattgacttgcatatgttgaaacawccttacatcccaggaataaataccacttggtcatgataaatgatctttctcattgttgaattc

SEQ ID NO: 638977 - DNA, 587 bp, Homo sapiens
agtggtgacagtgagcatccatgtcgtgttccagatcatagaggaaaggcatgcaggttgttctcattcagtataatattaacctcgggtctgtcatatatggcttttgttatgttaaggtatgttccttctatccccagcttttggagggtttttataatgaagtttttatgttgaattttgtcaagtgctttttcagcattgattgacatgatcataagattttcatctttcattttattgatatgatacatcacattgattgacttgcatatgttgaaacatccttacatcccaggaataaataccacttggtcatgataaatgatctttctcattgttgaattcagtttgctagtattttattgagaatttttgcatcaatatttatcaaagctattggcttgtagttttcttttctttttccttttttttwaatgtgtctttggttttggtatcagagtaatactgactttagaatgagtttggaagtatttcctctttctctatttttaggaatagtttgagtaggattggtattagttcttctttaaatatttggtaaaattcagcagtaaagctatcag

SEQ ID NO: 638978 - DNA, 568 bp, Homo sapiens
agtttccaaaatttatcttattaatttctagytttattccattgtggtcagagaagatgcttcttattatttgaattttttgaatgttttaagacatattagacatattttctgacctaagatatggtctatccttgagaataatccatgttttgaggaaaagaatgtgtatcctgcagctcttggatgaaatgttctgcgaatatctattagacccatttggtctatagtgcagattaactctgatgtttctttgttgattttctatctggaagatctgtccaatgctgaaagtggggtgttgaagtcttcagctattaatgtattaaggcccatctctctctttagctttaatagtattccctttatatagttgggtgctccagtgttgagtgcatatatatttaaaattgttatatcatcttgatgaattaacccctttagcattataaagtgacctatatagtgaccttctttgactcttcttatagtttttgtcttgaaatctattttttctgatataagtgtagcaaccattgctcttttttggtttccatttccatggaat

SEQ ID NO: 638979 - DNA, 576 bp, Homo sapiens
ctttaatagtattccctttatatagttgggtgctccagtgttgagtgcatatatatttaaaattrttatatcatcttgatgaattaacccctttagcattataaagtgacctatatagtgaccttctttgactcttcttatagtttttgtcttgaaatctattttttctgatataagtgtagcaaccattgctcttttttggtttccatttccatggaatatctttttccattcctttcttttcagtctatgtgtgtctttagaggtgaagtgtaattcttttaggcaacagatcaatgggtcttgttttttcatctgttcagccagtctatgtcttttgactggagattttaaaccatttacatttaatgctattattgataagcacttactcctgccattttgttctttgtttaattattattttattgtcttctctttcttcttcctttctttcctgtcttcctataatgaaggtgatttcctctggagatatgatttagtttcttgctttttatttcttgtgtatccattgtatgttttttggtttgaggttatcatgaagcttgcaaatac

SEQ ID NO: 638980 - DNA, 576 bp, Homo sapiens
ctttaatagtattccctttatatagttgggtgctccagtgttgagtgcatatatatttaaaattgttatatcatcttgatgaattaacccctttagcattataaagtgacctatatagtgaccttctttgactcttcttatagtttttgtcttgaaatctattttttctgatataagtgtagcaaccattgctcttttttggtttccwtttccatggaatatctttttccattcctttcttttcagtctatgtgtgtctttagaggtgaagtgtaattcttttaggcaacagatcaatgggtcttgttttttcatctgttcagccagtctatgtcttttgactggagattttaaaccatttacatttaatgctattattgataagcacttactcctgccattttgttctttgtttaattattattttattgtcttctctttcttcttcctttctttcctgtcttcctataatgaaggtgatttcctctggagatatgatttagtttcttgctttttatttcttgtgtatccattgtatgttttttggtttgaggttatcatgaagcttgcaaatac

SEQ ID NO: 638981 - DNA, 605 bp, Homo sapiens
tggtgcacctattcccccatggtgtatctgacgtccccctttccatctcatcctgctctattccagtggttctcaactgtgggcaatttgtccctcagtttggagacatttttggttgtcacaaatataggggtaggaaggggaaggatactactggcatctagtgggtggaggtctgggatgccgctaaacatcctaccacacacaggatagccctcatcctcacaaaaatgtctagccccaaatggcaatagtttcaaaactaagaaaccctcctctatgcaatgccccataccacctacacagacagcactaaattccctgtagtttgcccaatattctctccttttttaaaaaacttgcattacatggtacatgctatttgttctacctagaatgccctttctattttgttgatctgttgaatgcctactcaktttttgagcctctgctcaggtatcaccttttactagaaatcttcctggcccctggaggccgagcgaagtgcttcctcttctgcgctttctgggcatcttgttcatacctctattttaccatttaaccacattactacagttgtaatttccttttcatctatctttctg

SEQ ID NO: 638982 - DNA, 455 bp, Homo sapiens
agtactgccagactacaactggtgttcccttataacccaaggtctctaaaggcagcttgtcatgaatgctgcctggcctgggactcacccttcaggacagtgggctccttgctggcccagggtaggtccagaaatgctgtgaaagggttgagtcctggaattggggactgcaaaagccctcttggtgctctatctcygctgtgacaatgctggtacctaaggtacaagtcccttttgcttttcccttggcttttctgaagcagaaggagttttgtcccatagccaccacacctggtaatgtgctgagtctcatctgaagccagcaagtctcagaagttcacccaaggccttcgatgtagtacctgggtatgcctactggttattcagggcccaagggctcttcagctggcaggtgataaatgctaccagcactggaccctgtttttcaaggcaga

SEQ ID NO: 638983 - DNA, 455 bp, Homo sapiens
agtactgccagactacaactggtgttcccttataacccaaggtctctaaaggcagcttgtcatgaatgctgcctggcctgggactcacccttcaggacagtgggctccttgctggcccagggtaggtccagaaatgctgtgaaagggttgagtcctggaattggggactgcaaaagccctcttggtgctctatctctgctgtgacaatgctggtacctaaggtacaagtcccttttgcttttcccttggcttttctgaagcagaaggagttttgycccatagccaccacacctggtaatgtgctgagtctcatctgaagccagcaagtctcagaagttcacccaaggccttcgatgtagtacctgggtatgcctactggttattcagggcccaagggctcttcagctggcaggtgataaatgctaccagcactggaccctgtttttcaaggcaga

SEQ ID NO: 638984 - DNA, 617 bp, Homo sapiens
gccctgtcttactgtggctgagctggcatccaagatgcaagacaaagtcctcctcatccttccctctcctcttctcaagcagaaggaagagttctcttttagagtcacaagctgtgcagcctggggttaggggaaggatgagaccagagctcccttggcttccccagctggtgtctcygtatgccacatgctcccttagtccactgtccctgggcctagttcagccctaggcctcgcctaagagagcctgtccttatggcatagactgcctttcaagtttacttggagacacagagtgctgtagccctcagtagcaaggtttgtaagcactcaagttcagcccgctgggattggcaattcccctctagctagggctcacttaaatgctccttctgtgggtgggcatcagctgagtttgatccagttttcctttctgctctaatagaacagcatggagttcagtgactcacagtagctgtgttcttcctcccacagcacccagagaggctctccacaccaggccaccactgccagaggatggggagagatggcattggtgattcaggactgttttctctatctcttcagtgcctctttcagccatatgaagttaaaaa

SEQ ID NO: 638985 - DNA, 579 bp, Homo sapiens
aaccaaaaaagagcccacatagccaaagcaagactaagtaaaaagaacaaatctggagacatcacgactacctgacttcaaactacactataaggccatagtaaccaaaacagcatggcataaaaataggcaaatagaccaatggagcagaatagagaacgcagaaataaagccaaacacttatagccaaatgatcttcraaaaagcaaacaaaaacataaagtggggaaaagatatcctattcaacaaatggtgcttggataactggcaagccgcatgtagaagaataaaactggatcctcatctctcaccttatataaaaataaactcaaaatggatcaaagacttaaatctaaaatctgaaaccataaaaactctagaagacaacattggaaaaacccttctagacattggcttaggcaaagacttcatgacgaagaaagcaaaagcaaattcaacaaaacaaaggtaaatagatgggacttaattaaactaaaaagcttctgcacagcaaaagaaacagtcagcagagtaaacagacaacccacagagtgggagaaaatcttcacaatctataca

SEQ ID NO: 638986 - DNA, 596 bp, Homo sapiens
ctaggcaaacttcaaatagcaagagaagaaaaaagaaataaaagtaatacaggccccagagtccacttgtgcaggtaagggtcacctgatcctttcatctgggaaggacagcctgacccaggtcagtgacagactggctgagcataagctggaacaaccttgtcattactttcaggttttaacaggggagtgtgtgctacatttgcttggacacttcctgtatgaaaaggacttggtacaagaactgataatgcctggaaagagcagagactcccagcctgaggaccagagcaggttttctatctacagtgccagctgatagcaggttggaggtgccatccctgtgatatcataaagccactgatggcaagttccctttgggcttgcattgctgcttcctgactcctggaaaatgaacagaggatagtttggcagatsaggctgtctgtgaactggccagctcacatctccagcctcagagctaccctcagtcccatcaaactttgtactataacaagtaatgtgcttgggcactgtgtgcctctgcctttctaagtggtctatagagatattatgggattttatcactacaactg

SEQ ID NO: 638987 - DNA, 571 bp, Homo sapiens
aggtcaaactacattgtctgggaccataaaacaagtacaaaagatgatcaaacagtaatagcccctatgggcacttatacataccaggagctataataaatactttgcattttcattaatcatcaaaaccatcacttcagataatattaatgctctcatttaaatgagaaaactgaggtccaaagaagcacacattctgctttaggtcacacagaaaatgttagaactaggatttgaatctaagtatggctaaattacttcaaaactgtttcctgttccatgcctgtccactattgtgccatcctgatttcatagcacaagaccttaaatccttctgtaattctgttaatattcctcttttcactaaatgaacaacacattttaatattmctcttcatttaactgatgaagtcccaataagtacacttacttcctacacaatgagcttttagacatctattgctaattactattactgactactacaggaaattcccataccattacttttcagcagtattttgatctggattgatacaaatatatgactggattgatacaaatatatgaa

SEQ ID NO: 638988 - DNA, 636 bp, Homo sapiens
gtatttctctccatatctacgtagagagagaaacatatatatatakagagagaaaaaatttaaaacataccagctatatccatatctagctgtctatctactatgtacaagttgtttacatggttcctcacagtaaattgtgagatcagtaatagccctactttacagatgagaaaactgagctcaaaagtctaagaaatgtgtttaagctcacacagctagttaattgtagataaagatctattcttagtctatttggcttgaaacccatgttcttttcactctgctgtattctacccttttctgcagatctgctatggagataatacaaatctacaaagaaaattaatgagaagtgattatttcatttcaaattaatctgctacagagttttttttaaaatcagtatttaaataccatctgcctttatatacatttcactgcaacatatcaactttttaggaatgtaagcattacataacatgagacatgtcttttaaaatgaatgccaatcaatgtgttctgggcttcagaagatctttgttgctatcttccatatgtataacttcctgacatcttgactagtgtcatgggtaaaatcctttagtgaaagtagaaatgacatggcagggatca

SEQ ID NO: 638989 - DNA, 636 bp, Homo sapiens
gtatttctctccatatctacgtagagagagaaacatatatatatatagagagaaaaaatttaaaacataccagctatatccatatctagctgtctatctactatgtacaagttgtttacatggttcctcacagtaaattgtgagatcagtaatagccctactttacagatgagaaaactgagctcaaaagtctaagaaatgtgtttaagctcacacagctagttaattgtagataaagatctattcttagtctatttggcttgaaacccatgttcttttcactctgctgtattctasccttttctgcagatctgctatggagataatacaaatctacaaagaaaattaatgagaagtgattatttcatttcaaattaatctgctacagagttttttttaaaatcagtatttaaataccatctgcctttatatacatttcactgcaacatatcaactttttaggaatgtaagcattacataacatgagacatgtcttttaaaatgaatgccaatcaatgtgttctgggcttcagaagatctttgttgctatcttccatatgtataacttcctgacatcttgactagtgtcatgggtaaaatcctttagtgaaagtagaaatgacatggcagggatca

SEQ ID NO: 638990 - DNA, 563 bp, Homo sapiens
gtgttatgaaaaggcattgaaaaatgtgaagtctataaaatgtagtgtattaatagtaaaaaagtaaacgaaaggacattgtgagttttgtctcagtttttctatgggagataggtttgcaatattttttgatttaaattctcttcttagtaattttggaagtattctaagaaagaacttcaaatagcatttaagctaaacttgatacagaaaaaatgatgatgtaattgaatgaataaaaatttatggtagaataaaatatatatttataaatttataaatgtgataaaatgtgtatttccaycagagtcttctcggtagtctttttagtgtttgatacagatgatttttttttctgaatatactaccattatagaaagcttatttctagaatcatattatggataaatatccaaatttatcggtgtcaaacctagataaatagtcattaactcagccagatttcaggatggagaaaggggagatagaggtaatgtttaattcttcctttgccaagggctggtgaagttattaaaacatccatttcttcagtaggtgctaga

SEQ ID NO: 638991 - DNA, 581 bp, Homo sapiens
atgagtttatactgatatttcaaactctaacctatcacacatggatcattctaggctcctcccattgcttatctgtaccctcttactccaacagtaagaaacttggcacctaccatacaccatccatttacttaattgctcaattccaacatccatgtatattggtgtcagaattattgacccacactcttgagggaaaaaactttgtcaactagagtatacagagtycctttcgtctttggacttacagactatactcatttccaaagttatttgagtcgacacctaatccccaaccccatttagtgaggttatttagtgtatttaaaatattagagacctttgttaaacctgtattcaattctgggatcctctgacttcctaaatgatttttaaaacatttgcataacttacagtgacactttaagctgtaatattctgtaaggtttgaggaatgcatggtgtcatgtacacatcattacagtatcatacagatagtttcatccccccaaaaatccaacacacttcacctgttcagccctactcacctatcttctggaatatacggcatccactgaact

SEQ ID NO: 638992 - DNA, 464 bp, Homo sapiens
acaggcgtgcaccaccacagctggctaatttttttttttttttgtattttttgtaaaracgcagtttcaccattttgcacaggttggtttcaaactcctgggctcaagcgatccttttgcctaagcctcccaaagtgctgggattataggtgtgagccaccacacccggcaggtctatgtttttttacttttaactaaactttagtgatcagaagaaatgatcttcctgaaattactcttttctctgcaattcaggatgcatcagttgttattatacttttattttgtatatccatgctaaagtttattattattgtatacttatttttatttacataaggtgaaggtttttttctaaaactaaaaagctcttgagcagtacttttgaaaaatgcacacccatctaacttttacatgtgtatatgattatattcttgctaaattcttttttttttttttttttt

SEQ ID NO: 638993 - DNA, 580 bp, Homo sapiens
tacaacggaggatacataatacaggaagttggttccacagatgataaaggagccgagaagccaaatgaaacggtgagaggaaacccttagcaacaccagggaaccactcctctccctgggctgcctagataaagggagacagcaaagtyactagagtccaggtgtcagggttactcagcagaagccagtttcaaggcaggcctgtcagacaggagctagtgccatggaaaatatacaacctagccagagataacaccaaaaatatataattaaagagaaattccctggtaccttcatttctgtcaccgctcagtctgctgcaggtcttcccactggccacacacagtctgaagcccactgacacataagcctgggaaacagcctacaggtatcagcccttcaagcaggggaacagcaaggaatagatctgaggcagcaatcagcactgtggcaaactagaataaacacacagagcagaatttgaaaaacgttcaaaaatttctatcagagtagatgattctctgtatggtgctatttcagaacatttcaaaatacatgtattagcataaggaaaggttaa

SEQ ID NO: 638994 - DNA, 595 bp, Homo sapiens
attatttttaattgattaaaagtcatattataaatctattattatattatgtaaagtgctttgtgtatcaatactttaccttaatgttcattaataactctgtaattacacagatgaggaaactgaaactcagagatattaagtacacctccaagacacctagctagcaaatggcaaagtgggatttgaaacctgacattacactaaaaagtcgtcttaaatatttaatagtggtcttaaatgcctcacatgcacagctatgaaatgacaacaaattatcgctgttgttgttttagtgtggaaattgtttttgttaagtagggggagaaaggaagaatggaaacaggaaccagaattacattgtggcatgatcatagccattactcacaatgctgcaagaaaacatataaaacagaaacaaatatgtcacctgggagaactgtgagtggttttttcttttttctcctgatttttgtgctgtgcattttttttttcaataagcatgtattgttyaaattgagcgtaacttggcaggcaggggtgatggtggtagtgttacttgttattaagaaaaaatttacacaaaagttgaata

SEQ ID NO: 638995 - DNA, 552 bp, Homo sapiens
aatattccataaacatattcacagtagaccagaattttgttcagcttttaactttcctaaagctactttcttcagcttattaaaacaagaccccctagaggttatccagacagaggagggaagatgcaagaaaagagagcagtgatttgtccaatgtcatacaagcagtcctaagaaccaggtatactgattaccctgccccagtgtagtatttttctactatacrattgttaactatcaatgggtaaggagtaaagttttaaatatgcacagataatctttccagctgcttttaaggagacaaagttgcactgcatgaatgaaaactcccattgtatattgtaaggcacatacctgtggtttcatccgtggattccaccttatgtaatatcccacccagagctctaggtggcgcatgctggctactggataaaggacatgattggaatagctcccatagagaggattagtgaagtcttccagctggctgtttatgtaagaccacagtgacacagtccttttaggaagattctgtaggcaggaaaaataggt

SEQ ID NO: 638996 - DNA, 597 bp, Homo sapiens
gtctgggcaacatagcaagaccccatctctacaaaacatttttaaaagccaggcatggtggcgtgcacctgtagtcctagctttcaggaggctaaggtgggaggctggcttgcgcccaaaagtacaggactacagtgaactayggtcgcatcactgcactccagcctgcatgacagcaaggccctgtctcaaatacataaaaattttcagaaagtcttttaaagagcattgcaaagtaagtaaaaaatcacccattatcctgccaagcagaaacattttgatgtgcaaactgctcagatattttctgacacaagtgcttataatatgaattactactctgtttaataaactcagatcctaaaaggttgctaataaaagatggaagcagtcagaacctcagaggccagatttttgtcctggagattttaatttctctctgagaaataagttacatggacactggcctcagaaagcaccattctctgttcatatcttgaccactgagtgaagggtaccccctcctatcttagcactaatgtgtcttcatcaggaggaaccatattagcacacatcttagaaaacctgtcaaaaatgctt

SEQ ID NO: 638997 - DNA, 554 bp, Homo sapiens
ttcttaagaaagccaatctttgatatgacattcacaatcaatgcttgtataaaacaaaacctttaaaacttataaatttagtaacagttttacatgaagcaaatttatctttgcccataaattattaagagaagcaactcactctatacagtgtatctagcaatactttaaaatcaaactaaaactctgaactgataataactaggagataaattctatttcaggctgaaaaccgctggatcagaatatagtcaataacttcatataacctatcccaccctaccttaaccttttatagacaattttaaagactttaggacaatttacttataatgcctgaatcttatagtagattccaatttattcaaagattatcacagattggattaaaaagatcatttaatttttttcagatttgctttaaatttacaaattacattgtacataaatattaacttagataaccacacatagggaaagcagatacatggatcaytgcagaaacattaaaatttttaaaaaattttataaaatataaagcaaaacatgtaact

SEQ ID NO: 638998 - DNA, 560 bp, Homo sapiens
ggacagggcaagtggctggaggctgatcctgttttccgtatgtgaaatttcactcagtccctgctttctggcctgcctctccttctagccatacacaatgcctgctattgctgagttcaagctttgttttgcttattgcctatgttcaaacaatcttcttgttttcagccctatccctcattcccaccctccacagtacctgacacctccaagtcctgagccttacaaagtttccatggggatggactagcttgttgctggtcagtttcctcttttgcagactcctcatgtcatgatctcttctaccctgctaagtcatttatcactctcctgcatccactggtattctcattttcttcctgggtctacaccttttaattttctttagttttagtgaagtcttgaartggttataaacttatgtggtcagtacaccatgtttaagaaaaattgccaatatttatttatacagtcaccaatgagcaaagaaggttttgcttggataaaaatcagggttgacagaaatcatacatagcatttgctgtattatatcaccctca

SEQ ID NO: 638999 - DNA, 414 bp, Homo sapiens
gaattcaagcaatttaaatctagaatctcataattgctttgccatactgaggctgttttcaaatggttctatttattttgttttgcatgtagattttaaactttaaggttcacttttatccttgacatttatctgcatttataaactggaaaatactaaaggattgaattgtaaaattsagcttgttcagcttattaaaagtcagacggcatcacaaattcacaaatgctaaaactatctgtaatataattggatcacaacatgttacccattcacatatttcttaacattggctatttctccacaaacatgccatgcacccagtggaagcatctgaatgttacctaacatttaattgaacccagcatttgtgagttgttataatgtacttgctaatacaactttatgagataa

SEQ ID NO: 639000 - DNA, 624 bp, Homo sapiens
cattaggcttataggtaatattaatgagtttaccaagaaagcaaaaaaagagccctgagcaactccaaccattccatgtaagggataagagaaggaaccaacaaaagaaactgaaaagcatcacgaaaggtaaggggttaaaaaacgaaacaaaacaaacaaacaaaaaaaacaggcaaatgtgatgttctagaagtcatgaacctttggacattttttctctttacacaaaatggtttcatcttagtaagtccctccctaatgtaaacatttgtgaatatctatactttattatactttctgcaatgatttatttacctagctgtctcttctagattatgagctcctgggaataagatttatctttgcatctttgtagtaattagcatagtgactggtgcatagcagcacataacacatgttcaactgataattaaatttaacaggaaattcacctccctgaaatgaaaatgtctatacagtaagatatcactcattgagattctcaattaaaaattagcaaaaactcagatataattcaaataactgtgacatttaaattatgtmgcatcaaggatcaaggacacagtaccagcatctgccatgtttgatcctactatgaaa

SEQ ID NO: 639001 - DNA, 448 bp, Homo sapiens
tggcctcccaaagtgctggattaaaggcatgaaccactgtgcccggccagcaatttcttccattctggcctgagtgactaggttggaaatgagtactggataaagttctggtttgtctttgatgcatgtgactattcttatcaccacccacagccagcacctggaccacaaagaagctcccagagcactttcaccttctggagtggccrtgcccaggaccacaagcactcaccttcagagcccttctgcttcctctccacctccctgcggtactcctccagctcacggtctgtgagtgtggtgaaggggttggggcccgtggtgctcacaatgacgtggggctggtactccttttcaatgatggccttggaggccgtcaccagctctccctgtggatgaaaggcacatctggtctgcaggagcccggcccgatggggactctccctcc

SEQ ID NO: 639002 - DNA, 507 bp, Homo sapiens
ctaaatgctactgagttgttcacgtttaaatggttaattttatgtgacgtgaatttctcaacaaatttttttaaagaaatgacctaaattacacaaagagctaacaataaaagaaagaccttcttgatgataagagctgaaaacagggtaaggctggcaggagtaaaatcaatgaagggcccccaaattctccccacagtagtatagatcagttcttaagagatagctttgtggagtcaagggctcttccccagagcctaaggtagtagcaggaaaaggcctgaggtaggagtcaggagctgtgactatgtcactaaataatcagcgcctctcccctgagcctcaagctccctcagttgcaaacccagaaaactacctcccgwggctgttgtgaggctcaaagcaaacagtgaatatgaaggttttcattacccattataaaaatgcaaagttttccatgtgcttcagggttgaaattccagcttgttgtatgtccctgaacaagct

SEQ ID NO: 639003 - DNA, 586 bp, Homo sapiens
ttatttaataattgtttagaactatgacttctcctttttaaacttggtcttaaatcttaattatttcaagtcatttcttaaaaatttctaacaactatataatttttcttgttccttttaaaacattggtcaaattagtcacatatcctaatcaatattcaataaaaatcttgggtaaaattctcttattgcatttcattgtagatacattacttaacctccctccctcctgtttttaaacatttcccatatgataaaatgaaatgttgggctaaattcattctgtctcrtaaaattcagcattatccatgctcataaatatgattttttgactcttaatgacagaaaagatcaatatgttgccatttttgtctaaagtggggtttttaatagaggtctgagaaatcctgaagtttctgtgttagtgggttctggataggctgtaggagagagagaagccccagactctgcagaagccagcttgtaatttggcagatggctctgaggcagaggacaacagaaccagagttcttagagacttgccacctgggctgtaggactgtagtgatagggttgtttagtccct

SEQ ID NO: 639004 - DNA, 535 bp, Homo sapiens
gtagaattccatagcattccataattcgattatccactcacaggttgaagggcatcttgattgtatcattttttggtggttatgaataaagctgctgtaaacattactatacaggtttttgtgttaacatgttttcaattctttggtaagtctatgagtaggattgttgggccatatgccaagtgtatgtttaactttataagaaactgccgaagtgccttccaaagtggccatacagatttgcatttctaggggctgggtgcagtggctcacayctgtaatcccagcattttgggaggccaaggcagtggatcacttgaggtgaagagtttgagaccagtctggccaacatggtgaaaccctgtctctactaaaaaggaaaagttcaggccgggcatggtggctcatgcctgtaatcccagcactttgggaggccgaggcgggcggatcacctgaggtcaggagtttgagatcaggctgaccaacatggagaaaccctgtgtctactaaaaatacaaaattagccaagcatggt

SEQ ID NO: 639005 - DNA, 535 bp, Homo sapiens
gtagaattccatagcattccataattcgattatccactcacaggttgaagggcatcttgattgtatcattttttggtggttatgaataaagctgctgtaaacattactatacaggtttttgtgttaacatgttttcaattctttggtaagtctatgagtaggattgttgggccatatgccaagtgtatgtttaactttataagaaactgccgaagtgccttccaaagtggccatacagatttgcatttctaggggctgggtgcagtggctcacatctgtaatcccagcattttgggaggccaaggcagtggatcacttgaggtgaagagttygagaccagtctggccaacatggtgaaaccctgtctctactaaaaaggaaaagttcaggccgggcatggtggctcatgcctgtaatcccagcactttgggaggccgaggcgggcggatcacctgaggtcaggagtttgagatcaggctgaccaacatggagaaaccctgtgtctactaaaaatacaaaattagccaagcatggt

SEQ ID NO: 639006 - DNA, 397 bp, Homo sapiens
gaattctataaaccttacaacttcctgcatatgtttattactatgtctttaatgatttgcagtatctggtaggaggtaatgtgtgtgtttggttatgtaagtatgagaaaataggatttaaggtttttatgtttagtgagtaattcttcaagttgtaagaaaatatattaaaaattccagttagcaaaattgcggaaaatatgcaggttgcatgcaatcacaacaactccaaaaccaagagtacattactggaacgttcacagagatgcaggaaagattaaggagaattagaaaacatgaatggaaaggtcattattttttcattaaatttcaaagccgtaccaaatgctttggcttgaggaagggtgaagataragggggctagagctatattaat

SEQ ID NO: 639007 - DNA, 423 bp, Homo sapiens
ggccaagaaaaggcaataactgtaggtaatcaaggagggtggttctgggccttctattcagttgagcagctctgcttgagagcatactacatatycctttggtattggatctccattcccagtgtatttttgccaataaaaattatggaatcagtgtttaatatgaataattgtccgtagtgccaagtaactgagtttcttacatagttgaatatatgtcaaattgtcactgaccttcagattttggctccttggctggtgagtggattgatggcagggtgtacagagtgtaatcccctaagttaagtgcaagctgcagtttcagtttgaagaagattgtggatctggttagttattgattcttttctacaggtttgcccatttggcagcagtgaagctgttagaggagctacagaaatatga

SEQ ID NO: 639008 - DNA, 580 bp, Homo sapiens
cttctactttagggcctttgcacttgttccttttgtctggaatgcttttcctctaatgtctacagggttatctctcttatttccttcagggcttggcttaraagcccccttctcaataaagccttccctagccactgtgtatgaaatgttaagcccctcttccacaacattttatactactctttcctgctttatttttgttttctcctttagcacttattaccttccaacataccatatattttacttatttattttccttgttgtctgcatatctctattactaaagtaaggtccaggaaggcagattttgggccttttgttcaccactgtatccccaatacctaggtcagtgctcattcttagtagacccttaatacatatttgttgaataaatgatttctttgttttatttgccttaaatacaatgtatgaatgctttccactactaaaagtaattattagttgacattgatgattgatttttaaaaaattttgtttttgataggaccatcaaagaactgcagggccagctggagtatgaacgactacgtagagaaaaattagaatgtcagcttga

SEQ ID NO: 639009 - DNA, 570 bp, Homo sapiens
tatataaatcaacgtgaaaaagacagtccagtaaaaaaactgggcaagacttgygtaggcatttcacaaaagaagatatccaagtggccaataaacatgaaattgtgctcaaaatcactggttatcagaaatgtaaattaaaacccaaacaagataccaatatatacccatcagaatggcaaaaattgaaacagacgttaccaaatgctggtgaggatgtggaacaactggagattttatacaccagtggtggcagtgtaaattggctaccactttggaaaattaattcctagtggaattagtacatgtttctttgtgtacacagatggacaccaaaaatatataatgttcttgtcagcattattacatatatctctcaaactagaatcatctaaaaattccctcaacagtaagaatcaatacattttgctatattcatacaatggaatattatatagcaatgaaaatgtgtgaattgctactctacacatcaccacgaatgaatttcacaaacactatgctgactaaaaggaaacaatatgaaagaacacataccgtgtgattacatgt

SEQ ID NO: 639010 - DNA, 557 bp, Homo sapiens
tacctacctcatatggctgtcattgggagaattaagaggtagtagaggacttggaacagatcttatacaaagtgcccaataaatgttgacaactgttattactatagattgaaagccacagaagaactaaaaatagtgaatataagggttattaaaaggataggtgagtcattttttaacacttgcttacrgacccttagccagctgaactggtttcagcaatcaaatgcactcttgtcagggcaaactagttctgatactaggtcaaaatggctttagtgtccatgtgagatagatgcaagggtccagagggtgggaagtctggggtatggtgagagggctcctgccagggaagcccaaaaccagcgacagatcttcagggggagacaggagccacagagctggctccaagagagtcataattctttgctagctggagggaaaagaagagaaaatagaggcaagtaggaaaaaagagggaattgaagtcagaactgaactgaaagccatagttgttttttggtcagcaaagcacatttattgggcactttgtgtga

SEQ ID NO: 639011 - DNA, 557 bp, Homo sapiens
tacctacctcatatggctgtcattgggagaattaagaggtagtagaggacttggaacagatcttatacaaagtgcccaataaatgttgacaactgttattactatagattgaaagccacagaagaactaaaaatagtgaatataagggttattaaaaggataggtgagtcattttttaacacttgcttacagacccttagccagctgaactggtttcagcaatcaaatgcactcttgtcagggcaaactagttctgatactaggtcaaaatggctttagtgtccatgtgagatagatgcaagggtccagagggtgggaagtctggggtatggtgagagggctcctgccagggaagcccaaaaccagcgacagatcttcagggggagacaggagccacagagctggctccaagagagtcataattctttgctagctggagggaaargaagagaaaatagaggcaagtaggaaaaaagagggaattgaagtcagaactgaactgaaagccatagttgttttttggtcagcaaagcacatttattgggcactttgtgtga

SEQ ID NO: 639012 - DNA, 640 bp, Homo sapiens
actcagtgaaaattaatctataatatactaagaactctcttaggcaatagagataaaaatgaatcagaatgtaacaggataatgtcaaggtttttcttttgaaaacaaaccagcagttagatttttgaggaaaatatagttggaaagcctgactctcactcactggaccatatggaccaatctcttgactgctctatactgcagattccctgtttatagctaaacaaatgacaaggctattttgaataatgattgtcaaacttttatagctattaccaaggcattatgaactcaaaatgtttactttctggtcttgtcttcttgatctgggtaagactgaagaactaagatgaaaaggatattttaaaatttctttgaaattacatatgatttactaatagatattactttgtaagaaaaaatatatctaataacaaaacaaaatacgaatttaaattttcctatgagtttcttgagagtaggtactagatatcaatgtttgctgaattraagtcattaagaaaagctttgttttatgtaataaatttaagatgggttaacttaaactacattaagaagcagggataaactggtttttgagtatcaaatatttaaaaaatacatgtaataatcagagctc

SEQ ID NO: 639013 - DNA, 623 bp, Homo sapiens
agcttaggaaaggatcaaaattcaaagtacagtttctactgaatgcacactgtttttgcaccatggtaaagtcaaaaatttttaagttaaactatcttaagttgaggactgtctgtaattagtctgagatcttatggtctcatagctaggcagattagtacagttcctctgacttagtcaacaaacactctgaataccagcagcttcctgctaaatttgggatagagaccaaataccttaacaagccaataaatctttgtagggtgcagctcgtctcatgtcctactatgctctctctggtcctctgctttcaagggctctttgattttaattccacaaacatgccatgtgctttcccttctcagggcctttgcctagcccctgycctgttcagaaagctctccttttctttgcctgctcatgtttatccttcagagctcagtctgaatgtttcttcctctggaaagcctgatgactcctttaggttatgtctctctcatgatggtttttcatagtactgcacaggattcttttgcaaaccctctcataatttacacatttatgtgactctcagttgtctccccaagagaccagcagtcagccaactatagcccatagactac

SEQ ID NO: 639014 - DNA, 609 bp, Homo sapiens
cccgcggggccttgaaacccaacgatctcctctgccttgggagagmaagagccgccaagcctggcgactattcatgtcctcagagttttccggtgggagggaggcggaagacggggtaaatctcgcacaggctttcgggcaaggtagttctggcaccacaggaatgctgggaattgtagttttcgctctgtcacaagctcacctcccagcgcaggcgccaccgtggtcccacgaaactgggtctcttcacagacagacccacagttcgcgagcatggctcagcgctgccccgcttctcccagcgccccttcccgacctttgaacgccttcaccgccctaggaaagcgagatcttgtcagagaaccttccggcgcctgtttcctggcagtggggcatagtccaacagctggctcccccaagatagccagcggccattacgcgcttgggtcgggggagatggagtcgcatttagccgcacagcagcctggaacctgaagttttcggccgctgagcgttctgggtgattgcgtagtgcgagggccaacgaaaccttctgggaagtgtagtccagcaagccgctcacttttcgtgaggcgtcacatcctgctg

SEQ ID NO: 639015 - DNA, 516 bp, Homo sapiens
ccagtgcagcttagcttacctaagctatattaagaactcattctgctccaggccctgggccagatgctgtaatacatgacagtcttgatgtgaatgggtccctgccctcctagagtttacagtctaatgaagcaactaaccatgtaatcaaataatttatcaatcagagacagggaatccaagatggtttaaatggaagacactgatatttctgcaagttttaaatgggagatgcttacgttttgggaaggcagctcatctctggtccacaagtgttcatgagcattactctgagcaccttctggaaagtaaaccagggaccagtaaacatattatgaggtgatggattttgaaatctacsacaaacaaaaaaaccaggctcaccacattcaggctgacttccacgagcacaacaaaatacacacatgctccactgactctagcctgttccttcataataaaggctttctcactcattgcttacaacaatgcatgggaccctcaaaagtgttaccc

SEQ ID NO: 639016 - DNA, 551 bp, Homo sapiens
agaagctgaagccattgtgccccatcccccaaatctcccatgaaacacagaaaatccaaagragaggaaattagtaagtaccatgatgaccaagtatagatacaaaaaggaaagagaatgagtgctctatagatcaaaatagtgatgtatccctagagtaataaggatgtaaagaagcatgcagagaaaaaagcattagtaaggataataatgatcactagtaatatattgacatttcccatgtgtcacacactggggtgggtgatttctgtgcatgtgttattcctcacaacaacccggtgagatgggtattaccctccttggtttacagggaaatgtaacatggagaaatcttgtaatatgccccattaagttgactgggatagtaagatgtgaacactgtataaagcctaacaaaatctggcatggagtccagtgttgggtacacagtggaggatcagactggtggcaattaggaaactatgagtaatgatacaaacactcacctgtaaaattctcattccaccctcatggcacccaggcttcttctg

SEQ ID NO: 639017 - DNA, 316 bp, Homo sapiens
tgaacactgtataaagcctaacaaaatctggcatggagtccagtgttgggtacacagtggaggatcagactggtggcaattaggaaactatgagtaatgatacaaacactcacctgtaaaattctcattccaccctcatggcacccaggyttcttctgtttcacagattctagaattaattggacaaaagaagcccaggtactgtaatgagagtttttacactttcattctttcaatggaagaaagaggaaagctgctcactttcttgttgaagtcaaattcccattgggcaccaccactgctatccctgtttttt

SEQ ID NO: 639018 - DNA, 597 bp, Homo sapiens
agcatttggcagtatggctttcagctgtgtgggttaaaaaactctataagaagcaagtgactaaaaagattagactttggtttcaactttacaaatatctttgggagaattccacacaagtttgggcagtaaaagctattttgagaagggaatcaaaatgggaacctatatacatccctcccctagggtgcattatcagtatgatacactaccatcttcctggtgggatggaagagattacagccacggtacagaagcttgttgaagttaatattatatggccagctgagttctttcagtcttatgtgacaggtaaggaaacttgatggcacctggcacatgagagtaggcttccagaaattaaataaggtgattcctgagatacatgctggtattcctaatatagctcaagtgatagaacaactaatacaaactctaggcacttgccatgctatattagacttggccaatgctttcttcattattgctttataccctgacacatggratcaattcccttttacttggaatggtcaataatggagagtccatgtgttgtcccagggttttctacatagccccactatttgtcatgga

SEQ ID NO: 639019 - DNA, 387 bp, Homo sapiens
gctctggttaggacttgcgtactacgytgaataggagtggtgagagtgagtatagttgtcttattccagctctcaatgggaaatcttctagttttcgactattctctatgatgtttactgtgggcttgtcacagatggctcttattattttgaggtatattcctttgatgcctagtctgtggagggctcttatcatgaaagaataagggattttatcaaaagctatttgtgtgtttatttagatgataattgagattttttttaaaaaattgtttatgtgatggattacatttattgatttgtgcatgtggagccaatcttgcatcctaggaataaagcctgcttgatcatggtggattagctttttcatgtactgctagattcagt

SEQ ID NO: 639020 - DNA, 601 bp, Homo sapiens
ttgctctaccagtgagttttatactttcatgtgtattcagggtagtattaatagataacattctttcacttccaggtttagaaatcccttaagcatgacttgtaggatttgtctagcatttatcaattacctcagcttttgattgtctgggaaagactatttctcttttatttatgaagtataactttgctaagcattgtatccttggatgaaagatttttctttctttcgacacttggaatatatcatcttattctctcctggtctgtgaagtttctgctaagaaatccattggtagcctgatgggggttcccttataaggaatgaaatgcttctcttttgctgaatttagaactccctgtttgtctttgacttttgacagtttgacaagaatgtgtcatggagaagatattgagttgtatttatttgggaatgtgtgcacttcctatatctggatgtctaaatatcttggtagacatgggaaatattcacctactattttgtcaaattggcttcatatttttttcatttgctcttcatcttttgggacatkaaaatttcaaatgtttgatcactttgtggtgtctcatatgtcacaaag

SEQ ID NO: 639021 - DNA, 620 bp, Homo sapiens
acagggtgatgagtatatgattactccttgtgttatttcttgcaactgcatgtaaatctataataatctcaaaaaacatttcattaaaaatctaaaacatgggaaagttatctgatgcaaactataagaaacctggcatagccatgttaacgttaaaaaatatataattcaaaatgaggagcatcactagagatagaggcatagtttataacaataaaataaacaatttatctggattcccaaaactaacatggaaaagatcttccaatgtgctatatataaatgaataaataagcccaaggaaataaactcctatatgagctgaacactgcctttctcttctatttatatttcatataatttaaakttatgtgagttcctcatgtgatttaacctgaagcataatatcagttaacaaaagatagtaatggcatcacattccaatttgctttaaaaagcaaaacatggtaattgggatttgcatttattcatcattttaatctaaattcagtactaaaggagaaaaaccctgactttctgctcttttcatggaaaaattataaagcagtttacttttgtgtctctcaaatttcacttcctagaaataacaacactgttta

SEQ ID NO: 639022 - DNA, 526 bp, Homo sapiens
atctgaaaaagacaatctttccttcatatgggatgtttagtttcactggatacaaaattcttggctgataattgttttgtttgaggaggctgaagataggaccccaatcccttctagcttgtagggtttcttctgagaaatcttctgttaatctgataggttttcccttttaggttacctggtgcttttgtctcacagcgcttaagcttctttccttcgtcttaactttagataacctgacgacaatgtgcctaggcgattatctatttgagatgaatttcacaggagttctttgtgcttcttatattcgcgtgtctagttctctagcaaggctggggaagttttcctcaatttttcccccaaatatgttttccaaacttttagatttctcttcttactcaggaacaccaaatattcttaggtttggtcrtttagcataatcccagactttttggaggctttgttcatattttcttgttcttttttcatttatttatttttttgtctttgttagattgggttaatt

SEQ ID NO: 639023 - DNA, 542 bp, Homo sapiens
atctcgcttctggatctagccatccaacaagtctaccaggctctgggctggtactggggattgtctgcagagtcctgtgatttgaactgtctattggtctctcggccatggataccagcacctgttctggtggaggtggctagtgggtgaaactgactctatgcaggttcttagctttggtggtttaatgttctatttttgtgctggttggcctcctggctgggggtggcactttccagagaacatcagctgtggagagaaaccagyagtgaatggggccctagaactcccaagaatatatgccttttgtcttcagaagttgggtaggaaaaggctatcaggtgggggcaggactaggcatgtctgagctcagactctccttgggtgggtcttactacagctgctgttgaggataggggtgaggttcccaggtcaaaggagttgtgtatttaggagtattatggctgcctctgctgagtaatgcaggttgtcagggaagtgggggaaagcccacagtcacaggcctcacccagctcccatgc

SEQ ID NO: 639024 - DNA, 336 bp, Homo sapiens
gtgttaagcccttacctattaataattaccttgaatgtaaatggactaaattctgcaattaaagacgtagaatgattgaatggattttttttaacttaattatatgctgcctataagagactcatttcaactataaggacacacgtagacttgaattgaacaaaaggaaaaagtatttcatgcaaatgaaaactaaaaaagactaggagtagctatgcttatatcagataaaataaacattatggtcttgtttctttttgcagttttttttttttttggccaaaaactgcaaaaaraaataaaaccttttttaatacttagggggtcaaaacagca

SEQ ID NO: 639025 - DNA, 619 bp, Homo sapiens
catgtaatttgtgacatattattttgacttgactgcagaagacaataaaacacaatcattaggtacatgggcaaacagctgcttttgagattttctctatgattttctagctgtttttaatcaggttcagtgtgagttaagactccttttcatcattttaaacagacagttacacatgacacctacgctgatgagtkgtccgaaagattagtgagatgatacattaaaatactgtctagcacagtagatagtgcaaagtcagcttgcaataatcattggccataatttttgttagtgtattattagtattataaatgattgcttttaaaataataaacaggtctcagctttattccctcagtaagtattgtttagtgggaaattcttattttgggctcaggtggagcatctgtatctcttatacctgagaacagtggggatgagttcaatgaagtgaacagcaacactggaaaaagtagcagcagaacagccgattcccagacatgccaaagccacacgcagggtctgcatttctggcaaaaggaagagaccagtgagactctgatatctgggccgaaggaagcaacatccaccaaacttaatttaaaaacaatctatc

SEQ ID NO: 639026 - DNA, 619 bp, Homo sapiens
catgtaatttgtgacatattattttgacttgactgcagaagacaataaaacacaatcattaggtacatgggcaaacagctgcttttgagattttctctatgattttctagctgtttttaatcaggttcagtgtgagttaagactccttttcatcattttaaacagacagttacacatgacacctacgctgatgagtggtccgaaagattagtgagatgatacattaaaatactgtctagcacagtagatrgtgcaaagtcagcttgcaataatcattggccataatttttgttagtgtattattagtattataaatgattgcttttaaaataataaacaggtctcagctttattccctcagtaagtattgtttagtgggaaattcttattttgggctcaggtggagcatctgtatctcttatacctgagaacagtggggatgagttcaatgaagtgaacagcaacactggaaaaagtagcagcagaacagccgattcccagacatgccaaagccacacgcagggtctgcatttctggcaaaaggaagagaccagtgagactctgatatctgggccgaaggaagcaacatccaccaaacttaatttaaaaacaatctatc

SEQ ID NO: 639027 - DNA, 559 bp, Homo sapiens
gatatgcctaggaagaggtaaactgtataatttaatagtactgtcttcagcttggaagtggacatacgctctcctgtaacactttttataagttttcaaaaatttagaattatatttaaaatttttcctactgacactaccaaagtaagtacttacatgtccccaagagacaatgtacaagcttgcctacagaagcccttctgygaacacccgaaattggaaatatgtaaaagtccaccaacaaagaagtaggtaaagaaattgttctgtattcatctattggaatactgaaacactgggaaggagaacaacctactattacaagcaacagcactgataaatcttgaaggaataaagttgaggaaaaggagcctgtgacaaacggagccatgttatcttttacattttgtgaaggtcaaaatcaggcaataatccttcatggtgatggaggccagaactgttcttaagttatttttggcaggggcagtttttattgctgtagatgatgcacaaggaggccttccaaggtttttctacatcttgatctgggtgttgatta

SEQ ID NO: 639028 - DNA, 383 bp, Homo sapiens
agaacaaaatataagagagccacaacccagaaagagaaaagtacagaaacttctcagaggaaaaaaataygtagaaagtagagtgaagggagagagaaagtgaaggctgaaaagggaaaggaaatttggcattttacagggtgtttgtaaagacaggtcttaaaggggacaacttggactaaatggggtgtgcttattgtatatgcccagtaatattaacaaacaaagttttgggttgggaactgttctacatttgaaatggaactctagatatatttaaatagtatctagaggagtggtatcagcaagatagctaagtagagactcctgacactcattccccccaacccacacaccaatgagaaaaaaaccaaggcaacaaa

SEQ ID NO: 639029 - DNA, 605 bp, Homo sapiens
tgaatttgtagattgcttttggcagtacggtcattttcacaatatgattctacccacccatgagcatgggatgtgtttccatttgtttgtgtcatctatgatttctttcatcagtgttttgtaattttccttgtacaggtcttttacctccttggttaggtgtatacctaagttttgcttttagttttgcagatattggaaaaagggttaagttcttgatttgattatcagctcgatcgctgtttgagtatctatgaggcaagagattcctagagagttttttaattctgaagaatataatttttaggtaatggctcattagttgataattaatgtgaaaataggatcatttgttcaccagggcawctggtgctgaaacaactgcctaaaatttggccaaatttgttgttttggggtgtcattctttattaaggacaccctggctgaggagtggaaaacagtcacattgcacaaagttccatgatgcaagatgcttacagtgccatttacacagtctacaaactcccattactatttactcagttaatcccatgaacatttccaggcagtcaaagggtctaggggtgatatggtttaactgtgtc

SEQ ID NO: 639030 - DNA, 527 bp, Homo sapiens
tgttccctcgctctctcaatgtttatgtgacaagcttctggtggctgtgagtggcctcccttgtgagccttggctttcattagtggttctcttcagccccatttactgacagccacctccttctttttttttttttttaggtcatgagtttattgtccagtagtcgggcaggcttgtgcctttccttatttgtcagattctttcatttgctgattctgtttaagctcaagggtcagtcactgtgaaatgaattkgcacctcgttttctctttaggctccaagactcccaagaactccagggctcccactttccccattctgtgggactccttagggcccagaagagtgtgctgtgcaaagttggcttttagaaaactggctagctagcttgctggctcctccactttcctctccaaaacttcagaattcaccactcactgtcctaccagaaatcccctagaattttaaggtcatgcttactcacaaagtcttgaacccttctaaacacacttcccaagagactgact

SEQ ID NO: 639031 - DNA, 658 bp, Homo sapiens
ggccatttatcagacagatgagcatctctgttcaaagatcactatactagtgagtatttccatccactgattaaatatttattcattgagaaatatttattgcaaatcacactgtcctggggctaccttggtcttcagggatctagaaacacaaatggagtactacaatctgtgtggtgagggctatcytgtcagcactgagtgttgtgtacaagacacagaaatgacatctccattaagcctgacaggtcagggtttggaaatctggtgccacaacatgtgatttagaaatatgagaacagttactgtcttagtccatgttctgctgctataacagaaggtcacaggataggtaatttattcacaatagaagtttatttggttcatgtttatggaggcttggaagtccaagagtttggcatcagcatctgatgagtaactttgtgctgtatcatctcacagcagaaggtggaagggcaagcaaggtcacaagacagagaatgggggctggatttcatcctatcatcaggatcccctcctgcaataacccacctccgcgatatccacatgaacctattcacctcttaaaggtctcgtctctttttttatttcaacttatattttatatacagagggtatatgtgcaggtttgttatgg

SEQ ID NO: 639032 - DNA, 658 bp, Homo sapiens
ggccatttatcagacagatgagcatctctgttcaaagatcactatactagtgagtatttccatccactgattaaatatttattcattgagaaatatttattgcaaatcacactgtcctggggctaccttggtcttcagggatctagaaacacaaatggagtactacaatctgtgtggtgagggctatcctgtcagcactgagtgttgtgtacaagacacagaaatgacatctccattaagcctgacaggtcagggtttggaaatctggtgccacaacatgtgatttagaaatatgagaacagttactgtcttagtccatgttctgctgctataacagaaggtcacaggataggtaatttattcacaatagaagtttatttggttcatgkttatggaggcttggaagtccaagagtttggcatcagcatctgatgagtaactttgtgctgtatcatctcacagcagaaggtggaagggcaagcaaggtcacaagacagagaatgggggctggatttcatcctatcatcaggatcccctcctgcaataacccacctccgcgatatccacatgaacctattcacctcttaaaggtctcgtctctttttttatttcaacttatattttatatacagagggtatatgtgcaggtttgttatgg

SEQ ID NO: 639033 - DNA, 658 bp, Homo sapiens
ggccatttatcagacagatgagcatctctgttcaaagatcactatactagtgagtatttccatccactgattaaatatttattcattgagaaatatttattgcaaatcacactgtcctggggctaccttggtcttcagggatctagaaacacaaatggagtactacaatctgtgtggtgagggctatcctgtcagcactgagtgttgtgtacaagacacagaaatgacatctccattaagcctgacaggtcagggtttggaaatctggtgccacaacatgtgatttagaaatatgagaacagttactgtcttagtccatgttctgctgctataacagaaggtcacaggataggtaatttattcacaatagaagtttatttggttcatgtttatggaggcttggargtccaagagtttggcatcagcatctgatgagtaactttgtgctgtatcatctcacagcagaaggtggaagggcaagcaaggtcacaagacagagaatgggggctggatttcatcctatcatcaggatcccctcctgcaataacccacctccgcgatatccacatgaacctattcacctcttaaaggtctcgtctctttttttatttcaacttatattttatatacagagggtatatgtgcaggtttgttatgg

SEQ ID NO: 639034 - DNA, 658 bp, Homo sapiens
ggccatttatcagacagatgagcatctctgttcaaagatcactatactagtgagtatttccatccactgattaaatatttattcattgagaaatatttattgcaaatcacactgtcctggggctaccttggtcttcagggatctagaaacacaaatggagtactacaatctgtgtggtgagggctatcctgtcagcactgagtgttgtgtacaagacacagaaatgacatctccattaagcctgacaggtcagggtttggaaatctggtgccacaacatgtgatttagaaatatgagaacagttactgtcttagtccatgttctgctgctataacagaaggtcacaggataggtaatttattcacaatagaagtttatttggttcatgtttatggaggcttggaagtccaagagtttggcatcagcatctgatgagtaactttgtgctgtatcatctcacagcagaaggtggaagggcaagcaaggtcacaagacagagaatgggggctggatttcatcctatcatcaggatccccycctgcaataacccacctccgcgatatccacatgaacctattcacctcttaaaggtctcgtctctttttttatttcaacttatattttatatacagagggtatatgtgcaggtttgttatgg

SEQ ID NO: 639035 - DNA, 604 bp, Homo sapiens
ggtaccattccttcttaaagtactacaatcaatagaaaaagagggaatcctccctaactcattttatgaggccagcatcatcctgataccaaagccaggcagagacacaacagaaaaagagaattttagaccaatatccttgatgaacattgatgcaaaaatcctcaataaaatactggcaaaccgaatccagcagcacatcaaaaagcttatccaccatgatcaagtgggcttcatccctgggatgcaaggctggctcaacatatgcaaatcaataaaagtaatccagcataaaaacagaaccaaagacaaaaaccacatgattatctcaatagatgcagaaaaggcctttgacaaaatgcaacaacacttcatgctaaaaactctcaataaattaggtattgatrggacgaatctcaaaataataagagctatttatgacaaacccacagtgaataacacactgaatgggcaaaaactggaagcataccctttgaaaactggcacactacaggggtgccctctctcaccactcctattcaacatagtgttggaagttctggccagggcaatcaggcaggagaagggaataaagggaattcaa

SEQ ID NO: 639036 - DNA, 609 bp, Homo sapiens
tagtagagagcctgagcagggcatagcctataagacatctaaatctagatgtagaagtctaggacagtgcaggctatgggtatactgatgtgaaaggaacatccatagaacaatacatcaaagttgttgaagtgttgcaggggagggcaaaaaaaaaaagaaaaaaaaaaaggaaaaaaaraaaaaagggaatttagtgttttactgttttctgggaaaggagtcctctctgtagacaactggaacaatatagcctgtggtgaggcaggatttcagctctcaccaatgtcattggcattgtatcaaaggttttagctactgctagaaagagattaaaaggaaaaagtagaacattagtgatttgaactattccaccttgcagatgatatgatcaagttgggaaattttaaggaatccataaatagctactagaactaataaatttatcctgttggcaggatgtaagtttactatgaaaaagttaattatctttacatatatgtacataatttacatgtaaattatctttacatatgaattagaaataaattaataaaaagtacatgacttttatcataaactataaaatattgcaaagggaaattaaac

SEQ ID NO: 639037 - DNA, 609 bp, Homo sapiens
tagtagagagcctgagcagggcatagcctataagacatctaaatctagatgtagaagtctaggacagtgcaggctatgggtatactgatgtgaaaggaacatccatagaacaatacatcaaagttgttgaagtgttgcaggggagggcaaaaaaaaaaagaaaaaaaaaaaggaaaaaaagraaaaagggaatttagtgttttactgttttctgggaaaggagtcctctctgtagacaactggaacaatatagcctgtggtgaggcaggatttcagctctcaccaatgtcattggcattgtatcaaaggttttagctactgctagaaagagattaaaaggaaaaagtagaacattagtgatttgaactattccaccttgcagatgatatgatcaagttgggaaattttaaggaatccataaatagctactagaactaataaatttatcctgttggcaggatgtaagtttactatgaaaaagttaattatctttacatatatgtacataatttacatgtaaattatctttacatatgaattagaaataaattaataaaaagtacatgacttttatcataaactataaaatattgcaaagggaaattaaac

SEQ ID NO: 639038 - DNA, 592 bp, Homo sapiens
agtgagttattccaaaacaatcagtttgatcatagcctactctgcatataatcacataatatttcctcttaggtttgtgagaaataccaaaatccttaggttatcttgtcccttcgtctttagctgattctccactgtcatctcctgcctggcatctcctaccccttcttttaccaccctgtgatctattaaaattggtctatctgcattttcccaggacagtatcacagaggactgggtgactaactattggaaattaaccctctgactcttagcycattctacattccatttcctgtcgtacattcaaggttcaaattttcaggtgagacaccagaagacatgatgttggtggatggcaagtggcacttcaagtccctcatcgccatcaggggagacatggttgggtgaaggtaattgttccctgccatgtcaggagacatacagcaaggtgaataccccaaacttctcacaccacagactgagatagtattatccttggattacttacctcacatggttctaaaaagctgtttttgcaaagacaataatcaagtttctacacataatttttcaacacaccaccaatgat

SEQ ID NO: 639039 - DNA, 603 bp, Homo sapiens
cccttagttaactctttctcatatttctaaaccacatgttgtggtaccttctctctaaaacctgtcttgaaacacccccagttcacatggagatatcatttctgtgtcctgcatacagagctcaaattttaaaaatagcactcaaaacacggactaaaaatttccttttctgtttggggatcagggcagcctcaggagaatgtaatttgcagtaagtaattctagatgaaataatgtttcataagttgataaaaaatgcccttaaagagagctgtgttccatacacactcacctgtctgataaatgaccgcctaggatgcctcccaccatcattccagccatgaatacaaatttagccactgaagtcagtgattgagagtcacataccagatcccactggaagagaaggaagccagcacatcaatgcttattacccctcagtgtaacttgatcaaaacttcttagcatgatctgcaagtttcctaatattaagtctctaacttcctctgtggcttcctttytcagcattacctgacctttgttattcaggtctcaacttaaacataactttctcttggaagactttcctaaacctataggttt

SEQ ID NO: 639040 - DNA, 559 bp, Homo sapiens
tgaaacttttcaaaaaaattaagaagaggcttctgtctaactcattctatggaggcagcagcatcctgatactaaaatccagcagagaacaatggtaaaagaaaacatcaagcctgtatccttgatgaaccttgatgcaaaaatcttcaataaaatactagcaaactgaatccagcagcacatcaaaaagctaattcaccacgatcaagtaggctttatttctgggatgcaaakttggttcaatatatgcaaatcaattatataattcacacaaaaggaattaaaaacccgtatgatcatctcaatagacacagaaaaatcctttcataaaatccaatccttctatgattaaaaccaacatactacggattgaagcaacatacttcaaaataataagagccatctatgataaacacacagccaaacttactctaagtgggcaaaactcaaaccattccccttaacaactggagcaagacaaggatgcccacacccagcacatctactcaacttagtactgaatgtcctagccagagccatcagacaagagaaagaaata

SEQ ID NO: 639041 - DNA, 581 bp, Homo sapiens
ccatactgcccttaacggtttacagattcaatacyatcactatcaaaaataccaacatcatttttcacaaaattagaaaaatctattctgaaattcatttagaacaaaaagaacttgaataaccaaagcaaccctatgcaaaaagagcaaagctggaggcatcacattgcctgacttcaaactacactataaggttacaataatcaaaacagcataataccggtataaaaacagacacataaatcagtgaaacaaaataaacaacccagaaataaactcaaacacctacaattatgtgatctttgacaaaatcaacaaaaataagcaatggagacagcactccctattcaataaatgtagctaagattactagctagctatatgcagaagaatgaaactggaccacaacttttcactgtatgaaaaaaccaactcaagatagattaaagaattaaatgtaagacctcaaactataaaaattctagaagaaaacctaagaaatacctttattgacagaggttttggcaaagaatttatggctaagtccccaaaagcaattgtaataaaaacaaaaattgact

SEQ ID NO: 639042 - DNA, 608 bp, Homo sapiens
gaaagtggctgactgcagaccaggaagagaattagctagtcctttgatcttgaacttcccagcatccacaactgtgagaaagtaaatttcttttgtttaagctacgcaaaaacacaaatttttgttatggtagccccagctaattaatacaggatctaaatctgcatttggcatcctaggaccatgcaggccaaggctaaactgatttgaaaggacaatccatagaagaatatatcaagytgctaatggatttcataaaagcgcctctctgcctagtttgattgtaggccttgcataatgtatgttttctacaacaggataccagggagtcacaactcagacaggggaacttatacatagtttgaagaggaaagcattagataagataagctgaggaaacagagaatcagaatcagagggtttaaaaagcgaacaaaaaggaattttctgtttcaaagattttggggagacaaaacgatgtgtggtgattctatatgaccaataatgtataccactgggaaaatactgggattgggcagatgctctgcaatctttgctactctcacagcatgtttacattataatatgactattaagtcatatattct

SEQ ID NO: 639043 - DNA, 611 bp, Homo sapiens
taggttggcggggagttcgtgctcaaaactttaaatatttcactttactctcttcttgcttgcttggtttctgagaagttgtatgtaattctaatctttgttcctttataggtaagtttttttttttgcctctggtttctttcaggattctttatctttgattttttgtagtttgaatatgatatgcctaggcattgttttggggtttttgttgttgttgttgttttttaattgtttgaggttttkgttttcgttttgttttgcacttattctgctctatgttctctaagcttcctagatctgtagtttggtgtctggcattaattttggaataattctcaatcatcatcattccaaatatttctattcctttctctattttccttctggtatttttattacatgtatgtcacaccttttgtaattttcccacaggtattggatatactggggattttttttgtcttttttctctttgatttttagttttagtttgattttcgttttagatctctttgatcttcaagctcagagattctttccttagttgtgtacagtatactaataagcctatcaaaaacattcttcatttctgttataatgtttttcat

SEQ ID NO: 639044 - DNA, 610 bp, Homo sapiens
ctgacctactcatgctcttctcccgaagcttccaagacaagcttagtgcctctgctaggtgctcctgtggtgtgagtgacaggaacaaaaggcaagagcaaagggggagccacagagagatgtgcatgctcatcacagggaggagctgctgtgcaggtaatctgtttgctcagactgactttgggaaccatgtcagtgactctcctgaaatgaacaccttggagagacccaggcagctgggtcatacgtcccaggcagctggggcagacgggtccgaaacgtcctgttgatcactggccacatgaatcctaaggggcaatgccccaattaatgagaagatcctgccttcatgctctctctcaacaggccactttctgtttttaagagcctgggctaagagtgatcaattccattagcccttagaggtggcatcacaaaagcatctttggttctctctcaaagcccgatccttcagagaggagggcacccaagaatagggtaatctcagtcctgacccgggacaggaattgcttcctttgccactggtttatgtgtgaccccaaataattcactcctactcrccctgtaggcctttattcacttgtaaaat

SEQ ID NO: 639045 - DNA, 550 bp, Homo sapiens
ccatagtcaaagacacaattgacaagtaaattcgttacctctgtggcacacaataatttaacataacagttattactgataatgtacactaagtcatatcagaattataggagttttccataattttgtaacacataccaataatatatttaaacaaatacagcccaaagaaaaccaagcamcatttcatatttgacaatccttcctatagcatttatatgccaaataaataagccatatatgtcattttttggactttagggtacctattaataatatcttacaggattaattaggtcagaaaaagacagtttataatttgattttggaaagtttgtcaaatatcaaaggtttaaaacactttatagcacaaaataggattacaggtcttgtaaaataagtcattcatttaaccaaagtgataactcaaggatttttttaaaaaggcaaaaaccttccttctttgagagataagacttaattttccaaatgataagacccaatgcaaacagcatgaagccaattaattttttcaaaattttataaacaa

SEQ ID NO: 639046 - DNA, 550 bp, Homo sapiens
ccatagtcaaagacacaattgacaagtaaattcgttacctctgtggcacacaataatttaacataacagttattactgataatgtacactaagtcatatcagaattataggagttttccataattttgtaacacataccaataatatatttaaacaaatacagcccaaagaaaaccaagcaacayttcatatttgacaatccttcctatagcatttatatgccaaataaataagccatatatgtcattttttggactttagggtacctattaataatatcttacaggattaattaggtcagaaaaagacagtttataatttgattttggaaagtttgtcaaatatcaaaggtttaaaacactttatagcacaaaataggattacaggtcttgtaaaataagtcattcatttaaccaaagtgataactcaaggatttttttaaaaaggcaaaaaccttccttctttgagagataagacttaattttccaaatgataagacccaatgcaaacagcatgaagccaattaattttttcaaaattttataaacaa

SEQ ID NO: 639047 - DNA, 550 bp, Homo sapiens
ccatagtcaaagacacaattgacaagtaaattcgttacctctgtggcacacaataatttaacataacagttattactgataatgtacactaagtcatatcagaattataggagttttccataattttgtaacacataccaataatatatttaaacaaatacagcccaaagaaaaccaagcaacatttcatatttgacaatccttcctatagcatttatatgccaaataaataagccatatatgtcattttttggactttagggtacctattaataatatcttacaggattaattaggtcagaaaaagacagtttataatttgattttggaaagtttgtcaaatatcaaaggtttaaaacactttatagcacaaaataggattacaggtcttgtaaaataagtcattcatttaaccaaagtgataactcaaggatttttttaaaaaggcaaaaaccttccttctttgagagataagacttaattttccaaatgataagmcccaatgcaaacagcatgaagccaattaattttttcaaaattttataaacaa

SEQ ID NO: 639048 - DNA, 553 bp, Homo sapiens
gtgtacagaatattatgttagaaggaaacatttcctttagatgcttaagaaaatattgttagcatcaacgcacaacaaacagaacttgaggaaaaaaacttacatgagttgaaaatgagttgaaggagagcattattattttgagccttttaaaagaaagaaaaaggtggccttgttatgtaaataaagtccgttcagtagtcaacgtaaagaatctttgctttttttttttttycctttttactggccaaatacggccaccaccacaccaactttgtgtgtgtgtgtgtgtgtgtgtgtgtgtttgggggggggcagaatttagccactttagaggccttgttccccataatttgaaattttccttcagatttgatcaagtcagatagagttaatcagaaccagtgggaaaaagaccaaaacaacaagaaaaacagaaacaaacaacaacaacaaaacaagcaaaacaaatgatggcacaacatatatgataactgagcactctcatggtaaggagaatttatgacaaatttgttgttaatcttaactttag

SEQ ID NO: 639049 - DNA, 539 bp, Homo sapiens
gaaatagcaaaagcaatcttggtggtgagggggagacaaagttggaggacacatactacctgattttaaaatttattctcaagctaccattatgaagactgaatggggctgggcacagtggctcacacctataatctcagctctttgggaggctgagacaagcagatcacttgagaccaggagttygagaccagcctggccaacatgatgtaatcctatctctactaaaaatacaaaaattagctgggcgtggtagcacatgcctataatcccagctacttgggaggctgaagtatgagaatcgtttgaacccaggagttggaagttgcagtgagccgagactgcactactgcactccagcctgggtgacagagcaagacgcacacacacacacacacacacacacacacacacacacacacacacacacaaaagactgaatagtactagtctaaggatagacaaataggttaatgggatggaaatagccccataagaatatggtcaactgtcagcatccccttttggattgtaagctt

SEQ ID NO: 639050 - DNA, 541 bp, Homo sapiens
cccactgtgcctggccccacctgcctctttgtctgtacttctgtgatcagaagcagcactcagtgaccacagcatggatcccattatttggaggaaaggttcctctttgctcaccctggctcctataagctgtgtgcaagtttttcggggaaacatatgcacagctgcttgtcatgggcttggttggcagggaagaatggagmagctgttactgtgctaaggcctgaaactgactgaaattaactgtactttattgtccaagctgtccctgaaatttgcaagccttcaatagactcctgaactccaaaatagttgtatcagacagattctgcccgtgcaattattgtctaggtaaggagaaaagttcctggtgcttgctactctgccatcttcctacaatcctctctgagagtctatatttttaacaatatcacaagcaattctgatgcaggtcatctgtggaccacaatctgtaagaatgtctcatcaagagggaagctttaaacagggaattactgtcctggaggctctttaataaaag

SEQ ID NO: 639051 - DNA, 464 bp, Homo sapiens
gaattctagtgtccattgagattctgttgcagagcagccccctggctctgtgtgacctacgagttccttcctctgtaaaatacggaggctgagaccgatgatcctaacgtctcttcctacggtgcagtatgttacacactgctggccccattgccccttattgcaccccaagtgcaagaagaaagaaggggacctgggatgatctgagcaagactctcagcttgggatctagagtcagagaaacttgggtttgtgactttgggcaaagttaggacatctcttgagactcagcttcttcatttgcaagattggggataatgttaatactacctcaggtttttgaggattaaatgagatgacgcatgtaagtttttagcccagggactgcatagaggaactgctatcccaggtcccaactatcgtttctgataatttctacaayagtccctagccaccataagacc

SEQ ID NO: 639052 - DNA, 595 bp, Homo sapiens
ctgtagctgtgtggacaggagggggtgacaagtcagagacaaacacactcttgctgatggcaaggaagctggctgggccacgtgctccgaggcccacaatgagttcgtggcaaagaaaatgtccaaaggctccctgagaaacggcctccactagagcaccctccatcccccccttgacctctgtggaagagctgggtgcagggctcagaggaccctgacttgtgcccagcctctggcctggctgccctcccgtccctgaccaggagctgtaggagacgagcagcccccttccctggaacccaggatgggaggcagccttggctggcagctggcagccaggggccatgcttcctgtgcccctcatgtgacagtgatgctaaagctttgccacgccaggacggtgcaagctggcatgaaggctacaggcctggcaggtctggtgcggccactctgggaaccgtcccctgggagatgagcgagcrttcaccaaccagtgcagcagggcctgtggctgtggccgaggtgctccctgtggcatttccaggaaaccagacaccaaggtgccagcagcagaaggaagtcccctggggcttct

SEQ ID NO: 639053 - DNA, 463 bp, Homo sapiens
ctagccagcaaacaacacttagtggatttggcctgctgcctctttttatgattcctgtgaactaggagtgttttttaccyttttttttttttttcgggtcagacaggtaatgtgctgacgtattaatagtaacaaggttcaagggtggcatctttcacatacgtgcatgaacacctaatcatgatcatgaactatataaaaggatcgttttttacattttttaatggttgaaaaaaatttaagagtattctgtgacatgttaaagttatctgaaattcaactttcagtgtctatgaataaaattttatattatttgagccacactcatttgtttaagtatttcatgctacaaggtagggttaaacagttacaatagacactttatgacccacgaagcctaaaatatttactatctggtcctttgcaggaaaagtttgtcaactcttgccttaaggtatccatt

SEQ ID NO: 639054 - DNA, 540 bp, Homo sapiens
tcactgcagcctcaatcttagctgggtctacagagacccgccaccatgcctgatttttgtattttttgtagggattgggttttgccttgttgcccaggctggtcttgaactgggcttaggctccactgccctcacacctctaggcctctgtttagatagctttattcttattgcctccctactcccctagtaaaattaccagttgttctgaagtcatttttcaatatctgggaataagtttaggtaaaacttccaacttggcactataacactaggtgtataagattagttctgccagtcttggagacaggcataaattggagtggggattaaaagaaaatgcacaatggttgacagaatagtgaaggtttaagacaaattgagagctggtgggggtgtcggsttagttaaatgcatagcataattccctccaatgagtaccttctgataagttgtaagagacaaatcaactggtttgcttgtaatagaataaaatagaaggaaagcttaaatttacctgaaagaagcattttgcttcat

SEQ ID NO: 639055 - DNA, 462 bp, Homo sapiens
ctttatactaacaatttgatccctttcataggtacatgccgttgataattgtggacattttaaaatataactcttcttatattttatatatgtagaaaacatgattttaaggttgttttgttttttagttactgcttgtctcacactttaaaaattttgcctacaatttttgattgactgctagccagatgctcgtttggctgctgaagaggaagctaaacgattggaagaactacaaaaacaggcagcacaagagagaatggaacggtttgaaaaggcacatgtacggggattccaagcaatgaagaagatccatttggctcaagtaagacttatattctacccatgaccattactcatggacttactaatagcattgcrggactgattagtgaatgagctcaaagaaaggtaggaagggtgggtgttcaatatagtctctgattcatatgatttcaagtt

SEQ ID NO: 639056 - DNA, 575 bp, Homo sapiens
acaaaattgataaatcacttctgatatcatatgagacacatttctattattcttgtttaacatgacattttaagtaatatatatttttaggaacctgatttggatgctttggcacagcgggcagcagaaaggaaaagaaaagcagatttgaggcataaagaagccttgaaagtacagaaaaatcaaaaagaaatattactgaaacaaaaaacmtggtaaagtaataatttttactataatctcaactgaaactaacatggttgaaagtagaggatacataggatactgtgtaagcaaatattaaataaacatagtagcatattcattgcatttgttaaacttgatttaaaaataatgttggggacagggaatgatttgcttaggtgaacatagtaactaatgagctttcttttctagttgtagtttgagttgagtttagcagcagttactaagtttctgaaaaaatatatggctacttcagaatgcatgtcaaccaatgtctgtttccgatgtaaacatgaaataaaaattgatgtgattaagaacattaaaagaggttgtagactctgggagtc

SEQ ID NO: 639057 - DNA, 544 bp, Homo sapiens
actttagtatgtatctctgatgtataaggacttttttcttagtataatactaatattgtttccaatattatttaatacccagtatttgttcagccttcctcaatgatgtcaaaaaaattttgttgtttggaaaactataatggttttggttttgaaaaatcttttaataattctgccttttgaaaaaataccctttatttatttattgggggaaaaaactaaactattygtccattaggctttcccacactctgaatttggcttattttaaatggtcaatattttacagataagtttcagttaagttaataaatttacataagattataaagtatccaggtgtgattttaaaaaagaaaagaggaaaaaaatattataaaataataaggatctattttttatgggagtaaaatgtgtgcttttgtgatttgaagcttattttttttaaaaaaatgtaattaaagcagaaattttttaaaatacttgttctccacattagcttgttatagttattgaaatggctatttggatgattgtcaaaatt

SEQ ID NO: 639058 - DNA, 544 bp, Homo sapiens
actttagtatgtatctctgatgtataaggacttttttcttagtataatactaatattgtttccaatattatttaatacccagtatttgttcagccttcctcaatgatgtcaaaaaaattttgttgtttggaaaactataatggttttggttttgaaaaatcttttaataattctgccttttgaaaaaataccctttatttatttattgggggaaaaaactaaactattcgtccattaggctttcccacactctgaatttggcttattttaaatggtcaatattttacagataagtttcagttaagttaataaatttrcataagattataaagtatccaggtgtgattttaaaaaagaaaagaggaaaaaaatattataaaataataaggatctattttttatgggagtaaaatgtgtgcttttgtgatttgaagcttattttttttaaaaaaatgtaattaaagcagaaattttttaaaatacttgttctccacattagcttgttatagttattgaaatggctatttggatgattgtcaaaatt

SEQ ID NO: 639059 - DNA, 544 bp, Homo sapiens
actttagtatgtatctctgatgtataaggacttttttcttagtataatactaatattgtttccaatattatttaatacccagtatttgttcagccttcctcaatgatgtcaaaaaaattttgttgtttggaaaactataatggttttggttttgaaaaatcttttaataattctgccttttgaaaaaataccctttatttatttattgggggaaaaaactaaactattcgtccattaggctttcccacactctgaatttggcttattttaaatggtcaatattttacagataagtttcagttaagttaataaatttacataagattataaagtatccaggtgtgattttaaaaaagaaaagaggaaaaaaawattataaaataataaggatctattttttatgggagtaaaatgtgtgcttttgtgatttgaagcttattttttttaaaaaaatgtaattaaagcagaaattttttaaaatacttgttctccacattagcttgttatagttattgaaatggctatttggatgattgtcaaaatt

SEQ ID NO: 639060 - DNA, 494 bp, Homo sapiens
tctaagctcttaaagacttactgtatatagcaataattccttacctttcacagtcaagcttttatattatttgtattcaattttactaagcttttaatgatgctgctacctcaccacatcagattatgcctcagtattgactaatcacaaagaaaattcgtggagaatttaccagccattataacatgcattcataatttatatataaagttcaaaaataaccacaactaatttgtggtataggaatcaagatatggtttagaagacaggggatgataactgggaaggtaaaagagaagtgtttactgggttctctaatgttccacttcttgacctggtggtgtttacatgaaacaaacatgatttgtgcacctctttgaaggttatattttgataaagcatcsccccaaaaattgggaattaagggcgctaggcactactacaaaaggaatacatgcagcaggaaactaaaaacagaacatttaagactatgc

SEQ ID NO: 639061 - DNA, 472 bp, Homo sapiens
cattgggttcatcctgtgtttcattggtatgatcacttagcttccatcttcataccacaactgagtgttgaagatgttatttggcatatagaggtcctaaccaattatacccaaaagatagctacataagtattccattattaaacaatagttattcttatggaaaaggccattattacaaaaccgtatggcttttgacatactcaccgaagcccagggaggaacttgcattatcataaaaactgtgtgttatgtctgtatcccagatgaatcagataatatcactacgttaatggataatatgaaaaccttaacaactaacctttcagatccaacacatctttaaacaactggctaagcagctagttttgatcttgaagacttggtggcaaaagctttrcttattctaggaatcataatcatttgttgttgtcttgtttttgtctgcactattagactgccactgcgcctg

SEQ ID NO: 639062 - DNA, 479 bp, Homo sapiens
cacctaactcatagccccactgccttttctactattctgtgcttttcccagaagggagtctccaggaatttcttaatatctccaggaactcttttatttacgttccctaatrcaatcaaaagattattttgatatgtttatgaagctttttatgtgatttttgactctcatacagccagaaaactgtattaaactggttagtaaaatacacaaattatggtgattgtggatatttatatatgcatatgtgatacatagatagtgacttctgatcagttttccaaaaaattaggattcagtgaagtacatttaatattaacaatggcagggcacggtggcttatgcctgtaattccaacactttggggaaccaaagcaggaagccaggagtttgagactttcccaggcaacatagcaagaccctgtctctaccaaaaaaaaaaaaaaagccaggcttggtgttgcacatctggagtccca

SEQ ID NO: 639063 - DNA, 518 bp, Homo sapiens
tgttttttgtttttgttttttttttttaacctcccctgccacacctctcctgatcatctgttttgtgaggattcartgagttttccaaagcccttggaaatgtgcctggaatttcataagctcagtaaatgttagtggtagtggtcattgttataaataatccaaaaggaataatatactagcttgcagtgagctagaatagtacacttactcaaacaactttagataattagaatcttagtataaatgaaataagttcatttataattttccttttcaggacatggcaaaaaaaattcatcctcaaaagacaaaatagttaaaactttacaaaagaataagtaatgtatatatgttatcactttttaatttatttttatttattttttattttttgagacagtgtctcactctgttgcccagggtagagttcagtggcgtgatcttggctcactgcaacctctgcctcctgggttcaagcaattctcccgccccagcctcccgagtagctggcattt

SEQ ID NO: 639064 - DNA, 518 bp, Homo sapiens
tgttttttgtttttgttttttttttttaacctcccctgccacacctctcctgatcatctgttttgtgaggattcaatgagttttccaaagcccttggaaatgtgcctggaatttcataagctcagtaaatgttagtggtagtggtcattgttataaataatccaaaaggaataatatactagcttgcagtgagctagaatagtacacttactcaaacaactttagataattagaatcttagtataaatgaaataagttcatttataattttccttttcaggrcatggcaaaaaaaattcatcctcaaaagacaaaatagttaaaactttacaaaagaataagtaatgtatatatgttatcactttttaatttatttttatttattttttattttttgagacagtgtctcactctgttgcccagggtagagttcagtggcgtgatcttggctcactgcaacctctgcctcctgggttcaagcaattctcccgccccagcctcccgagtagctggcattt

SEQ ID NO: 639065 - DNA, 571 bp, Homo sapiens
gcctttctgaacatccatttacattaaatattgcattgtatttcagaagattataaaagctcaaaggtaaaagttaccagaaacatgatcatagagcaaattcggatatgaatgggcatgggatcattgatttttaaaaatacctattagtttaaatagctattttaagcatagaattttcaataccttacttggggtgccgggtttcaggatactttggaacctaagcaacctcattcttgaaagatagatttmtgtacttaatagtaaatataaatttgaaatacacatttttccacaggtgaattttgaagtcttcatcagtatatccatattaaaacgagatgacagaagccaaagtaattatggcaagtaatggtttttatcttaactataagttatttgctcaagggtgtaatggtcattaccaaggcttttagaatgcagtttctcatttgctgtggacatgaccataaaaaaatttcccagtaggttttctatctgctactttgctagcaatcagcttattgggaacagttgattaactgtaatagaaatgcaatacaaataa

SEQ ID NO: 639066 - DNA, 571 bp, Homo sapiens
gcctttctgaacatccatttacattaaatattgcattgtatttcagaagattataaaagctcaaaggtaaaagttaccagaaacatgatcatagagcaaattcggatatgaatgggcatgggatcattgatttttaaaaatacctattagtttaaatagctattttaagcatagaattttcaataccttacttggggtgccgggtttcaggatactttggaacctaagcaacctcattcttgaaagatagatttatgtacttaatagtaaatataaatttgaaatacacatttttccacaggtgaattttgaagtcttcatcagtatatccatattaaaacgagatgacagaagccaaagtaattatggcaagtaatggtttttatcttaactataagttatttgctcaagggtgtaatggtcattaccaaggcttttagaatgcagtttctcatttgctgtggacatgaccataaaaaaatttcccagtaggttttctatctgctackttgctagcaatcagcttattgggaacagttgattaactgtaatagaaatgcaatacaaataa

SEQ ID NO: 639067 - DNA, 606 bp, Homo sapiens
gcctgcggccgtgatcccttcaccctctcggaccgacttcggagtctcgatcctccggaccaacgaaggggccccgggaaaccccagatatgcaacgcctcccccgcccgccaggcccggacggcctcgccctcttagcaacctacctaaaacggcctcgcagtggccccaaccgcgcacttgctgcttgtaacccaggcctcggcccaaaacccgcgactggcctggtgtcctagagctctgtacacaccaccctcccgacctcagccctccaactcccgataaccagccgacctcctccaaccgtgcggaagaaaagggttggctatttccgtgscccaagtaatagtcaggccgaaatctcgcgatacaacttagcttccgggaagaaggcgagcggtgggaggagacgcgacgtgggggcgccatttttctcgccgcgcagggaggactgactaacgtgggcggagctctagctcgcgtattctgaggaggcggggttggcctaggcgaagatccggactctgggtgttttgctaccgtgaccgtttaggtgagtggaatagccaagaacatttcggcaaataacaaaaacaaaacgtgcgg

SEQ ID NO: 639068 - DNA, 606 bp, Homo sapiens
gcctgcggccgtgatcccttcaccctctcggaccgacttcggagtctcgatcctccggaccaacgaaggggccccgggaaaccccagatatgcaacgcctcccccgcccgccaggcccggacggcctcgccctcttagcaacctacctaaaacggcctcgcagtggccccaaccgcgcacttgctgcttgtaacccaggcctcggcccaaaacccgcgactggcctggtgtcctagagctctgtacacaccaccctcccgacctcagccctccaactcccgataaccagccgacctcctccaaccgtgcggaagaaaagggttggctatttccgtggcccaagtaatagtcaggccgaaatctcgcgatacaacttagcttccgggaagaaggcgagcggtgggaggagacgcgacgtgggggcgccatttttctcgccgcgcagggagkactgactaacgtgggcggagctctagctcgcgtattctgaggaggcggggttggcctaggcgaagatccggactctgggtgttttgctaccgtgaccgtttaggtgagtggaatagccaagaacatttcggcaaataacaaaaacaaaacgtgcgg

SEQ ID NO: 639069 - DNA, 518 bp, Homo sapiens
ggtgacgggtgggatgtgtgcctgagtgttttgtaatcctttgtctatttctgccttcagaaacccttgtgtgttaaaatattggagaaggctcattctttgaccatgactcgaagtgtgtaacctttgtgctggacgccagtgttattccatagcacgcccaggtctcctccccacttttgcacctgtttcgtaagctcaccctttctgcctcccaggagttggctaacatgtcacaagtgagacctgtggaggatttgtttttcctaagtttcctcctacatcccccctgccccacaccattagttccttgaccggttcctgagttaagattaaacagtgtaaactagtttagttttggtggggtttttttytcccaaagtaatttttttttttttgagaccgagtttcgctcttgttgcccaggctggagtgcaacggtgcgatcttggctcaccgcaacatctgcttcccgggttcaagcgattctcctgcctcagtctccccagtagctgaga

SEQ ID NO: 639070 - DNA, 604 bp, Homo sapiens
ggagaaacaatacattctcagatgaatcaaagctaagaataagccgggtgcagtgactcatgcctgtaatcccaacacttctggaggccaaggtgggaggatcatttgagcctaggagtataagacgagcctggacaacagagtgagaccctgttctctatttttaaaaaagagctaagaatatatcaagcataactcacctaaaagaatggctaaatgaagttctctaaatagaagggaaacaaaagaaagaacttgtaacatcaggaaggaagaacacaggaagtgaaattatggataaatatgatagactttccttctcttgagtttctaaattatgtttaacagttgaagtgaaaactataacatggtctattatagctctaaatatatktagaggaaatatttaatgcaagtatattataaatgggggaagataacaagacaaagggaagtaaggtttttatattttacttgaacttataaaataacactggtagactgtggcaagttacatacatataatgcaatacctagagcaaccactaaaaaagctatacaaagaaatatgctcaaaaacactaaagatatgccaaaatgaaat

SEQ ID NO: 639071 - DNA, 625 bp, Homo sapiens
agtaatatggaggatggattagaagagggacaagtctggaggcaaaaaggacttaggtgttgaagtgattcaagtgagaaatgatggcaatctgaattaaagccatgatagaagatgttggagaagtaaggacagatttaagcaatactgacctgggacgctggttaataataagtggaaaaaaaaaagaattaaaacttaggttcatactggcaaaataaagtgcgaaaaaccttcaaaatttatttaaacttgtagtagaaaacaaacgaactactttcctagtactaccttcaggctgtgaagatattaaccaaagaccacaaaaactgtccctcaggttctctaagtaaccagtgtccaaaggtattttggctaaaacaaagccctttttcaattaccacagctggcatcctagtatgttaccactgaaagagaaagacaggaaatgaatcaataaaccccaggcatatgctcagcctagaaagacacagcatatcaagragcagaaatctgtaaataaagaccctgggtaatttaattaccaggccagaatctgctaactgccggtttaattgtttgaacagtgcccaaattgtctgacgaggtgatcaccctaagatct

SEQ ID NO: 639072 - DNA, 625 bp, Homo sapiens
agtaatatggaggatggattagaagagggacaagtctggaggcaaaaaggacttaggtgttgaagtgattcaagtgagaaatgatggcaatctgaattaaagccatgatagaagatgttggagaagtaaggacagatttaagcaatactgacctgggacgctggttaataataagtggaaaaaaaaaagaattaaaacttaggttcatactggcaaaataaagtgcgaaaaaccttcaaaatttatttaaacttgtagtagaaaacaaacgaactactttcctagtactaccttcaggctgtgaagatattaaccaaagaccacaaaaactgtccctcaggttctctaagtaaccagtgtccaaaggtattttggctaaaacaaagccctttttcaattaccacagctggcatcctagtatgttaccactgaaagagaaagacaggaaatgaatcaataaaccccaggcatatgctcagcctagaaagacacagcatatcaagaagcagaaatctgtaaataaagaccctgggtaatttaattaccaggccagaatctgctaactgccggtttaattgtttgaacagygcccaaattgtctgacgaggtgatcaccctaagatct

SEQ ID NO: 639073 - DNA, 544 bp, Homo sapiens
ctgattgaaacattttaaactggagagtaaagattaccttaggatagggaacaagatgagaaacagttactgttgttagtagactgttgcaataatcaggtaactaatgacaattgcctgcacaagggcagaaggtagggaggcagagaaaatgaaatgttaccagaaattctaacttgatggttaaggattaaactaaagtacattcacatacatgccagcatcctaaagcctaatacttacacccattgctggtagtcttgtttctgccccattatctggagaccagaattcacccacacacgtatggaggctggcaaacatcacaaccacctccaggagatggtttgctgaggggccagtaaactagtgttgtggttgccttgagagaaatctagggaggttcacaacaactcccacactatagtagaaagctcttcaagasaggacaaactcacttttcagcagagaaacttgacctcatatgccattaagggtaggtgagtttgtcccacaaaataatgctgctatgtgccctaatgaa

SEQ ID NO: 639074 - DNA, 639 bp, Homo sapiens
aaatgttaccagaaattctaacttgatggttaaggattaaactaaagtacattcacatacatgccagcatcctaaagcctaatacttacacccattgctggtagtcttgtttctgccccattatctggagaccagaattcacccacacacgtatggaggctggcaaacatcacaaccacctccaggagatggtttgctgaggggccagtaaactagtgttgtggttgccttgagagaaatctagggaggttcacaacaactcccacactatagtagaaagctcttcaagagaggacaaactcacttttcagcagagaaacttgacctcatatgccattaagggtaggtgagtttgtcccacaaaataatgctgctatgtgccctaatgaaccatcgtttctagaaaaaaaagaaaaaatgattactaagagctgcacccaaagtaatgaggctagaatcaagctccctcccccttcatcagcactagcatgactgctggcatgtcgtacccaagttgggactcaaggtcacaactytttgtatccactcagagccactggcccaaagcacaagtctactcacaagagaaccaagctgtgactgctccaatgctaccagcttcctggatccagaatcacc

SEQ ID NO: 639075 - DNA, 605 bp, Homo sapiens
gtcacaactttttgtatccactcagagccactggcccaaagcacaagtctactcacaagagaaccaagctgtgactgctccaatgctaccagcttcctggatccagaatcacctaacagcagaaactcagcaagaaaaccaagatgtagggagaagatacaagcggctggagaagagcaaagccttaaaatggagatgagagaggagaagggagggataaagttttgaagtaggagaaaacaaaaagaacaagtcccctgctgagagcacaggagggtggagtaaaaagagattgagaagacagctactaaatggcttaagtggagattaacaggatctgccaaacaacagcaaggacctggctgagaacaaacagcatgagtaggaatgggtccagtcaacaaggttgtgggaattttctaacaactagagacacagaatttagaagagtcaaactatttttggctaataaagtgaagctggattgtagaatctcccttcctaattttaaaatctataaaatctaacaaagataaaattcaccagcagcagcctaatgggcatttcctcataccataaacatygaaaagtagcagccaaaacaa

SEQ ID NO: 639076 - DNA, 591 bp, Homo sapiens
tttatgtttattcttgaattgtccctcttccatccctacctcaccactgccaacccaatccaaaactgcatgttcatgatctctggggccacagcctagaaatcttcattttaaacacctaagatgatggatacagatgttttacagatcacactttgaaaagacattgctgtaaaagaatayagctgattacaggtctgatccccaaatggaagaagacctttctaaaaataaaaatagaattaagggcaaatactgtaaatcctcactcaacaacctcgataggttattggaaactaattttaagctaaatgacatatagcaggtctttgaataacatagtttggttataagactgaggaaaaaaatggctttgtcatacatcattttacttaaagtcactgtttccaagaaactatcaatgacacacatagtttaaaaaactagggacaaaacatttgccagaaatatgtcaaggggttaaaatcgttctggcatataaagaacctacaataatacattagaacttcaaataatgaatggctgaataagagaaaatttgtagggcagtaggtgctaaaacatttgggc

SEQ ID NO: 639077 - DNA, 591 bp, Homo sapiens
tttatgtttattcttgaattgtccctcttccatccctacctcaccactgccaacccaatccaaaactgcatgttcatgatctctggggccacagcctagaaatcttcattttaaacacctaagatgatggatacagatgttttacagatcacactttgaaaagacattgctgtaaaagaatatagctgattacaggtctgatccccaaatggaagaagacctttctaaaaataaaaatagaattaagggcaaatactgtaaatcctcactcaacaacctcgataggttattggaaactaattttaagctaaatgacatatagcaggtctttgaataacatagtttggttataagactgaggaaaaaaatggctttgtcatacatcattttacttaaagtcactgtttccaagaaactatcaatgacacacatagtttaaaaaactagggamaaaacatttgccagaaatatgtcaaggggttaaaatcgttctggcatataaagaacctacaataatacattagaacttcaaataatgaatggctgaataagagaaaatttgtagggcagtaggtgctaaaacatttgggc

SEQ ID NO: 639078 - DNA, 591 bp, Homo sapiens
tttatgtttattcttgaattgtccctcttccatccctacctcaccactgccaacccaatccaaaactgcatgttcatgatctctggggccacagcctagaaatcttcattttaaacacctaagatgatggatacagatgttttacagatcacactttgaaaagacattgctgtaaaagaatatagctgattacaggtctgatccccaaatggaagaagacctttctaaaaataaaaatagaattaagggcaaatactgtaaatcctcactcaacaacctcgataggttattggaaactaattttaagctaaatgacatatagcaggtctttgaataacatagtttggttataagactgaggaaaaaaatggctttgtcatacatcattttacttaaagtcactgtttccaagaaactatcaatgacacacatagtttaaaaaactagggacaaaacatttgccagaaatatgtcaaggggttaaaatcgttctggcatataaagaacctacaatmatacattagaacttcaaataatgaatggctgaataagagaaaatttgtagggcagtaggtgctaaaacatttgggc

SEQ ID NO: 639079 - DNA, 599 bp, Homo sapiens
aattgagaaatgaaaaagaacagaaaacaaaaactaagtggtaaactcgaggcctaacatatttataattgcaataaatgcaaatagtctagaaacaccagttaagagacagaaattggtagagtgaactaaaaataagacacaatatgccatctacaagaaactcacctcgaatataataaaataagcatattgaaaataaaaagatcaaaaatagatactatgcaaacattaatcaaaagaaagcaggaatggctatattaatatcagataaagccgacatcacagcaaagtagattaccagaaacaggaacattacataatgatgaaagggtcaatctaccaagaatacatagcagtcctaaatgcttatatacacaacagaactgcaacacatgtgaaacacagagaaacggacaaatcacaattatagttggagacttcaatacctcctctcagcaatttatagaactagacagaaaatcagcaaggatataaaagaactcgacaccatcaatcaacatyatctaattaacatttatgggacattccccccaacaacaacaggatgtacattcttttcaagtgcccacaggata

SEQ ID NO: 639080 - DNA, 578 bp, Homo sapiens
tctagaatttaatagaaatagaatcacataatgtatattcttaattttgtctggtttctttcactcagcataacttttcgagattcatccatggtgatgcttgtatctgtgattcattcctttttattgctgagttgttgtctcttgtgtgcatttgccacaatttgtttatccattcacctgttgatgaatattttggtagttttcagtttctggctattacaaataaagttgctgtaaatattcacatacaaatccatttataaacatatgatttcttttctcttggttgaatacttgggaataaaatggctggatcatatgatagatacatgtttaactactttaaaaatataagtatagttttgtaaccctgtatcttcagttaatatgaaaatattttcaagtcaataaatacattcctataaaattattttttaactgttatagtagtccatcaattaaacatgccataatgtatttaaccaattctttgttgatggrcatttagattacttccagttttttcactattataaacagcattaccatgaatatccttgaaactaaatctttga

SEQ ID NO: 639081 - DNA, 628 bp, Homo sapiens
ggcaaatttataatactaagtatatacattagaaaagagggaaagtgtcaattcaataatcttagcttctaccccaaaaatctagaaaaagagtaaaataaacccaaagcaagcagaagaaaggaagtaatagcaaaaataaatgaaactaaacacaaaacaatagaaaaaaacacagtaaagcaaagagctatttctttggaaaggtcaataaaattgacaaccctctagaattaaaccctctgacaattaaaaagaaagtgaagacacaaattaccaatataaagaatgaatgtagggataccactgcagacctgcagacaccaaaaggataataaggaaacactataaacaactccacatgcataaatttcagagataaaataggctaatttgttaagaaacacaaagtattacaactcacccaatatgacacatattatttaaataatcctaaaactattaaggaaattgaatttataattttttgatttccaagraagaagtctccaggcccagatagcttcataatataattctaccaaacatttaaaaataggattaacatcaactctatgcaatttcttctataaaatagaagagcattacattctgatctactttatga

SEQ ID NO: 639082 - DNA, 616 bp, Homo sapiens
aagtctgtacttctgttattgtgctaatacagagtctctgtgatggcataggtggcagtgatgtcatgatggtggtgggagtccagaaggragatactgcaaatacttttttcaacatcactttctcataactaacaagatcttttctccagaatagctctatttttttaaaaaaattaattgtgctaggagctctcataagtatttgcatatccagaagttgacctagggaataaaaagaggcagaaaaatagtttagtggcttactaattaacacaaatttgagttatatgcaaactcagtagtgtcttctcagcattaactatagacagttcatttgtcctgaaagctttattgtttgattgtgattgtgtagatctttctcccataaaacattggattagtaggtgtacatatatgctaaacaactaaaatacagcttaatatccttaatttagatacattttaaatcttaactttagcaattatcttttcctttggcttctctgggcaactagatttcaactcatgacttgattaagccatctccattttgaactttctgaaaaaacggaagaaaatctctgatttttcatagtaaaacataaatttaatt

SEQ ID NO: 639083 - DNA, 550 bp, Homo sapiens
ctaattataatgaccaatttctggcaagcaactgcaaagagaaagggaggtaaagatatatggagaaataagaaaatacaatgcaggtgaaaatcctgggttctggaatcaggttgttgagtttctaagtcctattactgctacttactggctgtgcaatcttgaacaaactacattatttaacctcggtttcctcatctctaaaatgaagataacattacctacctggaaatgctgctataataaaaatcacaaaatatgcataaggtgcttgatgcattttgtgggttgaatttcrtccatcaccaccacccccctcagaaaaagtattgaactcctaaccccaaatccctcaaaaatgtgaccttttttggaaatagggtcatttcggatatacttagttaagatgaagtcattagcatggaaccctgttccaatgactggtgtcctcaaaaaaaaaaggcaatttggacacagaaatgcatacagggagagcgccatgtgaagacgaaggcaaagatcatggtgatgcttctacaagccaaagaat

SEQ ID NO: 639084 - DNA, 473 bp, Homo sapiens
ggaggacagctccctcatagcccctcttatrggcaatgactattttaccattttattagtatctgtgccatgaaagcacgatttcaatcaaaatggtaactaatgaggtatttttaaggctgtctaatttggtacttacctgatgactaatctaactatgtgagctgaattaagatgactaagtagccaattctaacaacaaaaaactcaaaatagaggagttagatgtagtgacttgattctgagcagatgttcctgatagcttgatttaaaaatccttgtttaacttaattgtaaatcttcttttcatgttatttcactgtttttattttattttcttgaaagtaatctaccattagtattttcatcagttggattgacagctaaatcctcagccatgtatggatgtctcttaattatgacaaaagacctacagagctaaaaatgttgaataccagatggacactgaattc

SEQ ID NO: 639085 - DNA, 512 bp, Homo sapiens
tgtctggcttaattaatcttcactctgctttctgggaaatacatttcataatttatgtgggtagctaaataaagttcttgaagacacatacccaatattaaatcaaactaagacttgccttcttcttaaaatactagagagtctttaatcttataaagttatgcattggtttgagggcgtgctctgtttaagaattccctgttaatggaataaatgggaggacagctccctcatagcccctcttatgggcaatgactattttaccattttattagtatctgtgccatgaaagcacgatttcaatcaaaatggtaactaatgaggtatttttaaggctgtctaatttggtacttacctgatgactaatctaactatgtgagctgaattaagatgactaagtagccaattctaacaacaaaaaactcaaaatagaggagttagatgtagtgacttgattctgagcagatgttcctgrtagcttgatttaaaaatccttgtttaacttaattgta

SEQ ID NO: 639086 - DNA, 433 bp, Homo sapiens
tatgtgagctgaattaagatgactaagtagccaattctaacaacaaaaaactcaaaatagaggagttagatgtagtgacttgattctgagcagatgttcctgatagcttgatttaaaaatccttgtttaacttaattgtaaatcttcttttcatgttatttcactgtttttattttattttcttgaaagtaatctaccattagtattttcatcagttggattgacagctaaatcctcagccatgtatggatgtstcttaattatgacaaaagacctacagagctaaaaatgttgaataccagatggacactgaattcataaattagtcatctttcattatctacccaaataatatttttaaaaagaaagctttaattctttagtagtctatcgtctatcttccttgcattgcttaggagacttgttaacaaat

SEQ ID NO: 639087 - DNA, 554 bp, Homo sapiens
ttgagttcaactctctgaataagtcatttgctccactgtctcccaagttttcctactgcctccatctwacagaaaacaaacttagaaattcagagttacttgtgtatctcttttgtcaatatcctccaatcactgtttccttaagcagtggttttcaaacttttgtgtaataagaatcacaagggggtgattctgttctcgagacccatccccaaattcctggatctgtggggtctatgtgcttccatttttcccaggttccccaagtggttggttcaggaggtctaaggatcacagtttgagaatcactgccttagagggctctcaaggctttcttcatcttccatgcctttattgtaatcaagttttcaaatcgcctctcttgcctgttgatttgaagtaactctcttgttcattctcttaagagacagtaggttggcatgaaaaaacttcaggtagtttggaatcagacaatctgagatctatcctttgactcagctgtgagtggcagctgcatagactcatggttatgagtttttggtgtcaaacacacc

SEQ ID NO: 639088 - DNA, 590 bp, Homo sapiens
aatagaaaatcaaagaaacactggacttaatctgtactgcacaccaaaaggacctaacagacatttacagaacattttatccaactgctgcagaatacccattcttctcctcagcatatggaacattctcaaggacagaccatatgttaggccacaaaacaagtctcaaaaattttttaaaaaatgaaatcatatcaactactttttccaaccacagtggaataaaactagaaatcaataacaaaggaaactttggaaactgtacaaacacatggaaattttaaaatatgctcctaaccgaccatgaggtcaatgaagaaattaagaaaatataaaaatgtattgaaacaaatgaaatacaacattccaaaaccaatggaatacagcaaaagcagtactaggagtgctagtttatagcaataaatgcctccgtcaaaaaataagaaaaacttcaaataaacaatctaacaatgcatccytgaagaactagaaaagcaagagcaaaccaaactcaaaaaccagtagaagaagtgaaagatcagagcagaagtgaatgaaattgagactttaaaaaaatacaaaagaacaaa

SEQ ID NO: 639089 - DNA, 389 bp, Homo sapiens
ctgggcaacatggtgaaaccccatctctacaaaaactcaaaaattaatcagacacggtggtgtgcacctgtagtcatakcacccaggaagctgaggcaggaggattgcttgagcctgggaggcagaggttgcagatcacaccaagatcacacccctgcactccagcctaggtgatagagtaagaccctgtctccaaataaataaataaatacacacatacatactattcatactattctaaaaaattgggctaaaaaattgagcagaaggtaatacttccaaacccatactatgaggccagtattacttggatatcaaacccagacaaagatacaacagaaaaaagaaaactacaggccagtatctctgatgaatatagatgcaaaaat

SEQ ID NO: 639090 - DNA, 389 bp, Homo sapiens
ctgggcaacatggtgaaaccccatctctacaaaaactcaaaaattaatcagacacggtggtgtgcacctgtagtcatagcacccaggaagctgaggcaggaggattgcttgagcctgggaggcagaggttgcagatcacaccaagatcacacccctgcactccagcctakgtgatagagtaagaccctgtctccaaataaataaataaatacacacatacatactattcatactattctaaaaaattgggctaaaaaattgagcagaaggtaatacttccaaacccatactatgaggccagtattacttggatatcaaacccagacaaagatacaacagaaaaaagaaaactacaggccagtatctctgatgaatatagatgcaaaaat

SEQ ID NO: 639091 - DNA, 389 bp, Homo sapiens
ctgggcaacatggtgaaaccccatctctacaaaaactcaaaaattaatcagacacggtggtgtgcacctgtagtcatagcacccaggaagctgaggcaggaggattgcttgagcctgggaggcagaggttgcagatcacaccaagatcacacccctgcactccagcctaggtgatagagtaagaccctgtctccaaataaataaataaatacacacatacatactattcatactattctaaaaaattgggctaaaaaattgagcagaaggtaatacttycaaacccatactatgaggccagtattacttggatatcaaacccagacaaagatacaacagaaaaaagaaaactacaggccagtatctctgatgaatatagatgcaaaaat

SEQ ID NO: 639092 - DNA, 561 bp, Homo sapiens
tcacagaaaacaataaagtggcttggagagaatactactggaactagtttatcatacatgtatccaacttctactgtctcccagggcctgggatatgataaayaagaagaaatattagttcactgaacacccactctgtgccaagtactttcaaacgtcatctttgttaatcctcataacaatattgctcaggtagatgtgatttgtatgagtgagatagaaagaccacccaaccagtaaggggcagggcaaagagaccttttggttttgttgcacattccacaaatcattccacaaatagccaagctgtgtatcccacggtggaggcaaacggggatgtaattttttttaatttgtattattttttctatttataaaagcacatgtggaaattacttgcgtttttttcacataagccctcccattttttcactgacatacatgtcttaagtaccttctgtgtttccaacactgtggacacaaagatatataaggccctcccctcaagctatttacaattcaactggggaagcagagctggaaataaatgtcactgtgcgt

SEQ ID NO: 639093 - DNA, 537 bp, Homo sapiens
caggatggcccatttaacccattgaacaatgggttacatgaagaagagttcattcaaactattaggcccccgataaaaattgtcaccatgtgaggcaaggtacaaacagcaggacacccagctctacagtaaaatkggttctgtaaaagcaaaaaaaaaaaaaaaaaaaaaaaagaaaagaaaaaaacacacattctggtccatttttttaaaagtaagagaatacacccattctgtccttatttttatctgtctcttttttcctgcatttcctacactgaaaatggatcacttttatcatcacagcacagaagctattaaaccaggaagagatatttttaaaatgttaacttggggccaggacaaaggaggcctgtggtgtggttgagtgactcccatcagtcagcagcgagcgaccacatgcagggacatcgtgcagcttcagtggtcaaaggtgtgcagacagcgctgtcttacccgtccccgaatgtcaccttcctcccaaacaaatccccggggctcctgcacaatggcttt

SEQ ID NO: 639094 - DNA, 510 bp, Homo sapiens
tgggcaacatggtgaaaccctgtctttactaaaaatacaaaacttagctgggtgtggtggcaagtgcctgtaatcccagttactcaggaggctgaggcagggagaatcgcttgaacccaggaagcagaggtttcagtgagctgagatcgtgccattgcactccagcctgggcgacaagaacgaaactctgtctcgaaaaataaataaataggctcacacctgtaatcccagcactttgggaggcccaggcaggcggaacacctgaggtctggagttcaagracagcctgaccaacatggagaaacccagtctttattgaaaatacaaaattagccgggggtgatggcacatgcctgtaatcccaagtactcggcaggctgaggcaggagaatcgcttgaacccgggaggcggaggttgcagtgagctgagatcacgccattgcactccggccagggcaaaaagagcaaaacttcatctcaaaaataaacaaacaagtaaataaataaata

SEQ ID NO: 639095 - DNA, 510 bp, Homo sapiens
tgggcaacatggtgaaaccctgtctttactaaaaatacaaaacttagctgggtgtggtggcaagtgcctgtaatcccagttactcaggaggctgaggcagggagaatcgcttgaacccaggaagcagaggtttcagtgagctgagatcgtgccattgcactccagcctgggcgacaagaacgaaactctgtctcgaaaaataaataaataggctcacacctgtaatcccagcactttgggaggcccaggcaggcggaacacctgaggtctggagttcaaggmcagcctgaccaacatggagaaacccagtctttattgaaaatacaaaattagccgggggtgatggcacatgcctgtaatcccaagtactcggcaggctgaggcaggagaatcgcttgaacccgggaggcggaggttgcagtgagctgagatcacgccattgcactccggccagggcaaaaagagcaaaacttcatctcaaaaataaacaaacaagtaaataaataaata

SEQ ID NO: 639096 - DNA, 409 bp, Homo sapiens
gggccccgagccccgcgtgcgccctggcccagcccgaggcgcgaagcgggccgaagtcggctaggggcagcagggcataaagaggctcgcccactccggcacaaccggctctgggtccaggagggagcttcacccccccatcccrggcgcaagacagaggaaactggaattagcatgagccaatgggggcgcggcgctgttactaggcggaccgggcagatctcgactaggaacttcgttgatttcccggctcagggacgagcgcaaaattgcaagcccggttagcgagcgtaaagagccgtccaggaacccgcgggggaggcgctggaatttggggcccggcgctggaatttggggcccggcggggagcgccagctgcccagcccccacctgggggaaccctgcttgg

SEQ ID NO: 639097 - DNA, 497 bp, Homo sapiens
gattctcccgctttggcctcccaaagtgctgggattacaggtgtgagccaccacacccagccccctaatgggctgtcttcagaaacacagygagtggccctgtgctggttccaccagactcagcctctcaagggaagaccctggccacaccctaaggaagggccttttctcggcatgacggtggcccctagcactgggctagaaaatcatcccattaacgggaagatagaaaagactgggacattaagaccataattaaatcttttaagggaatgacagtaatacagtagtccctccttatccacaggggacaggttccaaaaccccactggatgcctgaaactgcagatagtactgaaccctatacaggcatcccttggtatctgaggggactggttccaggacctcccctggataccaaaatctgggaatgctcaagtgcccgatatgaaatggcatggtatttgcaaataacctacgcacgtcctcccatgtcc

SEQ ID NO: 639098 - DNA, 530 bp, Homo sapiens
cccatttgctcatttactcaacaagctcacactgttgggccaccgtgagcacggctcccctgctggggtacagcaatgaccaaggatggcaaggccaacacttggcataaaacaacmcctgctaagggggcagaacttaaaaatgtgtaataaatgaatatgatcatatgaataattctaagtgccacaaggggggagtgacgggggagagaggacatcttacgaggtcctcagaagtgcccctgagccggagctgagtgccgcgtgatgaaaagaagccaccaggcatggaaggtctagcaggggctgtgtgcaaaggcccgggggcaggacagaaagaaggcgtgtgaggctgggcgcagacagagggaaactgggtggggggttgggagatatctttgccggatgatctcgtagttctcagactcagccatcatcctttttcttttttaaacccatctattgaacatttaaaagttattgtaaacatctacactttattttagaaagttaattgctctgtcgtttct

SEQ ID NO: 639099 - DNA, 501 bp, Homo sapiens
ggcactggggcttggggtccaaagaaaccagcactgagtggtaaccaggggtcactaagccacttggtcccacgatgacccacaggagtaagtcctgaagctcttctagtcatcaggtccaccctgtgagtgtgtcrgggggagggtggtgggtagagatcgcagagtatcccccaagggaagaaatgaggactgaagctcacataggccccaagtccagggttaggacatcccacaggatggaacctgctagctccagccagtcccaggcaccagaaatgtggacggcagctcagtgcatgaggcctcccaaggcctggggcccagggaactgctccagccagagccccctgttcccccagtacacacaccatggactggtgtgcgaagctgggcagagtggagtaagagttgcctgaagaagcgaagtgtgtcacctgactttggatgtgacttcaggaaaggagtccccaaggcatctaggcctctgctcaagagcca

SEQ ID NO: 639100 - DNA, 461 bp, Homo sapiens
ttcctgccaatgacttatcccattcaggtttgcctgaatggagaagccactccattggagtagccactcggggatgccttctggatcccctgcccagtccttctggttggagcttctttgagctcttaagagaaccttctgcacttgttagctgaccctccaccgcatttagattgtcatctccatggagcaagcccggatttgtgttgttgccagttgtacctccagtgctgggcacatagtaggtgctcaatagctgtttgtgagtaaatggctggctaggtacactaggagctcatccatcagcaatcctcactgcaagctgccctgcccaatctgccactgtgccccggggcagacaaacagaggtacctgcaaaggcctcaggcagagctgccccyatgggaaggtctgcattgcctttttttttctttatgtgaaagaaatagttggaccaaggt

SEQ ID NO: 639101 - DNA, 560 bp, Homo sapiens
tttttgttttttttttgtttttttttttatggagttttgctcttgttgcccaggctggagtgcggtggcaccatctccgctcactgcaacctctgcctcccggcttcaagcaattatcctgcctcagcctcccgagtagctgagattacaggcatgcgccaccacgctgagctaattttgcaattttagtagagacagggtttctccatgttggtcaggctggtctcgaactcctaacctcaggtgatccacctgcctcagcctcccaaagtgctgggattacaggtttgagccaccacgcccagccctagtttgagtttttgaggaacctccgttccacaacctctccagcccccatgtgagcacgcactgcatgcccgtggtcactctctcaggctccaggcctggagggcgagtgacagataggggtgggatccgtgctttgcttgytttgctttgcactgccttgcactgccaaattgctctccagaaagcctgtcccgtgcccacccaggtgcgggcttgcttcagtgcctgctgggcctcatgtgggtgattgg

SEQ ID NO: 639102 - DNA, 558 bp, Homo sapiens
aagcttaggatctggagatgaggtcctcttgagtttcaagtgggacgtaaattgaatgtaggcactcttctcagagcagaggagagaaacrgaagcagagaagcccacgtgaagacggtgggaggcacgggaacaatgcagccctagtccggagcgccaggagaccccaggagctggaagaggcaggaggatcctcccccagagccttcggagggtgcacagccctgcccaggccttgattttggacttctagtttccagaacagatttttgatgtttttttgtttgtttttttgagacagagtctcacactgtcacctgagctggagtgcagtggcgcaatcttggcttactgcaacctccgcctcccaggttcaagcgattctcttgcctcagcctcccaagtagctgggattataggcacccaccaccacgcctggctaattttttgtatttttagtagagacggagtttctccatgtcggtcaggctggccttgaactcctgacctcatgatctgcccacctcggcatcccaaagtgctgggattgcaggcaag

SEQ ID NO: 639103 - DNA, 558 bp, Homo sapiens
aagcttaggatctggagatgaggtcctcttgagtttcaagtgggacgtaaattgaatgtaggcactcttctcagagcagaggagagaaacagaagcagagaagcccacgtgaagacggtgggaggcacgggaacaatgcagccctagtccggagcgccaggagaccccaggagctggaagaggcaggaggatcctcccccagagccttcggagggtgcacagccctgcccaggccttgattttggacttctagtttccagaacagatttttgatgtttttttgtttgtttttttgagacagagtctcacactgtcacctgagctggagtgcagtggcgcaatcttggcttactgcaacctccgcctcccaggttcaagcgattctcttgcctcagcctcccaagtagctgggattataggcacccaccaccacgccyggctaattttttgtatttttagtagagacggagtttctccatgtcggtcaggctggccttgaactcctgacctcatgatctgcccacctcggcatcccaaagtgctgggattgcaggcaag

SEQ ID NO: 639104 - DNA, 558 bp, Homo sapiens
aagcttaggatctggagatgaggtcctcttgagtttcaagtgggacgtaaattgaatgtaggcactcttctcagagcagaggagagaaacagaagcagagaagcccacgtgaagacggtgggaggcacgggaacaatgcagccctagtccggagcgccaggagaccccaggagctggaagaggcaggaggatcctcccccagagccttcggagggtgcacagccctgcccaggccttgattttggacttctagtttccagaacagatttttgatgtttttttgtttgtttttttgagacagagtctcacactgtcacctgagctggagtgcagtggcgcaatcttggcttactgcaacctccgcctcccaggttcaagcgattctcttgcctcagcctcccaagtagctgggattataggcacccaccaccacgcctkgctaattttttgtatttttagtagagacggagtttctccatgtcggtcaggctggccttgaactcctgacctcatgatctgcccacctcggcatcccaaagtgctgggattgcaggcaag

SEQ ID NO: 639105 - DNA, 530 bp, Homo sapiens
tcattaacattgaactgatggccaacagcactctaaattacacctaaacaaagcccatctaacagtcatattttctctataaggcacatcacagccttcttgcacttaggaacactggacagcattttggctackctcagggccattttaagcagcaaattcaccaacaaaacacaaaaatgggaaaaacgtagcactaaatagacctcaaagaaaaggacacttgacttgtttacaaagacatgaaacactaaggcagagcttctcattcagcctctgctggaacatatgccttggggaactcaaatttttcaccattctccctgcacacttgtctgtggaatgacctaaaaatcacaagtgttaatttaggggttaaaaataagttttagcaagtaggcaaatttgcaaagatggggaatctgcaaatgatgaggatcagctgtgtgtcatttttcaatcactgtgtattgagtttctactgtgtgctctactcccaggattatgcagcacttaaacattgatcagtt

SEQ ID NO: 639106 - DNA, 530 bp, Homo sapiens
tcattaacattgaactgatggccaacagcactctaaattacacctaaacaaagcccatctaacagtcatattttctctataaggcacatcacagccttcttgcacttaggaacactggacagcattttggctacgctcrgggccattttaagcagcaaattcaccaacaaaacacaaaaatgggaaaaacgtagcactaaatagacctcaaagaaaaggacacttgacttgtttacaaagacatgaaacactaaggcagagcttctcattcagcctctgctggaacatatgccttggggaactcaaatttttcaccattctccctgcacacttgtctgtggaatgacctaaaaatcacaagtgttaatttaggggttaaaaataagttttagcaagtaggcaaatttgcaaagatggggaatctgcaaatgatgaggatcagctgtgtgtcatttttcaatcactgtgtattgagtttctactgtgtgctctactcccaggattatgcagcacttaaacattgatcagtt

SEQ ID NO: 639107 - DNA, 596 bp, Homo sapiens
gctgctcactgcaattactgagaagctttgcaaactattgacacctatatcctaccaccagagagtctgatgaaattggtctgaaatggtttctgggcatcaagatattcaggagctcccagtgatttctaatgagcgccaggttacaaaccattgcatgaggygaaaggaattggttatttacatgctgccaaaatatcactccataacctcctttctgagccttgatttttctaatctataaaatgataataataatacctattttagagtgaaattgttgtaaggatgaaataagctaatgaatgcaaagtgcttagggaaaagatctggcacacaggaggcacttctgctttaggctccaaccatcttcctgtcaaactgctgttaacagtaaccttctcctgccaatgggatagtctgcctcgtgccctcagtatgtacacagaaatactggcatatacgttgttatttgatttcttctctctgagggcttctccaaagtctaaaacccaaattgcctagatgagatgagagcagtgtctatgcatgagatgtatcctgtgatctccacctcatccctgagttctgtcctc

SEQ ID NO: 639108 - DNA, 561 bp, Homo sapiens
gggctggatgaggggtgaaatgaggagttagtgtttatcaggtgcagggtttcagctggggaakgtgaaaaggctttggagatggatggtggtaacagctgcacagtaatgtgaatgtagttaatgccacaaaactatacacttaaaagtggttaaactaatacattttgttatatatatttgccacaatataaaatataatctggctgggcgcagtggctcatgcctgtaatcccagcactttggaagtccaaggcagggtgcatcacttgaggtcaggagtttgagaccatcctggccaacatagtgaaaccccgtctctactaaaaatacaaaaattggccaagcatggtggcacatgcctataatcccagctacttaggaggctgaggaggggaaatgcttaaacccaggaggcggaggttgcagcaagtcaagatggtgcactgcactacagcctgggtgacggagcgagactcagtctcaaaaagaaaaagaaaaggcaaagaaaaaatataatctaacttaagacataatataagacataccagtcttgaattt

SEQ ID NO: 639109 - DNA, 362 bp, Homo sapiens
caacccagccaatcagcactcctcactatccgagcccatactcgccaaattatttttaaaaactctgatccctgagtgctcggggagactgatttgagtaataataaaatttggtctcttgcacagctggttctgtgtaatyactctttcaacattacagttcccctgtcttgataaatcggctctgtctaggcaacgggccaggtggacccattaggcggttacagtagctatggtttggatctgtgtccccaccccaatatcatgttcaattgtaatcctcgctgttggaggtggggcctggtgggaggtgattggatcacgggggtggttcctcatgaatagtttagcaccgttccctt

SEQ ID NO: 639110 - DNA, 568 bp, Homo sapiens
agttgactcagctgaactccattgattaagcttggttaaaaatcaaggtaaaagagatgagtaatagttataataactaacatttaatgaatgcttaccatgttccagatactattctaagcactttgcatgcrttgtctcatataatgcccacaaaacccctataaggaaacacctatcactatttccatttcacagacgagacaactaagaccaagattatagtcagtaaataacagtgcaggggctaaaatgcagtcaatttgactctagaatcaggacccattatgtgaataagatacagtaactgcccttattactttactatttatttggagaaataaaaacacatgaaaaattaaaagaaaactaagaagagaagataatttataggtgtcaaatgtgagtataggtaataaatgccatgaggtatcagaagacagagaaatcactttaggttggggtggttaggaacacttacatagaagatgagtcggggtttcaaaaaggggagatttgagctggattgtgatgaatgagtagtattttgataagtggagaggataag

SEQ ID NO: 639111 - DNA, 504 bp, Homo sapiens
tttatatttaattttgaagactgagttagaatttatttggtaaataatacaagaaagagcattccagaaagggggaatatcagaggtaggaaatcatggtacatcagagaaaaggccrgtatatcataatggtgaagacaaaagtcatgcattctggcaatgggggagttgtgagtcagctggagggggtgtttggagcaacatcaggaaggacttgaactgccgtatttgccaacagggagtttgaactttaccttgcagaccataggagccactcaaaaagtttaagcaggggaaagacagtataagcatttaatttaagaaagaagaacctagcttcagtttagaggctggattagatataaaactagattagaatctagcttcaatttagagaatagattagatagatagattagtggtcttcccctagccaacaactgggtaatgaagcgctggtgtgggaccagtctcctagacccaagtgctaggagtagaatgcta

SEQ ID NO: 639112 - DNA, 610 bp, Homo sapiens
gtgcatccttgcaggagaggcatatcatgctcaccttattacaaatatgaatcaggtgggcataaacaggtgttattacaatatgatcctgggaggttttgtttttgagggtggggggaacttgtgttatgaattttattttaaaatccacatagatattagataagcatgaggaaaagaaccgtgtttacagataattaaatccagaggagttatacattttcattcatcctgaagattttgtctgggctttccttcctcagctgtcatcttgcagctactgtttgttgattcatagatgacatagcctcaggagagcaaaacaatcccaaacagcaactgcaaggtaagggagtggcagctgcaggcccaagagtaacctcccaggaggtggttgtgggggtggcagcagccgtctgatcytgggagctgagttacagtcccttccacatggctgtaaattaggtaggctaattccctcttttctctcatttttgtctctaagaaaatcaaaaaggcttcaatgattggaaacaagataacttgttttcttaatatggatttctcagtagcataatatcttaaagcatgcaaaaatatatttggtagt

SEQ ID NO: 639113 - DNA, 577 bp, Homo sapiens
gtgtgtttctggtttactattaatcagtagttttaaatgaataatttgatatgataatattcaacaattttagaatctagtcaaatggtctatttctttaggaagttaaataaccctaattcttctagaaaataaactatgtattttattgatttgagaaaaaaccaaagctgtagtttgaattgttttgtaatttgagttgttttcatttaagaaattcaaatcagaaataattcttaaggaactggggggaaaaaaaagcaaaactttcagtgataatttttttggcyaggcagggtgtctcacacttgtaatcccaacacttcgagaggtcaagatggaaggatcatttgaggccaggagtttgagaccagcctgagcaacatagggaaacacctctacctatagcaaaatatatatatatatttaaaataaaattttaaaagaaatttttttgtgtgattttgatggctcaatatttaaagcacatctaaattcaatcagcttatgggtaactgctcacaatttcagagcgctgtgaagataaaaagatatgtgtataaaagcatcagttctt

SEQ ID NO: 639114 - DNA, 590 bp, Homo sapiens
tcaggtgctcagtatcctgatgtggctattgactactatattggacaatgcacttctagagccccatgcagacctaccaagtcaagttcaaagtgtaactcaggcatcactttgtaagtagtrtgccttccattaatgatgtatgctgaaattagggaactactgttttctgtaggtgacagcaagttctttgacatagactatgaggagaaccaacctaatcctctaaatagctttttcgggtggaggcagtattatctttctttcatttattagcaaatgcaacaagatttgaactacttgccaagacaaaatggaattcaaacccaaaaatgtctgacctaaaagcctatattcttcattacataaaaaagagaaaaactaagttgaaaaggttaaagccagatcttactagagaatttaaagctggctctgtaatccaagggtaattgaagggttttcagtagaggagtgtcaagagtagagttgtgccttatactgatcatttttgcaatgatgtatgggaggtaggagatcagtttggatgtaaacaaccctttctaatggagtagaaagaatctcgccaagtg

SEQ ID NO: 639115 - DNA, 590 bp, Homo sapiens
tcaggtgctcagtatcctgatgtggctattgactactatattggacaatgcacttctagagccccatgcagacctaccaagtcaagttcaaagtgtaactcaggcatcactttgtaagtagtgtgccttccattaatgatgtatgctgaaattagggaactactgttttctgtaggtgacagcaagttctttgacatagactatgaggagaaccaacctaatcctctaaatagctttttcgggtggaggcagtattatctttctttcatttattagcaaatgcaacaagatttgaactacttgccaagacaaaatggaattcaaacccaaaaatgtctgacctaaaagcctatattcttcattayataaaaaagagaaaaactaagttgaaaaggttaaagccagatcttactagagaatttaaagctggctctgtaatccaagggtaattgaagggttttcagtagaggagtgtcaagagtagagttgtgccttatactgatcatttttgcaatgatgtatgggaggtaggagatcagtttggatgtaaacaaccctttctaatggagtagaaagaatctcgccaagtg

SEQ ID NO: 639116 - DNA, 590 bp, Homo sapiens
tcaggtgctcagtatcctgatgtggctattgactactatattggacaatgcacttctagagccccatgcagacctaccaagtcaagttcaaagtgtaactcaggcatcactttgtaagtagtgtgccttccattaatgatgtatgctgaaattagggaactactgttttctgtaggtgacagcaagttctttgacatagactatgaggagaaccaacctaatcctctaaatagctttttcgggtggaggcagtattatctttctttcatttattagcaaatgcaacaagatttgaactacttgccaagacaaaatggaattcaaacccaaaaatgtctgacctaaaagcctatattcttcattacataaaaaagagaaaaactaagttgaaaaggttaaagccagatcttactagagaatttaaagctggctctgtaatccaagggtaattgaagggttttcagtagaggagtgtcaagagtagagttgtgccttatactgatcatttttgcartgatgtatgggaggtaggagatcagtttggatgtaaacaaccctttctaatggagtagaaagaatctcgccaagtg

SEQ ID NO: 639117 - DNA, 602 bp, Homo sapiens
ggatttgagcactaagattggagacaaagagacccacttatgtttgaaaatatatgcaaaagttaaattgtggacaactcctggaaaaagatgcaacaagaatatcattggttttatataccaatcaaatgacacagaatagagaaataaagtaaccatttgcttgagagtttatactcagccccgcaaagagtcatattggaaaacagctggtgttagtacacatctgattgtaactggggtattaaaaaaagcactgcaggtaaatcactgaagtaattttcttaaagtttgaacagaaatcagatatagattatatagagtcagaatatgaacagggaaaatgcattaagctgtgataactttcctctgtatcaagaaaatgaactaagcccatatatttatgaaatacaagcagagtttagcaatctgtacaatcaggatttaagcttctgattaatcttttaaaaagtacaaagcctttcttatatctaatctttgkgaagctgtatgaacttgagaaccctttttaatataaatttgaatactgaaggctttcttgcctaggctctaaaatttgccttcaattgtttggttggttt

SEQ ID NO: 639118 - DNA, 594 bp, Homo sapiens
cttaaagtcattttttttagagtcctttaaaattaaaatctattttcatgtgtccaagatggtttatgtataatcaggcctaaaatatgagaaaaaaataaaattaattcaccaaatatttgaagagtacctggactttatattaataatttaatgttctataaatatttattaatattataattattctgtgattaaaatctactatactctttctctaatataattaactatatctaaactggaaggattttgatactaaagattcaagtatgattttctagtttaaaaagattatttttaaaaacacacacacgtatatgtatttgtatatgtgtatgtgtatatatgtataaagacggggtcttgctatgttgtccaggctggttgaactcctgggctcaagcagtcctcccacctaagcctcccacaagtgccaggattacaggcgtgagccaccgtgcccagcctaaaragatacctttatatttccattctagccacttcattgacaaaccctgctaacttgtgtccttatcacgataggtaggttaatctaattacccattaaagtaatagaagttttataatcat

SEQ ID NO: 639119 - DNA, 637 bp, Homo sapiens
agaggttcctttgttcttttcttcactgccatataaagtattaaaaagaggcagtctctttttatagatgccttcattctctttttaggtttttccatgtttttcaattactccccgtgtctatcattggaaggtaacagttataattctaaaataacccttcctgttctgtggttaacctagttaatggtatctgtatatatacctaaagaaaacattaatatgtaacattatggttttttagatatggcagatctaaaagtggttgtcccatcatcttcccttctaggccccagactgaggcacattgcattacaatatgtggtcccttgaatttttctctgcattacaaaacccacctctattatctattaaccattgtaggtggctaatatagtgccattaataaacaagcataattctccggtggcaattcatatggtgtaataggatacaagaaattattttgacttcttaggcccttctcttgagggcagaaaagtagaatttatgtgcttttccagtatattagtcttgagtaaagataatcttrttagagctatgagacaaagtgaatttacagaaaaatgaaaaattataatagtgaaagccttatgaagaatatgtttgttaagat

SEQ ID NO: 639120 - DNA, 581 bp, Homo sapiens
ccaataatccctttgagtggggtttttctgagaattcctgtaaatacatcaatttgtctacttcaaatgagccttcttttgaccgttgcaaagcaggatttttataagtatgcttatgccaaatgtgagagaataaaagaagccttttatttttaaaaragagacctactgacaatattctaggcatctcgtatttttctactgctaaagccagtgatgaatcagatgggaccttcaatgagttacccattttgctcagttgtaacttggaatttacagagaggctttggaattttccctgggaaccaaatcccactcagccaaagtagtcagagggagactttttggcaaacattcagagttctgacctaatcacgggtgaccacaaatcctccaacaaattcacccaccaaaaggactcacttgagatacaccaatcttccttattgccaaattgttgggataaaaaagtaatcaaggcccaaaggaacatgctaatgcataaatatagaattaactaattttgttactgagcagaaaacccctgcatccatgcagatagcccataagtggctatagag

SEQ ID NO: 639121 - DNA, 581 bp, Homo sapiens
ccaataatccctttgagtggggtttttctgagaattcctgtaaatacatcaatttgtctacttcaaatgagccttcttttgaccgttgcaaagcaggatttttataagtatgcttatgccaaatgtgagagaataaaagaagccttttatttttaaaaaagagacctactgacaatattctaggcatctcgtatttttctactgctaaagccagtgatgaatcagatgggaccttcaatgagttacccattttgctcagttgtaacttggaatttacagagaggctttggaattttccctgggaaccaaatcccactcagccaaagtagtcagagggagactttttggcaaacattcagagttctgacctaatcacgggtgaccacaaatcctccaacaaattcacccaccaaaaggactcacttgagatayaccaatcttccttattgccaaattgttgggataaaaaagtaatcaaggcccaaaggaacatgctaatgcataaatatagaattaactaattttgttactgagcagaaaacccctgcatccatgcagatagcccataagtggctatagag

SEQ ID NO: 639122 - DNA, 605 bp, Homo sapiens
tgcaatctaacggtcatcttagtttattcttagacctcccagatgttcaccactgccccccttcaaaagacctccagaaaaacttgcttattagaaaaaatctgagtttgtcagacttactgcaacattaaagaacaccgtctattttttttttttttttgagatgggagtcttgctctgtctctcaggctggagtgcagtggcgccatctcagctcactgcaacctctgcctcctgggttcaagtgattctcctgcctcagcctcctgaatagctggtattacaggtgcctgccaccatgcccagctaatttttgtatttttagtagagacggggtttcaccatgttggtcaggctggtctcgaactcctgacctcgtgatttcccccacctcagcctcccaaagtgctgggattacagtcatgagccactgcgcccggcctggaagaacgccatcttgacagagtgttcccagtatctcaaaaaggctaagtatgttacagggttttagarcttggacagggtgatgttaaatcatgtcctgaaaggtagagaaccagttgagattgggtagagttgatgcatgttagctttgggttaatgag

SEQ ID NO: 639123 - DNA, 566 bp, Homo sapiens
acagtcaatctaataaccaagacggctcctatgtgactcatgggtgagtagcgcagacagcatggacatgccagacaacgggatgattcacgtcctgggtgagatggagtaggactgcatgagatttttatcatgccattcagaagggcatgcaatttaaaacttacgtgtatttctgagatttgccatttactatttctggactgcggttaagcacaggtaactaaaactgtagaaagtgaaactgcagataagggagactactgtatcgggacaagtttgttaatactcatagctacccagattgggataggcagtgtaaaggagtcagagcttctgttcatcagaatccatacrgcagaggtgggtcagccttttggcactctagggcctccaaaatccttttcagccctgggattatctgattctttgattaatgaatgtctttcaagatgcctaccttaccaacttaaccaggaaatgaattcactagtactgtgaccaggtaagagtatttccaagggcagcctatgagccctcaatggatggagtttcactaattccct

SEQ ID NO: 639124 - DNA, 562 bp, Homo sapiens
ctgtccctgtttcagatgatggacagtcctgtctcctgcaccaggtgatgaatggttctgtccccttmatcaggttatgtagagttccccgcatcagagatgggagattctctcccttgcatccctgggtagaacaatggctggaataaagtcttgaaaaggacagggagaccatggatggaagtatatcttgccaggaagcaaagtgaggcagagcctcaaatgtagtgggcattcaggggaggagttgttcttaagatgagctgttctttctctacctcttctagcaattagacataccataaagtggagactgaagccatcatatttgcagacaaatgctttgatttggtaaagtcttgagagcttaaaagtgttattttgaagtctatgatttcttcagtatcatttctttcaaatattttatcagttctcactctggttattaaaagccagaagccatcccattctgcagtatttctttggggagcatttacaaagtgcatctcagcagtggcacaggaaaatatatttccctggaaaccagaagtcacacaatagt

SEQ ID NO: 639125 - DNA, 562 bp, Homo sapiens
ctgtccctgtttcagatgatggacagtcctgtctcctgcaccaggtgatgaatggttctgtccccttcatcaggttatgtagagttccccgcatcagagatgggagattctctcccttgcatccctgggtagaacaatggctggaataaagtcttgaaarggacagggagaccatggatggaagtatatcttgccaggaagcaaagtgaggcagagcctcaaatgtagtgggcattcaggggaggagttgttcttaagatgagctgttctttctctacctcttctagcaattagacataccataaagtggagactgaagccatcatatttgcagacaaatgctttgatttggtaaagtcttgagagcttaaaagtgttattttgaagtctatgatttcttcagtatcatttctttcaaatattttatcagttctcactctggttattaaaagccagaagccatcccattctgcagtatttctttggggagcatttacaaagtgcatctcagcagtggcacaggaaaatatatttccctggaaaccagaagtcacacaatagt

SEQ ID NO: 639126 - DNA, 562 bp, Homo sapiens
ctgtccctgtttcagatgatggacagtcctgtctcctgcaccaggtgatgaatggttctgtccccttcatcaggttatgtagagttccccgcatcagagatgggagattctctcccttgcatccctgggtagaacaatggctggaataaagtcttgaaaaggacagggagaccatggatggaagtatatctygccaggaagcaaagtgaggcagagcctcaaatgtagtgggcattcaggggaggagttgttcttaagatgagctgttctttctctacctcttctagcaattagacataccataaagtggagactgaagccatcatatttgcagacaaatgctttgatttggtaaagtcttgagagcttaaaagtgttattttgaagtctatgatttcttcagtatcatttctttcaaatattttatcagttctcactctggttattaaaagccagaagccatcccattctgcagtatttctttggggagcatttacaaagtgcatctcagcagtggcacaggaaaatatatttccctggaaaccagaagtcacacaatagt

SEQ ID NO: 639127 - DNA, 562 bp, Homo sapiens
ctgtccctgtttcagatgatggacagtcctgtctcctgcaccaggtgatgaatggttctgtccccttcatcaggttatgtagagttccccgcatcagagatgggagattctctcccttgcatccctgggtagaacaatggctggaataaagtcttgaaaaggacagggagaccatggatggaagtatatcttgccaggaagcaaagtgaggcagagcctcaaatgtagtgggcattcaggggaggagttgttcttaagatgagctgttctttctctacctcttctagcaattagacataccataaagtggagacygaagccatcatatttgcagacaaatgctttgatttggtaaagtcttgagagcttaaaagtgttattttgaagtctatgatttcttcagtatcatttctttcaaatattttatcagttctcactctggttattaaaagccagaagccatcccattctgcagtatttctttggggagcatttacaaagtgcatctcagcagtggcacaggaaaatatatttccctggaaaccagaagtcacacaatagt

SEQ ID NO: 639128 - DNA, 660 bp, Homo sapiens
cactggtgttctaaatcactgttccacattgcttctcattcctgcatatacattttagggcttgctttgtgtcagggatcaatcagatgctacaagactagagcttggaagaaataaaaaaatgaattgagaatgcactcagccctcaagtagtttattctcccatacatgttaagtatttccacagacaatcatgagaaaatgtagaaggcgmcagatacttaatgaaagatactgataaatactatggggttccagaagggagagagattccagcatgggaaatggggagggatggcacatcagtttgtttttgccacataacagaccactccaagatttagtggcttaaaacaatacatacttattacttctcacagttctgcagtgggctgggcagttctgctcagggttggctcagtagagctggatgactgagcatggtctcattcacatgtttaggatgactgggaaagatgtgacctctctgtatatggcctcttattctccagaagtctagtctagtttcctctcatgaaaggtttctaccagcaagagagagagaaagccctgagcatactcttttaagctcctccctgtgtcccctttgctaatgtccattggccaaaacaagccacatggtcaagcccaagattcaaa

SEQ ID NO: 639129 - DNA, 616 bp, Homo sapiens
cctgttttaaaaatgtcttagtgtctagaatattatttagcctaaaccagtctaaatgacacctatctcacaagatctagctgttataccttcctctataaagcctctctaacatttacctctaaattatctcttatccccccaaagaacttcatgcactaggctatgatttctatttcgacagtaacagrcaaaggaagttaagtggtttgttctaagtcacatagcctcaaagcaagatctgatttcagatctgacttcaaagtccaagttcttgctttccatgtggaaggaaagaggtggagaaagtacaacagcaggagatgcttccagagagggcaggctcggtggggcttcatactgggaggcccaggttgtggaggggcgctgcactctttggaaaggagagagccattagaatgggagatggcctgaagggcccccaaacctctttgcttaggccgtaccatggctctgggaatcagaattccccaattaactgaagatctgggtatgccctgtgtggagggaatgaaagactcagtttccattttgcttctggtcccccagcactgttgaggaaaccctaagattcttaatagtgataagcagaggg

SEQ ID NO: 639130 - DNA, 616 bp, Homo sapiens
cctgttttaaaaatgtcttagtgtctagaatattatttagcctaaaccagtctaaatgacacctatctcacaagatctagctgttataccttcctctataaagcctctctaacatttacctctaaattatctcttatccccccaaagaacttcatgcactaggctatgatttctatttcgacagtaacagacaaaggaagttaagtggtttgttctaagtcacatascctcaaagcaagatctgatttcagatctgacttcaaagtccaagttcttgctttccatgtggaaggaaagaggtggagaaagtacaacagcaggagatgcttccagagagggcaggctcggtggggcttcatactgggaggcccaggttgtggaggggcgctgcactctttggaaaggagagagccattagaatgggagatggcctgaagggcccccaaacctctttgcttaggccgtaccatggctctgggaatcagaattccccaattaactgaagatctgggtatgccctgtgtggagggaatgaaagactcagtttccattttgcttctggtcccccagcactgttgaggaaaccctaagattcttaatagtgataagcagaggg

SEQ ID NO: 639131 - DNA, 616 bp, Homo sapiens
cctgttttaaaaatgtcttagtgtctagaatattatttagcctaaaccagtctaaatgacacctatctcacaagatctagctgttataccttcctctataaagcctctctaacatttacctctaaattatctcttatccccccaaagaacttcatgcactaggctatgatttctatttcgacagtaacagacaaaggaagttaagtggtttgttctaagtcacatagcctcaaagcaagatctgawttcagatctgacttcaaagtccaagttcttgctttccatgtggaaggaaagaggtggagaaagtacaacagcaggagatgcttccagagagggcaggctcggtggggcttcatactgggaggcccaggttgtggaggggcgctgcactctttggaaaggagagagccattagaatgggagatggcctgaagggcccccaaacctctttgcttaggccgtaccatggctctgggaatcagaattccccaattaactgaagatctgggtatgccctgtgtggagggaatgaaagactcagtttccattttgcttctggtcccccagcactgttgaggaaaccctaagattcttaatagtgataagcagaggg

SEQ ID NO: 639132 - DNA, 616 bp, Homo sapiens
cctgttttaaaaatgtcttagtgtctagaatattatttagcctaaaccagtctaaatgacacctatctcacaagatctagctgttataccttcctctataaagcctctctaacatttacctctaaattatctcttatccccccaaagaacttcatgcactaggctatgatttctatttcgacagtaacagacaaaggaagttaagtggtttgttctaagtcacatagcctcaaagcaagatctgatttcagatctgacttcaaagtccaagttcttgctttccatgtggaaggaaagaggtggagaaagtacaacagcaggagatgcttccagagagggcaggctcggtggggcttcatactgggaggcccagrttgtggaggggcgctgcactctttggaaaggagagagccattagaatgggagatggcctgaagggcccccaaacctctttgcttaggccgtaccatggctctgggaatcagaattccccaattaactgaagatctgggtatgccctgtgtggagggaatgaaagactcagtttccattttgcttctggtcccccagcactgttgaggaaaccctaagattcttaatagtgataagcagaggg

SEQ ID NO: 639133 - DNA, 587 bp, Homo sapiens
tctgcctgtaagtgcctaagtgacagctggcttgtgccatggtgctgcatgctaagtggcctgaggatggggtacaggggagggtgtgaggggctcttctaaggttctggttggagggaggccaggaggtgctgttgccggtgcctcttctgtgggtgaggcctttcagcccatatrggccctggcttcttggcctgggtctgggctggatggaatgtatggattcgggacagcaaactaggtggtgatgtgtccccaaacctaatgggtcctcatatacacagtccccctcactgaccttggccctggatcaacaagaactggattggaaatctggaaacttggagtttaagctttgtccctcgttgcttgtaaccttagggacatggtttaactcttccagttgcccagtcttcacaatgaagggtttgaacagggttaatttattcatttaactacaagtgtcaaaccaatgaacaatggatagaaactttctgttagatgaatggataaagaaaacatagtaaatacatacagtggaatattatttagccttgaaaaagagggaaatcctgtcatttgcaaca

SEQ ID NO: 639134 - DNA, 532 bp, Homo sapiens
cctactgaccatgagaacttggacaagccaaatgacctctttgaacctcattttggtgaggaggttarattagataatcttgtaagatctctaccatctctaaagagtcattgggtccagaagatcagcatcaaggtcattcaagaacccctgatctggacagggagatcaaggcaggagaattatgcctattagctggccacctgttggcctggatgagtcagggaagcctcccaggtcctccctctcaagactgtggctgttgccaggaaggacaccctagcagagcctggagccttcacaccatgggctggggttggcaaggaggctgtagcagtgccagaaacctctgagcataccacacaacttcccctctgcagaggcagctgccctgtagggagtcagtacatttctagtcccaaagcttccaggagatggagagccagaaccactgcctagtgcccagtgaggggctcatggccacattcaccctgcaccaagtcctcaagagccaggtagaagctccagccac

SEQ ID NO: 639135 - DNA, 532 bp, Homo sapiens
cctactgaccatgagaacttggacaagccaaatgacctctttgaacctcattttggtgaggaggttaaattagataatcttgtaagatctctaccatctctaaagagtcattgggtccagaagatcagcatcaaggtcattcaagaacccctgatctggacagggagatcaaggcaggagaattatgcctattagctggccacctgttggcctggatgagtcagggaagcctcccaggtcctccctctcaagactgtggctgttgccaggaaggacaccctagcagagcctggagccttcacaccatgggctggggttggcaaggaggctgtagcagtgccagaaacctctgagcataccacacaacttcccctctgcagaggcagctgccctgtagggagtcagtacatttctagtcccaaagcttccaggagatggagagccagaaccactgcctagtgcccartgaggggctcatggccacattcaccctgcaccaagtcctcaagagccaggtagaagctccagccac

SEQ ID NO: 639136 - DNA, 494 bp, Homo sapiens
ctgtgctccagcctccaccttgaactctaagccacagtctccttgctgtgagtgccacctggccagcccaggctgccctggcaaggacatggaaccaggccaggtccctagtgtggatggtaattcatggtgcttcasctccaccaggccagactccaccaatcaggagacatgtctctctggagctcagcctcaactgctccaaagctgagcctgggaagagggaagggtgacatgaatggccagccctcaccttctgccaagcccagggaagaagagggccggcattacataagtactttcctggagacagtacttgttaagagcctttgcttccctctgggttccaacccagcctgcccaccctgtggccaagaacatccctggcccctggctccagccacagctcccaaagtcaactcattctgcaagtaaaagcaatgagcccaggaagaggagacaactttcccaaacagcagcaatagagagaaggg

SEQ ID NO: 639137 - DNA, 494 bp, Homo sapiens
ctgtgctccagcctccaccttgaactctaagccacagtctccttgctgtgagtgccacctggccagcccaggctgccctggcaaggacatggaaccaggccaggtccctagtgtggatggtaattcatggtgcttcagctccaccaggccagactccaccaatcaggagacatgtctctctggagctcagcctcaactgctccaaagcygagcctgggaagagggaagggtgacatgaatggccagccctcaccttctgccaagcccagggaagaagagggccggcattacataagtactttcctggagacagtacttgttaagagcctttgcttccctctgggttccaacccagcctgcccaccctgtggccaagaacatccctggcccctggctccagccacagctcccaaagtcaactcattctgcaagtaaaagcaatgagcccaggaagaggagacaactttcccaaacagcagcaatagagagaaggg

SEQ ID NO: 639138 - DNA, 494 bp, Homo sapiens
ctgtgctccagcctccaccttgaactctaagccacagtctccttgctgtgagtgccacctggccagcccaggctgccctggcaaggacatggaaccaggccaggtccctagtgtggatggtaattcatggtgcttcagctccaccaggccagactccaccaatcaggagacatgtctctctggagctcagcctcaactgctccaaagctgagcctgggaagagggaagggtgacatgaatggccagccctcaccttctgccaagcccagggaagaagagggccggcattacayaagtactttcctggagacagtacttgttaagagcctttgcttccctctgggttccaacccagcctgcccaccctgtggccaagaacatccctggcccctggctccagccacagctcccaaagtcaactcattctgcaagtaaaagcaatgagcccaggaagaggagacaactttcccaaacagcagcaatagagagaaggg

SEQ ID NO: 639139 - DNA, 571 bp, Homo sapiens
taacctgttgcatgagcttccccctaagagacctagtcccaacgtgtctatggttcctcatctgcccagcattccccttggctcagggcttcttgggaggtccatatgagcaaatgccctgcatcacccgtagatgccagagctgcaaagagacctggacaacaaccatcccaacctccggcttttgcagttgtagaagaggctcagataagttaggtgatttttccaaggtcacacagtatgtcctgcaagaatgaattaaaacaytcatcactgtataaatataaggaattaatagaaaccatgtttatataacagatatttgaatcagtgattatctgataaaagttacagactctccctctgagaaacacacatgcgtcaaagtgcagactgctcatgtgatatgagggggttggctcctgaagcccattcatggattagcctgtggtcaaggtttccagctctgtcactaggacaacttacctaactctctgtgcctcatttcttcaacaaccaaagggaacaatagtacatgcctcatggttgtttgtaggatttaatgagtttg

SEQ ID NO: 639140 - DNA, 571 bp, Homo sapiens
taacctgttgcatgagcttccccctaagagacctagtcccaacgtgtctatggttcctcatctgcccagcattccccttggctcagggcttcttgggaggtccatatgagcaaatgccctgcatcacccgtagatgccagagctgcaaagagacctggacaacaaccatcccaacctccggcttttgcagttgtagaagaggctcagataagttaggtgatttttccaaggtcacacagtatgtcctgcaagaatgaattaaaacactcatcactgtataaatataaggaattaatagaaacmatgtttatataacagatatttgaatcagtgattatctgataaaagttacagactctccctctgagaaacacacatgcgtcaaagtgcagactgctcatgtgatatgagggggttggctcctgaagcccattcatggattagcctgtggtcaaggtttccagctctgtcactaggacaacttacctaactctctgtgcctcatttcttcaacaaccaaagggaacaatagtacatgcctcatggttgtttgtaggatttaatgagtttg

SEQ ID NO: 639141 - DNA, 553 bp, Homo sapiens
ataacttggaggtaattataagaagcatcaattacccagcaatggggatttcatgaattcaattaatttgcatggcaatcgatacgggcgggtttcgctggggtccccaggggaagttaggacattgttctgcacgctattgattttacaatgtaaaacaaaacctctctcctcgaattcatagatgcccattcagccatattaactttcagatcatttatttttrtatgtctttcaactctgtttgttgctatcacacagatgcagagtattacattgtagggaataattgaatcaatacagtcatgctacaccagacttccccaactcaaggaagaagagcagtttgccgaccagctcttctgcactctgccttccccagccagctgtccaccctcgtgcccaccccaaactctccctctcccaagcaggccactcccctaaccctaagtttctcactctgtccagtgtgtcttcattcaggacagacttaaagtgcagctggggaaatatggttagacaataggaagaatttttctgtcggtgaatggaa

SEQ ID NO: 639142 - DNA, 553 bp, Homo sapiens
ataacttggaggtaattataagaagcatcaattacccagcaatggggatttcatgaattcaattaatttgcatggcaatcgatacgggcgggtttcgctggggtccccaggggaagttaggacattgttctgcacgctattgattttacaatgtaaaacaaaacctctctcctcgaattcatagatgcccattcagccatattaactttcagatcatttatttttatatgtctttcaactctgtttgttgctatcacacagatgcagagtattacattgtagggaataattgaatcaatacagtcatgctacaccagacttccccaactcaaggaagaagagcagtttgccgaccagctcttctgcactctgccttccccagccagctgtccaccctcgtgcccaccccaaactctccctctcccaagcaggccactcccctaaccctaagtttctcactctgtccartgtgtcttcattcaggacagacttaaagtgcagctggggaaatatggttagacaataggaagaatttttctgtcggtgaatggaa

SEQ ID NO: 639143 - DNA, 555 bp, Homo sapiens
taaacagcccagcgcctgtttccttcagataaccagctcctgacgagccccctcaytgtccccagaatctcagcgccagtgtatagagtaggtcatttaaccaacagtacacacaactaaataaaaatccattttccaagagaaaattctattcttatcagagttttgcaagagggttgcaagcggcccatgttaattgaagctttgatgtttgtaggaggaggcctctaatcaacaccacaaaggaggctgattcactgcagtgtgcccctcggccgaggagcggagtctggggagctggtgatggggggcatggggtgcagagggccaggcaaggacagaggatccagcctagccaccagacaccacaggctcccagccactgcctcaggcccagaggcaggcacaaagatgtcagggaggcaggtggctgggtcaggaaagtcagcaagactggaggtgggcaggacccagtgtcagacaagcctggagtcaggatctacctggtgatttgctcactgtgtggccttgggcaagtcacttgacattgctgag

SEQ ID NO: 639144 - DNA, 555 bp, Homo sapiens
taaacagcccagcgcctgtttccttcagataaccagctcctgacgagccccctcattgtccccagaatctcagcgccagtgtatagagtaggtcatttaaccaacagtacacacaactaaataaaaatccattttccaagagaaaattctattcttatcagagttttgcaagagggttgcaagcggcccatgttaattgaagctttgatgtttgtaggaggaggcctctaatcaacaccacaaaggaggctgattcactgcagtgtgcccctcggccgaggagcrgagtctggggagctggtgatggggggcatggggtgcagagggccaggcaaggacagaggatccagcctagccaccagacaccacaggctcccagccactgcctcaggcccagaggcaggcacaaagatgtcagggaggcaggtggctgggtcaggaaagtcagcaagactggaggtgggcaggacccagtgtcagacaagcctggagtcaggatctacctggtgatttgctcactgtgtggccttgggcaagtcacttgacattgctgag

SEQ ID NO: 639145 - DNA, 555 bp, Homo sapiens
taaacagcccagcgcctgtttccttcagataaccagctcctgacgagccccctcattgtccccagaatctcagcgccagtgtatagagtaggtcatttaaccaacagtacacacaactaaataaaaatccattttccaagagaaaattctattcttatcagagttttgcaagagggttgcaagcggcccatgttaattgaagctttgatgtttgtaggaggaggcctctaatcaacaccacaaaggaggctgattcactgcagtgtgcccctcggccgaggagcggagtckggggagctggtgatggggggcatggggtgcagagggccaggcaaggacagaggatccagcctagccaccagacaccacaggctcccagccactgcctcaggcccagaggcaggcacaaagatgtcagggaggcaggtggctgggtcaggaaagtcagcaagactggaggtgggcaggacccagtgtcagacaagcctggagtcaggatctacctggtgatttgctcactgtgtggccttgggcaagtcacttgacattgctgag

SEQ ID NO: 639146 - DNA, 506 bp, Homo sapiens
gaaagtatcatcaacccacagggaagtgctgcaagtcacaggaaaataggcaggatcgtgtcatcctcctgtggggaggatggaacattcttgaaaccagaaaaagaaaacagactctaattaatgaaagtcataaaagagaatgggtaaaaaattatgagacatgaaataagatgacagaaaggagtactaaaataaatcaaaattatrgcaaagatgggaaatcatatgtatatataattatcttaaaaagcaaaacccagcaatatattttctgtaagagtcatatttaaaacaaaatctagatttcagtctggagaacatgatgtagaactgtttccttgctcgtccccaccaaatgtaactataaaccttggaaatgatgccagaagcaaccaaaagagaactctgaaagggggtgagaaggcaaattggtctgtgacctaggactggagatcacaagtagaagggtatctcatgctcccccatctaagagaaggttacca

SEQ ID NO: 639147 - DNA, 464 bp, Homo sapiens
gaccaaaacaacacaaggaaagtgctgaaaatctacctgtcattggagtgatcacccacakatagaggccaagaccggtgtgagaaacctaaacagagtgaccacctgctaaaatgaaaaagtttaaataagaacctgcgtctcctacaattccaggttacaattatttaaaaattacccttcatatcaagaaaaatcataactcaaatgacaaaaagcaatccacaataccaaccctgagatgaatgagatgttgggaatatctgacaaaacattttattattattattctttacgttctgggatacatgtgcagaatgtgcagttttgttacataggtatacacgtgccatggtggtttgctgcataatgttatccctcccctagtcccccacccccacaggccctggtgtgtgatgttcccctccctgtgtccatgtgttcttattgttcaattcccactt

SEQ ID NO: 639148 - DNA, 429 bp, Homo sapiens
ctcagtgggggacttcgtccttgatacctctgggcagacacgtaggcaaaaactgagtccttgtctgtttggactttggatcatgcaccaggtggtacctgtcatcatatgctgcccatcagggtcccctgcaatcattttgaactgaccaactcccttgtctgtgacaggagatggccctctgaatggccctacaggatggcatcttcttctccatgttgtcctttaaccttgakatcccgcaggctcagcttgggaatttctggctttaggttgggagaagggctgctgggcagagcggaggcccgtttgtcctcctccccgttgggaaacttccaggtcctgagctctccagggagatgccacagcaggtccaggtccagggttccagaagggctgccaggacccccaacctgagcctggttgggt

SEQ ID NO: 639149 - DNA, 572 bp, Homo sapiens
ctccctgggcaaaaatattgcagtcctcactgctatgtagagtcctcacagtaygtagagcagcacctgccacatagtagatgcaggatacgcctttaccgactgaacacctattgcaagtcaagtcctggcaagcactgggaatggagcatatgtgctcacgatccatgcttgtctcacttagcttgggggttcttaccctgagataatgagggggtttatgcaggggtttcagagagtccttgaacccccagaaattagatgcaaaatgagtttataaacacttttctggggagagaatccatgcctgttatcaaatacccataggggtaagagtccaaggaactagagggaaaaagaggggactgtcaatgacactgtatggggtttgtccccagggggagggccaagcggtagctcacacaggcacaaacctgaccagatgccagggaggcaggtgtgtgaggaaccccagcaagtgtgcacacaggaatgtgcctttgccatcctggaaggcttccccagggaggtgatcagagcaggcctgagaatgagcagacaacaggctttct

SEQ ID NO: 639150 - DNA, 636 bp, Homo sapiens
gtgacctaatttgtaaatagggtccttgcaaatgtaactaattaaggatctcaagatgatgtcctcctagatgtagggtggaccctaaatcccatgactggtgtccrtataagaggaggagaaaacgcagagagacaaacaagaaggacatgtgaagacggtggcagagattgaagttatgatgccataagccagggaatgccttgggccctcagaagctgaaagaggcaaggaaggattccttcttggatgcttcagggggagcatggacctgctgacacttcgatttcagtcttctagcctccagaattgtgagaggatacatttctgttgttctaagccacccagtttgtggtactttgatatggcagccctagaaaatgaatacaggctttgttactgggaagtgggtgctgctgtaatacatacttttgaatttcatggtagaaaaagcctggtagcattgaagaagagattgttgctagaaatatggatgttaaaagcaattctagtgagggctcagatggaagtgatgagaatggttgagaaagcttctataatcttagagaatatatataatcatatatatagaaagaatgttgctagaaataggaacattaaaggtacttctggtga

SEQ ID NO: 639151 - DNA, 625 bp, Homo sapiens
gatttaatactttttttggtgaactctcaacaaaataaattatccttcctccactaatttgtgacatcttaatcatatgtcaaattcctacatatacacaggtctgtttatatattttaagttctgttccattggatttatatgtctgttcttgagttaataccaaactttataaaatcatatagttctgcagtatgttttaatatctgatatagcaaatcatcatagtttgttctttttaaaaaattgctttagctatttgtgaactttgaaacttcatttttccatatattaattttagaatcaatttatcaactttctaaaaaatgtctgytagaattttgatgaactttcactgaacttagagataagtaaaatttcgttgaattatgtgcaaatttacaattggcttgaccaaatttagtatctaaatctatacctacctgtctgtctagattgatagtcttgtcaaaattgtatatctatatttctatctcataagtgggttatgtttatccttcaagaggagtataatgacaatgtctgattggctctcctttaatgattttagtagccattgatgatcaatgtctagattaattaattattaggagttgcaaaaggt

SEQ ID NO: 639152 - DNA, 518 bp, Homo sapiens
gtttcttaccctgagtctcaatagcactatctcttaggattgttctcagaattagaaagaatgagctatgtaaactagcataggagaaacggatgctcctcacmgtgtggtcaagcaccacgacccttgttgactccaacagaatgttctatccacagccaaggttgttcagaggctctgctctctgggaagagacctttcttcctctgcaagctggagaaggaaactgctatatctcagagacccacctatgcctcagagggacagaaacccagcaccctgacatccaggcaagaccaggcttagccctcccagcaagcctcagcccagtctggcccactggtggggtgaagaggagagtgcaggggcttgaacctcatagctacatgcagtgggcacacctgcaaaccaggagcaaagcagcccacctgctgcagggtgaggagctgacgccccctccctggcccagatgcccaactgcttagctccagccccagccccagccccagccccacccc

SEQ ID NO: 639153 - DNA, 559 bp, Homo sapiens
tctggagtgggatcggatcaatgttttgtaattggattccaaaaatggagatgagccccggggagcctgaggactgaccaccttcataggggcttggccctggtggacctgagagtgacgtgaccaccacaggtgaccatgctgcctccagcacagtgcggcttgtttcagtctgcctctgcttagcttaatttagaacctaggctgaacattttagaattgattccctaggaaacaggaccattgtaggataagactagattatggagggtctgggtacacagtttagatttacttaaggcaaatacctgacatgcgtatcacgattgtcctctttgctgctataggctgcatgtttatgtcccctcactcttcctatgttgaaatccagaccttcaaggtgatggtagtagagggtggggacttggggaggcaattaggtcatgagggtggagcccttatgaatgggattagtgcccttagaaaagaggccctrgagaacttccttgccccttccaccatgtgaagtcacagcaagaaagcactgtctgtgaaccgg

SEQ ID NO: 639154 - DNA, 559 bp, Homo sapiens
tctggagtgggatcggatcaatgttttgtaattggattccaaaaatggagatgagccccggggagcctgaggactgaccaccttcataggggcttggccctggtggacctgagagtgacgtgaccaccacaggtgaccatgctgcctccagcacagtgcggcttgtttcagtctgcctctgcttagcttaatttagaacctaggctgaacattttagaattgattccctaggaaacaggaccattgtaggataagactagattatggagggtctgggtacacagtttagatttacttaaggcaaatacctgacatgcgtatcacgattgtcctctttgctgctataggctgcatgtttatgtcccctcactcttcctatgttgaaatccagaccttcaaggtgatggtagtagagggtggggacttggggaggcaattaggtcatgagggtggagcccttatgaatgggattagtgcccttagaaaagaggccctagagaacttccttgccccttccaccatgtgaagtcacagcaaraaagcactgtctgtgaaccgg

SEQ ID NO: 639155 - DNA, 635 bp, Homo sapiens
agtcattcaagctatgtgaaaaaatagacttatgggaggggtaagtgaagagtgactaaactatttaggaagctgttattatgattgagagatgatggtgcttcaatgtgacagaagcttggtgacgcaggtcactgatgcttttatgacagaggtcataaaaatggtcagaatttgaaactatttgggtggtaaaaccracagcatttgctgaaaaactggatgtaaacagtatgagagaaaaagaattcaaggatgactgtaagatttttgacctaaccaacttaagaatggagttactgttaagtgacatggagaagcctgagaaaccttcataattggaacagattgggtaggaatgagataaagagttccatttgagacacattaagttgatgtatctgttagacatccaaatgggatttcaggtaggcatttggatatataagtatggtgtttaagtgagaggtttagcgtaaagttattggcatataaataatttaaaatatgagactgtatgtcaactccaagaaagtaagtataaaataaagaataaaaattatgaaaataacaccctggagcattgtaacagtaagaagttgtggagaagagaaccagccaaaggcggcagaatg

SEQ ID NO: 639156 - DNA, 635 bp, Homo sapiens
agtcattcaagctatgtgaaaaaatagacttatgggaggggtaagtgaagagtgactaaactatttaggaagctgttattatgattgagagatgatggtgcttcaatgtgacagaagcttggtgacgcaggtcactgatgcttttatgacagaggtcataaaaatggtcagaatttgaaactatttgggtggtaaaaccaacagcatttgctgaaaaactggatgtaaacagtatgagagaaaaagaattcaaggatgactgtaagatttttgacctaaccaacttaagaatggagttacygttaagtgacatggagaagcctgagaaaccttcataattggaacagattgggtaggaatgagataaagagttccatttgagacacattaagttgatgtatctgttagacatccaaatgggatttcaggtaggcatttggatatataagtatggtgtttaagtgagaggtttagcgtaaagttattggcatataaataatttaaaatatgagactgtatgtcaactccaagaaagtaagtataaaataaagaataaaaattatgaaaataacaccctggagcattgtaacagtaagaagttgtggagaagagaaccagccaaaggcggcagaatg

SEQ ID NO: 639157 - DNA, 635 bp, Homo sapiens
agtcattcaagctatgtgaaaaaatagacttatgggaggggtaagtgaagagtgactaaactatttaggaagctgttattatgattgagagatgatggtgcttcaatgtgacagaagcttggtgacgcaggtcactgatgcttttatgacagaggtcataaaaatggtcagaatttgaaactatttgggtggtaaaaccaacagcatttgctgaaaaactggatgtaaacagtatgagagaaaaagaattcaaggatgactgtaagatttttgacctaaccaacttaagaatggagttactgttaagtgacatggagaagcctgagaaaccttcataattggaacagattgggtaggaatgagataaagagttccawttgagacacattaagttgatgtatctgttagacatccaaatgggatttcaggtaggcatttggatatataagtatggtgtttaagtgagaggtttagcgtaaagttattggcatataaataatttaaaatatgagactgtatgtcaactccaagaaagtaagtataaaataaagaataaaaattatgaaaataacaccctggagcattgtaacagtaagaagttgtggagaagagaaccagccaaaggcggcagaatg

SEQ ID NO: 639158 - DNA, 635 bp, Homo sapiens
agtcattcaagctatgtgaaaaaatagacttatgggaggggtaagtgaagagtgactaaactatttaggaagctgttattatgattgagagatgatggtgcttcaatgtgacagaagcttggtgacgcaggtcactgatgcttttatgacagaggtcataaaaatggtcagaatttgaaactatttgggtggtaaaaccaacagcatttgctgaaaaactggatgtaaacagtatgagagaaaaagaattcaaggatgactgtaagatttttgacctaaccaacttaagaatggagttactgttaagtgacatggagaagcctgagaaaccttcataattggaacagattgggtaggaatgagataaagagttccatttgagacacattaagttgatgtatctgttagacatccaaatgggatttcaggtaggcatttggatatataagtatggtgtttaagtgagaggtttagcgtaaagttattggcatataaataatttaaaatatgagactgtatgtcaactccaagaaagtaagtataaaataaasaataaaaattatgaaaataacaccctggagcattgtaacagtaagaagttgtggagaagagaaccagccaaaggcggcagaatg

SEQ ID NO: 639159 - DNA, 611 bp, Homo sapiens
gtggctcttatcctttctcgcttcttgaatttctattttgtgttttcaacggctctttctgattaacttcctttgctactccaactgatcaagctgcaatcttttgccaccattgccagagggattgaagaacattcacaaacaaaataagccacaaactcacaattcttactgttgcagtttcagactttcaagagtaaactctcctctagcttctgtctgcttttggatgcttgccatgattttaaaattctcatttgggtcggggtttgtataatcatttcactcatccacatttccatcattttcttaatatctgtaagatctgtgggatattttctttctgtcagtatttatatgtcctcctcccccmcccttcttttcatcactcttgattaaaagagatttacaaaatatgtgatcttttcaaagcattaactttgtctttattcattttcttaatgtttctttttccaattcattttgttgttcctgtcatttttatatccttctttctactttatttaggtttaaaatttattgctctattttgaacatcttaagatggatattcactgacttttggcttttatttttttccagtatatata

SEQ ID NO: 639160 - DNA, 598 bp, Homo sapiens
ctcacaaaacatattcaagtacatcagttataattaaatgctcttagaattttttctattcaatattctctctttcaaaatgtttcaataaagaatatgaagaaggcaactaatatttgtaaaagacatacactgaactacatgtgttargaaaatatttaattatatttatagctaatcttcagtatattttctttatgcagcaataacagcttctaggaaaaataaatacaaatttattcagtaactaatatccattattatgtttcttctgcattttaaactttctcacctcatatcatctaatcactgttgaactgcctcataaatattcaaaagtttaactaagcatcatttatttattttatgtaactcattaaattgcatcctttatggtaaaattacctctgggcacaaagtaactaatatgcatgcaatttaataatactgactgccagcatatctcaaagtattgattgtgaatagccaatttaataactatatctagtactaaattcaagagtttgggaaactggagatgaactaaattgacgcaagcagggactttgccaatcaaaacaaattcaactttcatgga

SEQ ID NO: 639161 - DNA, 659 bp, Homo sapiens
tgaattctatcagacatttaaagaagaattggtaccaattctactgacactactcaaaaagacagagaaagagggaatcctccctaaatccttcaatgaagccagtatcatcytaataccaaaaccaggaaatgacataacaaaaatagaaaactacagatcaatatccctgatcatcatagatgcaaaaatccttatgtcaaaaagataatacaccatgatcaactgggtttcataccagggatacagggatagtttaacacgtaagtcagtaaatgtgatacaccacataagcagaattaaaaatcacatgatcatctcaatagacacagaaaaagcatttgacaaaatccagcatctctttatgattaaaatcctcaacaaaattggcatacaagggacatactttaaggtaataaaacctgtctatgacaaacccacagccaatattataaatggggaaaactcgaaaccatttcccctgagaactggaacaaggcaaggatgcccactctcaccacttctattcagcatagtactggaagtcctacccagagcaatcagacaacagaaagaaataaagggcatccaaattggtaaggaggaagtcaaactgtcactgtttgctgatgatatgattgtatacatgaagacaaaaa

SEQ ID NO: 639162 - DNA, 659 bp, Homo sapiens
tgaattctatcagacatttaaagaagaattggtaccaattctactgacactactcaaaaagacagagaaagagggaatcctccctaaatccttcaatgaagccagtatcatcctaataccaaaaccaggaaatgacataacaaaaatagaaaactacagatcaatatccctgatcatcatagatgcaaaaatccttatgtcaaaaagataatmcaccatgatcaactgggtttcataccagggatacagggatagtttaacacgtaagtcagtaaatgtgatacaccacataagcagaattaaaaatcacatgatcatctcaatagacacagaaaaagcatttgacaaaatccagcatctctttatgattaaaatcctcaacaaaattggcatacaagggacatactttaaggtaataaaacctgtctatgacaaacccacagccaatattataaatggggaaaactcgaaaccatttcccctgagaactggaacaaggcaaggatgcccactctcaccacttctattcagcatagtactggaagtcctacccagagcaatcagacaacagaaagaaataaagggcatccaaattggtaaggaggaagtcaaactgtcactgtttgctgatgatatgattgtatacatgaagacaaaaa

SEQ ID NO: 639163 - DNA, 562 bp, Homo sapiens
ccaccatgattgtaagtttcctgaggcctcctcagccatacttcctgtacagcctgtggaactgtgagccaattaaaccacttttctcaggttaaggtagtaaacaagatagggaaggtgactgcttatgacttttaaagagaagaaagtcaataaacaagtgaaagataatttcasatagtaacaaacgcaatgaagaaaaaaaagtggtgaaaattggatggggaagaggtaggcaacatttgatagggagttgagaaataaataagaaggagccagccagccacataaacaatatgggcaagagttttccaggcagagaacagcaatggcaaaatttgtaagtgttaatgagtatggcaattggagcatagcaaagcaagaggagagtggaggtgataatgtcagaaagattagcaagtgccagtttatacagggattagaaggcaatagcaaggaacttggattttattttgagtgtgaatcagaagccactggatagcatatgagagaagtccaaagaaagaagccattgaaacgataaggcaaacatttgatgaaa

SEQ ID NO: 639164 - DNA, 616 bp, Homo sapiens
acaccctaatagtggggtacttcaacatcccattgtcagtgttagatagatccctgaggcagaaaactaacaaggaaattctggacttaaaacttgacagctgaccaattggactgaatagacatacacagaatagtccacccatcaaccgcagaatatgcattcttcttatctgcacatggaacatacttcaggatcaaccacgtgctcagccatgaagcaagtatcaacacattttttttttgtttgagacaaagtctcactctgtygcccaggctggagtgcagtggcgtgatctcggctcactgcaacctctgcctcccgggttcaagtgattctccttcctcagcctcctgagtagctgggattacaggtgcgcaccaccatgcctggctaatttttgtatttttagtagagtcggggtttcaccatgttggtcaggctggtctcgaactcctgacctcgttatccacctgccttggcctcccaaagtgctgggattacaggcgtgagccactgtgcccagccatcaatacattttttaaaaactgaaataacaccaactgtactttttgaccacagggaataaaaatataaatcaataccaggaagatct

SEQ ID NO: 639165 - DNA, 616 bp, Homo sapiens
acaccctaatagtggggtacttcaacatcccattgtcagtgttagatagatccctgaggcagaaaactaacaaggaaattctggacttaaaacttgacagctgaccaattggactgaatagacatacacagaatagtccacccatcaaccgcagaatatgcattcttcttatctgcacatggaacatacttcaggatcaaccacgtgctcagccatgaagcaagtatcaacacattttttttttgtttgagacaaagtctcactctgtcgcccaggctggagtgcagtggcgtgatctcggctcactgcaacctctgcctcccgggttcaagtgattctccttcctcagcctcctgagtagctgggattacaggtgcgcaccaccatgcctggctaatttttgtatttttagtagagtcggggtttcaccatgttggtcaggctggtctcgaactcctgacctcgttatccacctgccttggcctccyaaagtgctgggattacaggcgtgagccactgtgcccagccatcaatacattttttaaaaactgaaataacaccaactgtactttttgaccacagggaataaaaatataaatcaataccaggaagatct

SEQ ID NO: 639166 - DNA, 664 bp, Homo sapiens
aaagaatccatgaaaccaaaagttacttttttgaaataataaaatgattaatagacagttatctagagtcacagaaaaaagggagaagatctcratacgcttaatcaacaatgacaaaggtgacgttacaaccaattctaccaatacaaaagatcctcagagattattatgaacaattctatatatacaaagtaaaaaatctggaagaaatggataaattcctggaaacacacaatcttctaagactgaattgagaaataattgaaatcctgaacagacgaatattgagttcgcaaagtgaatcagtaatggaaaacaaaaacaaaacaaaaaaaaaccttaccaacaccaccaacaacaaaagccctggaccagatgaattcacagctgaattctatcagacatacaaagaagaactgttaccaattctaatgaaactatcccacccaaaagaggatgaggcagctctttcctaactcattctatgaagccagtgatactgggcatttaggtagccatttaggttctgataccaaaacctggcaaagacacaatgaaaaaagaaagcaataggcaagtatctctgataagcacagatgcaaatatcctcaaaaaagtgctagtatatcatataagcagcacatcaaatagttaattcacacaa

SEQ ID NO: 639167 - DNA, 476 bp, Homo sapiens
ttcacaggcatagaaaaatcaatcctaaaattcatatggaactacaaaagaccscaaatagccaaagcaatctcaaggaaaaagaataaactggaggcatcacactatctgtcttcaaaatttactgcaagtcaagaaagcatgctattgatctaaaaacagacacatagatcaatgaaacagaataaagagcccagaaataaatccatatatttacaatcaattgatttttgacaaaggagccaagaacacacaagggggaaaaaatagtctcttcaataaatggtgctggataaactgaatatccacatgcagaagaatgaaattataccttatctcccaccatataaaagaaatcaatccaaactggattaaagatgtaaacataagacctaaaactgtaaaactactagaagaaaacataagagaaaagttccatgaccttggtctgggcaatgagtttatggatatgacca

SEQ ID NO: 639168 - DNA, 621 bp, Homo sapiens
tttttggtgatgttaaaccatcttttgttattaaaaataaatatttattatatttgctgctagataacatagtactttatgaaaaactatagcactgaaattcatctggactcgctttctatcttgcactaatgtaaatggcttattccctaccctaatgacttgctctaggggtgcatatagaatagcatattgacaaatcttgctatttcactatgcaatcatacaatatttttcaagaaaatttttgtgtacttatcttataatggaccacatcactgaagcatttttcatatgtcctgctggtttgtcaattgaaatattcagccaaagggaaaatgaaaaacactggacttagtcttaagcaaacttttcattctcayttttgtatttgtttttgaaacagatctgctaaaggccagttacttaacaaatggatggcacacactcggagtcatcagatataaaataaaatcccaacatattaaaaaagtaaagaatacatttgacagaaattacctttgtttacaaaaattcattacatacaatctgcatatttttactggactaagaactgtcctctccgtttacaaaaaccaaagagaaacctgatggataagt

SEQ ID NO: 639169 - DNA, 400 bp, Homo sapiens
aataaaggcaatcaaaactacagaaatgtaggtatgtcaaaaccagtgtaatatcagtttaaaagctatactccaaaaaccaaatggctagcaaggtactgcttgagaccaggagaggcaaggacatttcacaaatcagtayattctaatgaaaatgtcaactcctttctagatttgtagaaattctgcaattgtgagcagattactatggttcatattaatcagaagataatataaaaatcagagaggagaaatccctcaaaatctctgaaccatgaaatctatcacatcaattttcgtgactttcataccatctcgtaattgttggttgtcagcaaattaaatctactgtgtcaaaacttacctgaatatgatggtaccctaatttgagaactagctg

SEQ ID NO: 639170 - DNA, 400 bp, Homo sapiens
aataaaggcaatcaaaactacagaaatgtaggtatgtcaaaaccagtgtaatatcagtttaaaagctatactccaaaaaccaaatggctagcaaggtactgcttgagaccaggagaggcaaggacatttcacaaatcagtatattctaatgaaaatgtcaactcctttctagatttgtagaaattctgcaattgtgagcagattactatggttcatattaatcagaagataatataaaaatcagagaggagaaatccctcaaaatctctgaaccatgaaatctatcacatcaattttcgtgactttcataccatctcgtaattgttggttgtcagcaaattaaatctactgtgtcaaaacttacctgaawatgatggtaccctaatttgagaactagctg

SEQ ID NO: 639171 - DNA, 536 bp, Homo sapiens
accacatggttacagtcttcctggcatttatagtctaatattgaagacagacagacaatgcaaagaagtgtgatatgcactgcagcgggaaatatatttgatgctatggtaatgcacaaagtgggtacttagtcaagattggggaaatcaggaacacttcctggaggatgccttaagcagcttcttttgtcttaaaatgtgacaaatatatctgtatgcttttgatttcgtctggagcatcgtgatgaattagaattctgatcatccatgtgaggtaattagaaagcaaatttatgggaatgggaaagtatgtaaattggtgaggattggcaggggagtgattattttagaggacagtgttattatggttcaataaattacatttyttatgacaaagaaaaatacatccagcaatgcatatctaatgttctagagttgaagaaaaatttgtggatcagttgagatttaggattaagaggtaaagacggggaaaaaatcagttagtggtgtcaaaacgagtttgagattaagtgtgg

SEQ ID NO: 639172 - DNA, 615 bp, Homo sapiens
gtgtgaagaaaataaggtggagataaaatggttgtttttactttataacctgggtaaattactttcatcgtgtaaagaaaaatattttccatttttgagatcattaaaaattatggctgaatatactttagtcaataagcttttttggcatttctttagtaacaccagtaatggtgagtcttacgtgctataattagtaaggattctagatagagaccccaaattataggagttgtaaaaataaaattttatttgtttataaacatttatttgaaaaataagtcaggtaagaaactttgatttgaagttttggttcatttccccatcatggaaataaaggtgattgataaaataggcagttgattttgtattggggaatgtaaaaacaacaaaataaagtggcacatgtttattgacctgaagaaaagtcataaatatgctaaataaattaccmaattggattcagcttctcaaatggaaagttattttgagtggaaattatttgtattattatttggtataacagacaatcctttccaacatcttgctggttctctatgcttttagtccttacttgttagtgaaaactatgatatcttgaaattattactatta

SEQ ID NO: 639173 - DNA, 379 bp, Homo sapiens
gaagttttggttcatttccccatcatggaaataaaggtgattgataaaataggcagttgattttgtattggggaatgtaaaaacaacaaaataaagtggcacatgtttattgacctgaagaaaagtcataaatatgctaaataaattacccaattggattcagcttctcaaatggaaagttattttgagtggaaattatttgtattattatttggtataacagacaatcctttccaacatcttgctggttctctatgcttttagtccttacttgttagtgaaaactatgatatcttgaaattattactattaaatctggatttyttaaacaaaattccaagaagcccagcatctcatagacaatctcaaaaaaaaatca

SEQ ID NO: 639174 - DNA, 579 bp, Homo sapiens
cgaatcaattcttccttctcagggatataaggaagtgcaaccatttcaagaaaataaaaggaaaaaaatatcttttgcaatgtgtgcctacttgtcattaatttacacaactaaaatggactatgctagtgattcttccctcagcaacaaggtattccaacatgacttgtgatatctttattaagagggaactggcaggcaacttttaacgatcagtttctttgttaaaattttaaaaattgtacctaatgagacatgctcctccaacaacactaagaaatggtatctgttttttaatgagaacattttatatgccaagcattttatacaaattattctttagaaaatcctgtataatatgtattattattgctatttctgccatttgtgaagttaagaaaataaaactgakaaagtttaaacaacttacttaaattactcaactaggatttgaactaaaatctgtctgaatcagtggccagtgatattttttcctctaagcaacaacaaatggcaaggttatgctagaaaaaaatacatatttgataatacacatatataaataactgcataagacat

SEQ ID NO: 639175 - DNA, 630 bp, Homo sapiens
tattgtatgtggactatgatgactcccaagttactattttaaatagccacttataaaattcaggaattataaaagatgaggaggctagagaagatgataagttcaattttgggtattttttcacctgctgaactattaagacatccaaccctggatggcctagaagcatttaatgtatactgccctggagctcaagagagagaggtcaaggttggaaatgtagatttgggaatcaatagcattcaaggtgattgaagccttgacaggaaatgacatccctcaaggaaagtggttaagtgatacaggagggtgtataaaaaagaaactctggggaacattgcatccagggacagagaaagtagagcccataaacacggatgggaaggacatgacccatgagagcgggtagagaacaatatggaaaaaaagagttgtagaaattgagaaaagagagtgtataaagagaagggcatttttagtagttttgaaattaaaattttcaaatagctattgggtaaataaattatctgtaacagatagcagaagastataattatttgcaaaaattttatttaaattagaattttgattttagaatttcacattaaataatatttagtgaggcacaga

SEQ ID NO: 639176 - DNA, 593 bp, Homo sapiens
gtagaatagacgtgcccctcattgctcagaaaatccacagcttgcttgactggggatacagacatgcgtttgagctggttcttgagatcctgaaagttcagtccctcaggtcttgggtaagacttaatcacattcaacacctgattttgggccacagggagsctgcttcactcttccctggattgctgataggtgctctctctgctgagggctggctgttcgctttgtgatcatgtgtgcatcgatcacttccagaatatgtatggtgaactcattcatatcctccaggagcatgatttataaaggctaccaggctctttttgttctgaaaagatctcaggtggcctgccactttcacatatgtttctggaggaactacagtgttttcactgctggtgtcatctgtgtcaacccactggtgaacattcatgggtgcagctgtcatgtcatctattttgtaaacaatgttggttgaagtcttctctgcatgtctgatgatccctacaagagtgatttgtgaaatctcagcattgccaattttgaacacttcatcaatcaaagtggcagaaagcagctgagatgtgtgtgggttc

SEQ ID NO: 639177 - DNA, 625 bp, Homo sapiens
tgtaaacaatgttggttgaagtcttctctgcatgtctgatgatccctacaagagtgatttgtgaaatctcagcattgccaattttgaacacttcatcaatcaaagtggcagaaagcagctgagatgtgtgkgggttcaatgtgctgtgctctggctcttgatttcttttctgcctaagaaggtgcccgcgatccaaagcctaccggggactgcatgtattcaccggctgccctatgagttgctgctatagctttcaaatccactgttccacatctagattgtgattctctggggaagaggccgggaaggttagggtctggggaagtcgcagaacacctcagaatccggaggctgccgtaccgctctagctacttttctctcctttagtgattcttaagctggaattgaggttacacaatattcacaagtcacatgcactttctaaggttgaaacttctctttatttagtttgtttcctcagatgtagatttcaacagctcatgaactttgaactctctatgtaaaatcacttgaaaccaaattaaagtcattaaaaagatatcaataattaaaattagagcacagacagcttatcattttaatatcttcatacaattattttctt

SEQ ID NO: 639178 - DNA, 625 bp, Homo sapiens
tgtaaacaatgttggttgaagtcttctctgcatgtctgatgatccctacaagagtgatttgtgaaatctcagcattgccaattttgaacacttcatcaatcaaagtggcagaaagcagctgagatgtgtgtgggttcaatgtgctgtgctctggctcttgatttcttttctgcctaagaaggtgcccgcgatccaaagcctaccggggactgcatgtattcacyggctgccctatgagttgctgctatagctttcaaatccactgttccacatctagattgtgattctctggggaagaggccgggaaggttagggtctggggaagtcgcagaacacctcagaatccggaggctgccgtaccgctctagctacttttctctcctttagtgattcttaagctggaattgaggttacacaatattcacaagtcacatgcactttctaaggttgaaacttctctttatttagtttgtttcctcagatgtagatttcaacagctcatgaactttgaactctctatgtaaaatcacttgaaaccaaattaaagtcattaaaaagatatcaataattaaaattagagcacagacagcttatcattttaatatcttcatacaattattttctt

SEQ ID NO: 639179 - DNA, 617 bp, Homo sapiens
atatgcctatgtaccacatattatttaaccatggtcctactgtaaaacatttggatagcttctaattattgctcttttaattaaaatgmtgccgtgcaaatattcatattgctcctttaattaaaatgctgccatggaaatcttcatataccctgttttccacatattagattaatttcccagaatagaccccagaaagaagattatgggttccaaagttgtaaagccagaaggtctatatgtgaattttacttttggtattttaagccacatataatgggacaagttagttcaccagtgaatctctgcatctttatttatataacagagaaaatagtacttctcttaggtttgtgaatgatttttagagagctcccctgctgttcaactgcttgagccattgtttcttgatattttaatatttctgatttttattatttgtaagtatatgttttttaatccttcatattattttggttttctgatttttgtctctcaaatattatttttatttaaaattataatgtacataatattagtggcagacaggaagtatgaattctgactcatataatacctgtaggagagtatagagacaaacctaaataaagagaatg

SEQ ID NO: 639180 - DNA, 583 bp, Homo sapiens
cgcctggctaatttttgtatttttaatagagacgaggtttcaccatgttggccgggctggtcttaaactcctgacctcaagtgatccacctgcctcggcttcccaaagtgctggacaggcgtgagccaccgtgcctgaccaaggatggttcttcttagtagacactctatttttcccaaagctgattctccaagataatgattattttaactgtgcaggtagtgtatttgattttctggtgtgacgattctatgatattcatgtcatgcacaatgcagtttccttacatgaagttataaaatctaaaactcatgagttctgccatatgcagctgttgattactgggtgagttgtgaactttcccctacttttacattttcattcagtcatataaaaccattgagtagttcttcctaatattttgtctttgcttgtccaatttttcacacttgttaaaattttttttggagccattttagagtcacagcaaaattgaaaggaaggtacagagatctccygaatctccctgcccactacacatgcgcagcctcccatgttatcaaaatccttcaccagaatagta

SEQ ID NO: 639181 - DNA, 599 bp, Homo sapiens
ctactctaaaactgtaatctagagtttctgagcatcctttttttttagatgatgttttagggttgaacaaagtagaaaaggatcttcaatgcctagtctttccacagaaacttatgatcataggaatgatgtcctcaaagaagaggattcaaagccctaaatttagagtacagatttagtccaatttaatagacaaagtactgggtctggtatacattacccataatgttatttaaatgtgagttttcagagataaatgtgaggagtgtatgtgtgtatgtatgtgtgtgtatatacatttaaaaaaacaawaatactaagagaagcagtaatggcatgatatcactaaattattaatatattttatccactatttatttgactatgctttgatggtcacaatattcagaagtctgagattagcaaaaaaggcaatgtttgaaaatttggatccctgtccttttacatatacagttaaactagctccattcttgtgtgtcttacccgtaacattgagcagaaaataaatttagactaatactacataacagtggtttttcagacatggttataaggcatactgatatctcacagtctgt

SEQ ID NO: 639182 - DNA, 599 bp, Homo sapiens
ctactctaaaactgtaatctagagtttctgagcatcctttttttttagatgatgttttagggttgaacaaagtagaaaaggatcttcaatgcctagtctttccacagaaacttatgatcataggaatgatgtcctcaaagaagaggattcaaagccctaaatttagagtacagatttagtccaatttaatagacaaagtactgggtctggtatacattacccataatgttatttaaatgtgagttttcagagataaatgtgaggagtgtatgtgtgtatgtatgtgtgtgtatatacatttaaaaaaacaaaaatactaagagaagcagtaatggcatgatatcamtaaattattaatatattttatccactatttatttgactatgctttgatggtcacaatattcagaagtctgagattagcaaaaaaggcaatgtttgaaaatttggatccctgtccttttacatatacagttaaactagctccattcttgtgtgtcttacccgtaacattgagcagaaaataaatttagactaatactacataacagtggtttttcagacatggttataaggcatactgatatctcacagtctgt

SEQ ID NO: 639183 - DNA, 599 bp, Homo sapiens
ctactctaaaactgtaatctagagtttctgagcatcctttttttttagatgatgttttagggttgaacaaagtagaaaaggatcttcaatgcctagtctttccacagaaacttatgatcataggaatgatgtcctcaaagaagaggattcaaagccctaaatttagagtacagatttagtccaatttaatagacaaagtactgggtctggtatacattacccataatgttatttaaatgtgagttttcagagataaatgtgaggagtgtatgtgtgtatgtatgtgtgtgtatatacatttaaaaaaacaaaaatactaagagaagcagtaatggcatgatatcactaaattattaatatattttatccactatttatttgactatgctttgatggtcacaatattcagaagtctgagattagcaaaaaaggcaatgtttgaaaatttggatccctgtccttttacatatacagttaaactagctccattcttgtgtgtcttacccgtaacattgagyagaaaataaatttagactaatactacataacagtggtttttcagacatggttataaggcatactgatatctcacagtctgt

SEQ ID NO: 639184 - DNA, 557 bp, Homo sapiens
ggaatccgtgagatgaactccacatatgaataatcctcagtatgtatgtaacagtgaaagaataaagattggtaactgctgctgcataatcctatattggtagcagctgcatgtgcctgagcaagagaattgtgttcatggagaaaagggccaaasgatactgaaacgtagaccctgacaaaggaaggttatttatttcaatggagccaattatatattcacaggttttgctcaccctcttttctggcccaaggagaatttgttttcttcctttccaggagtatataaattccacttcagtttttctggtgtataaaaggctgtgtgaatacctaccagtaattaatagcctttcattccaagtaagtaatatataggagtgaatttattgtttatgagtatatcaatatcgtttaaaaatgatatgccggaatagaaaggcaacactgaagtgtaaaattgttaatgcaggctcatagcctgtaaaatgatttcttttaatagttttcttcatttaaaagttcttcatttgaaaatgttccctttcaactgcagat

SEQ ID NO: 639185 - DNA, 639 bp, Homo sapiens
tggaattgttgctaaggtttaacaacaacaaaagaaatgtactgaagcttcctgggggttctggtaaggcagtaatgctaatcttgacctgtggatttttcagtggctctgcaagccccgggataacaaaaaagagtcacgtcattagcaaagaggataacagtgagcaattttaaggacaaaatttacctaatcattattagatgttcttagctatagtgttaattattatttagaaatcactaccacagagcattttcaagaggcatggtgcaataagtggtcatgaaaaaaaaagtgtatcaaaatctgccacatagatttgaaagcagggtgtttctgtcaccaatattttgttttaatctttaatatgaccattctgacttcaaacaaacttctgacttatytcaggattttatccaacgtaggttgggagtttttttctcctcactctccacccatttttatccacagttccgaagacagcacccaccaatgtaagcggaagaagtggaagaaggcatgagttagtcattgcctgggaggtaagaaaaacacatcctctcacaaattactccacgtgtttgtttggcttagtgtgatatttaattattttatgattaagcagtccacttgatt

SEQ ID NO: 639186 - DNA, 531 bp, Homo sapiens
ccccaacatgttaatccaaagatcttcatttcatatacatgactaattggagcaaatttgtttcacttcaaaagttttcaattctcttgagagtttttgtacatttcaactgatacaatttttcttcttttacckttaaagctttttaactttcaaagaagtgccaaagtgattgtactattttggcttccaatgtagtataaagatttgagattctccctttctctagctatctataattttttttaattaagaatttggagaaagtggatttttaatcaatcattttgctgataattaattatatttttcttctttagccagtatctgaagagtttcagaatggggaaggcttcggctatattgtggctttcagacccaatggaacacgtggctggaaggaaaaaatggtgacatcctctgaagcttccaaattcatttatcgagatgaaagtgtccctcctcttactccctttgaagtgaaagttggcgtttataacaataaaggagatgggccttttagtcaaattg

SEQ ID NO: 639187 - DNA, 531 bp, Homo sapiens
ccccaacatgttaatccaaagatcttcatttcatatacatgactaattggagcaaatttgtttcacttcaaaagttttcaattctcttgagagtttttgtacatttcaactgatacaatttttcttcttttacctttaaagctttttaactttcaaagaagtgccaaagtgattgtactattttggcttccaatgtagtataaagatttgagattctccctttctctagctatctataattttttttaattaagartttggagaaagtggatttttaatcaatcattttgctgataattaattatatttttcttctttagccagtatctgaagagtttcagaatggggaaggcttcggctatattgtggctttcagacccaatggaacacgtggctggaaggaaaaaatggtgacatcctctgaagcttccaaattcatttatcgagatgaaagtgtccctcctcttactccctttgaagtgaaagttggcgtttataacaataaaggagatgggccttttagtcaaattg

SEQ ID NO: 639188 - DNA, 565 bp, Homo sapiens
ggctttttcttggaaccttttcaaacacatcattaaatcctatggaaatcttatgaaatagacattattgcctccgttatgtagaaagagaaattgactttcggaaaagttaaagaacgtgctaaaggttacactgcttgtaactgagaattaaatccaggtttgtctaaccactaactccttgatttttgtataacttgctgccttcatatgcatgaccatgtttaattcacaagatagaactcataggtaggcagtaccgagtagacaatatacctattttacagatgagtaaactgtaaagtggttatactcaatacatgatagagctacagtggaaaccctgcttcctacatcaaagatactgaattrtttcaagttttaatataaaaatgcaattttctgggtgaaagtataataatagatctagccccctaaagttagcttttcctcttagtccttcttttattcaaattcaggatttcagttaaccttacaagtgggggaaaaaaatgagaaaaggaaaagacagccttatgtttcttaaatttacaaatgactgaga

SEQ ID NO: 639189 - DNA, 555 bp, Homo sapiens
aagccagaaattcttattttcaaatgttggcttaaattaatctaacacatgatgtagacaaacaaaatatgactaaagacccactgcccctgcatttgtgactttggagccaagtgacttctagagtcctttccatttgcaactttccatcattcagttacaatgggatgcccaaagcgaatggccagtttcaatgcaagccagatgttctgtgatccagttagctacttgtgtctgcagaccaatttttgacccagttgaaaatgttcacttgggtataaatagtacatactaaaatttctgggaaaatctgacagaggtcactatttttacatgctgaaatgtctaattcaggtcaacatagatcaacttctgataccattcagggatgttcaatctttggcttccctgggccacactggaagaagaagaattgttttggaccacacataaaatacactaatactaacgatagctgattagctaaaaaaaaaaaaaaaawttacaaaaaaaatctcgtaacgctttaagaagttcacaaattttggggggggc

SEQ ID NO: 639190 - DNA, 592 bp, Homo sapiens
atggacttatttctacaatcttgcttcaattaattatttggaatgataatttagtatctcattatgattgcatgtttaatgtgatgaatatttctgtttctcccaatccatgcttcagggaccatgtttgttcatcattaaatctcagcaaatgataatatatatatttggcccataactgaccacaataaatatgttgaatgaataaatgtttgtgtggcacaattagcccctttctatccaaccgtagaagacactgtggtggtttgtcyagtttcccttctctatggaggagggacacgtgcctcctccaactgctgtgagtgttgactgctaatggttctcagctcccactatagatattgccctccactgaggagagctacattgcttggaaagtgacctcgccacacttagtcagcctaagatcaatgactgactgatacttgtctcttacctcaaggaggaaagaactttatggtgtagtttatgatacagagccttgctgcgtgcatcaggccaaagccagatttcctggaaccacattcttgctcagctccccattctgagttcctccctttttaaacctgta

SEQ ID NO: 639191 - DNA, 557 bp, Homo sapiens
aataaaaatcaacatctcattaattgtgaaattctttactttttataaacagaacataatgaaaactttggctaaacatgacattaactgttattttaagtatattcagtgaagactatttttgatttatactgtttcataactgaatagctgcatgtagatttaacactaaatatgatataggtgaagctatcaggatctctcttttcctctcttttctgtattctttttccctcgaaagagagttctgcctctgtccttcaccaaacacatctggaacttactgctctcctcttctccccacttatttttctctatcaaaaatgtcacttagtaaaagatttccctaattattactaaaatataatgaacccataaagcttaacaattttgtttacttttatccctctttttcactctatccctaccacaatyctacctatatttactgatggtcgaattcagagcatggtgacaataaaacaaatattgaaacaagggcatttgtcatcaaaaccaaaatgatcaatttcacattttatgtacttataatatca

SEQ ID NO: 639192 - DNA, 574 bp, Homo sapiens
ttgtatctttcaaatatttgagaaattttgtcaacatccgcttagaaccacccatttgtaaattttggttacctacatggcattagcttgaaattttatggtagcagggactaaatgtagaaagcactgacactgagatatgtgaaatgtctagcttatgatatgcagcatgattgaaaattgaaagtgggctgtatttactgaacaactttgattcatgaataaccatgactgtcccatctggattgccatctctgtcactagcccatacaagtaaattattaggttcagttttgaatttatgaacccaccagcattaagtgtcctgtgtatggtaatctctgaatcctagagcagagtccctcaagcttttcagaacataaaaggatttttatgtgcatacaaattcagagmagatgccagtctggcaagaagggagggtaaaggataaggccaaatttcataatcatttctgtgattttcccagatcagcaaaacagacaaagtaaattgtgataatggaatgttggatgattcatttttttcactccttcactcatcaagcatttattca

SEQ ID NO: 639193 - DNA, 506 bp, Homo sapiens
ttttggaaaaaaaggaaagtataactgtttgtttctcatttccattcttgactacccctggtataaagggttggttactctcatgagactgaaaacagtaggaagaggtcacttagattagattagtaaatagcaaacaaatgtaagaaagccctctaggcttcatgagtaacgtaatggtggtcagaaagtatctgaggagaaggtaaagaaggaatgacccaatcccacgtgaagttgaactctgccagcccgggatgtcaagagtatatcaggagacatcatcttgtataaaaataaatattctatcaataataccatacttcctaaataagggtatrccataattcttcataactttattataaaggtgaatacatcagctttgcaggtattaatagctaatgtactatgaaaagtctagtcacattattaaatattattttttattgaaatatttttttcatgactatttctacatatccttttccattgagtcaacacaa

SEQ ID NO: 639194 - DNA, 545 bp, Homo sapiens
tctgcgagttgtcctttcattctgttgattatttcttttgctgtgaggagctttttagtttggtataatcctatttgtttatttttgcttttgttgcctgtgcttttgagatcttattcataaaatcttttccaaaaccaaggtcctgaagcacttcctctatatttttttctagtagttttattgtttctggtcttatagttagctctttgatacattttgaattgatttttgtaygaggtgaggggtgagaagtctagtttcattcatctgcatgtgaacatccaatttttccagaaccatttattgaaaagactgttctttccctaatgaggtctgatctgaaggcctcttcactgacatgtctggtgcctggacttggatggctagaatagctggatgcaagttggatctctctctccacagacctctctaaatagctaatttggacttcttcacagaatggcaatttccatgtaattggactgacaactgtcttttcctataaaaagcattccaggaaacctgtggtaaagatgcaaagc

SEQ ID NO: 639195 - DNA, 540 bp, Homo sapiens
aaatttaaatctcagctgtgctgttccctagcagagtgatttgagcaaataacttctcattagaatgaactctctgatacccagtgcctaccataaaacttaacatataataaggktattgactaaataatttattattatttattaactaagtaatctctttgagattctattacctcctctatgaaatggggataacaatgcccacctcccagtgacgaagaagtaaatgaacaatttaatgtttgcaaacacttagtaagcaccttaatacagtacaatacagtgagattatcacagctattagtattattatagttaatattcttctcactattaaatcattataatgtattgtagatgctcctctacattcctgtcaccacagtctaaaaacttgttagacatcttcttcaacacctggatctcatttattttctttaccttatccttagtcgctattttagtggcttcaacattgatattgggcgatgcaatagacatattttttcataaatcctagaccttataaaccctgta

SEQ ID NO: 639196 - DNA, 569 bp, Homo sapiens
taataaggttattgactaaataatttattattatttattaactaagtaatctctttgagattctattacctcctctatgaaatggggataacaatgcccacctcccagtgacgaagaagtaaatgaacaatttaatgtttgcaaacacttagtaagcaccttaatacagtacaatacagtgagattatcacagctattagtattattatagttaatattcttctcactattaaatcattataatgtattgtagatgctcctctacattcctgtcaccacagtctaaaaacttgttagacatcttcttcaacacctggatctcatttattttctttaccttatccttagtcgctattttagtggcttcaacattgatattgggygatgcaatagacatattttttcataaatcctagaccttataaaccctgtaataatattctcaactttgctttagataaacaaaaaccaacttcttactcaaaaccaccctacctctaaaatcacaaatctgtcaattttctcttgcaacacaattcctactcttatattttcctcccataacaatc

SEQ ID NO: 639197 - DNA, 592 bp, Homo sapiens
ctctatgaaatggggataacaatgcccacctcccagtgacgaagaagtaaatgaacaatttaatgtttgcaaacacttagtaagcaccttaatacagtacaatacagtgagattatcacagctattagtattattatagttaatattcttctcactattaaatcattataatgtattgtagatgctcctctacattcctgtcaccacagtctaaaaacttgttagacatcttcttcaacacctggatctcatttattttctttaccttatccttagtcgctattttagtggcttcaacattgatattgggcgatgcaatagacatattttttcataaatcctagaccttataaaccctgtaataataktctcaactttgctttagataaacaaaaaccaacttcttactcaaaaccaccctacctctaaaatcacaaatctgtcaattttctcttgcaacacaattcctactcttatattttcctcccataacaatccagtctccttgactccttttttttattctagtctgtcagccccattctggcttcctctgacttgactccatggttacccacagcattgtcatatt

SEQ ID NO: 639198 - DNA, 620 bp, Homo sapiens
cttggtcctgactttcctatctttactgaattggtcagtttcacttcaaaatgataccgtctaaccaaatttgaactctagtactagtctagaatatttgtattttctcttcattgcaccctttcacttttatcatgtgctattccaaaactttcctgttatatcctccagcccccaatctaatttcccgcaatcaccctaactcttgtagacagtattatattcttaagtttaaaaaatgagtaccttccaaaatgagttctctcaacgtttccccttaccatctcgaaaactttaattattttgcttccttcatttatcttagaggaaaaaattgtcatttcttctcaaggttgccctctagacctttgcccacgattccaactttcggtcaccttcctgatagaatagtctctatcttctatatctttagtctcttgcatctgctggtggttcttctcaggtaacaaygacaacaaaaaaagttcgttccttattttctaaaaatgtcatttgccccaatgaggcttttaaacgttttctccatcttactgaagctgtattgttgatactctctattcaaaggtcttcaccaactcctccatctgttcagcatgcaa

SEQ ID NO: 639199 - DNA, 643 bp, Homo sapiens
aggtaacaatgacaacaaaaaaagttcgttccttattttctaaaaatgtcatttgccccaatgaggcttttaaackttttctccatcttactgaagctgtattgttgatactctctattcaaaggtcttcaccaactcctccatctgttcagcatgcaaccatttcttagggtttagctcatgtctcttaatcaacaaatccagagagcatttgtacataaagaccaactcagaaaatacttaaaatacttaagtttttgaaattcaaaataaaacattattgtgactttaattgtccatactatggaatggaagaactggcattgctttgtagccactaaaatataaatacctgtgcatttttaaaatactattcaaaatcaccactagaaataaaaacacaatggcacatttctcctcaaatctggttataattcgttcttaaagatgaagtccatatgcacacagattagtcaataatattctataccattctttcataatcaaaagggaattaatcctcctttattcactacctccccactcctaccaaggaaaaaaggaagctaatcatagatcacagtctcctttgaactccctacagaactttatgtatgtctcaggtctggcatatgtccttacc

SEQ ID NO: 639200 - DNA, 643 bp, Homo sapiens
aggtaacaatgacaacaaaaaaagttcgttccttattttctaaaaatgtcatttgccccaatgaggcttttaaacgttttctccatcttactgaagctgtattgttgatactctctattcaaaggtcttcaccaactcctccatctgttcagcatgcaaccatttcttagggtttagctcatgtctcttaatcaacaaatccagagagcatttgtacataaagaccaactcagaaaatacttaaaatacttaagtttttgaaattcaaaataaaacattattgtgactttaattgtccatactatggaatggaagaactggcattgctttgtagccactaaaatataaatacctgtgcatttttaaaatactattcaaaatcaccactagaaataaaaacacaatggcacatttctcctcaaatctggttataattcrttcttaaagatgaagtccatatgcacacagattagtcaataatattctataccattctttcataatcaaaagggaattaatcctcctttattcactacctccccactcctaccaaggaaaaaaggaagctaatcatagatcacagtctcctttgaactccctacagaactttatgtatgtctcaggtctggcatatgtccttacc

SEQ ID NO: 639201 - DNA, 621 bp, Homo sapiens
ggacccactccccagcttcctgccatgataaaatcttacataaccatagwacaattaccaaatcaggagatgatgttggtgaattgatgttaactaagattcagaccttattaggatctcactagttttgatatgcaattgttttagtgtgtacttatatgagattctatgaaattttattatgtagactcaagtaaccatcaagacaatcaggatatagatcagtttcattagctcagttccttttgctactcctttctagtcatacatctcttttatttataaaaagaaaatctattcagctggcaagatggctgaataggaatagctctggtctgcagttcccaatgagatcaacgcagaaggtgggtgatttctgcatttccaattgaggtactaagctcatctcattgggactggttagacagtgggtgcagcccatggagggcaagctgaagcagcatggggcattgcctcacccaggaagcatagggggtcggagaattccctcccctagccaagggaagctgtgagagactgtgtcatgaggaacagtgcacaccagcccagatactacacttttctcagagtcttcacaacccacagaccaggagattccct

SEQ ID NO: 639202 - DNA, 621 bp, Homo sapiens
ggacccactccccagcttcctgccatgataaaatcttacataaccatagtacaattaccaaatcaggagatgatgttggtgaattgatgttaactaagattcagaccttattaggatctcactagttttgatatgcaattgttttagtgtgtacttatatgagattctatgaaattttattatgtagactcaagtaaccatcaagacaatcaggatatagatcagtttcattagctcagttccttttgctactcctttctagtcatacatctcttttatttataaaaagaaaatctattcagctggcaagatggctgaataggaatagctctggtctgcagttcccaatgagatcaacgcagaaggtgggtgatttctgcatttccaattgaggtactaagctcatctcawtgggactggttagacagtgggtgcagcccatggagggcaagctgaagcagcatggggcattgcctcacccaggaagcatagggggtcggagaattccctcccctagccaagggaagctgtgagagactgtgtcatgaggaacagtgcacaccagcccagatactacacttttctcagagtcttcacaacccacagaccaggagattccct

SEQ ID NO: 639203 - DNA, 519 bp, Homo sapiens
ttgggcagacatccagctagctgcaggagtgttttttcatacccyagctgtgcctggaatgccagtgagacagaaccattcactcccctagaaagggggctgaagccagagagccaagtggtctagctcagcagatcccacccccatggagcccagcaagctataagattcacgaaattctcaacagtctgaagttgacctgggatgcttgagcttggtcaggggaggggtgtccaccattactgaggattgagtcggtggtttacccttatagtgtaaacaaagccacctggaagtctgcaatgggcagagcccaccgcagctcagcaaagctgctgtagccagactgcctctctagattctgtcctctctgggccagggcctctctgaatgaaagacgagcagccccagtcaggagcttatagataaaactcccatctccctgggacagagcaccagggggaaggggcagctgtgggcacagcttcatcagacttaaacgttcccgcctgccagctc

SEQ ID NO: 639204 - DNA, 621 bp, Homo sapiens
cactgcacagcattttaatgcctacttccaagatgtttgcattatagttgcattattttaaaaattttttcatctctaatcattttcttttcattttacaacttcccatmtctctccaaatgtggctgtccagcagggatatgtaaaatcacacttactggatagttactagacacttatttaacatactggtatttgaaaagtgtacagtaagtctacagaagagaatctttagaagcaattgtccatactgagtaacaactgtgtttttgttttaaactctaatgacctctattgacctgttttgaaatatagaaatcagtaaaatatttgcacgcagtaaccttaaaactcaaccagaatattatgagggtaaagtggttcattttattgtgtaggtaaatgaaatttgagtttttgtatgaaacactgtaatatcagaaggagaaaatttgtttatctatatgcagaatttaattcagaatttatttgatatttaggctcctgcattgttagacctcagtttgatcattatagtgtctataaacatatttattatgcatatatacatatttattttgtattatagataattgctcatatcagcctcattcctggatc

SEQ ID NO: 639205 - DNA, 621 bp, Homo sapiens
cactgcacagcattttaatgcctacttccaagatgtttgcattatagttgcattattttaaaaattttttcatctctaatcattttcttttcattttacaacttcccatctctctccaaatgtggctgtccagcagggatatgtaaaatcacacttactggatagttactagacacttatttaacatactggtatttgaaaagtgtacagtaagtctacagaagagaatctttagaagcaattgtccatactgagtaacaactgtgtttttgttttaaastctaatgacctctattgacctgttttgaaatatagaaatcagtaaaatatttgcacgcagtaaccttaaaactcaaccagaatattatgagggtaaagtggttcattttattgtgtaggtaaatgaaatttgagtttttgtatgaaacactgtaatatcagaaggagaaaatttgtttatctatatgcagaatttaattcagaatttatttgatatttaggctcctgcattgttagacctcagtttgatcattatagtgtctataaacatatttattatgcatatatacatatttattttgtattatagataattgctcatatcagcctcattcctggatc

SEQ ID NO: 639206 - DNA, 560 bp, Homo sapiens
tgttgttaagggaataaaatatagaaaaatgagataaaagtgtttttttaaatgagtaatttccccatatttgattttgagcatttcatttttaatagcatgtttgttcaagaaaaaattgcattaccatattgtaagcttgagtacgtaatatatcaaaggaaatcctaattttaaatgctattcttttatacacatctctgccttcagaattagggatgtatttattatcctaagaacatccctttaacttgctaaccatagctgtaatgactcttagtgatagagcccmaacttgtttctgaagcttggtgctttggggaagatgattatttcagaactgaaagttgatgggaacatggctgacaaatgggaagtttataagtaaaaagtcctagcaacaaagagacacctatccacatcaatatgggaaaaaagaatactgatttgttattgagtacacacaacagactacgtgcatgtagacagcacacaaaacctttgaagacagaatgacatttcacacaatttatacagcaaagaataagaaaatgaaataa

SEQ ID NO: 639207 - DNA, 560 bp, Homo sapiens
tgttgttaagggaataaaatatagaaaaatgagataaaagtgtttttttaaatgagtaatttccccatatttgattttgagcatttcatttttaatagcatgtttgttcaagaaaaaattgcattaccatattgtaagcttgagtacgtaatatatcaaaggaaatcctaattttaaatgctattcttttatacacatctctgccttcagaattagggatgtatttattatcctaagaacatccctttaacttgctaaccatagctgtaatgactcttagtgatagagccccaacttgtttctgaagcttggtgctttggggaagatgattatttcagaactgaaagttgatgggaacatggctgacaaatgggaagtttataagtaaaaagtcctagcaacaaagagasacctatccacatcaatatgggaaaaaagaatactgatttgttattgagtacacacaacagactacgtgcatgtagacagcacacaaaacctttgaagacagaatgacatttcacacaatttatacagcaaagaataagaaaatgaaataa

SEQ ID NO: 639208 - DNA, 621 bp, Homo sapiens
attttcccctggagcttccagaagtaatgcagctctgccaattccttaattctggctttgtaaaactcatttcagacttctgacctacagaacaataagataatttgtgatgttttaagacattaagtttgtgataatttcgttacaacaggactaatataactaccaacattgctttcaataaatactgttaatgttcaacactattttctctacaaaggcttctatgacctattccttgtaatggatatgtcctatatcaagggtttcacaccagaacagtcttttttagtgcgttaattgtctgaagtacactctaaaccttttgagagaagggatcatcagagctaatgcttcacatactctactgtagttacacacttatgcatgcttttgtcctatgtgtgtttattcagcaaacattcatcgatggcgtgattcatacaaagtaattgcccagtacctgtggaacttagtaaaacaagctactgtccttgtcctctagaataatatcttgggagtgataaaacatgtactcaaraaactaaaggaaaatccagaacagggtaagtaaaattagagtcaagaaagaaaagctttaggagtttagatatggaagag

SEQ ID NO: 639209 - DNA, 413 bp, Homo sapiens
aaattcacaaaactagtcactattaagtctgccttatggtgtagtatcctcattaaaaatttattacatatgaaagtctgccttatggtgtattcttattttaaatttattacaagtgaaaaagaataagaaaatgaataccaatttaccgactgtccacctaaagcagtaaaatgttaccaaaatgtcacctatgctacattcttcctcttctccccagaggtaatccacagtactttcaacagtaaataaaatgagaatgtaaagaaagctctacagtaaatgccrattgcaaccaattagaaagacttgtccagattaatttgatgtatggattttactgatttaaatgttctctgcatgaacacacacttagttttataggatttctgaaatgttgcgtactaataaag

SEQ ID NO: 639210 - DNA, 540 bp, Homo sapiens
gaaccgttttctaatggctatagtaagataaaacatgtattagaagatttaaaatgtctagtgaatacagacacaaagcactctcccaggactttataaatctaatccataagagaagctatctggatatagggcttggcatgactgttgaccctcatttaacagttatctgtaatttccccagcattatttcacagaaagttacacatgtcaaaaatatgcacttattgccatcaaaatgtgtccccaaaagaagaaaatttgtccccagwgggaaaggagtagtatatttggtagtgaaatataagaatatagtcaacttacataataattagagacgtgatattaagattttatcagttctcattctgaaactataaaaccaacccatgttagaagttccccaattcctcatcccatcattcagattctcatcagaaaaacacatgaaaattgaattttgagggtcatttagttaagtagcaggtgttccaatatctctatgtcatcttctacatacgagcctgtgtttagagaaat

SEQ ID NO: 639211 - DNA, 588 bp, Homo sapiens
gaaggggaacttcatcaacttaataaagaatatctacaaaatctctacagctaacattattcttaatggtaaaaaaccagctttcccactaagatgaggagcaaggcaagaatgtaccatctcactactccttttaaatattgtactgaagtcctagctaataaaataataaagggaaataaaattactatggtttgaataatgtggtcctctccaaaatacatgttgaaacataatctccaatgcaacagtattaagaagtgtggcctttggaagtgattatctcacaatccactctcatgaatgggattagcatccttataaaagggctcaagggtgaaaaaagtgctctcttgctattccatcccttctgccacatgaggatgcagcattcttctcctctcaaagaggaatattggaagcaccataytgaaagcagagagcatccctcgccagacaccaatcctgccactgtcttgatcttgaatttcccagcctccaaagtgtgagaaataaatttctgttcttcataaattatcaagactgtgttatcacagaacaaatgaactaggacaaaaaggtgtagtg

SEQ ID NO: 639212 - DNA, 444 bp, Homo sapiens
ctttgacaaaggagcaaaagcaatgcaatgaaraaaagataccttttttcaacaaatggtgctagaacaactggacatcgaattacaaaaaaaaaaattgaatctagatacagacctcatatctttcacaaaaaatgcaaaatggatcacagaccaaatgttaaatgcaaaactataaaattcctggaagataacatacaagataatatagaacaacttgagtttggcaatgacttttcagataagatgacaaaggcatgatgtatttaaaaaaattgatgaacttgacttcattaaaattaaaaatctatgctccacagaaaacaatataaagagaatgaaaagacaagccacagactgggagaaaatatttgcaaaatacatatctggttattatccaaaatagacaaataacccttaaaactcaatattagggaaacaacc

SEQ ID NO: 639213 - DNA, 444 bp, Homo sapiens
ctttgacaaaggagcaaaagcaatgcaatgaaaaaaagataccttttttcaacaaatggtgctagaacaactggacatcraattacaaaaaaaaaaattgaatctagatacagacctcatatctttcacaaaaaatgcaaaatggatcacagaccaaatgttaaatgcaaaactataaaattcctggaagataacatacaagataatatagaacaacttgagtttggcaatgacttttcagataagatgacaaaggcatgatgtatttaaaaaaattgatgaacttgacttcattaaaattaaaaatctatgctccacagaaaacaatataaagagaatgaaaagacaagccacagactgggagaaaatatttgcaaaatacatatctggttattatccaaaatagacaaataacccttaaaactcaatattagggaaacaacc

SEQ ID NO: 639214 - DNA, 599 bp, Homo sapiens
agtgggaactttcattcattgctattggaaatgaaaagcagtacagccattttggaagacagtttggcagtttcttacaaagctaaacatactcttaccatatgatacagcaattgtgcttcttggtatttacccaaataggttgaaaacatgtatgcacacaaaaacctgcacaatggatgtttatagcaggtttattcataattgccaaaactcaaagcwaccaagatgtccttctataggtgagtaaatacactctgaacatgcaggcaatgaaattttattcagtgctaaaaagaaatgggctatcaagctatcaagccatgaaaagataagcagaaaaattaaatgtgcataattaaatgaaagaactcaatttgaaaaggttacatactgtgtgagtccaactatataacattctggaaaaaacaaaaatatggagacagtaaaaaggtcaatagctgctatctggggttaaggggtagggaaggaggaatagacagagcacagaggattattatggcagtgaaaatattccatatgatactataatggtggacatgtcattatacatttatccaaacccatagattacacaa

SEQ ID NO: 639215 - DNA, 576 bp, Homo sapiens
atataaaagtataaatagcctgcatatgaaatatttagtagcagctcaaagcatgctgtttccatggagagataaataaaacaagtgtgggtgaatttcatgtattgtaaattaatttagacataattaaaggacttagcctttgtctacataatrtcagaacaacaactacagagagaaaattcaagcaacctgttgtttagtctaacttacattaaaaatcatattttcctccccacagaattaaaatatttatagttgttctttaattacaaaataattgagactaagtatttccaagaaattcttttgataatctgatgaaccttcatcccagaaaaagaatcctatgccaaattttgcatattaataatgcagggctttcatagagcctctgaaacacacacatatgccctacattaagaatctatggccgggcacggtggctcacgcctgtaatcccagcactttgggaggccgaggagggcagatcacgaagtcaggagatcgagaccatcctggctaacatggtgaaatcctgcctccacttaaaaatacaaaaaaattagccaggca

SEQ ID NO: 639216 - DNA, 536 bp, Homo sapiens
ttttttaaaaacctgtttctgtactgaacatgtacagactatttccttgtcattgttccctaacaatacaactatttcygtagcatttagattatattagatattataaataatctagaaatgacttaaagtatacaggaggatgtgcataggttatatgcaaatactacactattttacagcaagaacttgagcatccgtggattttggcacccatgggaggccctggaaccaatctcccacagataccaagggacgacagtacatgcctcttgattatgaatctatgtcttgcaaaacttttcaaatataagaactctaactgaacttcaaatatgtccaatgacttactgtgctcaaacactgattttattctttagaatgtaaacttctaaggataaaataaatatgtaaaatctttttttaaagatgccaccaaagtcccaacagcagaatgctaaataaatattatctaataattattacatcttctgaaatgataaaaaaaaaactcatcaccaatttctgaagccttc

SEQ ID NO: 639217 - DNA, 536 bp, Homo sapiens
ttttttaaaaacctgtttctgtactgaacatgtacagactatttccttgtcattgttccctaacaatacaactatttccgtagcatttagattatattagatattataaataatctagaaatgacttaaagtatacaggaggatgtgmataggttatatgcaaatactacactattttacagcaagaacttgagcatccgtggattttggcacccatgggaggccctggaaccaatctcccacagataccaagggacgacagtacatgcctcttgattatgaatctatgtcttgcaaaacttttcaaatataagaactctaactgaacttcaaatatgtccaatgacttactgtgctcaaacactgattttattctttagaatgtaaacttctaaggataaaataaatatgtaaaatctttttttaaagatgccaccaaagtcccaacagcagaatgctaaataaatattatctaataattattacatcttctgaaatgataaaaaaaaaactcatcaccaatttctgaagccttc

SEQ ID NO: 639218 - DNA, 475 bp, Homo sapiens
agttctttaggcactaaatcaaccagggctggtccagaaatcctttggcaattacatttaaagaaaacaaaaataaaaatgtaaaaaataggctggggtctgagctaccctacaaaataggtcaatgaaatatttgggatcatatgttccacaaaaaggctagaagaaggtgaagaaatatttttggaattgctgttgtacrcaataattactaaaaagtaaaagaagaaaatttgggcatggaaacaagaaaaggtctcagaacatttaaataccaaccaggaatagtgcggaatgaatgaaagggataatttcctaattacaattacagaaaagtttacatcatcaaacaacagaaccttattatataaaagataataagctatataataaattttgtgcactacattttaatcaaactttttattttgagataattataaattcacatgcagttagttgcaagaaataacag

SEQ ID NO: 639219 - DNA, 475 bp, Homo sapiens
agttctttaggcactaaatcaaccagggctggtccagaaatcctttggcaattacatttaaagaaaacaaaaataaaaatgtaaaaaataggctggggtctgagctaccctacaaaataggtcaatgaaatatttgggatcatatgttccacaaaaaggctagaagaaggtgaagaaatatttttggaattgctgttgtacacaataattactaaaaagtaaaagaagaaaatttgggcakggaaacaagaaaaggtctcagaacatttaaataccaaccaggaatagtgcggaatgaatgaaagggataatttcctaattacaattacagaaaagtttacatcatcaaacaacagaaccttattatataaaagataataagctatataataaattttgtgcactacattttaatcaaactttttattttgagataattataaattcacatgcagttagttgcaagaaataacag

SEQ ID NO: 639220 - DNA, 475 bp, Homo sapiens
agttctttaggcactaaatcaaccagggctggtccagaaatcctttggcaattacatttaaagaaaacaaaaataaaaatgtaaaaaataggctggggtctgagctaccctacaaaataggtcaatgaaatatttgggatcatatgttccacaaaaaggctagaagaaggtgaagaaatatttttggaattgctgttgtacacaataattactaaaaagtaaaagaagaaaatttgggcatggaaacaagaaaaggtctcagaacatttaaataccaaccaggaatagtgcggaatgaatgaaagggataatttcctaattacaattacagaaaagtttacatcatcaaacaacagaaccttattatataaaagataataagctatataataaattttgtgcactacattttaatcaaactttttattttsagataattataaattcacatgcagttagttgcaagaaataacag

SEQ ID NO: 639221 - DNA, 489 bp, Homo sapiens
atggcaattctattgttagatctacacctaccttattcatagtaacatctaaattagaaaaatatgaaaatgcaagctgccataaatcatagtatgagttctccatatatgttcacagagagaaagagattccctcacacctcttctacagtggatggaaggatttctgaagctggtgttcaatggccaaaaaagagtcactgmttcactcaaaattttgagacatgtaagcttgaaatctcaatcctttgaagaacctacacatgttattacaagcatttttaacatcagccaacaacaacttcacagatgagtctgtgctgacaagaaatataattcttgacctctccttcaaaaagcaagagttttggaatcaacttccactgcttgtcacctacaatatgctcagatttttgacccccctgtatctccaagggaaaaaaaaaaaccaccatgtcttcattaggaaaaacggaaaacgaaccaaga

SEQ ID NO: 639222 - DNA, 614 bp, Homo sapiens
cccactgactatgaggttggcaatgaaaacaagcttcaaaaagttaacttgctcaaggttacccagctagtaaataacagtctgaagttgggaagtcctgctacagagactgcattcttttttttgagacagagtctcgctctgtcaaccaggctggagtgcagtggtgcgatcctggctcattgcaacctctgcctcccggcttcaagccattctacagagactgtattcttaatcatacacaatactgtctctcaatactgctttttttctgtgcttgctcaaggatgatgccctatcaaagcatatgtaaagctaattgtttctatcagaattataataattagaaattaccataaaacccaattgcaaaaagaaagatgctgtagcttaagtcatgattcaaaagttgctataggaaaaaatactaagttgatgtctaagttctggaactcaattataccaaatctcaaaatccttgaaaagtaaaactrtaacaaaataataagaaaagaaacctagtgtgttatgttgccatgcctttgatatcttttcctgttttgaaagtacttcggggctggacacagcgacccatgcctgtaaatcccagcact

SEQ ID NO: 639223 - DNA, 587 bp, Homo sapiens
agttttctaaaaccaaattgttgtcgtagatgcactattatattcatttactaaaaattattgcactgtatacttaccaaaaaagtacacaagaacaaacaggaaactatcaaaaaatgaagaggtagacaacacattgaaaacatgtatttttttttcactgagacttaaagctactggctaaaatgattctaacttaaaaacaaaaggaacagttaaaggaagattctgtatgatttttaactaaagggattgatttttatccctgagaacctacaaamctttaatagaactaaataaaaatctgatctccaataggaggtacctcctgttatgctcagggctacaatatttcttgttaacaaaaattaaatatggcaaaataagcactttaagcctatagatgactattgggaatacataattcatcatgtaatcatgtacagtgtcctcttactatacacaataaagtaactatacaggaacaatgccattaagcctcctgtgtggttcatttaaaaaaaataccatacagcaattttaaccttatactaatttttaaaaacccagaaccagcatgaacatca

SEQ ID NO: 639224 - DNA, 592 bp, Homo sapiens
agaaaaaggtgggcaactgtctagaaaagataagagagtattctgaaaactgatttggccacagaaaaccagacatttcctactttattctttgaaaattgtttcccagcgtttgattgtagcttctaattaataagacaaatgagagcatatttctgggaattaaaaaagaaatgtgtttttgttatgcttttcctcagttccaaccctgagaacaaaagtgaagatgaataacaatgctattgctctgtcgcagggatgatgtatttcaaatgctgggttccttccaaggtgctattaaagttctctcaagtgatgctactaaaaaaaaatgtcaaaagaactcatgttatttattgtttctcaaaatccgttgctgcttcaggttgtgcctaagttaacacatccattttattttggaagttactgcacaatgctctgataaatgaacataaamgacattagtagatacaggtaatgaaaactcgattccaaaccttcatcaatctgacagagaccagagattttaaaacaatgatagtatgtaaataaaatgcagatccaaacagagctcctatagaatgtgtgacaa

SEQ ID NO: 639225 - DNA, 518 bp, Homo sapiens
atgtcatttaatcctcccaaataactttctgaggtaggcagcctaaactaccagagaattattttaactaattcttgataacaagatgatcccttcatggtaggtaagtcagattctccgcacctctcttttaaaatgcatctgaattcactgaaacatagagatgaaagaaagcttcatggccaagygcggtggctcacgcctgtgatcccagcaatttgataggccaaggtgggtggatcacctgaggtcaggagtttgagacgagaccagtctggcctcaaacatggtgaaacccagtctctactaaaaatacaaaattagctgggtgtggtagtgcacacctgtagtcccagctactcgggaggctgagacaggagaatcgcttgaactagggaggtggaggttgcggtaacctgagatcacaccactgcactccagcctgggtgagacacagcaagactccatctccaaaaaaaaaaattaaaaaaaaaattaaaaaaaaaatcatgatcaat

SEQ ID NO: 639226 - DNA, 436 bp, Homo sapiens
agaagatcttttaagttgcaagagaaaacaggtaattaaaaaaaatttacttttcatctgcaacaatgaaagctagatgatgagagaaaaatacaggtgagatactgagagaactgaaacctaaaagtttatcacccagaagagtatctggcaaagattcagrgattccatcactcagtgaaacaccttagaaaatgaaaaaaaacaaaaacaaaaaaaacaaaacaaaaaaacacattaatcgatcaagaaatcactcagaatgaagaagtagaggagtctggttaagagaagaaggaaaagtagacacattagtgagcaatgaaccctacaacacacacatagacacatgctttctgatgtatgtgtacatatacatcatatacaaatgtgtacatacatacaaatgtccacacatttatacatattagacatg

SEQ ID NO: 639227 - DNA, 589 bp, Homo sapiens
tttacaggcttctgtacatggctggttctgtgttttgttttattttgttttttaactaggattctgttctcctacctaccccacttagctagttctctgcttcacttattttgcatatcttcacaccaaaattccttcagaatgctttccttgacactctgagaccgagatagatgtctctacttgttaggcttccaaagcaccttgtgattacccccagcctaatatttcccacacaatagctgctaatgtgtccaatccctcaaccagacttaacctcttgaagaagaaaaaggaaatgtcaactaggccaccaaaaaagagtagatagataggggaggaaggaaaccattccagactgaagaaacatatatgctaaggtccagaaagasaaactatggagttttagagaaactaaatgaagaccactatagtaaccctaatctttggtaccgtgccttgtctgtggtgaatctataaaagaatgaatataaaaccaatggattaatgaaaacaaatacatctggatgtgactgatcatatgtccaggcataatatatgtagtgatagaaattcatatgtgtgcata

SEQ ID NO: 639228 - DNA, 573 bp, Homo sapiens
ttgattcacaaagtattcaatgtccctctgaatgctgcacatttctaaactctttcggacttgttcgtacatctaataaaaaaaggtcaattaataggtagaggtatgttgagatcattgtgacacagctccttaaaaacatgggtttgaggcggggcgcagtggctcatgtctgtaatcccagcattttgggaggttggggtgggcggatcacaaggtcaggagttcragaccagcctggccaacatagtgaaaccccatctctgtttaaaatacaaaaaattagccaggcatggtggcaggcgcctgtaatcccagctacttgggaagctgaggcaggagaatcacttgaacccaggaggtggagattgcagtgagccaagatcacaccactgcactccaaccccaggcgacagtgcgagactccgtctcaaaaaaaaaaacaaaaaaacaaaaaaacatgggtttgatagagagctgactcttccaaattttcttgttttcaaaaaaaaagaacacattccaaagtcccagattcatattggagcttttctctgatgcacatctgctatt

SEQ ID NO: 639229 - DNA, 573 bp, Homo sapiens
ttgattcacaaagtattcaatgtccctctgaatgctgcacatttctaaactctttcggacttgttcgtacatctaataaaaaaaggtcaattaataggtagaggtatgttgagatcattgtgacacagctccttaaaaacatgggtttgaggcggggcgcagtggctcatgtctgtaatcccagcattttgggaggttggggtgggcggatcacaaggtcaggagttcgagaccagcctggccaacatagtgaaaccccatctctgtttaaaatacaaaaaattagccaggcatggtggcaggcgcctgtaatcccagctacttgggargctgaggcaggagaatcacttgaacccaggaggtggagattgcagtgagccaagatcacaccactgcactccaaccccaggcgacagtgcgagactccgtctcaaaaaaaaaaacaaaaaaacaaaaaaacatgggtttgatagagagctgactcttccaaattttcttgttttcaaaaaaaaagaacacattccaaagtcccagattcatattggagcttttctctgatgcacatctgctatt

SEQ ID NO: 639230 - DNA, 578 bp, Homo sapiens
aagtggttctcatacttgaattcacatcagaatcacttggaaggtttattagcatagagattgctgagctctacccccacagtttctgattcaatttcatatctcatactacaggttttattcaaaaccaaaaaattttgaatgccttttaaaatttgctacattttaaaacttgttataaaataaaacaaaacttccaacatatacaagwgtagagaggtacagatagtatgatgaatccctatgtactcatcaccagcttaaacatttatcaactcacaaccgattctattttatctatatctctaccaattaccctactctctggagtattttgaagcaaatgcattatttcacctctaaatatttttatatctatataacatagtataataatttaataatattacattattgttgttatggaatatttcacatagaatcagaaagcagtataataaatacctatataccaactacctagctttgtcaaaaacttcagccatattttttcagattctgtaaaagcccctgtgtgatttacccagtttctatcaccttcctccttccccagatag

SEQ ID NO: 639231 - DNA, 615 bp, Homo sapiens
ggaaacagggtaaaaccatgtctcaataaacaaacaaataaatacataaatacataataaagtattccattcaacatttttaccttagtaatgctcaacgtttggtttttacttatttccttttatgttgtattttctagaccaaattcacatatagtataaagcagaagaaactaaagattaaattcattgttcgtaattgtattcagtttcctgttttcatcatcgtttgtttacaaatttttttttttttcttttttgaaacagagtctcgctctgtcacccaggctgagtgcagtggctggatagctcactgaaagctccgcctcccaggttcatgccattctcctgcctcagcctccggagtagctgggactacaggcgcccaccaccatgtctggctaatgttttgtatttttagtagagacggggtttcaccatgttagccaggatggtctcaatctcctgatctcgtgatccrcctgcctcggcctcccaaagtgctgggattacaggtgtgagccactgccccggtctgtttaggaatatttttaaagaattattgcacttctgttcggatagaaaaacaaaaatgcattttaagaatatatattt

SEQ ID NO: 639232 - DNA, 585 bp, Homo sapiens
aagaacctctaaaagtagccaacagctggagacagacatccatcctaagaactacggagcaagtaaatgatatgatgaagcagtccgcttctgccaaagatcatgaaacaagattcactccgattcccctcccctgtctctgacttcaattttgggtctacgcattctgctactactcctgtgtcctctacaacgtcccatcttyatcctagtgatgtgtcctacttacaacatatatactccatctccagcctcagcagccctgtcatgattcccctctgtttcctccttatcttaccctatcccgtgctttcctctcatgaccataattccctcggtctcttagctgacaaagtagccaatgaaattaaccaaagtaattgccgggtctatgcccattcccactctattctaaaactcgtattcccttaataattgtctcccttatgctttagatatggccttggcagaaaacattacaaatatacagccatttaggtctcccttttagaaagatattgggctatttcttaaaagcccttgtgactgggagtatgatgtggcctctttaacctaagaaacgtg

SEQ ID NO: 639233 - DNA, 585 bp, Homo sapiens
aagaacctctaaaagtagccaacagctggagacagacatccatcctaagaactacggagcaagtaaatgatatgatgaagcagtccgcttctgccaaagatcatgaaacaagattcactccgattcccctcccctgtctctgacttcaattttgggtctacgcattctgctactactcctgtgtcctctacaacgtcccatcttcatcctagtgatgtgtcctacttacaacatatatactccatctccagcctcagcagccctgtcatgattcccctctgtttcctccttatcttaccctatcccgtgctttcctctcatgaccataattccctcggtctcttagctgacaaagtagccaatgaaattaaccraagtaattgccgggtctatgcccattcccactctattctaaaactcgtattcccttaataattgtctcccttatgctttagatatggccttggcagaaaacattacaaatatacagccatttaggtctcccttttagaaagatattgggctatttcttaaaagcccttgtgactgggagtatgatgtggcctctttaacctaagaaacgtg

SEQ ID NO: 639234 - DNA, 585 bp, Homo sapiens
aagaacctctaaaagtagccaacagctggagacagacatccatcctaagaactacggagcaagtaaatgatatgatgaagcagtccgcttctgccaaagatcatgaaacaagattcactccgattcccctcccctgtctctgacttcaattttgggtctacgcattctgctactactcctgtgtcctctacaacgtcccatcttcatcctagtgatgtgtcctacttacaacatatatactccatctccagcctcagcagccctgtcatgattcccctctgtttcctccttatcttaccctatcccgtgctttcctctcatgaccataattccctcggtctcttagctgacaaagtagccaatgaaattaaccaaagtaattgccgggtctatgcccattcccactctatyctaaaactcgtattcccttaataattgtctcccttatgctttagatatggccttggcagaaaacattacaaatatacagccatttaggtctcccttttagaaagatattgggctatttcttaaaagcccttgtgactgggagtatgatgtggcctctttaacctaagaaacgtg

SEQ ID NO: 639235 - DNA, 585 bp, Homo sapiens
aagaacctctaaaagtagccaacagctggagacagacatccatcctaagaactacggagcaagtaaatgatatgatgaagcagtccgcttctgccaaagatcatgaaacaagattcactccgattcccctcccctgtctctgacttcaattttgggtctacgcattctgctactactcctgtgtcctctacaacgtcccatcttcatcctagtgatgtgtcctacttacaacatatatactccatctccagcctcagcagccctgtcatgattcccctctgtttcctccttatcttaccctatcccgtgctttcctctcatgaccataattccctcggtctcttagctgacaaagtagccaatgaaattaaccaaagtaattgccgggtctatgcccattcccactctattctaaaactsgtattcccttaataattgtctcccttatgctttagatatggccttggcagaaaacattacaaatatacagccatttaggtctcccttttagaaagatattgggctatttcttaaaagcccttgtgactgggagtatgatgtggcctctttaacctaagaaacgtg

SEQ ID NO: 639236 - DNA, 559 bp, Homo sapiens
cttagtctctaaggagaaaatggtttccccagccaaatggcttaggagactttttaagggacttggcttttttttttttcctttaaactttaattttaaggtcgggggcacatgtgaagatcttgtctacaagggtaaactcaggtcatggggtcttgttgtacaggttatttattcccccaggatttaagcccagtacccaacagttacgtgtttccactcctctcccacctcccacackgcatgttcaagcagaccccagtgtctgctgtttccctctttgtgttaataagttctcatcatttagcctccacttataagtaagaacatgcagtatttggttttctgttcctgcgttagttgctgaggataatagcctccagctctagccatgttcctgcaaacgacataatctcattcttttttatggctgcatggtactccatggtgtatatgtaccacattttctttatccaatctgtcattgatgggcatttaggctgattccatgtctttgctattgtgaatattgctgcgatgaacatttacatgtgcaagt

SEQ ID NO: 639237 - DNA, 443 bp, Homo sapiens
atcaggtcctgggctttttttggttggtaggctatttgttactggttcaattttggagcttgttgctggtctgttcaggcaatcaatttcttcctggcttagtcttgggtgggtgtatgtgtccaggaatttatccatcttttcaaggttttctagtttgtgtgcattgaggtgttcatagtagtttttagtggttatttgattatttttatttttgtgcagtcagtgttaacattttcytttcttttctttttttttatttgagacagagtcttgctttgtcatccaggctggcgtacagtggcaccatcttggctcactgcaggctctgcctcctgggttcaagcaattcttgtgcttccgcctcctgagtagttgggactacagttgtgtgccaccatgcccagctaatttttgtatttttagtagagagggtttcacca

SEQ ID NO: 639238 - DNA, 443 bp, Homo sapiens
atcaggtcctgggctttttttggttggtaggctatttgttactggttcaattttggagcttgttgctggtctgttcaggcaatcaatttcttcctggcttagtcttgggtgggtgtatgtgtccaggaatttatccatcttttcaaggttttctagtttgtgtgcattgaggtgttcatagtagtttttagtggttatttgattatttttatttttgtgcagtcagtgttaacattttcttttcttttctttttttttatttgagacagagtcttgctttgtcatccaggctggcgtacagtggcaccatcttggctcactgcaggctctgcctcctgggttcaagcaattcttgtgcytccgcctcctgagtagttgggactacagttgtgtgccaccatgcccagctaatttttgtatttttagtagagagggtttcacca

SEQ ID NO: 639239 - DNA, 421 bp, Homo sapiens
gattgcattgaatttgtagattgcctttaacagaatggtaawtttcacaatattggttctacccatccatgagcatggggatgcgtttccatttgtctgtgtcatctatgatttcttttctttcttgttttttttgtttttttttttcagagggagtttcggtcttgtcgctgaggtgggagtgcaatggtgtgatctcggctcactacaacttctgcctcctgggttcaagcgattctcctgcctcagcttcccgagtagctgggattataggcatgcgccaccgtgcttggctccatccatgatttctttcagcagtgttttgtaattttcattgtagaggtcttttgattcctttgctaggtatattcctaagttttgttttttgtttgtttgtttgttgcagctattgtaaaagggg

SEQ ID NO: 639240 - DNA, 421 bp, Homo sapiens
gattgcattgaatttgtagattgcctttaacagaatggtaaatttcacaatattggttctacccatccatgagcatggggatgygtttccatttgtctgtgtcatctatgatttcttttctttcttgttttttttgtttttttttttcagagggagtttcggtcttgtcgctgaggtgggagtgcaatggtgtgatctcggctcactacaacttctgcctcctgggttcaagcgattctcctgcctcagcttcccgagtagctgggattataggcatgcgccaccgtgcttggctccatccatgatttctttcagcagtgttttgtaattttcattgtagaggtcttttgattcctttgctaggtatattcctaagttttgttttttgtttgtttgtttgttgcagctattgtaaaagggg

SEQ ID NO: 639241 - DNA, 421 bp, Homo sapiens
gattgcattgaatttgtagattgcctttaacagaatggtaaatttcacaatattggttctacccatccatgagcatggggatgcgtttccatttgtytgtgtcatctatgatttcttttctttcttgttttttttgtttttttttttcagagggagtttcggtcttgtcgctgaggtgggagtgcaatggtgtgatctcggctcactacaacttctgcctcctgggttcaagcgattctcctgcctcagcttcccgagtagctgggattataggcatgcgccaccgtgcttggctccatccatgatttctttcagcagtgttttgtaattttcattgtagaggtcttttgattcctttgctaggtatattcctaagttttgttttttgtttgtttgtttgttgcagctattgtaaaagggg

SEQ ID NO: 639242 - DNA, 539 bp, Homo sapiens
aaatttcgggcccccaatcactatgcaaaaaggaaaaaattaagatggaagctgagccatgcaagaaacagccttttccttctattgctaagaaagtagctaacaaatgaaaggccagatatctccacagagagctacactaggtacaccttttatgtaaagtactgatttactgagatgaatacatcactgactattttcctacctgctccttttctcctgcaatgcatggattatgccatgtgaccatactctccctctttcgcctccacttttcccctttaaatactgaaaccttcaaaatatctttgcagaaagacacagaccacaggctgtctctgtgattgtgtgttccattcttccaggcatgttcttaaccttggtaaaataaacttctaagttgattgagacctgtctcagagactggtttacaagtgtgcatagcacacctrcaggcaggcatacatttctgaggcatactcgctgagatagctccttcctttctctgtcccccccttactgactgaatctcatttatg

SEQ ID NO: 639243 - DNA, 295 bp, Homo sapiens
caactcttctaggttttctagtttatgtgccaaaaggtgttcatagtacccttgaataayctttaatatttcagtggtgtcagttgtaatatcccctgtttcatttcttagtgaggttatttggattttctctcttcttggttaatcttgctaatggtctatgaattttatttatcttttcaaataaccaactttttcttttatgttttgtattttttgttgttgttgttgtgtcaatttcatttagttctgctctgatcttggttatttcctttgtttgctgggattgggtttg

SEQ ID NO: 639244 - DNA, 295 bp, Homo sapiens
caactcttctaggttttctagtttatgtgccaaaaggtgttcatagtacccttgaataacctttaatatttcagtggtgtcagttgtaatatcccctgtttcatttcttagtgaggttatttggattttctctcttcttggttaatcttgctaatggtctatsaattttatttatcttttcaaataaccaactttttcttttatgttttgtattttttgttgttgttgttgtgtcaatttcatttagttctgctctgatcttggttatttcctttgtttgctgggattgggtttg

SEQ ID NO: 639245 - DNA, 577 bp, Homo sapiens
cagagtggcaaactgaataaaaaaacaagacacttctgctgcctttgagagacccatctcatgtgtaatgataccaacaggctcaaagtaaatggatggaaaaagattcatcacataaatgaaaaacaaaaacagagaggtattgctattcttgtatcagataaaacagacattaaactaacaacagtacaaaaaaaatacaaagaatggcattatataatgataaagtgttcaattcaacaagaagacttaactgtctcaaatatatatgcagcctacattgaagcaaccggatttttagaataaatattactagacctaagaaaagagatacacagctgtacaataatcatggaggacttcaacaccccaccgacagtagtaagcagattattagttaggcagattattaggcagaaaactaacaatgaaactgtggactcaaattgggctcttgaccaaacagacctaatagatatctacagaatactcyacccagaaaccacagaatgtacatttttctcatttgcacatggaacattccctaaaattgaccacatgctcagtcataaaataa

SEQ ID NO: 639246 - DNA, 577 bp, Homo sapiens
cagagtggcaaactgaataaaaaaacaagacacttctgctgcctttgagagacccatctcatgtgtaatgataccaacaggctcaaagtaaatggatggaaaaagattcatcacataaatgaaaaacaaaaacagagaggtattgctattcttgtatcagataaaacagacattaaactaacaacagtacaaaaaaaatacaaagaatggcattatataatgataaagtgttcaattcaacaagaagacttaactgtctcaaatatatatgcagcctacattgaagcaaccggatttttagaataaatattactagacctaagaaaagagatacacagctgtacaataatcatggaggacttcaacaccccaccgacagtagtaagcagattattagttaggcagattattaggcagaaaactaacaatgaaactgtggactcaaattgggctcttgaccaaacagacctaatagatatctacagaatactctacccagaaaccayagaatgtacatttttctcatttgcacatggaacattccctaaaattgaccacatgctcagtcataaaataa

SEQ ID NO: 639247 - DNA, 242 bp, Homo sapiens
tgccaaattcccccatctcaacctcatttggacatcctatattaagaaaaaacaaagcaggtactcatcagcaggaacggaatcctaytctcttgacagaattcccgtgatctataacctgctggataaatagttcaaatgctgtatctctgttcctattcctagactttctggcacctattacccttcaagtccatgtgtcttccagtaggttgcagtgctctccccaggagatggcagct

SEQ ID NO: 639248 - DNA, 618 bp, Homo sapiens
agaacatttatggaaagcacatggcactgtrccacactcataataagtactcattaagtgttggccacaattctcaccagccttgttctctgtcctcaggagatgatgaccataattggaaaattgcccatgtggtactcaaagaggaacaggaatttcgctaacttttccagggcacaaaaggcgaccctcggaactcaactgggggaatttacctggatgacatcactcttgacagaaaccccctgccccacaggggtctggagagtccagaatttctcccaggtccttgagaacaccagcgaagtggacaagcttcagagccctcgattctacaattcagagggatgcggttttgggttaactttatacccccatggcagagaaagctctggctatttgagacttgctttttacatgtgcagtggggagaatgatgctatcctggagtggccggtagaaaacagacaggtgataattaccatcttcgaccaggacctgatgtcaggaacaggatgtcctcaagtttggtgttcactacctccaagttgcacatatctccaggtgggtggtgttggcataaataagaactgcccctcgaaccagagaggcccacag

SEQ ID NO: 639249 - DNA, 618 bp, Homo sapiens
agaacatttatggaaagcacatggcactgtaccacactcataataagtactcattmagtgttggccacaattctcaccagccttgttctctgtcctcaggagatgatgaccataattggaaaattgcccatgtggtactcaaagaggaacaggaatttcgctaacttttccagggcacaaaaggcgaccctcggaactcaactgggggaatttacctggatgacatcactcttgacagaaaccccctgccccacaggggtctggagagtccagaatttctcccaggtccttgagaacaccagcgaagtggacaagcttcagagccctcgattctacaattcagagggatgcggttttgggttaactttatacccccatggcagagaaagctctggctatttgagacttgctttttacatgtgcagtggggagaatgatgctatcctggagtggccggtagaaaacagacaggtgataattaccatcttcgaccaggacctgatgtcaggaacaggatgtcctcaagtttggtgttcactacctccaagttgcacatatctccaggtgggtggtgttggcataaataagaactgcccctcgaaccagagaggcccacag

SEQ ID NO: 639250 - DNA, 618 bp, Homo sapiens
agaacatttatggaaagcacatggcactgtaccacactcataataagtactcattaagtgttggccacaattctcaccagccttgttctctgtcctcaggagatgatgaccataattggaaaattgcccatgtggtactcaaagaggaacaggaatttcgctaacttttccagggcacaaaaggcgaccctcggaactcaactgggggaatttacctggatgacatcactcttgacagaaaccccctgccccacaggggtctggasagtccagaatttctcccaggtccttgagaacaccagcgaagtggacaagcttcagagccctcgattctacaattcagagggatgcggttttgggttaactttatacccccatggcagagaaagctctggctatttgagacttgctttttacatgtgcagtggggagaatgatgctatcctggagtggccggtagaaaacagacaggtgataattaccatcttcgaccaggacctgatgtcaggaacaggatgtcctcaagtttggtgttcactacctccaagttgcacatatctccaggtgggtggtgttggcataaataagaactgcccctcgaaccagagaggcccacag

SEQ ID NO: 639251 - DNA, 618 bp, Homo sapiens
agaacatttatggaaagcacatggcactgtaccacactcataataagtactcattaagtgttggccacaattctcaccagccttgttctctgtcctcaggagatgatgaccataattggaaaattgcccatgtggtactcaaagaggaacaggaatttcgctaacttttccagggcacaaaaggcgaccctcggaactcaactgggggaatttacctggatgacatcactcttgacagaaaccccctgccccacaggggtctggagagtccagaatttctcccaggtccttgagaacaccagcgaagkggacaagcttcagagccctcgattctacaattcagagggatgcggttttgggttaactttatacccccatggcagagaaagctctggctatttgagacttgctttttacatgtgcagtggggagaatgatgctatcctggagtggccggtagaaaacagacaggtgataattaccatcttcgaccaggacctgatgtcaggaacaggatgtcctcaagtttggtgttcactacctccaagttgcacatatctccaggtgggtggtgttggcataaataagaactgcccctcgaaccagagaggcccacag

SEQ ID NO: 639252 - DNA, 621 bp, Homo sapiens
cgtcagtgaagaacacaggccccctggaggaccataactggccacagtacttcagagrcccatgtgacccaaacccttgccaaaatgatggcatctgtgtgaacctgaagtgggtggcgaggtgcaggtaggctctgtggctggggagacaggcaggccagcagacctgggccgtgtgcatgcttatgcctggtaaaggctgctgtttgcagagtagggcgaagactacctcagatggtcagctggatgcagttttccttgactctacaaaggtgtgccctggattcatgggcttacgctgccaggacagaggcgtcccaggtctccttgtctcttgactttcaccccttttcctcctctggggtattgtcaacagcatcttggatgttgttggaatttctaactctaacaacatccaagatggcttctagcctagggactttctactccatgacagtgggtctcaagaccaagcttaaatctttgctgactacacagatgttattattagctcctaatgattattagttatacagtctgtcatttacactgcactattattaaagttatgttttcaataatagtagtaagaacacctgatatttctgaccccttgttatg

SEQ ID NO: 639253 - DNA, 522 bp, Homo sapiens
taaaataaaactagctagtaccgtgggaatcagctggattcaaagccacttttccatgtcactgggggtgacatatcactagagatagaagcaggctggggaactttcaccagaaatgggagttcactgtagtcagttactaatcctggatctttctcgtgaccctctatttcctgaagatatcacccacctcagccagactgaagttcccactaaaggcaaaagactgagcccccaaggcctcattctccaaggccagaagcagcaggtctccaaagaaggttcaggaaaggccatgttagaggaagccgtacctgtcagcctcagccagggcagcccggctgacagaagccgtcagtgaagaacacaggccccctggaggaccataactggccacagtacttcagaggcccatgtgacccaaacccttgccaaaatgatggcatctgtgtgaacstgaagtgggtggcgaggtgcaggtaggctctgtggctggggagacaggcaggccagcagacctgg

SEQ ID NO: 639254 - DNA, 541 bp, Homo sapiens
cccttgccaaaatgatggcatctgtgtgaacctgaagygggtggcgaggtgcaggtaggctctgtggctggggagacaggcaggccagcagacctgggccgtgtgcatgcttatgcctggtaaaggctgctgtttgcagagtagggcgaagactacctcagatggtcagctggatgcagttttccttgactctacaaaggtgtgccctggattcatgggcttacgctgccaggacagaggcgtcccaggtctccttgtctcttgactttcaccccttttcctcctctggggtattgtcaacagcatcttggatgttgttggaatttctaactctaacaacatccaagatggcttctagcctagggactttctactccatgacagtgggtctcaagaccaagcttaaatctttgctgactacacagatgttattattagctcctaatgattattagttatacagtctgtcatttacactgcactattattaaagttatgttttcaataatagtagtaagaacacctgatatttctgacccct

SEQ ID NO: 639255 - DNA, 621 bp, Homo sapiens
cgtcagtgaagaacacaggccccctggaggaccataactggccacagtacttcagaggcccatgtgacccaaacccttgccaaaatgatggcatctgtgtgaacctgaagtgggtggcgaggtgcaggtaggctctgtggctggggagacaggcaggccagcagacctgggccgtgtgcatgcttatgcctggtaaaggctgctgtttgcagagtagggcgaagactacctcagatggtcagctggatgcagttttccttgactctacaaaggtgtgccctggattcatgggcttacgctgccaggacagaggcrtcccaggtctccttgtctcttgactttcaccccttttcctcctctggggtattgtcaacagcatcttggatgttgttggaatttctaactctaacaacatccaagatggcttctagcctagggactttctactccatgacagtgggtctcaagaccaagcttaaatctttgctgactacacagatgttattattagctcctaatgattattagttatacagtctgtcatttacactgcactattattaaagttatgttttcaataatagtagtaagaacacctgatatttctgaccccttgttatg

SEQ ID NO: 639256 - DNA, 591 bp, Homo sapiens
tggtagaatgctagtaaataaattacaggccttattcggctcttcccagttctcccactaatgttctttttctatttcaggatccaattccggatctcacgttacatttagtttttatgtctcctgtctcctaatcccctccaatctgggacaattcctcagttctttcttgtctttcattaccttgacacttttgaagattactggttagggatttttttttggttcatcttgttctctcatgattaaattgaggtttcacatttgtgkcaagattagtaaatatgtgctgtgccttcttgttgcatcatgtgagcaggtacatgatgccgatacatgtaattactggtgatgtcaaccttcatcatctggccaacagcatgtccaccaggcctctccactgaagagttaccatttctccctctgtaattgatacatatcttgggagagatagttcaagaccattgagacatcctgcttttcctcaaatcctcacatgctaatttcagcatctattgatacaacctgctgcaatattcaccactgggatcttctaatgttgatttcctatgtccttcacattcattaatt

SEQ ID NO: 639257 - DNA, 591 bp, Homo sapiens
tggtagaatgctagtaaataaattacaggccttattcggctcttcccagttctcccactaatgttctttttctatttcaggatccaattccggatctcacgttacatttagtttttatgtctcctgtctcctaatcccctccaatctgggacaattcctcagttctttcttgtctttcattaccttgacacttttgaagattactggttagggatttttttttggttcatcttgttctctcatgattaaattgaggtttcacatttgtgtcaagattagtaaatatgtgctgtgccttcttgttgcatcatgtgagcaggtacatgatgccgatacatgtmattactggtgatgtcaaccttcatcatctggccaacagcatgtccaccaggcctctccactgaagagttaccatttctccctctgtaattgatacatatcttgggagagatagttcaagaccattgagacatcctgcttttcctcaaatcctcacatgctaatttcagcatctattgatacaacctgctgcaatattcaccactgggatcttctaatgttgatttcctatgtccttcacattcattaatt

SEQ ID NO: 639258 - DNA, 591 bp, Homo sapiens
tggtagaatgctagtaaataaattacaggccttattcggctcttcccagttctcccactaatgttctttttctatttcaggatccaattccggatctcacgttacatttagtttttatgtctcctgtctcctaatcccctccaatctgggacaattcctcagttctttcttgtctttcattaccttgacacttttgaagattactggttagggatttttttttggttcatcttgttctctcatgattaaattgaggtttcacatttgtgtcaagattagtaaatatgtgctgtgccttcttgttgcatcatgtgagcaggtacatgatgccgatacatgtaattactggtgatgtcaaccttcatcatctggccaacagcatgtccaccaggcctctccactgaagagttaccatttctccctckgtaattgatacatatcttgggagagatagttcaagaccattgagacatcctgcttttcctcaaatcctcacatgctaatttcagcatctattgatacaacctgctgcaatattcaccactgggatcttctaatgttgatttcctatgtccttcacattcattaatt

SEQ ID NO: 639259 - DNA, 510 bp, Homo sapiens
agcaaatctgtggcaaacctgggaaggtgacccaaactccagaccccaagcccggtgcttttttttttttcccagatctatgtctcccccacatctgactctgtttccctgaggtccagagccattccctgttcctttttaggattctcacgacccaggyttaggcacattagttgtccaaagcacacttggcttgctctgacttgagcagtacaatgagctatgtcttagtttcaggcaagaccaccttgaccatgggacatgaaaaggcactctatggggcctctactatgatgtagcagggactgtgttagcacattgctatagccctgggaagcaagaattcttagcacccattgcccagatgaagaaactcactttcagagagggtaaagaatgtctctgtggtaccacagctatatagtggctaggctggaattcaaaaccaggtttgcctgcctccttctcctgtatgatactgcttcatacacagtccccagaaccttaacg

SEQ ID NO: 639260 - DNA, 510 bp, Homo sapiens
agcaaatctgtggcaaacctgggaaggtgacccaaactccagaccccaagcccggtgcttttttttttttcccagatctatgtctcccccacatctgactctgtttccctgaggtccagagccattccctgttcctttttaggattctcacgacccaggtttaggcacattagttgtccaaagcacacttggcttgctctgacttgagcagtacaatgagctatgtcttagtttcaggcaagaccaccttgaccatgggacatgaaaaggcactctatggggcctctactatgatgtagcagggaytgtgttagcacattgctatagccctgggaagcaagaattcttagcacccattgcccagatgaagaaactcactttcagagagggtaaagaatgtctctgtggtaccacagctatatagtggctaggctggaattcaaaaccaggtttgcctgcctccttctcctgtatgatactgcttcatacacagtccccagaaccttaacg

SEQ ID NO: 639261 - DNA, 510 bp, Homo sapiens
agcaaatctgtggcaaacctgggaaggtgacccaaactccagaccccaagcccggtgcttttttttttttcccagatctatgtctcccccacatctgactctgtttccctgaggtccagagccattccctgttcctttttaggattctcacgacccaggtttaggcacattagttgtccaaagcacacttggcttgctctgacttgagcagtacaatgagctatgtcttagtttcaggcaagaccaccttgaccatgggacatgaaaaggcactctatggggcctctactatgatgtagcagggactgtgttagcacattgctatagccctgggaagcaagaattcttagcacccattgcccagatgaagaaactcactttcagagagggtaaagaatgtctctrtggtaccacagctatatagtggctaggctggaattcaaaaccaggtttgcctgcctccttctcctgtatgatactgcttcatacacagtccccagaaccttaacg

SEQ ID NO: 639262 - DNA, 577 bp, Homo sapiens
aggcaaatatcttaagggtgaaaagtggcatcagtgccttagttacttctttgggtttcacttccattttaaaacttttttagctttttggaactcttattttgtagctcattgacacatttttaagaggttcttgatatgttttccagaagcttaagttgttttcagctggtccttatcagccctactgttggaaataaaattctttcaacttgttctttagcaatgtacaggctccatagagctctcgctgctcctgaggcaacagggtaagaacgccacttaggaatcaggctggcctgagatcaagtctcagatccaccagcagtgtgacatcagtgcctcgctttctttatagggttggtgatatggtttggctctgagtccccagccaaatgtcatgtygaattgtaatttccaattacaattggaaattgaatcttacaattggaaattgattattgaatcataggggtggacatcccccttgctgttcttgtgataggactctcatgagatctggttgtttaatactgtatagtaacttcccctgtgctcctgctgtccatatgaagat

SEQ ID NO: 639263 - DNA, 525 bp, Homo sapiens
ttggctgcttctaacagcatatgctcatatgcattcacaaagagatggtctgaaattggaacttatatttaaaagggaagcagagcataaaagattggaaaatttgcagcctgaccatgtggtagaaaagaaaaaccaaatttctggtaagacattcaactcagctgcaggaatttccataagtaaagaggagcagaatgtgaatagccaagacaatggggaaaatgcctccaggacatttcagagatcttcacagtagcccttcccatcacaggcctgaaagattaggagggaaaaatggtttygtggcctaggcccaggaccccactgttgtgtacagcctcgggacatgtcacccggaatcccagctgctccagctccagctgtggctaaaagggccccagatacatctcaggccactgcatcagagggtgcagccataagaagcctttgtggcttccatgtggttttaagcttacaggtgcaaggaaggcaagagttgaggcttgggagtttccacctaga

SEQ ID NO: 639264 - DNA, 585 bp, Homo sapiens
tatgtgacatcctaaatcataactttatcaaggtttgagtttaaatcgtgctcattatgaagccagaatgggtgagtaattcacataacaagtgtgtgagcctggttaacttccccatgtctgcatttcaaatcagttttggtaatcttacatattacataattttatttaatcttcaaactaatttcattatttcttttctttacaaatgagccaattatgcactataacagtggtgttaattaaggctttctcagtcacaggtaacagaaccacaatcaaattagtttaacaaaagtgggcacttaccatgtaactgggaaagatagtagattggtacaccttcaggtacagctagattcaggtgcccaaacagtgttctcagagttctggctcttccttttgtgttgttgcctctctttgtgtattcatttcattccaaggtagatcttcaaggagaggaatttatgaggtccacagamcaatagattgagatttaaaaagaagactaacccttttcttctccaaatgttcatgtatatgtggcagtacagggtatcatgattggcttagtctgagccatgt

SEQ ID NO: 639265 - DNA, 618 bp, Homo sapiens
tatgacttttcattgttcatgttaaccttgattacttggctatgttggtgacttgatggttycctccactacaaaattacagtttttacttttccatattccatttcttaaaagtcagtcattaagaccaacctgcaagactgggcacagtggctcatgtctgtaattccaggactttgagagaccaaggtgggcagattgcttgagcccagaagttcaaaaccagcctggacaacatggtgaaaccccatctctacaaaggtacaaaaattagccaggtgtggtggagtgcacctgtagtctcagcaatgtgggaggctgaggtgggaggatcacttgagtctgggatgttggggttgcagtgagctgtgattgtgccaatgcacttcggcctggatgacagaggaagaccttatctcaaaaacaaaaacccaaaccacaaaaacaagactaacttgcaagccacatgaggggaattcaacttcaccttaattcaaaatcgccagagtaattaacaaatatttaatgaatttttcattggttatagaattctgggttgataggtttttaaaaagtcttttatgacttcaaaagtgtcacttcgtttcttgcttgcat

SEQ ID NO: 639266 - DNA, 618 bp, Homo sapiens
tatgacttttcattgttcatgttaaccttgattacttggctatgttggtgacttgatggtttcctccactacaaaattacagtttttacttttccatattccatttcttaaaagtcagtcattaagaccaacctgcaagactgggcacagtggctcatgtctgtaattccaggactttgagagaccaaggtgggcagattgcttgagcccagaagttcaaaaccagcctggacaacatggtgaaaccccatctctacaaaggtacaaaaattagccaggtgtggtggagtgcacctgtagtctcagcaatgtgggaggctgaggtgggaggatcacttgagtctgggatgttggggttgcagtgagctgtgattgtgccaatgcacttcggcctggatgacagaggaagaccttatctcaaaaacaaaaacccaaaccacaaaaacaagactaacttgcaagccacatgaggggaattcaacttcaccttaattcaaaatcrccagagtaattaacaaatatttaatgaatttttcattggttatagaattctgggttgataggtttttaaaaagtcttttatgacttcaaaagtgtcacttcgtttcttgcttgcat

SEQ ID NO: 639267 - DNA, 618 bp, Homo sapiens
tatgacttttcattgttcatgttaaccttgattacttggctatgttggtgacttgatggtttcctccactacaaaattacagtttttacttttccatattccatttcttaaaagtcagtcattaagaccaacctgcaagactgggcacagtggctcatgtctgtaattccaggactttgagagaccaaggtgggcagattgcttgagcccagaagttcaaaaccagcctggacaacatggtgaaaccccatctctacaaaggtacaaaaattagccaggtgtggtggagtgcacctgtagtctcagcaatgtgggaggctgaggtgggaggatcacttgagtctgggatgttggggttgcagtgagctgtgattgtgccaatgcacttcggcctggatgacagaggaagaccttatctcaaaaacaaaaacccaaaccacaaaaacaagactaacttgcaagccacatgaggggaattcaacttcaccttaattcaaaatcgccagagtaattaacaaatatttaawgaatttttcattggttatagaattctgggttgataggtttttaaaaagtcttttatgacttcaaaagtgtcacttcgtttcttgcttgcat

SEQ ID NO: 639268 - DNA, 554 bp, Homo sapiens
accttaattcaaaatcgccagagtaattaacaaatatttaatgaatttttcattggttatagaattctgggttgataggtttttaaaaagtcttttatgacttcaaaagtgtcacttcgtttcttgcttgcatggtttctgatatgaaaccattcttaatccattcttaaccttgtttcttgtttgataatgtcttttttcctctagcttcctcaagatgtttctcttttgagaaaaatragagattttcagtttttgtgttgatttctctttgtctctggttttcagcaatttgaacacattccatgtcactttaagagttcttcatcggggtcactggacacatgtgtcacaattaacaaaggggaatacattctccaaatgttttctgtttccccaggaagccagctggaaatacaacaaaatgcctctccctctcctttagcaaaacacatgtcagagcaatgcaagatttgattgggactgctttacttcgttaacattacagtgacctgtttttctttctagtaacaacccagtaatagttattaaat

SEQ ID NO: 639269 - DNA, 416 bp, Homo sapiens
gccactgtccacagaggtttctgggcaagaaaatcaaaaccccaaagatcctgtaacatcatgattggctgtctccacatttacatcatacaattcaattacaaaccactgcaaagcagcacttattgatgaagagctggctcgtgagctgtaagtggacatgccatcagtggtggcaggttgtagcttattaacttgaaatgatactttttttacattcctctctgccctcacrtggtgctaataattgtcataaaagggagtatatgactccaccatgacctcaaaaggcctattcctcatcttaaaggaaaatgtcactttcctggtgctagaaattgtagatatgagagttgctcaagttcatttatagtgaagaaaatttaatagtgtatttatacaagcctaacactatg

SEQ ID NO: 639270 - DNA, 416 bp, Homo sapiens
gccactgtccacagaggtttctgggcaagaaaatcaaaaccccaaagatcctgtaacatcatgattggctgtctccacatttacatcatacaattcaattacaaaccactgcaaagcagcacttattgatgaagagctggctcgtgagctgtaagtggacatgccatcagtggtggcaggttgtagcttattaacttgaaatgatactttttttacattcctctctgccctcacatggtgctaataattgtcataaaagggagtatatgactccaccatgacctcaaaaggcctattccycatcttaaaggaaaatgtcactttcctggtgctagaaattgtagatatgagagttgctcaagttcatttatagtgaagaaaatttaatagtgtatttatacaagcctaacactatg

SEQ ID NO: 639271 - DNA, 416 bp, Homo sapiens
gccactgtccacagaggtttctgggcaagaaaatcaaaaccccaaagatcctgtaacatcatgattggctgtctccacatttacatcatacaattcaattacaaaccactgcaaagcagcacttattgatgaagagctggctcgtgagctgtaagtggacatgccatcagtggtggcaggttgtagcttattaacttgaaatgatactttttttacattcctctctgccctcacatggtgctaataattgtcataaaagggagtatatgactccaccatgacctcaaaaggcctattcctcatcttaaaggaaaatgtcactttcctggtgctagaaattgtagatatgagagttgctcaagttcatttatagtgaagaraatttaatagtgtatttatacaagcctaacactatg

SEQ ID NO: 639272 - DNA, 416 bp, Homo sapiens
gccactgtccacagaggtttctgggcaagaaaatcaaaaccccaaagatcctgtaacatcatgattggctgtctccacatttacatcatacaattcaattacaaaccactgcaaagcagcacttattgatgaagagctggctcgtgagctgtaagtggacatgccatcagtggtggcaggttgtagcttattaacttgaaatgatactttttttacattcctctctgccctcacatggtgctaataattgtcataaaagggagtatatgactccaccatgacctcaaaaggcctattcctcatcttaaaggaaaatgtcactttcctggtgctagaaattgtagatatgagagttgctcaagttcatttatagtgaagaaaakttaatagtgtatttatacaagcctaacactatg

SEQ ID NO: 639273 - DNA, 566 bp, Homo sapiens
agttcatttatagtgaagaaaatttartagtgtatttatacaagcctaacactatgaaatgcatttatttattaaatactatggaaggagctaatggcagtgatccagaaaacatatccttttcagttgagatagaagagcaaaagaaatctctattcctattgcagagaaaaaatagtaaatatatttgctcataacaacataactaaactgtttgtggcttaataaataaaaatatagttatttaaaggtggttcaaggtttcctatataatcttacattccccaaatgtgaatttgcacagtaatgaattaaaaataaaacaaagcaatattacttgtcaattcaatcaaataactttgtaatttagcagaaaataaattgcaccagtttggtttaaagccctaactacacatctatagtttccttaaattaattaaaagaagtcatgcaattttcacagaatatcacatgcatgttatccattttaatttctcttaaaaatgggttagttgccattatcaaactttagacaagaaatcaaacagataaagtaacaatgaaag

SEQ ID NO: 639274 - DNA, 566 bp, Homo sapiens
agttcatttatagtgaagaaaatttaatagtgtatttatacaagcctaacactatgaaatgcatwtatttattaaatactatggaaggagctaatggcagtgatccagaaaacatatccttttcagttgagatagaagagcaaaagaaatctctattcctattgcagagaaaaaatagtaaatatatttgctcataacaacataactaaactgtttgtggcttaataaataaaaatatagttatttaaaggtggttcaaggtttcctatataatcttacattccccaaatgtgaatttgcacagtaatgaattaaaaataaaacaaagcaatattacttgtcaattcaatcaaataactttgtaatttagcagaaaataaattgcaccagtttggtttaaagccctaactacacatctatagtttccttaaattaattaaaagaagtcatgcaattttcacagaatatcacatgcatgttatccattttaatttctcttaaaaatgggttagttgccattatcaaactttagacaagaaatcaaacagataaagtaacaatgaaag

SEQ ID NO: 639275 - DNA, 566 bp, Homo sapiens
agttcatttatagtgaagaaaatttaatagtgtatttatacaagcctaacactatgaaatgcatttatttattaaatactatggaaggagcyaatggcagtgatccagaaaacatatccttttcagttgagatagaagagcaaaagaaatctctattcctattgcagagaaaaaatagtaaatatatttgctcataacaacataactaaactgtttgtggcttaataaataaaaatatagttatttaaaggtggttcaaggtttcctatataatcttacattccccaaatgtgaatttgcacagtaatgaattaaaaataaaacaaagcaatattacttgtcaattcaatcaaataactttgtaatttagcagaaaataaattgcaccagtttggtttaaagccctaactacacatctatagtttccttaaattaattaaaagaagtcatgcaattttcacagaatatcacatgcatgttatccattttaatttctcttaaaaatgggttagttgccattatcaaactttagacaagaaatcaaacagataaagtaacaatgaaag

SEQ ID NO: 639276 - DNA, 566 bp, Homo sapiens
agttcatttatagtgaagaaaatttaatagtgtatttatacaagcctaacactatgaaatgcatttatttattaaatactatggaaggagctaatggcagtgatccagaaaacatatccttttcagttgagatagaagagcaaaagaaatctctattcctattgcagagaaaaaatagtaaatatatttgctcataacaacataactaaactgtttgtggcttaataaataaaaatatagttatttaaaggtggttcaaggtttcctatataatcttacattccccaaatgtgaatttgcacagtaaygaattaaaaataaaacaaagcaatattacttgtcaattcaatcaaataactttgtaatttagcagaaaataaattgcaccagtttggtttaaagccctaactacacatctatagtttccttaaattaattaaaagaagtcatgcaattttcacagaatatcacatgcatgttatccattttaatttctcttaaaaatgggttagttgccattatcaaactttagacaagaaatcaaacagataaagtaacaatgaaag

SEQ ID NO: 639277 - DNA, 421 bp, Homo sapiens
tttagtttttaagaaactgccaaactgtcttcccatgtgactgcaccattttgcattcccactagtaatgaaagagttttggttgcttygcatccttgccagcatacagcactgtcagttttttggagtttagtcatgctaatagttgtatagaggtatctcattgttgttttaattttcaattcctttttaaataatttcaacttttattttagattcagggggttcatgtgcaggtctgttacctgggtatattgtgtgatactgaggtttgaggtatgattgctcccatcactcaggtactgcgcatagtacctaatggtttttcaacccttccctcatctactccccgccagtagtccccagtgtcagttgttgccatctttatgtccctaagtacccagtgtttagctcccagtta

SEQ ID NO: 639278 - DNA, 421 bp, Homo sapiens
tttagtttttaagaaactgccaaactgtcttcccatgtgactgcaccattttgcattcccactagtaatgaaagagttttggttgcttcgcatccttgccagcatacagcactgtcagttttttggagtttagtcatgctaatagttgtatagaggtatctcattgttgttttaatttkcaattcctttttaaataatttcaacttttattttagattcagggggttcatgtgcaggtctgttacctgggtatattgtgtgatactgaggtttgaggtatgattgctcccatcactcaggtactgcgcatagtacctaatggtttttcaacccttccctcatctactccccgccagtagtccccagtgtcagttgttgccatctttatgtccctaagtacccagtgtttagctcccagtta

SEQ ID NO: 639279 - DNA, 421 bp, Homo sapiens
tttagtttttaagaaactgccaaactgtcttcccatgtgactgcaccattttgcattcccactagtaatgaaagagttttggttgcttcgcatccttgccagcatacagcactgtcagttttttggagtttagtcatgctaatagttgtatagaggtatctcattgttgttttaattttcaattcctttttaaataatttcaacttttattttagattcagggggttcatgtgcaggtctgttacctgggtatattgtgtgatactgaggtttgaggtatgattgctcccatcacycaggtactgcgcatagtacctaatggtttttcaacccttccctcatctactccccgccagtagtccccagtgtcagttgttgccatctttatgtccctaagtacccagtgtttagctcccagtta

SEQ ID NO: 639280 - DNA, 439 bp, Homo sapiens
catgggtcaatttgtcctaaatttgtccaggccctaagggatgctgtgacccagatgaggcccatgtctcaatccattctgggattccaggactagtccttggtaaaattgtggaaggcaaagagagatgggtcttgtctttactctgatatcactgttagctgcaactcttatacacacacacacacacacacacacacacacacaycctgttaggctgccttacccatatcaaatctttcctatcatattttttcacatcagtactcattagaggtcactggcacctgactccattatctcccatcccccattcattagggttttcaagagtctgctaaatgacactcacagctacaggataactataaatcttttcaaacttttctttgcttagagacttttgaaaaacatatttatattaaaattggcataagaa

SEQ ID NO: 639281 - DNA, 439 bp, Homo sapiens
catgggtcaatttgtcctaaatttgtccaggccctaagggatgctgtgacccagatgaggcccatgtctcaatccattctgggattccaggactagtccttggtaaaattgtggaaggcaaagagagatgggtcttgtctttactctgatatcactgttagctgcaactcttatacacacacacacacacacacacacacacacacaccctgttaggctgccttacccatatcaaatmtttcctatcatattttttcacatcagtactcattagaggtcactggcacctgactccattatctcccatcccccattcattagggttttcaagagtctgctaaatgacactcacagctacaggataactataaatcttttcaaacttttctttgcttagagacttttgaaaaacatatttatattaaaattggcataagaa

SEQ ID NO: 639282 - DNA, 622 bp, Homo sapiens
tttcacatcagtactcattagaggtcactggcacctgactccattatctcccatcccccattcattagggttttcaagagtctgctaaatgacactcacagctacaggataactataaatcttttcaaacttttctttgcttagagacttttgaaaaacatayttatattaaaattggcataagaaagatgttttagccatatttataaacatatagaaatttgagtaggtgacaaatcatccataaacctaatatccctaataagggaaaccaagtaaaaagacctttacatagtgttcaatatagatttgcctatattttatagcaccttccaaacctctaatcttattaaggttttctgtagtcaaacaagaataatagattctgctattaagtggttctgtgacctgcctaaggcacttagcctctccagaattgcctcagtttacccaaatacaagaggtggacttcagaatctctaaaaatttcatcaagccataaaacagatgatataattcatgagaaaggaggagctcaagaagggaaggtgtgagatcatctgtaatttgcttgtaaatgcctccatataggtattacactgtatacagcctgcagggggac

SEQ ID NO: 639283 - DNA, 586 bp, Homo sapiens
tatttatattaaaattggcataagaaagatgttttagccatatttataaacatatagaaatttgagtaggtgacaaatcatccataaacctratatccctaataagggaaaccaagtaaaaagacctttacatagtgttcaatatagatttgcctatattttatagcaccttccaaacctctaatcttattaaggttttctgtagtcaaacaagaataatagattctgctattaagtggttctgtgacctgcctaaggcacttagcctctccagaattgcctcagtttacccaaatacaagaggtggacttcagaatctctaaaaatttcatcaagccataaaacagatgatataattcatgagaaaggaggagctcaagaagggaaggtgtgagatcatctgtaatttgcttgtaaatgcctccatataggtattacactgtatacagcctgcagggggactataatccacaccctgggggaggttaaatagtatgcaaagtattctgaaaaggaatacacactccaatagcagttagttagtatttgaaagatcctaatcaaaagtctctactggagaaatatc

SEQ ID NO: 639284 - DNA, 586 bp, Homo sapiens
tatttatattaaaattggcataagaaagatgttttagccatatttataaacatatagaaatttgagtaggtgacaaatcatccataaacctaatatccctaataagggaaaccaagtaaaaagacctttacatagtgttcaatatagatttgcctatattttatagcaccttccaaacctctaatcttattaaggttttctgtagtcaaacaagaataatagattctgctattaagtggytctgtgacctgcctaaggcacttagcctctccagaattgcctcagtttacccaaatacaagaggtggacttcagaatctctaaaaatttcatcaagccataaaacagatgatataattcatgagaaaggaggagctcaagaagggaaggtgtgagatcatctgtaatttgcttgtaaatgcctccatataggtattacactgtatacagcctgcagggggactataatccacaccctgggggaggttaaatagtatgcaaagtattctgaaaaggaatacacactccaatagcagttagttagtatttgaaagatcctaatcaaaagtctctactggagaaatatc

SEQ ID NO: 639285 - DNA, 586 bp, Homo sapiens
tatttatattaaaattggcataagaaagatgttttagccatatttataaacatatagaaatttgagtaggtgacaaatcatccataaacctaatatccctaataagggaaaccaagtaaaaagacctttacatagtgttcaatatagatttgcctatattttatagcaccttccaaacctctaatcttattaaggttttctgtagtcaaacaagaataatagattctgctattaagtggttctgtgacctgcctaaggcacttagcctctccagaattgcctcagtttacccaaatacaagaggtggacttcagaatctctaaaaatttcatcaagccataaaacagatgatataattcatgagaaaggaggagctcaagaagggaaggtgtgagatcatctgtaatttgcttgtaaatgyctccatataggtattacactgtatacagcctgcagggggactataatccacaccctgggggaggttaaatagtatgcaaagtattctgaaaaggaatacacactccaatagcagttagttagtatttgaaagatcctaatcaaaagtctctactggagaaatatc

SEQ ID NO: 639286 - DNA, 353 bp, Homo sapiens
ggaaaagaattcagcaatatctctcctacttgcacatctgtttatacgctctctgcaagaagaaaaatacagttctattctgcctgaccctgcaggcagtcagaccttatggttatcttcccttgttccctgaaaatcgctgttattctgttctttttcaaggtgcactgatttcacattgttcaaacacacatgttttacaatctatttgtacaatagtggtcctgaggtgacatacattctcagcttatgaagataaygggattaagagagtaaagacagacataagaaattataaaactattattagggaagtgataaatgtccatgaaatcttcacaatttatgttcag

SEQ ID NO: 639287 - DNA, 353 bp, Homo sapiens
ggaaaagaattcagcaatatctctcctacttgcacatctgtttatacgctctctgcaagaagaaaaatacagttctattctgcctgaccctgcaggcagtcagaccttatggttatcttcccttgttccctgaaaatcgctgttattctgttctttttcaaggtgcactgatttcacattgttcaaacacacatgttttacaatctatttgtacaatagtggtcctgaggtgacatacattctcagcttatgaagataacgggattaagagagtaaagacagacataagaaattataaractattattagggaagtgataaatgtccatgaaatcttcacaatttatgttcag

SEQ ID NO: 639288 - DNA, 688 bp, Homo sapiens
agacagacataagaaattataaaactattattagggaagtgataaatgtccatgaaatcttcacaatttatgttcagagactgcagtaaagacaggtgtaagaaattataaaagtagyaattttgggaactgatacatggccatgaaatcttcacaattgatgttcttctgccgcagctccagctggtccctccgtttggagtccctgacttcccacaacaatggttaacaaatatgaatgtgtagcagaatttagttcaaatcttgattcattttaacataatcagagagggggttagagttcccatccacttctaattatcagaggctccagatattactgaaagaacctgacatttgtgaatggccagattggctcagctcagttcacagaaggaaaggatacagatggggatgtatcaaggatatggtgtgggaagcatgagacattttcaaaatttcaagccactatgacttattcccactatgtaagattaaagaagtcagacactcagattcagggaggatttcccacatttttcatgttgctcatctaaatcccaaattccatactgcctagagattatgaaatgcttaatttctacccactccccatcctacatgcccactttgccatcaccatcccaacacctcaaaagaataaagtatctgctagtcctcctggaat

SEQ ID NO: 639289 - DNA, 688 bp, Homo sapiens
agacagacataagaaattataaaactattattagggaagtgataaatgtccatgaaatcttcacaatttatgttcagagactgcagtaaagacaggtgtaagaaattataaaagtagtaattttgggaactgatacatggccatgaaatcttcacaattgatgttcttctgccgcagctccagctggtccctccgttyggagtccctgacttcccacaacaatggttaacaaatatgaatgtgtagcagaatttagttcaaatcttgattcattttaacataatcagagagggggttagagttcccatccacttctaattatcagaggctccagatattactgaaagaacctgacatttgtgaatggccagattggctcagctcagttcacagaaggaaaggatacagatggggatgtatcaaggatatggtgtgggaagcatgagacattttcaaaatttcaagccactatgacttattcccactatgtaagattaaagaagtcagacactcagattcagggaggatttcccacatttttcatgttgctcatctaaatcccaaattccatactgcctagagattatgaaatgcttaatttctacccactccccatcctacatgcccactttgccatcaccatcccaacacctcaaaagaataaagtatctgctagtcctcctggaat

SEQ ID NO: 639290 - DNA, 688 bp, Homo sapiens
agacagacataagaaattataaaactattattagggaagtgataaatgtccatgaaatcttcacaatttatgttcagagactgcagtaaagacaggtgtaagaaattataaaagtagtaattttgggaactgatacatggccatgaaatcttcacaattgatgttcttctgccgcagctccagctggtccctccgtttrgagtccctgacttcccacaacaatggttaacaaatatgaatgtgtagcagaatttagttcaaatcttgattcattttaacataatcagagagggggttagagttcccatccacttctaattatcagaggctccagatattactgaaagaacctgacatttgtgaatggccagattggctcagctcagttcacagaaggaaaggatacagatggggatgtatcaaggatatggtgtgggaagcatgagacattttcaaaatttcaagccactatgacttattcccactatgtaagattaaagaagtcagacactcagattcagggaggatttcccacatttttcatgttgctcatctaaatcccaaattccatactgcctagagattatgaaatgcttaatttctacccactccccatcctacatgcccactttgccatcaccatcccaacacctcaaaagaataaagtatctgctagtcctcctggaat

SEQ ID NO: 639291 - DNA, 688 bp, Homo sapiens
agacagacataagaaattataaaactattattagggaagtgataaatgtccatgaaatcttcacaatttatgttcagagactgcagtaaagacaggtgtaagaaattataaaagtagtaattttgggaactgatacatggccatgaaatcttcacaattgatgttcttctgccgcagctccagctggtccctccgtttggagtccctgacttcccacaacaatggttaacaaatatgaatgtgtagcagaatttagttcaaatcttgattcattttaacataatcagagagggggttagagttcccatccacttctaattatcagaggctccagatattactgaaagaacctgacatttgtgaatggccagattggctcagctcagttcacagaaggaaaggatrcagatggggatgtatcaaggatatggtgtgggaagcatgagacattttcaaaatttcaagccactatgacttattcccactatgtaagattaaagaagtcagacactcagattcagggaggatttcccacatttttcatgttgctcatctaaatcccaaattccatactgcctagagattatgaaatgcttaatttctacccactccccatcctacatgcccactttgccatcaccatcccaacacctcaaaagaataaagtatctgctagtcctcctggaat

SEQ ID NO: 639292 - DNA, 334 bp, Homo sapiens
tcattgctgattgggtatagaaactttagcttttttttttcttttttttttttttccacttgatctatcttggaacttccttgccccagctagatttttatctccttaggaactatggaaagaaagcatatctaaaaatacttctttaaagttctctgataccttctgtttgttaatatgataatgttgtacataaatagctataaaatatactgttaaacttaaaagatctgggaaagagcttttgaacacccccaaccttcaacacacacatgcacacccacaygtacatacaataccagatacaaagaaggtgctaactcaatatttatta

SEQ ID NO: 639293 - DNA, 511 bp, Homo sapiens
aggaaagcaaatgctgtgaagccgggctgcctrgaagtacctttatttgaaatctttaacaagatcttaaaagagtaatgacactactgtgtctaatgaaaaatgagtatttgattctaacatattcaacctaagaatttcatcatatatatttgatctgcaatataaatgagagtttctatatcttattcattcatttattgttttattcattcaaccattgttgagtgcccacaatgtgccagccatgcatctaggcacgtggccagcatggtcaataacaacatgtgcctgccctcatggggcttacagtctataggaaagacagtcaatcaaacaagtggtttacaatgaagtatgatgaatgttgtcacaggacacactagatacattaggagcacatagcagagtaacagaattatgtggggcagaaagatgacaagggtcacacatggggctggaggccttagaccttggaggtcctatccaaagcaaggctgataaaaaagct

SEQ ID NO: 639294 - DNA, 511 bp, Homo sapiens
aggaaagcaaatgctgtgaagccgggctgcctagaagtacctttatttgaaatctttaacaagatcttaaaagagtaatgacastactgtgtctaatgaaaaatgagtatttgattctaacatattcaacctaagaatttcatcatatatatttgatctgcaatataaatgagagtttctatatcttattcattcatttattgttttattcattcaaccattgttgagtgcccacaatgtgccagccatgcatctaggcacgtggccagcatggtcaataacaacatgtgcctgccctcatggggcttacagtctataggaaagacagtcaatcaaacaagtggtttacaatgaagtatgatgaatgttgtcacaggacacactagatacattaggagcacatagcagagtaacagaattatgtggggcagaaagatgacaagggtcacacatggggctggaggccttagaccttggaggtcctatccaaagcaaggctgataaaaaagct

SEQ ID NO: 639295 - DNA, 511 bp, Homo sapiens
aggaaagcaaatgctgtgaagccgggctgcctagaagtacctttatttgaaatctttaacaagatcttaaaagagtaatgacactactgtgtctaatgaaaaatgagtatttgattctaacatattcaacctaagaatttcatmatatatatttgatctgcaatataaatgagagtttctatatcttattcattcatttattgttttattcattcaaccattgttgagtgcccacaatgtgccagccatgcatctaggcacgtggccagcatggtcaataacaacatgtgcctgccctcatggggcttacagtctataggaaagacagtcaatcaaacaagtggtttacaatgaagtatgatgaatgttgtcacaggacacactagatacattaggagcacatagcagagtaacagaattatgtggggcagaaagatgacaagggtcacacatggggctggaggccttagaccttggaggtcctatccaaagcaaggctgataaaaaagct

SEQ ID NO: 639296 - DNA, 529 bp, Homo sapiens
caacctaagaatttcatcatatatatttgatctgcaatataaatgagagtttctatatcttattcattcatttattgttttattcattcaaccattgttgagtgcccacaatgtgccagccatgcatctaggcacgtggccagcatggtcaataacaacatgtgcctgccctcatggggcttacagtctataggaaagacagtcaatcaaacaagtggtttacaatgaagtatgatgaatgttgtcacaggacacactagatacattaggagcacatagcagagtaacagaattatgtggggcagaaagatgacaagggtcacacatggggctggaggccttagaccttggaggtcctatccaaagcaaggctgayaaaaaagctgccccaaactgcactgaccattggaaggtaaggcctgcatggaggaggtgctgctgtggtctggccaatgccagcaggcaggtcacttccttggcctttgggaaaggatggcgatgatggagaagctcaagaagatcacaccag

SEQ ID NO: 639297 - DNA, 529 bp, Homo sapiens
caacctaagaatttcatcatatatatttgatctgcaatataaatgagagtttctatatcttattcattcatttattgttttattcattcaaccattgttgagtgcccacaatgtgccagccatgcatctaggcacgtggccagcatggtcaataacaacatgtgcctgccctcatggggcttacagtctataggaaagacagtcaatcaaacaagtggtttacaatgaagtatgatgaatgttgtcacaggacacactagatacattaggagcacatagcagagtaacagaattatgtggggcagaaagatgacaagggtcacacatggggctggaggccttagaccttggaggtcctatccaaagcaaggctgataaaaaagctgccccaaactgcactgaccattggaaggtaaggcctgcatggaggaggtgctgctgtggtctggccaatgccarcaggcaggtcacttccttggcctttgggaaaggatggcgatgatggagaagctcaagaagatcacaccag

SEQ ID NO: 639298 - DNA, 529 bp, Homo sapiens
caacctaagaatttcatcatatatatttgatctgcaatataaatgagagtttctatatcttattcattcatttattgttttattcattcaaccattgttgagtgcccacaatgtgccagccatgcatctaggcacgtggccagcatggtcaataacaacatgtgcctgccctcatggggcttacagtctataggaaagacagtcaatcaaacaagtggtttacaatgaagtatgatgaatgttgtcacaggacacactagatacattaggagcacatagcagagtaacagaattatgtggggcagaaagatgacaagggtcacacatggggctggaggccttagaccttggaggtcctatccaaagcaaggctgataaaaaagctgccccaaactgcactgaccattggaaggtaaggcctgcatggaggaggtgctgctgtggtctggccaatgccagcaggcaggtcacttccttggcctttgggaaaggatggcratgatggagaagctcaagaagatcacaccag

SEQ ID NO: 639299 - DNA, 629 bp, Homo sapiens
gcctggtcccatttcaagtgctgtatatggaccaactaatttaaccctgcaacaacttttgaggtggaggctattacttggccattctcatcatcttcatcttacaggaaggttaaataatttgctcaaggtcccattgttagtaagcatttcacacttgaaatctaatcccaaaaggtatgcctccagatccaggcttctcagccacctaggattcaggaggayggtctgagacacttaaaggaatacattgcctgacactggctaagaatacaagctacaaaggaaattccccagatacagtctgacttagagcatcagtggtagcttgaaaacgtctaaataatattaaataaaatgttactgtaaggttagtgtgtactgtcactatctcacaaggttgccctgaagttcacctgagataatgaggacactgtacctatcaaggtatttgacacagagtaagcacataatggccagcccttagttttgtttcttaatgttatctggtataaagatgaattaatctcataaccaaggcatataacttgtagtgtctcatccatacctttgtaaaaattccagcctttgtttcaaacattcccactagaaggtctactcagcagaat

SEQ ID NO: 639300 - DNA, 629 bp, Homo sapiens
gcctggtcccatttcaagtgctgtatatggaccaactaatttaaccctgcaacaacttttgaggtggaggctattacttggccattctcatcatcttcatcttacaggaaggttaaataatttgctcaaggtcccattgttagtaagcatttcacacttgaaatctaatcccaaaaggtatgcctccagatccaggcttctcagccacctaggattcaggaggacggtctgagacacttaaaggaatacattgcctgacactggctaagaatacaagctacaaaggaaattccccagatacagtctgacttagagcatcagtggtagcttgaaaacgtctaaataatattaaataaaatgttactgtaaggttagtgtgtactgtcactatctcacaaggttgccctgaagttcacctgagataatgaggacaytgtacctatcaaggtatttgacacagagtaagcacataatggccagcccttagttttgtttcttaatgttatctggtataaagatgaattaatctcataaccaaggcatataacttgtagtgtctcatccatacctttgtaaaaattccagcctttgtttcaaacattcccactagaaggtctactcagcagaat

SEQ ID NO: 639301 - DNA, 629 bp, Homo sapiens
gcctggtcccatttcaagtgctgtatatggaccaactaatttaaccctgcaacaacttttgaggtggaggctattacttggccattctcatcatcttcatcttacaggaaggttaaataatttgctcaaggtcccattgttagtaagcatttcacacttgaaatctaatcccaaaaggtatgcctccagatccaggcttctcagccacctaggattcaggaggacggtctgagacacttaaaggaatacattgcctgacactggctaagaatacaagctacaaaggaaattccccagatacagtctgacttagagcatcagtggtagcttgaaaacgtctaaataatattaaataaaatgttactgtaaggttagtgtgtactgtcactatctcacaaggttgccctgaagttcacctgagataatgaggacactgtacctatcaaggtatttgacacagagtaagcacataatggccagcccttagttttgtttcttaatgttatctggtataaagaygaattaatctcataaccaaggcatataacttgtagtgtctcatccatacctttgtaaaaattccagcctttgtttcaaacattcccactagaaggtctactcagcagaat

SEQ ID NO: 639302 - DNA, 582 bp, Homo sapiens
gttcctgtttctctagttccctgagatgtgaacttagattgtctgtttgtgctctttcaggctttttgacgtcggtgtttagcgctacaaactttcctcttagcactgcctttgctgtatcccataggtggtgataggttgtgtcatccagtttgaagaaattttttatatttccatcgtgatttcgtttttcacccaatgctcattcaggagcaggttatttaaattccatgtatttgcatggttttgaagattccttttggagtcgattttcagttttattccactgtgatctgagacagtgcgtgatagaatttcagttttcttcaatttactgagactcgttttatggcctatcatatggtctatcttggagaaaattccatgtgctgtggaatagaatgtgtattctgtggttgttggatgaaatgttctgtatgtatctgttaagtccrtttgttccaaagtgtagtttaaatccagtgtttctttgttgactttctctcttgatgacctgtctagtgctgtcagtggagtattgaagtcccccactattatcgtgttgctgtctatctcatttct

SEQ ID NO: 639303 - DNA, 573 bp, Homo sapiens
agcctgtttcagatcagcaagagcactggggtcctcacgccactctgggggcctcacttgggattttgatctcaccactgtgttcccagggaccaaccttgtgttccatatcgtatttgccatcctcaatgtcttccaggtgagttttacagtgcgggactttcaggaagattttattcctgtaggacaaattaatgatagaaacacaaacaagagtaggaatggggaaggatttcagcccagaggaagcctcagctctaaagattagtaataatgagaattcaatgagatggaaagaacacattcttctgatcctatggaacctcatgctttttatcacctacattataatttagtgtcatttcccagtctctgctaaataccctgattacaccagtaaaaggaaaatccccatttgtctaagattatcttgatgcagtctattatctcctaaatgaaaatcctgtctttgtgaggacagggattgcccttttcttgttcatcastatacctctatgcctgatagagaccttggtacagagtaggttctcaataatcatttgaatgaaataa

SEQ ID NO: 639304 - DNA, 392 bp, Homo sapiens
cattcttctgatcctatggaacctcatgctttttatcacctacattataatttagtgtcatttcccagtctctgctaaataccctgattacaccagtaaaaggaaaatccccatttgtctaagattatcttgatgcagtctattatctcctaaatgaaaatcctgtctttgtgaggacagggattgcccttttcttgttcatcactatacctctatgcctgatagagaccttggtacagagtaggttctcaataatcatttgaatgaaataaatcctrtgtaccacatagcagcttctctggaaacatcaaaaatcaaagaacgaatgtcctgtgaatgccagacaatctgcttgattgtactacaatgaaaaaacatcttctttgctctcc

SEQ ID NO: 639305 - DNA, 611 bp, Homo sapiens
aagactgccagccattattccagaggtcatgagatatgcacacctgtaagtcaccagtcagcaggagctataatcttggaaggccagagctacaaccagacatgtgctcaggagaaaggggactgcagcagggasaagagtgggcagcaggaaaaatgtatctctgcctcccaggttcaagcgattctcctgcttcagcctcccaagtagctgggattgcaggcactttgggaggctgagacagatggatcacctgaggtcaggagttcaagacctgcctgactaacatgatgaaaccccatctctactaaaaatacaggcttaagatttaaaataaaataaaataaaatagtaaacatccctgccagcctgctgaattgaccttagagagtagggtgtgtagtgggtgtgactctcactgtcaccattgctaagtgcttactgacatctttcagtcttggggacccatcctctgctaaactctgccataagaaggtcatacatccccactgcctgtgatgtctcagttttgttttctcgtttcctcttacctttatgcaatcagtttctaggaagatgttgtttttttcttttttatgattgaaagaatt

SEQ ID NO: 639306 - DNA, 580 bp, Homo sapiens
cactctcaggccttcatctgcctgctgacggtccaaaaacgtcttgcttcaggagcacaggttggagttagaagtgaaattagagkaaaattagaagattttaaactattatttccccagaaccgcacagaatcggcagctacattaaatttcttacccacagagctgattttagaaatacataactgcagacatgtttaatggtgactgtcccgttaaaaggtaatagggatgcatgtgtccccattaaaggacttgccttgttccattaaaaggtaatggggatgcatgtgtgtgtgtgtacatgtgtgtgtgttattatccaccaaaaagcagcaaaagttttttatatatattttaaagaaaataataggagaagggttttgtcatgctatacttagaattctgaacatcataactcttattacaatgtatgttttaaggttaaaaacagtattatttaatgtggaaaaccttggtaaatgacattctatttataatatatattttatattcataattatgttatattcttatatgcaatattcaacactaatataatttgttttatggtacacct

SEQ ID NO: 639307 - DNA, 580 bp, Homo sapiens
cactctcaggccttcatctgcctgctgacggtccaaaaacgtcttgcttcaggagcacaggttggagttagaagtgaaattagaggmaaattagaagattttaaactattatttccccagaaccgcacagaatcggcagctacattaaatttcttacccacagagctgattttagaaatacataactgcagacatgtttaatggtgactgtcccgttaaaaggtaatagggatgcatgtgtccccattaaaggacttgccttgttccattaaaaggtaatggggatgcatgtgtgtgtgtgtacatgtgtgtgtgttattatccaccaaaaagcagcaaaagttttttatatatattttaaagaaaataataggagaagggttttgtcatgctatacttagaattctgaacatcataactcttattacaatgtatgttttaaggttaaaaacagtattatttaatgtggaaaaccttggtaaatgacattctatttataatatatattttatattcataattatgttatattcttatatgcaatattcaacactaatataatttgttttatggtacacct

SEQ ID NO: 639308 - DNA, 447 bp, Homo sapiens
tggttttcacagaaaaaaaggagaaaaaacattaagcatctcaggcaagaaagggatgggaaaagcgtgatttgggtgaagcttagtagtgaagtaaatgtcacatggtagcctaagaagctgaggacaattttcacttgcatgacaatttttagtagagttgyttagtaactttaaaaacagatttaatacattttttctcttaaaaaaatctacagcaagaaatccagaaaccaatacaatttctatcatttcaatccagaattctttcaattgtttcaggttatggaggcattggcccataaaatattttgcccgataatgttttccaaaaagggaaatcttttctgctctcatcaacaacaaaatgtctggaagaaaaaggaaatattaaggaataaaaatttggctgaagagcctctctacttaaaggaatgaaaggtgttt

SEQ ID NO: 639309 - DNA, 447 bp, Homo sapiens
tggttttcacagaaaaaaaggagaaaaaacattaagcatctcaggcaagaaagggatgggaaaagcgtgatttgggtgaagcttagtagtgaagtaaatgtcacatggtagcctaagaagctgaggacaattttcacttgcatgacaatttttagtagagttgcttagtaactttaaaaacagatttaatacattttttctcttaaaaaaatctacagcaagaaatccagaarccaatacaatttctatcatttcaatccagaattctttcaattgtttcaggttatggaggcattggcccataaaatattttgcccgataatgttttccaaaaagggaaatcttttctgctctcatcaacaacaaaatgtctggaagaaaaaggaaatattaaggaataaaaatttggctgaagagcctctctacttaaaggaatgaaaggtgttt

SEQ ID NO: 639310 - DNA, 447 bp, Homo sapiens
tggttttcacagaaaaaaaggagaaaaaacattaagcatctcaggcaagaaagggatgggaaaagcgtgatttgggtgaagcttagtagtgaagtaaatgtcacatggtagcctaagaagctgaggacaattttcacttgcatgacaatttttagtagagttgcttagtaactttaaaaacagatttaatacattttttctcttaaaaaaatctacagcaagaaatccagaaaccaatamaatttctatcatttcaatccagaattctttcaattgtttcaggttatggaggcattggcccataaaatattttgcccgataatgttttccaaaaagggaaatcttttctgctctcatcaacaacaaaatgtctggaagaaaaaggaaatattaaggaataaaaatttggctgaagagcctctctacttaaaggaatgaaaggtgttt

SEQ ID NO: 639311 - DNA, 545 bp, Homo sapiens
atccagaattctttcaattgtttcaggttatggaggcattggcccataaaatattttgcycgataatgttttccaaaaagggaaatcttttctgctctcatcaacaacaaaatgtctggaagaaaaaggaaatattaaggaataaaaatttggctgaagagcctctctacttaaaggaatgaaaggtgtttcaaaaagttactaacaataagcacaaaaacaattaaacattaaatatagaaacaaaagaaatatttcatgattttccgtagctcttattggcaatcaaaaaccagaaaacaaaagcagcaggggggaatgcaagaataaatgaagtgcagagaaagggcaaacatgagtaaatagtaatgaaagctttttaaaactacaataatatcttgtagaaatataaaatgcaataaaaaagtgtattacaacaatggcacaagggtgagagatacacaaatacatggaagtaaacttgtaaggatcttgcattctttgggaagtggccaaagtactaataacttaagagaacatattgt

SEQ ID NO: 639312 - DNA, 545 bp, Homo sapiens
atccagaattctttcaattgtttcaggttatggaggcattggcccataaaatattttgccygataatgttttccaaaaagggaaatcttttctgctctcatcaacaacaaaatgtctggaagaaaaaggaaatattaaggaataaaaatttggctgaagagcctctctacttaaaggaatgaaaggtgtttcaaaaagttactaacaataagcacaaaaacaattaaacattaaatatagaaacaaaagaaatatttcatgattttccgtagctcttattggcaatcaaaaaccagaaaacaaaagcagcaggggggaatgcaagaataaatgaagtgcagagaaagggcaaacatgagtaaatagtaatgaaagctttttaaaactacaataatatcttgtagaaatataaaatgcaataaaaaagtgtattacaacaatggcacaagggtgagagatacacaaatacatggaagtaaacttgtaaggatcttgcattctttgggaagtggccaaagtactaataacttaagagaacatattgt

SEQ ID NO: 639313 - DNA, 611 bp, Homo sapiens
aagactgccagccattattccagaggtcatgagatatgcacacctgtaagtcaccagtcagcaggagctataatcttggaaggccagagctacaaccagacatgtgctcaggagaaaggggactgcagcagggagaagagtgggcagcaggaaaaatgtatctctgcctcccaggttcaagcgattctcmtgcttcagcctcccaagtagctgggattgcaggcactttgggaggctgagacagatggatcacctgaggtcaggagttcaagacctgcctgactaacatgatgaaaccccatctctactaaaaatacaggcttaagatttaaaataaaataaaataaaatagtaaacatccctgccagcctgctgaattgaccttagagagtagggtgtgtagtgggtgtgactctcactgtcaccattgctaagtgcttactgacatctttcagtcttggggacccatcctctgctaaactctgccataagaaggtcatacatccccactgcctgtgatgtctcagttttgttttctcgtttcctcttacctttatgcaatcagtttctaggaagatgttgtttttttcttttttatgattgaaagaatt

SEQ ID NO: 639314 - DNA, 628 bp, Homo sapiens
ttggatgcctctaggatctgaaggtaagagcaatgacagtttcatgtttctagaaaagcgtgaagtgcttctggcatgttgaagttacgatagcttctttttaacaatgcaggtacaggaagctttgctgaataagttttcattgtcgagatggtcttcacagcactcaaaggtaaaccttttctctgcagagacttttcattttataacctcatgtattccactagcattctgaagtacagagtactaaattttttcttcaggattttgatcaattagkctaaatatattgcatcctcaaacccatctccctcaacagctatatttggcatagatcattcaattgtttttgcttctcaagtcattctgcctattaaacagagccatagagctgtcattgagatgctactccacatacttaaatagggtttaaaataatatatgatataaactgaaggttgaaatcaaatgttcaatgagaagcagtcttctggggggattcaaggcattagagaaaacaagttgaagaataataatggataaaattttctatagctcattttggaacataactattgcccttggatatatctgactgcctttcacatgtcagaaaatactagaagcc

SEQ ID NO: 639315 - DNA, 587 bp, Homo sapiens
aatgcactgggtggcctccgaaggccttggaaagttctgcccctgtagctttgcagcatacagcccccacggctgctttcacaggctggaattgagtgcctgtggcttttccaagcacatggtgcaaactgtcagcagatctaccattctgggatctggaggacagtggccctcttctcatagtttcactaggcagtgccccagtggggactctgcgtggggcctccatccccacatttccctcctgcactgccctactagatgatctccatgaggtctccacccctgcagcagacttctccctggacatccacacatcyccttaaacctaggtagaggctcccaaacctcaactcttgccttctgcacacctgcaggcccaacacaatgtggaagtcaccaaggcttggggcttacaccctctgaagcaatggacaagctgtatcttgccccttttagccaatgctgcagctgaagtctccatgatgcagggtgccatgtccctaggctgcacagagcagtgggtccctgagcctggcccacaaaaccatttttgcgtccaggcctgtgatgggaggggttgcctt

SEQ ID NO: 639316 - DNA, 587 bp, Homo sapiens
aatgcactgggtggcctccgaaggccttggaaagttctgcccctgtagctttgcagcatacagcccccacggctgctttcacaggctggaattgagtgcctgtggcttttccaagcacatggtgcaaactgtcagcagatctaccattctgggatctggaggacagtggccctcttctcatagtttcactaggcagtgccccagtggggactctgcgtggggcctccatccccacatttccctcctgcactgccctactagatgatctccatgaggtctccacccctgcagcagacttctccctggacatccacacatccccttaaacctaggtagaggctcccaaacctcaactcttgccttctgcacacctgcaggcccaacacaatgtggaagtcaccaaggcttggggcttacaccctctgaagcaatggacaagctgyatcttgccccttttagccaatgctgcagctgaagtctccatgatgcagggtgccatgtccctaggctgcacagagcagtgggtccctgagcctggcccacaaaaccatttttgcgtccaggcctgtgatgggaggggttgcctt

SEQ ID NO: 639317 - DNA, 587 bp, Homo sapiens
aatgcactgggtggcctccgaaggccttggaaagttctgcccctgtagctttgcagcatacagcccccacggctgctttcacaggctggaattgagtgcctgtggcttttccaagcacatggtgcaaactgtcagcagatctaccattctgggatctggaggacagtggccctcttctcatagtttcactaggcagtgccccagtggggactctgcgtggggcctccatccccacatttccctcctgcactgccctactagatgatctccatgaggtctccacccctgcagcagacttctccctggacatccacacatccccttaaacctaggtagaggctcccaaacctcaactcttgccttctgcacacctgcaggcccaacacaatgtggaagtcaccaaggcttggggcttacaccctctgaagcaatggacaagctgtatcttgccccttttagccaatgctgcagctgaagtctccatgatgcagggtgccatgtccctaggctgcacagagcagtgggtccctgagcctggcccacaaaaccatttttgcrtccaggcctgtgatgggaggggttgcctt

SEQ ID NO: 639318 - DNA, 515 bp, Homo sapiens
tgctcaggagaaaggggactgcagcagggagaagagtgggcagcaggaaaaatgtatctctgcctcccaggttcaagcgattctcctgcttcagcctcccaagtagctgggattrcaggcactttgggaggctgagacagatggatcacctgaggtcaggagttcaagacctgcctgactaacatgatgaaaccccatctctactaaaaatacaggcttaagatttaaaataaaataaaataaaatagtaaacatccctgccagcctgctgaattgaccttagagagtagggtgtgtagtgggtgtgactctcactgtcaccattgctaagtgcttactgacatctttcagtcttggggacccatcctctgctaaactctgccataagaaggtcatacatccccactgcctgtgatgtctcagttttgttttctcgtttcctcttacctttatgcaatcagtttctaggaagatgttgtttttttcttttttatgattgaaagaattcggttagt

SEQ ID NO: 639319 - DNA, 524 bp, Homo sapiens
caaagtcacttccacattttcaggtatctttattgcaatgtcccacttctctgctaccaattttctgtattagtttattgctataaagaactacctgagactgggtaatttatttttaaaaagaggcttaattgactctcagttccatacgctgtgcaggaggcatggctggggaggcctcagaaaacttacaaacatggcataaagtgaagaggaagcaagcacatattcacttgrccagcaggagagagagtgaagggggtggtgctacacacttttaaacaactagatcttgagagaacccattatcacaagaacagcaagggggaaatcttcccccaggatccagttacctcccaccagttccctcccccaacattggggattacaattcaacgtgagatttggttggggacacagagaagagccaaaccatatcagatgccttgtcacagtctatcgtgcaacttgtaaatggaagagccagtgctaggatccagttatcttgtatccactgcagcact

SEQ ID NO: 639320 - DNA, 524 bp, Homo sapiens
caaagtcacttccacattttcaggtatctttattgcaatgtcccacttctctgctaccaattttctgtattagtttattgctataaagaactacctgagactgggtaatttatttttaaaaagaggcttaattgactctcagttccatacgctgtgcaggaggcatggctggggaggcctcagaaaacttacaaacatggcataaagtgaagaggaagcaagcacatattcacttgaccagcaggagagagagtgaagggggtggtgctacacacttttaaacaactagatcttgagagaacccattatcacaagaacagcaagggggaaatcttcccccaggatccagttacctcccaccagttccctcccccaacattggggattacaattcaacgtgagatttggktggggacacagagaagagccaaaccatatcagatgccttgtcacagtctatcgtgcaacttgtaaatggaagagccagtgctaggatccagttatcttgtatccactgcagcact

SEQ ID NO: 639321 - DNA, 566 bp, Homo sapiens
gaagaataacatgtttcagtgtgcttgattgctaagtgagacagataagtgtaaggttatttttcaarcaatatacttgctcgtctttcaggaagcactttactcatgattacatgtgcacttagataaaagtacagtttttatcttgattgtcactcatgatgtaattattcataaacttaagaaaagaagtttctttcagcatgacaaatggttctcatgcttgtgacatgacacttttgatctgttatgtgaagggaaaggtttttcttccacctacctaaaattttccccaatacaagaaatttgacagcactgaattctgtacctgacaggatgacttgtctccttgcattttgttaacctaacaatttcttccaatagaagcattcaaatgaagagtaactttgtgataaaaacacaggaagcaaagggaaaccaagggaaaaaactcataaaataaaccacctgttagtgctaccaaaaaggttaagagatcaattccaagatttatatactaagaggaaaatatttttaaccaacttatagaatgtcataagctgcca

SEQ ID NO: 639322 - DNA, 566 bp, Homo sapiens
gaagaataacatgtttcagtgtgcttgattgctaagtgagacagataagtgtaaggttatttttcaagcaatatacttgctcgtctttcaggaagcactttactcatgattacatgtgcacttagataaaastacagtttttatcttgattgtcactcatgatgtaattattcataaacttaagaaaagaagtttctttcagcatgacaaatggttctcatgcttgtgacatgacacttttgatctgttatgtgaagggaaaggtttttcttccacctacctaaaattttccccaatacaagaaatttgacagcactgaattctgtacctgacaggatgacttgtctccttgcattttgttaacctaacaatttcttccaatagaagcattcaaatgaagagtaactttgtgataaaaacacaggaagcaaagggaaaccaagggaaaaaactcataaaataaaccacctgttagtgctaccaaaaaggttaagagatcaattccaagatttatatactaagaggaaaatatttttaaccaacttatagaatgtcataagctgcca

SEQ ID NO: 639323 - DNA, 598 bp, Homo sapiens
tggattcatccagtcatggataaaatatcttcaaaaattaaaaataacacaaattttaaaacagtatgtaaaacaacgatttatatagtgtttacattgcattgggaattataagtaatccagagattatttaaagagasagtgtatgtgtgggttacatgcaaatacttcatcatttacataaggaactcaagcatccatgggtttgggtatccccagggagtcctggaaccaatgtgccaccaatactgtgttaagtatcaagacaaatggattaatgataagctgtgtcttctctacaattctttcaccacgtttttcctttagaaaaacactaaagtaagtatgaaaagctttggctccaatttctcataaattacttaaaatttgatatttacaaatataattatgaattataagttgatatcgtattgcaataacattttgtttctataatcatgcctctttttaatgtgattttctcgtgtattttaatatattgcagaaatgcaataactgaagaacttgttttttgtacagtgagaaatttgtatacaaagtcttctaccataataaaaaaaatgaagaggagcaccaa

SEQ ID NO: 639324 - DNA, 598 bp, Homo sapiens
tggattcatccagtcatggataaaatatcttcaaaaattaaaaataacacaaattttaaaacagtatgtaaaacaacgatttatatagtgtttacattgcattgggaattataagtaatccagagattatttaaagagagagtgtatgtgtgggttacatgcaaatacttcatcatttacataaggaactcaagcatccatgggtttkggtatccccagggagtcctggaaccaatgtgccaccaatactgtgttaagtatcaagacaaatggattaatgataagctgtgtcttctctacaattctttcaccacgtttttcctttagaaaaacactaaagtaagtatgaaaagctttggctccaatttctcataaattacttaaaatttgatatttacaaatataattatgaattataagttgatatcgtattgcaataacattttgtttctataatcatgcctctttttaatgtgattttctcgtgtattttaatatattgcagaaatgcaataactgaagaacttgttttttgtacagtgagaaatttgtatacaaagtcttctaccataataaaaaaaatgaagaggagcaccaa

SEQ ID NO: 639325 - DNA, 598 bp, Homo sapiens
tggattcatccagtcatggataaaatatcttcaaaaattaaaaataacacaaattttaaaacagtatgtaaaacaacgatttatatagtgtttacattgcattgggaattataagtaatccagagattatttaaagagagagtgtatgtgtgggttacatgcaaatacttcatcatttacataaggaactcaagcatccatgggtttgggtatccccagggagtcctggaaccaatgtgccaccaatactgtgttaagtatcaagacaaatggattaatgataagctgtgtcttctctacaattctttcaccacgtttttcctttagaaaaacactaaagtaagtatgaaaagctttggctccaatttctcataaattacttaaaatttgatatttacaaatataattatgaattataagttgatatcgtattgcaataacattttgtttctataatcatgcctctttttaatktgattttctcgtgtattttaatatattgcagaaatgcaataactgaagaacttgttttttgtacagtgagaaatttgtatacaaagtcttctaccataataaaaaaaatgaagaggagcaccaa

SEQ ID NO: 639326 - DNA, 293 bp, Homo sapiens
gggctgaatgattggcagtcaattcaactttcttcctcaygtaggtatgcataagtgacttctcaactattagaaagttacttttaagtaggattcacttgagtaatagccaccttaatatttctcttcttctcttaaaaggaagagaaacatttgccatataaaatactgtatatcttatttcaatataaatagcaaatttgatttttattattcatatgcaatactaaagaccctcagcaacatttcaaatcagagtttcacatgaaatatgtaaaactgccaaacttgaa

SEQ ID NO: 639327 - DNA, 293 bp, Homo sapiens
gggctgaatgattggcagtcaattcaactttcttcctcatgtaggtatgcataagtgacttctcaactattagaaagttacttttaagtaggattcacttgagtaatagccaccttaatatttctcttcttctcttaaaaggaagagaaacatttgccatataaaatactgtatatcttattycaatataaatagcaaatttgatttttattattcatatgcaatactaaagaccctcagcaacatttcaaatcagagtttcacatgaaatatgtaaaactgccaaacttgaa

SEQ ID NO: 639328 - DNA, 352 bp, Homo sapiens
ttactgacctcaaccactggatttcaaaatacatataaacataagagctcaatgaacactttgagaacttcagtaagtctcagccacttctccaaaaatggagagcatattctgtgacagggctgccctgccagtcacttcttggaaggctgaactcatgcagcaacagcgccccaccctgtcagccgctgagctttgaagactcacctgcatcactggcaccaccsactggtgtcaagggaccctaggtgtctttgaggatctccatggtgtcagacaccatctctccagagaattcgcttgaaaaaaaggtgcacctcaaactttcattcgatttgcctttccacagagg

SEQ ID NO: 639329 - DNA, 545 bp, Homo sapiens
atgtgacctctgggagtgggactagagatgccggcagtgaccactagagggtggaaaatcaatcctcctagtgatgtaaacagctttggtcccacaaatttgctttgtgattttccctttttttctctcttctagtcaacatccctgggttcatccacacctgtgttttctatgagttctccaatatcaaggagatttaacagtttgtttggtaaaacaggtgagtagtggcctctatgttctccctgcttgcccagaacacatttggtcaaatggggagcctcaacacccctactctttcaccccamtcatggcatttacctaaaatgtcctcttttggggtagaggttaaatagaggaacttacattttcacaaatcaccaaaaagtgggtacagagggcagctgcctttgttgggaacttataataactcataaagaataagatttggagaatctagacaatgatttggagagctgtctgtcaaaatatcatccatcaaaatgagaactgtaaattgctggccttgtcaaacacagagttct

SEQ ID NO: 639330 - DNA, 545 bp, Homo sapiens
atgtgacctctgggagtgggactagagatgccggcagtgaccactagagggtggaaaatcaatcctcctagtgatgtaaacagctttggtcccacaaatttgctttgtgattttccctttttttctctcttctagtcaacatccctgggttcatccacacctgtgttttctatgagttctccaatatcaaggagatttaacagtttgtttggtaaaacaggtgagtagtggcctctatgttctccctgcttgcccagaacacatttggtcaaatggggagcctcaacacccctactctttcaccccactcatggcatttacctaaaatgtcctcttttggggtagaggttaaatagaggaacttacattttcacaaatcaccaaaaagtgggtacagagggcagctgcctttgttgggaacttataataactcataaagaataagatttggagaatctagacaatgatttggagagctgtctgtcaaamtatcatccatcaaaatgagaactgtaaattgctggccttgtcaaacacagagttct

SEQ ID NO: 639331 - DNA, 579 bp, Homo sapiens
gtggggttttatgctaacatagctgccaagaactccataaatgaatgcccacaattgtaagtgagaaaacaagattattcaatttggtctgtgtgtgtgtgtgtgtgtgtgtgtgtgtgtgtgtgtttctattctcaggcagggagttggttttagttctttttttaagaggcccaaactcatrctactgtaagaattaactgcaagttaattattgcaagttgaagttatttataagactatggtatgtatatgcagacacacaattctgaattcactgtgtaatattagtactcaaaatcatatatattgtacaggagaacaacctgtgtgataattcatgagttatctcagtctctaattggacagtacaattatttactttaaaatagattagaaatcaccaacagagagctttttttttaaactaaatgcaagcagagtaaaaagaaatgtagagtagaaagaaatgaagcgaaatataggtcttcctttgggaaaaaagtcaagacacaaaagcagttgaagaggtgtctttcatttcctagagtgatacacatatttagtagttcagtagtt

SEQ ID NO: 639332 - DNA, 611 bp, Homo sapiens
gaaccacatagtatttacttttctttatctggcttttttctttcaacagaattattctgaaattcattaatgtgtgatatgtatcaatagttcattcctttttattgctgagtagtatctcgttgtgtgaatatagctcaatttgtgtgttcattcatttgaagatgggcatttgaattgtgtccagttttcatctgttataaataagctactatgaccacttatgcacagatggtcatatgaaaatatcctttcatttctcttgggtaaatatctagacaagaatagctatgtcatatggtaggtatctgtttaacatttaagaaactgccaaattgttttgcagaatgtttgtctttatgccaaattgctttggttgattttattatggtaawctaaacttgaattactggtataagtcaattttttgaaactttgttaagatttttttgcatctgtggtcatgaaggactgtatttttactttttaaaaatgtctgtctaggttgggcatggtggctcacgcccataatcccagcactttgggaggtcaaggtgggtggatcatgaggtcaggaggtcgagaccagcctggccaacatgacgaaaccc

SEQ ID NO: 639333 - DNA, 611 bp, Homo sapiens
gaaccacatagtatttacttttctttatctggcttttttctttcaacagaattattctgaaattcattaatgtgtgatatgtatcaatagttcattcctttttattgctgagtagtatctcgttgtgtgaatatagctcaatttgtgtgttcattcatttgaagatgggcatttgaattgtgtccagttttcatctgttataaataagctactatgaccacttatgcacagatggtcatatgaaaatatcctttcatttctcttgggtaaatatctagacaagaatagctatgtcatatggtaggtatctgtttaacatttaagaaactgccaaattgttttgcagaatgtttgtctttatgccaaattgctttggttgattttattatggtaatctaaacttgaattactggtataagtcaattttttgaaactttgttaagatttttttgcatctgtggtcatgaagkactgtatttttactttttaaaaatgtctgtctaggttgggcatggtggctcacgcccataatcccagcactttgggaggtcaaggtgggtggatcatgaggtcaggaggtcgagaccagcctggccaacatgacgaaaccc

SEQ ID NO: 639334 - DNA, 611 bp, Homo sapiens
gaaccacatagtatttacttttctttatctggcttttttctttcaacagaattattctgaaattcattaatgtgtgatatgtatcaatagttcattcctttttattgctgagtagtatctcgttgtgtgaatatagctcaatttgtgtgttcattcatttgaagatgggcatttgaattgtgtccagttttcatctgttataaataagctactatgaccacttatgcacagatggtcatatgaaaatatcctttcatttctcttgggtaaatatctagacaagaatagctatgtcatatggtaggtatctgtttaacatttaagaaactgccaaattgttttgcagaatgtttgtctttatgccaaattgctttggttgattttattatggtaatctaaacttgaattactggtataagtcaattttttgaaactttgttaagatttttttgcatctgtggtcatgaaggactgtatttttactttttaaaaatgtctgtctaggttgggcatggtggctcacgcccataatcccagcactttgggaggtcaaggtgggyggatcatgaggtcaggaggtcgagaccagcctggccaacatgacgaaaccc

SEQ ID NO: 639335 - DNA, 398 bp, Homo sapiens
taagctactatgaccacttatgcacagatggtcatatgaaaatatcctttcatttctcttgggtaaatatctagacaagaatagctatgtcatatggtaggtatctgtttaacatttaagaaactgccaaattgttttgcagaatgtttgtctttatgccaaattgctttggttgattttattatggtaatctaaacttgaattactggtataagtcaattttttgaaactttgttaagatttttttgcatctgtggtcatgaaggactgtatttttactttttaaaaatgtctgtctaggttgggcatggtggctcacgcccataatcccagcactttgggaggtcaaggtgggtrgatcatgaggtcaggaggtcgagaccagcctggccaacatg

SEQ ID NO: 639336 - DNA, 494 bp, Homo sapiens
tagaatgagttcaaaagtattctctcctcttcaattttctgaatgagtttatgtttatttgttatttcttccttaaattgctagaaaactccagcgaagccatctgggcctggaatttttttgtgggaaggtttttaacwataaactcaatctaattaatagactattcatgtcatctatttcttcttgagtcagtattagtagtttacatctttcaaggaatttgtctttacttctaagctgtcaagcatactggcatacagctttgcattgtaatctcttattatgccttttaatatatgtaatgtatgtagtgagatcacctctctcattactgatgttggtaaattttgtctttttttctctcattgatggcagcagctgcagccatcatgcaggcgacagcagggaggcatggctgggcctgcatactccatgaagctggtgggagccccaccccttctgagttggggtatgagttctctggtgtggct

SEQ ID NO: 639337 - DNA, 494 bp, Homo sapiens
tagaatgagttcaaaagtattctctcctcttcaattttctgaatgagtttatgtttatttgttatttcttccttaaattgctagaaaactccagcgaagccatctgggcctggaatttttttgtgggaaggtttttaacaataaactcaatctaattaatagactattcatgtcatctatttcttcttgagkcagtattagtagtttacatctttcaaggaatttgtctttacttctaagctgtcaagcatactggcatacagctttgcattgtaatctcttattatgccttttaatatatgtaatgtatgtagtgagatcacctctctcattactgatgttggtaaattttgtctttttttctctcattgatggcagcagctgcagccatcatgcaggcgacagcagggaggcatggctgggcctgcatactccatgaagctggtgggagccccaccccttctgagttggggtatgagttctctggtgtggct

SEQ ID NO: 639338 - DNA, 494 bp, Homo sapiens
tagaatgagttcaaaagtattctctcctcttcaattttctgaatgagtttatgtttatttgttatttcttccttaaattgctagaaaactccagcgaagccatctgggcctggaatttttttgtgggaaggtttttaacaataaactcaatctaattaatagactattcatgtcatctatttcttcttgagtcagtattagtagtttacatctttcaaggaatttgtctttacttctaagctgtcaarcatactggcatacagctttgcattgtaatctcttattatgccttttaatatatgtaatgtatgtagtgagatcacctctctcattactgatgttggtaaattttgtctttttttctctcattgatggcagcagctgcagccatcatgcaggcgacagcagggaggcatggctgggcctgcatactccatgaagctggtgggagccccaccccttctgagttggggtatgagttctctggtgtggct

SEQ ID NO: 639339 - DNA, 494 bp, Homo sapiens
tagaatgagttcaaaagtattctctcctcttcaattttctgaatgagtttatgtttatttgttatttcttccttaaattgctagaaaactccagcgaagccatctgggcctggaatttttttgtgggaaggtttttaacaataaactcaatctaattaatagactattcatgtcatctatttcttcttgagtcagtattagtagtttacatctttcaaggaatttgtctttacttctaagctgtcaagcatactggcatacagctttgcattgtaatctcttattatgccttttaatatatgtaatgtatgtagtgagatcacctctctcattactgatgttggtaaattttgtctttttttctctcattgatggcagcagctgcagccatcatgcrggcgacagcagggaggcatggctgggcctgcatactccatgaagctggtgggagccccaccccttctgagttggggtatgagttctctggtgtggct

SEQ ID NO: 639340 - DNA, 566 bp, Homo sapiens
tttgcattgtaatctcttattatgccttttaatatatgtaatgtatgtagtgagatcacctctctcattactgatgttggtaaattttgtctttttttctctcattgatggcagcagctgcagccatcatgcaggcgacagcagggaggcatggctgggcctgcatactccatgaagctggtgggagccccaccccttctgagttggggtatgagttcyctggtgtggctgcagacccaggcctcctgctctatggagcaggctgtagcccagcccaaactgcagctgtggatccaagcttccctgtgctcttggagggggctgggaaccgacaggatctgccctcctgggtacagctgcagccacccaacccactgctgcagacctgggcttccggctccatggagcaggaaggagacggagacaagcagaagccccgccccttctgagttggctgggtgggagctccctgggtgcaactgaggccaccgtctcaggcgcaggaccctggcatcttggcagcctgcacctgccaccccctgctggctctgggatgtctgctctca

SEQ ID NO: 639341 - DNA, 541 bp, Homo sapiens
atttagggaaccaagagttttagtcaagctatttaactgtcatcagaaataaagaaaamaaatcacctttacagccttctgggttaatttttataaggtggtttgtcttcattcagtggaaaagaataatcttaacttcaggtcattggcaggtcaataaaagctctaaagctaaattttcaccaaaatctcagttgagataagtaatatttaaggattatttggaagaataggctccactgatttctgtaataaccaaagatttaatactggattaatccaaaccatcgtataactccatacacaagccatattgtctggattgtccaagaaattgcttttaagaaattgtcatatacttatggtccaaaacgtgtttattatagttttattgttgaggacaatgtcccctttatcgcttggtgactccaattaaagaccccaataaacattgctctcagacttgattttgacaacaaaacctctcacataaaatactgaaagtatgaatgttagaattcttttttatttccgggaagct

SEQ ID NO: 639342 - DNA, 541 bp, Homo sapiens
atttagggaaccaagagttttagtcaagctatttaactgtcatcagaaataaagaaaaaaaatcacctttacagccttctgggttaatttttataaggtggtttgtcttcattcagtggaaaagaataatcttaacttcaggtcattggcaggtcaataaaagctctaaagctaaattttcaccaaaatctcagttgagataagtaatatttaaggattatttggaagaataggctccactgatttctgtaataaccaaagatttaatactggattaatccaaaccatcgtataactccatacacaagccatattgtctkgattgtccaagaaattgcttttaagaaattgtcatatacttatggtccaaaacgtgtttattatagttttattgttgaggacaatgtcccctttatcgcttggtgactccaattaaagaccccaataaacattgctctcagacttgattttgacaacaaaacctctcacataaaatactgaaagtatgaatgttagaattcttttttatttccgggaagct

SEQ ID NO: 639343 - DNA, 440 bp, Homo sapiens
actccctaaagctgtctctggcctccagtttaaaaacatctagaatctagccaggcccttgcctttccttgaagcacacttatctgcctagaattaggtgtaaataattttgttctatttcccaccccacgattctgaagaactggctcaaatgtacccaaactctggtacacatttgtcaatgctgcctcttacaggacaaaaaaaactgagtattttctttcakaccctcatacactttccacattgaaaatgtgggatattctgtatttccacaagcagttctttctctctcctttatctctctcctatttttcttgaaacccctactctctcactctgtgatttgtctaaatataataaagatataggtacaaaaaatattttactttcctcttaattctactatgagaagaaagcatcaagttcaacgataaagg

SEQ ID NO: 639344 - DNA, 608 bp, Homo sapiens
ccttggagatatgaaatgaatggaattaataactttgggcaacagatctcagctattctagcaaattgaaacccctgtcccatgccaccatccctcccccacaggaaaataagccccaggatttcttctagctttttgaaactcaacagatctcacaaatgcagagttgagaaatgcatcaatgttccagattaaggcttttcacatacaagcaaattttgtgaatgcctataactgttaaaactccagaggacttgggttcttttctgcttcaatttgatgaattacccatgaaactgggggaccttcacttctgattatgaaagtcccaattgggcatgtttgggggccccataagtaccataatttggtttatgttgtcagcagcccctaagatcaccccaggccatgacagaaactttgttagcggtggcggttcagcaatttgatggtagggtgggcacttcaacccttttcttgcccgacacacactctccacccactccctgtgcacagtccccacctccacgcagacacaagcctgtgcagttgctcagagrctgccttccttgctgcactgattctcagcagttctgttgacgttcctg

SEQ ID NO: 639345 - DNA, 624 bp, Homo sapiens
gatgaaagaaaaaatgtgtcttatttatggagctagcataagaggaagctagagctttactaaatgtgaaaatttaagttgatgtatattctacatcctgaacacccagtgacaaactgatgttccgatatctgtttatacagtgtgtgtgttatcattacactggcaaaatggatgatatgcttgccttatttcaaatcactaagttttgtattatggtgatatactcatactgctttcttatcaactcagaaatccattatayaaaatccattttttatggccatctaaatcctttattcaataccatcagcctgggacatgttaatatatttctgctagacataccacccagacttgaaatgcataggacactaagcacatagtggtagcagcatgttttcctttaataaaaagacattatttttggaggcagttttacatttacaagaaaattgagcagacaatacagagagttccttaaaccctccctagctcatcatgcctattattaagatatcttgcattcgtctggtatatttgttacaattaacgagccaatattgatacattattattattaactaaaattaacagtttcattaaggtgtactgtttgtgttg

SEQ ID NO: 639346 - DNA, 550 bp, Homo sapiens
ttacaaatatcagatgaccaatacataacttctcttgtttattttaattcttctgttttaatagacaatatttcattttgacattttaaggaacatttctgtgtctctgttctagcccctgatgttacctttggagactaggaggaagagagagggaataattaatatatttataagaacatatttttgagtaagaagaatatgcatgagttaacatttattaatatatttttattaatcaaaatatattcacaagaaattatttatatttaagaatatrctcaataacatatatgtaaaatatgttattcaggagtgcattcttaattcacatgttctttgtgccacatgtgtccactgatctctgtggaagattcataaaaacgatatgtaaggtatccaaattgctgaaaaccacagacagtgagaaaaatcttgaaggcacctagaggaaaaattaagcatttacatcaagcatttatcaatgagaagaatatattcatcggaagaatcgtattagtccgttctcacgctgctaataaaggcatac

SEQ ID NO: 639347 - DNA, 550 bp, Homo sapiens
ttacaaatatcagatgaccaatacataacttctcttgtttattttaattcttctgttttaatagacaatatttcattttgacattttaaggaacatttctgtgtctctgttctagcccctgatgttacctttggagactaggaggaagagagagggaataattaatatatttataagaacatatttttgagtaagaagaatatgcatgagttaacatttattaatatatttttattaatcaaaatatattcacaagaaattatttatatttaagaatatactcaataacatatatgtaaaatatrttattcaggagtgcattcttaattcacatgttctttgtgccacatgtgtccactgatctctgtggaagattcataaaaacgatatgtaaggtatccaaattgctgaaaaccacagacagtgagaaaaatcttgaaggcacctagaggaaaaattaagcatttacatcaagcatttatcaatgagaagaatatattcatcggaagaatcgtattagtccgttctcacgctgctaataaaggcatac

SEQ ID NO: 639348 - DNA, 550 bp, Homo sapiens
ttacaaatatcagatgaccaatacataacttctcttgtttattttaattcttctgttttaatagacaatatttcattttgacattttaaggaacatttctgtgtctctgttctagcccctgatgttacctttggagactaggaggaagagagagggaataattaatatatttataagaacatatttttgagtaagaagaatatgcatgagttaacatttattaatatatttttattaatcaaaatatattcacaagaaattatttatatttaagaatatactcaataacatatatgtaaaatatgttattcaggagtgcattcttaattcacatgttctttgtgccacatgtgtccactgatctctgtggaagattcataaaaacgatatgtaaggtatccaaattgctgaaaaccacagacartgagaaaaatcttgaaggcacctagaggaaaaattaagcatttacatcaagcatttatcaatgagaagaatatattcatcggaagaatcgtattagtccgttctcacgctgctaataaaggcatac

SEQ ID NO: 639349 - DNA, 349 bp, Homo sapiens
cctgatgtcttcttagctaagaggagaaaaaaaaggctgaaaaaatagggaggaaattccttcatcagaacgacttcaagtggataataatatttataagaaatgaatggaaggaaatatgattctcctgaggataactttgtatgttaaggtttgaactaagtgactgtatctrcagaggaagtattataaagatacgtcattagatccaagtgctgattgaatttttatcgtttatcagaaaagccttgtattttagttcgttccatattttgaaagcaaaaaatatatattttatatacctttcaattgccaaatttgatatattgcgctgaagacagaccctgtc

SEQ ID NO: 639350 - DNA, 349 bp, Homo sapiens
cctgatgtcttcttagctaagaggagaaaaaaaaggctgaaaaaatagggaggaaattccttcatcagaacgacttcaagtggataataatatttataagaaatgaatggaaggaaatatgattctcctgaggataactttgtatgttaaggtttgaactaagtgactgtatctacagaggaagtattataaagatacgtcattagatccaagtgctgattgaakttttatcgtttatcagaaaagccttgtattttagttcgttccatattttgaaagcaaaaaatatatattttatatacctttcaattgccaaatttgatatattgcgctgaagacagaccctgtc

SEQ ID NO: 639351 - DNA, 349 bp, Homo sapiens
cctgatgtcttcttagctaagaggagaaaaaaaaggctgaaaaaatagggaggaaattccttcatcagaacgacttcaagtggataataatatttataagaaatgaatggaaggaaatatgattctcctgaggataactttgtatgttaaggtttgaactaagtgactgtatctacagaggaagtattataaagatacgtcattagatccaagtgctgattgaatttttatmgtttatcagaaaagccttgtattttagttcgttccatattttgaaagcaaaaaatatatattttatatacctttcaattgccaaatttgatatattgcgctgaagacagaccctgtc

SEQ ID NO: 639352 - DNA, 608 bp, Homo sapiens
atcgtacaaagtacacatagtaggtgtggcatgtartaagttactctcctatattttcttctaaaagatttttaaatatttgcatctcaaatttaagtcctttgtccatttagatctggcctttgtgtgacagggatccatttttgggatagagatccattctgatattttcccatatggataccaactgctcataccatggattatatagaccctttctgactgttctgtaatgttagccagggcatacatcaaaatttcacacaagcatacactttcacaatagcaattcctgctgtggtaattataacttcacagcaaatctggtacgtaagctccacctcccaccttcgcacactttattcttctatgggattgtcttagttatactggacccttttctcttccctataagctttggaagcagtttagtgacaatggtattcttgtctttttcttgattttaaaaggagtgatttcaatatttttaatcacaaaacatgatagatgctgtaggttatttgtcgactccttttatcaggttaaggaagttaccctttattcataggtggaaatatcatgaattatttaatttttgtaaaataatt

SEQ ID NO: 639353 - DNA, 608 bp, Homo sapiens
atcgtacaaagtacacatagtaggtgtggcatgtagtaagttactctcctatattttcttctaaaagatttttaaatatttgcatctcaaatttaagtcctttgtccatttagatctggcctttgtgtgayagggatccatttttgggatagagatccattctgatattttcccatatggataccaactgctcataccatggattatatagaccctttctgactgttctgtaatgttagccagggcatacatcaaaatttcacacaagcatacactttcacaatagcaattcctgctgtggtaattataacttcacagcaaatctggtacgtaagctccacctcccaccttcgcacactttattcttctatgggattgtcttagttatactggacccttttctcttccctataagctttggaagcagtttagtgacaatggtattcttgtctttttcttgattttaaaaggagtgatttcaatatttttaatcacaaaacatgatagatgctgtaggttatttgtcgactccttttatcaggttaaggaagttaccctttattcataggtggaaatatcatgaattatttaatttttgtaaaataatt

SEQ ID NO: 639354 - DNA, 608 bp, Homo sapiens
atcgtacaaagtacacatagtaggtgtggcatgtagtaagttactctcctatattttcttctaaaagatttttaaatatttgcatctcaaatttaagtcctttgtccatttagatctggcctttgtgtgacagsgatccatttttgggatagagatccattctgatattttcccatatggataccaactgctcataccatggattatatagaccctttctgactgttctgtaatgttagccagggcatacatcaaaatttcacacaagcatacactttcacaatagcaattcctgctgtggtaattataacttcacagcaaatctggtacgtaagctccacctcccaccttcgcacactttattcttctatgggattgtcttagttatactggacccttttctcttccctataagctttggaagcagtttagtgacaatggtattcttgtctttttcttgattttaaaaggagtgatttcaatatttttaatcacaaaacatgatagatgctgtaggttatttgtcgactccttttatcaggttaaggaagttaccctttattcataggtggaaatatcatgaattatttaatttttgtaaaataatt

SEQ ID NO: 639355 - DNA, 608 bp, Homo sapiens
atcgtacaaagtacacatagtaggtgtggcatgtagtaagttactctcctatattttcttctaaaagatttttaaatatttgcatctcaaatttaagtcctttgtccatttagatctggcctttgtgtgacagggatccatttttgggatagagatccattctgatattttcccatatggataccaactgctcataccatggattatatagaccctttctgactgttctgtaatgttagccagggcatacatcaaratttcacacaagcatacactttcacaatagcaattcctgctgtggtaattataacttcacagcaaatctggtacgtaagctccacctcccaccttcgcacactttattcttctatgggattgtcttagttatactggacccttttctcttccctataagctttggaagcagtttagtgacaatggtattcttgtctttttcttgattttaaaaggagtgatttcaatatttttaatcacaaaacatgatagatgctgtaggttatttgtcgactccttttatcaggttaaggaagttaccctttattcataggtggaaatatcatgaattatttaatttttgtaaaataatt

SEQ ID NO: 639356 - DNA, 349 bp, Homo sapiens
cctgatgtcttcttagctaagaggagaaaaaaaaggctgaaaaaatagggaggaaattccttcatcagaacgacttcaagtggataataatatttataagaaatgaatggaaggaaatatgattctcctgaggataactttgtatgttaaggtttgaactaagtgactgtatctacagaggaagtattataaagatacgtcattagatccaagtgctgattgaatttttatcgtttatcagaaaagccttgtattttagttcgttccatattttgaaagcaaaaaatatatattttatatacctttcaattgccaaatttgatatatygcgctgaagacagaccctgtc

SEQ ID NO: 639357 - DNA, 477 bp, Homo sapiens
actctagcttccttctgcatggaatgcctcctttctgttttctgtggtcacacctctgcactgagccccatgagacccaccaacttcagaagctgcccctgacacctctggcagtaggcaggtgtgtcctgtgctgtccatgcccttcctttgtacctataagctggtgactctgttctgtagatagttaggtccctgtctcatcttcccagccggactgtgaggtattcatggtgggatctatgtctgatccatctcagggagtcccgtggagcttgacctaatgccyggcatgtgggaatcccggagaggaaacagcatgtgcaaatgctggagatctgatggcacctgtggcaatacggaagattccatgtgtgtaaagggcaacaaaatagagcagtattagataaaataaatattcttgagtgcatactgatataaataaatgattaaataagttaatgaatgagggaaagg

SEQ ID NO: 639358 - DNA, 477 bp, Homo sapiens
actctagcttccttctgcatggaatgcctcctttctgttttctgtggtcacacctctgcactgagccccatgagacccaccaacttcagaagctgcccctgacacctctggcagtaggcaggtgtgtcctgtgctgtccatgcccttcctttgtacctataagctggtgactctgttctgtagatagttaggtccctgtctcatcttcccagccggactgtgaggtattcatggtgggatctatgtctgatccatctcagggagtcccgtggagcttgacctaatgcccggcatgtgggaatcccrgagaggaaacagcatgtgcaaatgctggagatctgatggcacctgtggcaatacggaagattccatgtgtgtaaagggcaacaaaatagagcagtattagataaaataaatattcttgagtgcatactgatataaataaatgattaaataagttaatgaatgagggaaagg

SEQ ID NO: 639359 - DNA, 477 bp, Homo sapiens
actctagcttccttctgcatggaatgcctcctttctgttttctgtggtcacacctctgcactgagccccatgagacccaccaacttcagaagctgcccctgacacctctggcagtaggcaggtgtgtcctgtgctgtccatgcccttcctttgtacctataagctggtgactctgttctgtagatagttaggtccctgtctcatcttcccagccggactgtgaggtattcatggtgggatctatgtctgatccatctcagggagtcccgtggagcttgacctaatgcccggcatgtgggaatcccggagaggaaacagyatgtgcaaatgctggagatctgatggcacctgtggcaatacggaagattccatgtgtgtaaagggcaacaaaatagagcagtattagataaaataaatattcttgagtgcatactgatataaataaatgattaaataagttaatgaatgagggaaagg

SEQ ID NO: 639360 - DNA, 393 bp, Homo sapiens
agtagaattcaaaattgtagaacagcagttatgaagctgagaattttatgaatgcaggagcctcatttggccctgaggttgccatctctcaatcagtaatgattacaaggctattagtagcagattcctgagaatgaaggcacatggagttgtgtgatctactttgttcgtaaggtgcccagtgcttccctgtgttcctgacatctctcagtgtataaagtccattccctgagcctaaactttcttgcattaagagctttccattaagtcagtttcttgcaaagggctttgtcctaatgagtcagagtctgtgaggttagaayattcacaaatgagaagctaatacagattataggaatattctctgggaatattctaagtccagactaacac

SEQ ID NO: 639361 - DNA, 364 bp, Homo sapiens
tctgtcaatttatttaaagagggtaaataatcctagcaggactgtgggtatttgaaatgaagcccaggtatctagtcacaaggtttggagacttcctggatttcttaggcggccaaggaagaggatgctagcttagcacctttatcagccaatttatttccctgagcctcatctgagtattttatactatatccctcagctttaattgtaacaactagctggggcaatagcaatgactctagaagttctgctatttggggtttacytttgactggggacaagttgctgtcatgaatcctctctgttttcaaaacataccaaaatcatgcactacaccaaagacccagtgtctgtcactgtagat

SEQ ID NO: 639362 - DNA, 430 bp, Homo sapiens
tgttttttaaacttgtaaaatagtttttgtgattctgtcatgtattttgcagtcatgaactaacatttttttccctcaattgtcagttgcagtttcctcaaagatcattataaatactccttaacctacaaagtttggcagtcacagcctactcttcgaggaacagcctgactcaccatcaagaggctcctcaggtggttttacttcccatgtttcccatgtgaggtactatgcctcagtgrttcctggcaaaacttgtattctctgttagtattgcgctaactttggagtgagtttcttttggtgagtaataattttagtcaatgatactactggttattttatctttttttaggcttatgatgaatgcttgatttatgattaatatgtttttcacttttacacatttcaaggaaggaaacaagaacag

SEQ ID NO: 639363 - DNA, 430 bp, Homo sapiens
tgttttttaaacttgtaaaatagtttttgtgattctgtcatgtattttgcagtcatgaactaacatttttttccctcaattgtcagttgcagtttcctcaaagatcattataaatactccttaacctacaaagtttggcagtcacagcctactcttcgaggaacagcctgactcaccatcaagaggctcctcaggtggttttacttcccatgtttcccatgtgaggtactatgcctcagtggttcctggcaaaacttgtattctctgttagtattgcgctaactttggagtgagtttcttttggtgagtaataattttagtcaatgatactactgrttattttatctttttttaggcttatgatgaatgcttgatttatgattaatatgtttttcacttttacacatttcaaggaaggaaacaagaacag

SEQ ID NO: 639364 - DNA, 623 bp, Homo sapiens
tggctttcttcaagccaaaaactggaagctgaacaagtttttctaagtgcttgtcccatagattatttcttctaagttctttcattttatacacaagaaacagaattgtttattaaaagttaacttatgatgtctaagtatgccacatttagcaatgcagaaagagtgtccttcaatttaggaccacttgaggaggcacaaaaggtatgsttcaagctctgaatacttgctttagcattgttctcattcttcctagagagggcatctctatcaatacaaatttagttgatctgaagtagaaaccagggcagccctacatgacatagcaaagctcttaagtttagagtgatcaattttcccatttcaatgggatctcaactgtaggatcttccaatagctaagtatccacagtctggccgtcccatcttgtcaatgaatgactcaaagtgtcacagggttgtaatacctgcctcagtcttcaaaattacattttacagcctagtggcagttgcaattttgaaaagaaatgtattaaattttatcacactaaacttgtatgacttcagaaagttttgtaaggattaatggattttaggcattactttataagacttcgtaaagta

SEQ ID NO: 639365 - DNA, 531 bp, Homo sapiens
taactgatagcaagatgcgataattcttgtctataggcatgcaaaataattttgtttggtgattcaattgaattccctccctccagggaaaaaagcaggtctctctctatttgtaaatgcatttaaacattcctttactacacataactttctgctccctttaacttatttttaaaagtgattgtaacaccttactgttttcctcattaatgagtttaaaacaatctttaacacgtattcattttatatytatgtgagactcatgatttacctgattcttgaaaattatcctttaataaatgacactgaaatgtcatccttgtaagaaacccagagtggtatttttctgtagttgttacatattgaatcatattaattgttgcttttattttcatatcttctgatattgctgctgtttcatctgtcatatttttagttaaatattcacgtgtgtgttttgttttcccaccctcattgtaagctctctgatggttaatgcttccctgtattccttgctgtgcctaacatagc

SEQ ID NO: 639366 - DNA, 595 bp, Homo sapiens
aaattaagaggaaggtacagctcatctgattttaatgtgcttgaatctgtccccctgtctcttctgaggtgactagagcagaccagacataaaggtaatcccaaaccattctccctagctccctagaagtttatgttcttgaatggatctgcaaagacttacttatgaatcattggtacagcactgtgttcatagaacctgagagttaactactgaaggaaccaataagatgttttttgctaaaatgctaatgaaactggtgcagttgtcccatagaactgatgtttatgggttttttkgaataaacatagaaattgaccttcctagtcatgaaacttaagaaagcgacatttctctcttaggaaaccaaccctcaggcttcccagatagtatcaaggagctgaaactcaccagatcactgcatctagacaatgggatgccagacccctcacccatcatggtggcctaactgaccacccgtgtctttctgaccaactcctcttgcttatccctccctgattcctatttcctcacatgtagttacatttcttctctactacataatcccctgattttagtccatcagggaggtgga

SEQ ID NO: 639367 - DNA, 379 bp, Homo sapiens
tgcatataacatatgcatatgctcccatgtgatttaaattatccctagattacatataatacctaatacaatgtaaactctatgtaaatattgattatactgtattgtttagggaataatgacaagaaaaaaagtctgtgcatgtttagtacagacacaaccattcatttttatwtgtgaatattttccatcctcagttggttgaatcactgatgtagaacccataggtacagagagctgaccatacttcctaagtttgcagtttcttattcagaccttttgaccattgttctattgcagttactgtcattttcctatcaattaacaatgtctagacatttagacattgtattttctcaatattattcacttttttgcc

SEQ ID NO: 639368 - DNA, 584 bp, Homo sapiens
ctcaattttatgaacagattttcattttagaaagacgattgtgtcagttgtaggtgcaattcagaagagggcgggcaaatttaagagaatttgagaggctacctcagcaggaggcagccgaataaccacacwtgggactggggaggagctctgtacagcgtgttgaatgatgtggtcactcagggacagggaattaagggggagaagcagggctgcgtgcaggagaattgacatattgggattgataacagggatgggtgtatcagtaacaatttacaaaggacgtaattcagaagtcatcataaaatctaaaattgtaatttcagaagtgtaattccaagcacgttttaagtcagtacagttatactttattatctgctcttctgtagtctaacttactttcaatttctttgtcatcaatatgtgaatactacttactggaaggaaatcacacgtcttttctccaaagagtctgttggcagttctaagcaagtactgagtgccagttctgttaacttcactgagaagtgactggaaacctcggtgaatatctccgtctttgtataaacaaagtgcctgggaac

SEQ ID NO: 639369 - DNA, 584 bp, Homo sapiens
ctcaattttatgaacagattttcattttagaaagacgattgtgtcagttgtaggtgcaattcagaagagggcgggcaaatttaagagaatttgagaggctacctcagcaggaggcagccgaataaccacacttgggactggggaggagctctgtacagcgtgttgaatgatgtggtcactcagggacagggaattaagggggagaagcagggctgcgtgcaggagaattgacatattgggattgataacagggatgggtgtatcagtaacaatttacaaaggacgtaattcagaagtcatcataaaatctaaaattgtaatttcagaagtgtaattccaagcacrttttaagtcagtacagttatactttattatctgctcttctgtagtctaacttactttcaatttctttgtcatcaatatgtgaatactacttactggaaggaaatcacacgtcttttctccaaagagtctgttggcagttctaagcaagtactgagtgccagttctgttaacttcactgagaagtgactggaaacctcggtgaatatctccgtctttgtataaacaaagtgcctgggaac

SEQ ID NO: 639370 - DNA, 584 bp, Homo sapiens
ctcaattttatgaacagattttcattttagaaagacgattgtgtcagttgtaggtgcaattcagaagagggcgggcaaatttaagagaatttgagaggctacctcagcaggaggcagccgaataaccacacttgggactggggaggagctctgtacagcgtgttgaatgatgtggtcactcagggacagggaattaagggggagaagcagggctgcgtgcaggagaattgacatattgggattgataacagggatgggtgtatcagtaacaatttacaaaggacgtaattcagaagtcatcataaaatctaaaattgtaatttcagaagtgtaattccaagcacgttttaagtcagtacagttatactttattatctgctcttctgtagtctaacttactttcaatttctttgtcatcaatatgtgaatactacttactggaaggaaatcacacgtcttttctccaaagagtctgttggcagttctaagcaagtactgagtgccagttctgttaacttcactgagaagtgactggaaacctyggtgaatatctccgtctttgtataaacaaagtgcctgggaac

SEQ ID NO: 639371 - DNA, 548 bp, Homo sapiens
aaagctcaattcctgaactccccagaattcactagatttgaacagagatagcattgcttgaaatcacaaggtagctttattttatcttattgctattcttctaccctatctaatttccttgctctttrcccactggacacacgggtcctcctgcccaaagagatgttggacaatgaaggaaattattgacctgggttgtcatgtgaccctcttaacagaggacagagtcatcatggtctgcattggtggggtttcaacccttagtaaagaggagaggttgatattatttcatgtttcatgttcccaaagtctgtaaagtcttgatgtgaaaactcctcacttctctcatcccaaggtcagttttgctctcaagtagacagtctccagccaagtctccatatgtatttgtaggccattctcaggggctacctctttattctagacagaaatatctgattcctagatctgatttgagacctgttattggtttcctttaccactagacactcattggttggtctaattgattgtttgcagggaagtactga

SEQ ID NO: 639372 - DNA, 548 bp, Homo sapiens
aaagctcaattcctgaactccccagaattcactagatttgaacagagatagcattgcttgaaatcacaaggtagctttattttatcttattgctattcttctaccctatctaatttccttgctctttgcccactggacacacgggtcctcctgcccaaagagatgttggacaatgaaggaaattattgacctgggttgtcatgtgaccctcttaacagaggacagagtcatcatggtctgcattggtggggtttcaacccttagtaaagaggagaggttgatattatttcatgtttcatgttcccaaagtctgtaaagtcttgatgtgaaaactsctcacttctctcatcccaaggtcagttttgctctcaagtagacagtctccagccaagtctccatatgtatttgtaggccattctcaggggctacctctttattctagacagaaatatctgattcctagatctgatttgagacctgttattggtttcctttaccactagacactcattggttggtctaattgattgtttgcagggaagtactga

SEQ ID NO: 639373 - DNA, 548 bp, Homo sapiens
aaagctcaattcctgaactccccagaattcactagatttgaacagagatagcattgcttgaaatcacaaggtagctttattttatcttattgctattcttctaccctatctaatttccttgctctttgcccactggacacacgggtcctcctgcccaaagagatgttggacaatgaaggaaattattgacctgggttgtcatgtgaccctcttaacagaggacagagtcatcatggtctgcattggtggggtttcaacccttagtaaagaggagaggttgatattatttcatgtttcatgttcccaaagtctgtaaagtcttgatgtgaaaactcctcacttctctcatcccaaggtcagttttgctctcaagtagacagtctccagccaagtctccatatgtatttgtaggccattctcaggggctacctctttattctagacagaaatatctgattsctagatctgatttgagacctgttattggtttcctttaccactagacactcattggttggtctaattgattgtttgcagggaagtactga

SEQ ID NO: 639374 - DNA, 445 bp, Homo sapiens
atatctctcgaatcaggtattataggtttgctctagaggcacatgtttgataactgaggtagataaaactggattgagaagaacctcttggccaacccagcttcactctgcaacagacactactcagaataaagggctgatcttttaaactgccaaaatacagacatgggaaagctgttaaaattataagagacagcttgtggcacttaatttaaaaaataattttccaggaaaatattaatagaatctcaagaaatagtagaaaatctgaaaaaaaaaattaaacatgattgaaattgtacaactctcaagtgattacctcccgtggaaacagcatcaaccccagacatgtagacrggtaaattcttttcaaccttcaagtaaatgataaatctctacactattcacacagtttcaaagcacaaaatagaaaattctctgatta

SEQ ID NO: 639375 - DNA, 560 bp, Homo sapiens
taattcttcatctaaagtagatttaggagtcaragagaaaacagagctcatcgtatccagctcaagcactgcccatactgacccatgggcttggattgacgttcaggctgacctagactcttttcccttctcatcattctcagaagcagtggctgctccttgcactgaatattcacccatggtgaggaagagcaataataacccagagtgacatctggtacagagaaaacagcattcactttggagtcagcaagacccaaatttaaattctgtctcctttactgtctctgtgatcatgttgagactttgctttttaatcctatctaaaaaaaatagcttcctttaaaaactcttgtaaaagttaaattccatacgtgctgtaagcattctaggcttggggtatattttcataaccctttcgcttcctgcaagacgctgccaattgtttcctaacagctgccaactattactttaaaaacatgcctattttgacaaaataaagttctatcaagaaataatgaggcagagggacaacaggctgaaagaagagaagcaggaaa

SEQ ID NO: 639376 - DNA, 649 bp, Homo sapiens
tggtttcgaactcccaacctcaagtgatccacccgcctctgcctcccaaagtgctgggattacaggcgtgagccaccacgcccagttttatgtgtcatttttatctgcccaggcagcatgcaggctcataaaagaagacatggggayaactctagctttaaagactggaaatttgacttttggtgctgactctgccattagctaatgaggaagctgttttaatctataaatgggaattgcctttcttaaactgatggggttaagaaggcactctgctgtatatcttacatttctttgcagttgtccatagcatttcatttagcatactgttacacacagaatatgttcttaatatatgctttttgttgattggtaaaatgtggaatgagatttataaactggaatcctataatgcacgcaaagttaggattgactaaagtgcagaaagtttgtctatggggaagactgagctggcccaaaaatgttctagttagtttagtgatatttttattactaataatcacttaaagtcataataaatataactattcctttcataagcttgattgtaatccattaagctttgaagttcataaagatgctattgcatttttgccaacagatttatgttaagttggtaagataaatg

SEQ ID NO: 639377 - DNA, 608 bp, Homo sapiens
aagcttgtgtatttcttcagctcataaaattccytatttcatatcttcaaatagttccatttgttttagtcttttattcagaaacattgattatgtatatatcgaaactccaaatgtattctatctgctatttctctctgatctgtttcttttctccacccactttctttgtgttctgttaggatcctcaggtgagttttctagccagtaagtaaaaattctgcagtgttggttctgttctttaatgatgaaatgcagttgtaaattccaaaattgcatttttaattttcttaaattatttcacttcttttagattccttttggtgtgtttttagttttcagatagctcctgtttcaccttagtctcataggattccatgtcatctttcacttcttctatcaaaaaaaaaatctcctcttgtcttatattttagtgagatcataaagcaggtattgcccaaatataatttatcttctgcaataaatctcttcaaaactagctcctttcctggatgttgagtactatgtccctctccttattttgagctgcaaaatcttttcacaggcctcctgttggctgttttctatttacacatccttgagagagg

SEQ ID NO: 639378 - DNA, 621 bp, Homo sapiens
agggactccaatcaggctggagttaatgaaaaggatcctgtcttttcccaggatggctaaatgtccgcaccgctcccagctagagggtcgagagggtgcggggtgcagagggcagacagaattacatttaaaaggcaaaggaaggagaaaattctttcatctccctggtggagcccggcagtgttcctggggccctgctcaaaccaatctcattcctgacaygtcttgctgctctctggaacagtccacattcaaaatattaggaggatgaccctgccttccatttgttgaggagctgcagtttctctcttggcataaattcaggttgctttcttattttctctctctctctctgagcttgagggcagggttggagaacaaggagaattgaagggagatgaaggatgctgtggggtcctaaggaggtgagagtagaaatcccttcagcttcctaagcagcggcattctgctcccttgtctttttcaaactctgttctctgaatgggattctctctttgtgtctcccacccaaaactatccatggtacagctgccactagcattcccttgtgacctctgtgagcctaaggctgtccctccaaacagctgcccttctccctgc

SEQ ID NO: 639379 - DNA, 621 bp, Homo sapiens
agggactccaatcaggctggagttaatgaaaaggatcctgtcttttcccaggatggctaaatgtccgcaccgctcccagctagagggtcgagagggtgcggggtgcagagggcagacagaattacatttaaaaggcaaaggaaggagaaaattctttcatctccctggtggagcccggcagtgttcctggggccctgctcaaaccaatctcattcctgacacgtcttgctgctctctggaacagtccacattcaaaatattaggaggatgaccctgccttccatttgttgaggagctgcagtttctctcttggcataaattcaggttgctttcttattttctctctctctctctgagcttgagggcagggttggagaacaaggagaattgaagggagatgaaggatgctgtggggtcctaaggaggtgagagtagaaatcccttcagcttcctaagcagcggcattctgctcccttgtctttttcaaactctgttctctgaatgggattctctctttgygtctcccacccaaaactatccatggtacagctgccactagcattcccttgtgacctctgtgagcctaaggctgtccctccaaacagctgcccttctccctgc

SEQ ID NO: 639380 - DNA, 606 bp, Homo sapiens
tgttgcttctcaggagcacaatctgggttgtaggtcctttccttccaacaaaattaagaaatcacattgcaagcatctgtgggctgtttccaaagtccrtaaaaagccaataaaggaggattccctccttgaacatatgccaagcaaagctgggtgctgagggaatatccaccctcgctttcctcttcttctcatcatttacggaatttctgcttagaactgaccagatgatctgctcacttggcccaagatgagtatcaaagctttctaattcatccccttggtgaatcccaggaaactgatttaaatccctgggctcactcagtggcagagaatgggaaagtcagaaggtgcttgtttcagagagtatctgagcaccgaagtcaaaagctctgctcctcagcttagtggagccaatttggcagagaatctgggtccctcggccaaatctggagcaattaatcatgattacaggtgggcatccgaaagggataaagccaggcagaactcaatgaactgaaccttgtagttgcaggtattcataacttttataattgtaaaagttgcaggaaaaataggagaatctcctccagaaagcccaccttg

SEQ ID NO: 639381 - DNA, 606 bp, Homo sapiens
tgttgcttctcaggagcacaatctgggttgtaggtcctttccttccaacaaaattaagaaatcacattgcaagcatctgtgggctgtttccaaagtccataaaaagccaataaaggaggattccctccttgaacatatgccaagcaaagctgggtgctgagggaatatccaccctcgctttcctcttcttctcatcatttacggaatttctgcttagaactgaccagatgatctgctcacttggcccaagatgagtatcaaagctttctaattcatccccttggtgaatcccaggaaactgatttaaatccctgggctcactcagtggcagagaatggraaagtcagaaggtgcttgtttcagagagtatctgagcaccgaagtcaaaagctctgctcctcagcttagtggagccaatttggcagagaatctgggtccctcggccaaatctggagcaattaatcatgattacaggtgggcatccgaaagggataaagccaggcagaactcaatgaactgaaccttgtagttgcaggtattcataacttttataattgtaaaagttgcaggaaaaataggagaatctcctccagaaagcccaccttg

SEQ ID NO: 639382 - DNA, 525 bp, Homo sapiens
cccataattctttaatccttagtattcacagatttccatttttgccagtgtgggtgattgtggctttaatttggattttcctgattgtaattttcctggattacawgagtaatcctataatctgattataattttcctggaatagaatcaggaaaattactgaacttttttttgtgtgtgttctctcatctaaaataccttttcattttttttacccaggttttttatgtaaaaaagtaaggttgaaagtcttttctttattaaactctagcagttctttaaatattccaaattctccttttttggtaatataaaatgcaaatattttcacagttgataggctatcattatcttttttatgtcttttgataaacgagtttcattaagatagtcagatttattaatttgtgtgatttgcctttttgtcttaagaatactttcctattctggggccataaagtgttgctctatattttctaaaaggacaaagtttcaactatcacagttaataatgtaatccatcta

SEQ ID NO: 639383 - DNA, 525 bp, Homo sapiens
cccataattctttaatccttagtattcacagatttccatttttgccagtgtgggtgattgtggctttaatttggattttcctgattgtaattttcctggattacaagagtaatcctataatctgattataattttcctggaatakaatcaggaaaattactgaacttttttttgtgtgtgttctctcatctaaaataccttttcattttttttacccaggttttttatgtaaaaaagtaaggttgaaagtcttttctttattaaactctagcagttctttaaatattccaaattctccttttttggtaatataaaatgcaaatattttcacagttgataggctatcattatcttttttatgtcttttgataaacgagtttcattaagatagtcagatttattaatttgtgtgatttgcctttttgtcttaagaatactttcctattctggggccataaagtgttgctctatattttctaaaaggacaaagtttcaactatcacagttaataatgtaatccatcta

SEQ ID NO: 639384 - DNA, 686 bp, Homo sapiens
tcttagctcacgttcactgaaagtaagaccttatgctatgcattaccttcatatgaagtcagcacagttattattatcctgattctacagatgacaaaaccaaggcacagacaggttatgtattttgtcaaaattataaatatttaaaggggagtatgtccaggattgatccgagacgtaccatgctataccatgtcaaccctcttctgtttcttgtctctgtagctcaaatagcattttctcaatttggctatacttggagaatcacagaattagcttacaaccctcaggaattaagactcttaagagcagtggcctaatttcatttcttcaaggaagcaccttcgaagattccgtagatkacactatggtttcttgtctatgaattcctattgcattctttcaagaagtcagcacctgagtccataactatcggatgggtgtttctgaaggctgagaactgcccgccgtctgggttactggcatcattgacaatgccgagacatgcctcttcctctctgagattgttgttaactggagcaggaggttctcactaaaaacatgccgactccctcctatggccttcatgatgtaaccatcatacacattgctgctgttctataataataggtcaccattcagggacaaacagcaatgactgactcattcaagagatggcgaagggg

SEQ ID NO: 639385 - DNA, 589 bp, Homo sapiens
tattaataaaggcttggttgagaaaatgagaggtgtttagcttggagatgtgaagatttaagggagttctgataactgctttcaaatggttgaagttattgtgtggatgaggaagaaaaattattatgtagcagttacaatraaaccagtagatagaagtttcaataaaatatatttgaactctatacacagaataatttccaaacaataaaagctgtccagccacaaaatacattacctggccaacagaaagctctccatcactggaaactttcaagcagagacaagatgacctactaggtatgcctaactgattttttgaattggtaacaagatcaaatcacaacctattttagagctaaaattcaacacaatagcacaggtaaatgggctttaaaaggcctaagccatgtacatatgcaggtgacattatgtcaatgctgtctgcacctgtctgcaccacctggagtgtctgtttaagtcctcaaaaacacattttgcttcccatccttaattcccatataaggccattctctaagttctattgcaaaacttgggcagccatgtagctctccaccaacgaaacagc

SEQ ID NO: 639386 - DNA, 622 bp, Homo sapiens
actttttaagcaacaaagcactctcaagtgtaagactaggtgaaaaaattatagtccacaggtcaccttcttattttccttcttccaggtgtaggctgaggctattttgagggatcctcaaaattaaatagaggaaatcggcatatttgttttaataataacttgatgatatatcgtgtccataggatctatacaaacatctccaaatactccatctttgacctctaaaaagattcccatggaakagccttccccatctgctagagtttcctaatcaggtgaagagaaataggacaatctctcagatggagaaaaacccaggacacaaaagaatctactgttatacagaactaacagcccctttatgtttcacaatgtcgttcttgtcctgcttttcacataaagatttggcgatactgcagtaagaaaacataaaacaaaacatccttgggggtggggtgaggggtttgaggagatgctggtcaaagagttcaaagtttcacttaggaggaataaattcaggaaacctattttacaacatagtgactatagttaataacaaggcatggtatccttgaaacttgcaaggtattgtatacctggaaattgaaaatagaattta

SEQ ID NO: 639387 - DNA, 571 bp, Homo sapiens
tgtcaatgacagtcactgctcatataaggccacacagaggattcacataatagagaggtattaggccttagtagacaaggtaagtctggggaaatgaacaggctgattgtgacagttttaataaaagcacaaagctttcttatctgctacatttgctttgcaccaaatgggaagtgcatccttttggtaccaattcaattcataaggcttgagggaagataaatctttaactaaagaaatgagtgaacagcatcagctttgaaatactacttcttgggatcctgaaaaaaggctcctccaagcactgacctgagcaaaacccctggctgtgtgtgctctaaaagtggtctgtaagtgacattttactagmtgctaagaagggaccttcaggcaggaggaactaactaactcacaagggataaattccttggtttgagttttattagctctatttctcaccaattgaggtgcatggctttaggctcaacttatccaagttgactcactgggaacctggtgtagaaattgatcacccctcctggcagagaccaggaccagcaccctgaaatac

SEQ ID NO: 639388 - DNA, 661 bp, Homo sapiens
agttaattatccttgcctatttcacatttctagtgctcaccaagtataagaaagcacttaaaattgcttcataaacataggctgtttattgttttatatcctgtaagtaagtttagtgaaggaccctaattgttccatgtatgtaaggaaaggccctctggccataagttttagtagacggtcctgtacctagtggagatgaattaatatggtgacagacaacctgattagctaatctagactgatacatatttaaggwaagtggagttattaggattagcacaagggccaactttctcaaaatggcatgcttatagcatatacttattttaaagacattgtggagaaagatggaggaagaatattagttgcaagaaccgaatttatgttcatggctgagctacattagtagcctctaaaactggcctagactcaagagggcagacaaaggatcacactccactgagattgcttttgataaattgcatctcagaacatctttctcatggtggaggctatgttaccaagtcagagatgtcctctgagttcatatgtgaacaaatgaatctccttacagacaaagagataaatcactgaatattttccattccatgctaatgagaaggcaggatgaggcagctccatctctgccataggtggt

SEQ ID NO: 639389 - DNA, 606 bp, Homo sapiens
tcttgctcctgctctggccatgtgatgtgcctgctttccctttaccttcggccacgattgtaaactccctgaggcctccccagatgccaagcagattccagcaccacgcttcctgaataacctgcagaaccattagccaactaaaccttttctttaaataaattactcagtctcggatatttctttataacgatacaagaacagcctaatacaatgctcaccccatgttctytactttgggatttctgttcctacacatatcaaaggcgggaagccaaatttagccagctgcattttctcacaatacaattaagcctggcacagacctctcttttttccatcagcaaactacttgccctatcaccacgtcaacaatggactatttgctggaaacaagagttctgcagcctggatggctcttttctgcagatgccctctcactcccccaatgccccattaaatccaaaacccatgtgcttcttgaatcatctcttatttttcatatggaagcagctgaatttagcggtgtgaaagtcatcatataaaatcctaaaaaatccccaagtcctagtgcagtctctccaaacagccaaatgccctttggtc

SEQ ID NO: 639390 - DNA, 571 bp, Homo sapiens
cccaaagtgctgggattacaggtgtgagccactgtgcccagtcagcacgtagcatttttaaaatgcaagtttttgaatgtttacyagtaggtgggtaaagccccttaaattgtaattaaaaaaaacaaagatttaaatgttagttttagtgttttgtaatttagcaaataagaatattcttgtgcaccacttgtgtcttccttgtgattttcaggacattcacgctccattcaagttctctttccccaggtgagctaaaggctttgcgcacagaattgacattagaccctgggcttggctaaccccagttccaaagagctccctttgtatgtaaaatatcctatttttagcaaagactaaattgcctattagttagtgccttattctgggctcctctatttaacccactggcaagagttctttagggataacttggaaggtaagtcatgctactggcctgatcaaatacttaagaaatatagtgggaaaaatggcagtgggggttgggaggatgctaggaaaattccaggatacttgggatctagcactttttctgaacaaaaaatggctt

SEQ ID NO: 639391 - DNA, 607 bp, Homo sapiens
aattatggtggaagaggaagcaaacacgtccttcttcacacaatggctggaaagagaagtgcctagcaaaagggggaaaagccccttataaaatcatcaratcctgtgagaactcattatcatgagaacagcatggaggtaaccccccacatgattcaattacctcccactgggtccctcctatgacacgggattatgggaactacaattcaagatgagatttggatggggacacagccaaaccatatcagcttagaagggaaaacagggggtggccagggaatgaggcatatgacagagccctgatttagacttggggggcttgaggatctagactgggggcttgaggaaaaggcaacaaagctgagaagagcagtgaggaggagcacctccttctgtcctagatcctgcttaaggctttgcggagtcctcttcatccagctcaggagagtcctgagaacatggggtgagtgtcaggaaggtgagggcaggccaaagccttctgagaggtcctcggcttttccccagaggtgcctgctctgtgtcctgcctgtgtatgggctgcctccaggaccccatgaacacatctggttagaactggctgact

SEQ ID NO: 639392 - DNA, 607 bp, Homo sapiens
aattatggtggaagaggaagcaaacacgtccttcttcacacaatggctggaaagagaagtgcctagcaaaagggggaaaagccccttataaaatcatcaaatcctgtgagaactcaytatcatgagaacagcatggaggtaaccccccacatgattcaattacctcccactgggtccctcctatgacacgggattatgggaactacaattcaagatgagatttggatggggacacagccaaaccatatcagcttagaagggaaaacagggggtggccagggaatgaggcatatgacagagccctgatttagacttggggggcttgaggatctagactgggggcttgaggaaaaggcaacaaagctgagaagagcagtgaggaggagcacctccttctgtcctagatcctgcttaaggctttgcggagtcctcttcatccagctcaggagagtcctgagaacatggggtgagtgtcaggaaggtgagggcaggccaaagccttctgagaggtcctcggcttttccccagaggtgcctgctctgtgtcctgcctgtgtatgggctgcctccaggaccccatgaacacatctggttagaactggctgact

SEQ ID NO: 639393 - DNA, 524 bp, Homo sapiens
caattaaaatgctttactctgcagtctgccaacatgccagatagacagggcaactctttactctccgaacatctttttggcttttgcatctctatgccttttctcctactgcttcctcctcctggaacaccctctctagtctcccttctcccttgtactcccttctacactgctgtctctccactgatcaacattaaatctacccttcagggctaaattcaaatagcagatcttctctataaatctgtccagatttccccagactcacgtgccatcttccagtttcctgtcccaagagctgtattgcttcacaaatgactattgttttactttcccgtatggattggtgtgtcccttccactaggtctatgaggacaggaatcagatctgaacagacaactgtttgaggataggaatcagatcttcctcagctttaccacccttgcagtaatgatgagcacagagacttccatgctgggcaaatactgaattgaatcraaacttaaatgttatcagctctatgc

SEQ ID NO: 639394 - DNA, 550 bp, Homo sapiens
aagactctgtctcaaaaaaaataataaaaataaataaaattttaaaaagacaaaagtaacaagtgttggtgaggatgtgaagaaaaaagaacacttgtacattgaatgtgggaatgtacattagtaccatcattagggaaaagagtatggaagttcctcaaaaaactaaaaataaaactaccatatgatccagcaaacccactactgggtatatagccaaaggaaatgaaattagtctgtcaaggagatattctgcactcctgtgttcattacagcattattcacaatagctaagatatgaaatcatccaacccactgatggaytaatgaataaagaaaatgtggtgtgtgtgtgtgtgtgtgtgtgtgtgtgtgtgtgtgtgtgtaatgaaatactcagccttttaaaagaaataaattctgttatttgcaacatgaatgaacctggacaacattatgctaatgaagcaagccaggcacagaaagacaaatactgcatgatctcatttatatgcagaatcttagaaactccagaatctctgcttcatgg

SEQ ID NO: 639395 - DNA, 611 bp, Homo sapiens
acctgatatggatcaatagtgtactaaatatggatttacacacaaatagctctacaggcctacctggtcaataatatgtgttattaaagctccctaaatgcatatttatagaactggaccaagaattcagcctttcaaggatcccccaataccawgtgggtctcaggagtccccagccaccccatacagcaggactaaaagaaatgggacttgaagcagctaagagagaaatatcaagtgattttccccaggccagctgaagaggacttcataccttcatttcctgtttgttaatagagttgacccattgatagaacatacgattaaccttatcttgtgcagatgagggatctgaagatatgagatgtaaagggacctgcccaaattcacagaataggtgaagctcagaccagagccctgaccagagcccagaacagtcttcctgttcagaacagtgtagtagagttagaagaaagagtctgtctcctcctagctgtgtgaactaaggcacattgctaaacttcttcatatctcagttttctcttctgcaaaatggaagtaataaatagtgcctacttggtgggtttgtaaagattaaatgagagaattac

SEQ ID NO: 639396 - DNA, 567 bp, Homo sapiens
aacttcttcatatctcagttttctcttctgcaaaatggaagtaataaatagtgcctacttggtgggtttgtaaagattaaaygagagaattacctgaaagtattcagtcacttgcctgccttaaccattcagtaaatgtaagccatccatgttactctcacagtactcctttacagtgggtttgtgctatagtctgaatatttgtttccactcaaaatttatatattgaagtttaatccccaatgtgattatattgggaggtgaggactttggaaggtaattatatcatgagggtagagcctttattaatgcaatcagcgctcttacaagaagagacatgagaggtatgatttctctctcttggccatgtgaggatacagcaagaaggcagccatctgcacaccaggcagagagtcttcatcagacactggatctgccagtgccttgatcttggacttcccagcctccagaacagtgagaagtaaatgtttgttgtttaagccacccagtctatggtattctattaaagctgtcctaatggactaagacagcttgatcaagtttttc

SEQ ID NO: 639397 - DNA, 595 bp, Homo sapiens
ctttggttagatttattcctaagtgttttttttcttttgattctattgtaaatgggattttttctttgcttaatgtctgcatttcctcttttccgttttagtggacacgtaattgtacatatttatgggatacagagtgctaatttgatatgtgtatataatatgtaatgatcaaattagagtaattagtacatccatcacctggagcatttatctcttctttgtgttgtgaactttcaaaatcctcacttcttgctttttaaaaatatacactgaattattgttaaccataatcatcctacagtgctacaaaacactagaacttctttctcccattagctgtatctattaaccaacctctccctagcctcctctgcccctctaatgatctgggctctaatgaccacaattttactctctacttttataatctgaattttttyatatagctcccacatatgagtgagaacacatggtatttttgtgtctgatttatttcccttaacagactgtccttcaggctcatccgtgttgctgtgaatgacaggatttcattcgttatggttgaatagtattccattgtgtttatataaca

SEQ ID NO: 639398 - DNA, 595 bp, Homo sapiens
ctttggttagatttattcctaagtgttttttttcttttgattctattgtaaatgggattttttctttgcttaatgtctgcatttcctcttttccgttttagtggacacgtaattgtacatatttatgggatacagagtgctaatttgatatgtgtatataatatgtaatgatcaaattagagtaattagtacatccatcacctggagcatttatctcttctttgtgttgtgaactttcaaaatcctcacttcttgctttttaaaaatatacactgaattattgttaaccataatcatcctacagtgctacaaaacactagaacttctttctcccattagctgtatctattaaccaacctctccctagcctcctctgcccctctaatgatctgggctctaatgaccacaattttactctctacttttataatctgaatttttttatatagctcccacatatgagtgagaacacatggtatttttgtgtctgatttatttcmcttaacagactgtccttcaggctcatccgtgttgctgtgaatgacaggatttcattcgttatggttgaatagtattccattgtgtttatataaca

SEQ ID NO: 639399 - DNA, 595 bp, Homo sapiens
ctttggttagatttattcctaagtgttttttttcttttgattctattgtaaatgggattttttctttgcttaatgtctgcatttcctcttttccgttttagtggacacgtaattgtacatatttatgggatacagagtgctaatttgatatgtgtatataatatgtaatgatcaaattagagtaattagtacatccatcacctggagcatttatctcttctttgtgttgtgaactttcaaaatcctcacttcttgctttttaaaaatatacactgaattattgttaaccataatcatcctacagtgctacaaaacactagaacttctttctcccattagctgtatctattaaccaacctctccctagcctcctctgcccctctaatgatctgggctctaatgaccacaattttactctctacttttataatctgaatttttttatatagctcccacatatgagtgagaacacatggtatttttgtgtctgatttatttccyttaacagactgtccttcaggctcatccgtgttgctgtgaatgacaggatttcattcgttatggttgaatagtattccattgtgtttatataaca

SEQ ID NO: 639400 - DNA, 531 bp, Homo sapiens
gtgcctcagctgaccacctcccaccttggaggagcccataaccattgtctgcctctccctacatccatcctgcctcctcctggccccttccggcccagatccttcctcgcccagccctgctgatcccagtgcaggctaatctgcctttcatgaggcagtccttccccatctgttccaacaatggtaaggaaagattgaacccttagggcttcattctgacttttttttttaaaaaaaacatgtaatttgctcagtccaagtcccaggtgaccagctctgtgactgggtatctctttgtggcttggagctgggatggggacaggaaggcgtggcagatggggtaggtgggagaggatgactcacacaagataatggcagaaacagtgatgggatgatgtctttgtgtatctccaggagaaagtggatattcagtaatcacctgggagagatgcccatgacactagatgggaaaagggattttcattagaataccggaaagaccacaytggccatcactgaggcccagggttc

SEQ ID NO: 639401 - DNA, 527 bp, Homo sapiens
gagctgacagttaaagaaagcaagtttttagagcaatagtgtacagcaaaatggctgctccacagacagagcagggccatcccataggcagagtagcacttgtgcattgctggctagctctatttatagctgctcctaattatatgctaaataagcggtgggttattcacagattttctagaaaaggtgtggggaatttccagaactgatggttccttcctctttaaaccatgtaaggtaacttctgggttttgccatgacatcaactgtcatggtgctggtgggaagtgttttacagcatgcaaatgtattataattcctagtcctaactgcttttggctggttcctttgctwcatcctgttttgatcagcagtgtcatgaaaacaagtcctgttcatctcctacctctccttgccctttccacttttctgcacacagcaactttcacctgcgcacccaggaatccacactttaagtcttaacaacctgaggtgttgttgagaaaaaactacaaacagtggtgcgc

SEQ ID NO: 639402 - DNA, 394 bp, Homo sapiens
gaattctcttgtttgcgtgcagtttttgttgctttctagtgctttcatatgctagctcttaacaacaagtattctggggcaaacaagaagatttatatttttatatctgtatttgtgcctaatcaactgctggccactgtaaactgcaaaaccgtgatgctgctycatgatggctacatttgtcttctatcaccatgcataggaatgtatttctgggccaggcacagtggttcacgtctgtaatcccaacactctgggaggccgaagcaggaggatggctggggcccagcagtttgagaccagcctgggcaacatagcaagacctcatctctaaaacaaaaatttaaaaattagcgaggcatggtgagtcacgcctatagtcccagctactcag

SEQ ID NO: 639403 - DNA, 596 bp, Homo sapiens
aaaaaaattatttttgagtacttaccagcatattatttgttgatcaaaactattagaagaacttttaaaaactgattatgaatgcttctaaaatgttttttctctcctaaagaccacaggaaaaaagaatgaaaatcttaaccaagcattatgttttggcttcagatgccaaaagaaagcaaaatatttaaggccaagattaaacagagagtgtaattcaaaagttaattatttaaagaaaaaaaaatcaactaagtagagagaaactgaaactcttctttattgtgacagtcattctctgggtattatacaaaaagggctgcagtctgataaagggagaaacccgtatgctttgtagtcaagcccaacttgaatatgacaaatatggttttattctggattctcatattcagaatgtttgagttccagttttaccatctctaaaatgagagcaaaaccacctatctcatagarttacagaaacaatgaactgaaacataatagtttccttccctgaaattaaaaatacttaatttctgaggtttaatactaacagacattggcttgaaaaactctttaaagaggcagcagcaaat

SEQ ID NO: 639404 - DNA, 596 bp, Homo sapiens
aaaaaaattatttttgagtacttaccagcatattatttgttgatcaaaactattagaagaacttttaaaaactgattatgaatgcttctaaaatgttttttctctcctaaagaccacaggaaaaaagaatgaaaatcttaaccaagcattatgttttggcttcagatgccaaaagaaagcaaaatatttaaggccaagattaaacagagagtgtaattcaaaagttaattatttaaagaaaaaaaaatcaactaagtagagagaaactgaaactcttctttattgtgacagtcattctctgggtattatacaaaaagggctgcagtctgataaagggagaaacccgtatgctttgtagtcaagcccaacttgaatatgacaaatatggttttattctggattctcatattcagaatgtttgagttccagttttaccatctctaaaatgagagcaaaaccacctatctcatagaattacagaaacaatgaactgaaacataatagtttccttccctgaaattaaaaatacttaatttctgaggtttaatactamcagacattggcttgaaaaactctttaaagaggcagcagcaaat

SEQ ID NO: 639405 - DNA, 338 bp, Homo sapiens
atctccagttccacatactagtaaggtccactttcaattacacttccactattagaacagatgaaaagttaaacattcaatcagtcaggrgaatgtgaaatattaccatggtttacccaactattataatctctcaggcactgagaactcagcataaagtggttattccatgatgtcagcatggaaacgtatccattatttagctatccattaattcagccaatcttcctttggatctacttatagctcaggctgctataggttgttctaaacctaacttggattgtcctagtgttagtttaggttatcttcattcttaaatctactgtttgattgta

SEQ ID NO: 639406 - DNA, 671 bp, Homo sapiens
tttgctccatgaaactgagatcttttaaatcctcattctaaagtccaaatcctcctttaggcaacaatccttcaaagtccagaatagactaatcttgctcccactgggtccattcttttgcagactttcaaggaactggccgagttgttatcaggaaagtaaagcactgttaaagccctggccagccacctcacaacagkgtgccttcaggtgagtggtttcagccaatctctgttcagacatctgtaagatggataatgataataacgtctacctattgcagaggattgatgtgaggattatatgaaaatgcaggtcaagtgcttggcctggctcatagtaagcactcagtaaatattaatcccctgtgtcggctatctagaaggttctcagtgcttcaaaacacacctacacaagccatgactgaaaatgttaggtgaagagaatgagaaacacacagcaaggccaagctacagacaagttacaaacttcatccaacaggctagtgttcataaagacacttcaaggcaaaccaaaaggtcaaaatacatagaaaaactctcatcagaaaccagatttcaaatttaagccaaaatgagacattattatgcagtccaccagatttttttaaatgttgaggtttgactacaacaagtatcctaaaattaggg

SEQ ID NO: 639407 - DNA, 671 bp, Homo sapiens
tttgctccatgaaactgagatcttttaaatcctcattctaaagtccaaatcctcctttaggcaacaatccttcaaagtccagaatagactaatcttgctcccactgggtccattcttttgcagactttcaaggaactggccgagttgttatcaggaaagtaaagcactgttaaagccctggccagccacctcacaacagtgkgccttcaggtgagtggtttcagccaatctctgttcagacatctgtaagatggataatgataataacgtctacctattgcagaggattgatgtgaggattatatgaaaatgcaggtcaagtgcttggcctggctcatagtaagcactcagtaaatattaatcccctgtgtcggctatctagaaggttctcagtgcttcaaaacacacctacacaagccatgactgaaaatgttaggtgaagagaatgagaaacacacagcaaggccaagctacagacaagttacaaacttcatccaacaggctagtgttcataaagacacttcaaggcaaaccaaaaggtcaaaatacatagaaaaactctcatcagaaaccagatttcaaatttaagccaaaatgagacattattatgcagtccaccagatttttttaaatgttgaggtttgactacaacaagtatcctaaaattaggg

SEQ ID NO: 639408 - DNA, 541 bp, Homo sapiens
ccaaagggggctgagtcaagcattcctttctataagatggcgtttgacccttaaatgacaatttgagaaacagaaaggcttcacagtctaaataatttaaatacggtgcattacagagcagcaccagaaaaaaagctattgttatctagtactttgtgatcttctcctttattattaggaaatgtaggcacttcaatacatttacacataacttccttagtaggtaactaaacttttagaaaaaatctggaggataaraatatattggaagaatattttaacaagctcattaaaacagagaattatttctttaaaaatgttgatagttatgctataataaaaacttgagaataaatgcaaagatgtggtcagaaacccaaaaagtaagaattttttggcataaagtgatgctttgggtgggaaagaatataaacaaaagtcataatttagagaaaaatcatatattactgaatcaaattaagttacaagactcagtgctgagaaaaatgctctgcaaatttatagaatgcatcctgtgtaa

SEQ ID NO: 639409 - DNA, 572 bp, Homo sapiens
gaggtggtaagatgtggccaaaggtatccagctgcacaggacaaagatggctatagaacccaaaccactattctctaaattgttggttctcttcgccaagccacgctctctccggggtccacttctagatcaagcaggactcggagtacatcaagctaaatgaggttagcatgagaaaggaaagaggctgaaaaagaaagaaaatgcccatccagccatcggtctgtgcagagtcatggaagatgggccttcttgctcagtgttgcaaaaagagagttcttatcagctctcctatcgactcccaagcccagtctgcagtggcgcccctggcctacttacaggcattggaaagaggcaaatcaaatgctgccagggaagaaaacaacagaggaggacttctattatcaaacctcaaagcctccgcagcttagcctcagccttctcctctgtccyggagcccacttgctgacctagacagagatatttcgaggcatgggtgtagcacgtgcatacgtgaccccaatcccaaacccccaagcaatgaaatttcatctggattttcaatattagtt

SEQ ID NO: 639410 - DNA, 571 bp, Homo sapiens
gaattctcaccacgtaaaggatttctgctggcttcctttaaggcatgaacttcaagtgcaacacagtgagagactttacaagtttgagtcacaagcatttgtggaayggagcgggggatggggagcagtttttgttttttctaattctggtgaggtaataaattttccggaaccttttttaagaaaggtttacaagtaaatagaaatatccgttttatgtaagcttttcaacacttgggagatcggtgaacttcattgcagttaatgaatattttctgcctttattgcttgcttttctgctttgggtgactgaaatattaacattatttgagtttcaagataccgatcatttaagaatctgatgatgaacctttaaaaaccagctactaatttcttgacataactgatacagcttttaataatgtactgttgctggctaggcttttaaaaatttaatattcatagggaggcttattcaattttaattaaaacataatattgtaagttttttatgaaacaaaatttttcctggattttctttcttttcaaaagaataagaaaggttatgtta

SEQ ID NO: 639411 - DNA, 604 bp, Homo sapiens
tgtaaatattttgggagtataataccaagaccatcactgtatatacaccagccataataccattctgtaaagagtggatttaaacatcagacagatcaccttaaatgtcatctgagtcagattgataacgcaattaccaaagaacttttaaactggaatgctactaaagtaataaaacgttatttccctaattccaatgctatcttattgggtattttaaaagtagaaaaacttgtctatgaataagcaaaataaatggttctagttatataataatactaacaattttaagtttcttacatttatattaaaattaagactagaatrtactagtaaaatagaaaaaatacatagtgtaaatgaaaagtgcttattagcagttcggcatttcagatgtaccaattacaactttcatacttgctgtttttatggtgatgattaccctcttaatatatgactgtttctcagtggtgtctacagtgggcatagtaaaaattaaggactgctatttaaggggctgggcattaatttgtttctttaataaataaattatatttaaatgaaatcagggtaaaattcttaggtaattggaattatttattgt

SEQ ID NO: 639412 - DNA, 587 bp, Homo sapiens
aaagacttatgaggacatacagtgctacttatatctaatgtttaagtagctacgtttaaattactgcttttwaaaaatgctattataacatagttttaacagtttgggagcatattaggcttttatgaaatgtgtgtttctgagacagagtcatgatctgtcacccaggctggagtgcagtggcgtgatctcggctctctgcaacctcctcctcccaggtgcaagcaattctcctgcctcagcctccggagtagctgggactccaagcatgtgccaccactcccagctaatttttgtagttttggtagagaaggggtttcaccatgttggcaggctggtctcaaactcctgacctcaagtcatccgctcgccttggacttctaaagtgctgggattacaggcatgagccaccacgcctagcctggacggtgtatttctcaactggtgatagttcattccatttttcttaatgttgcatcattaaaatttggaaagttttaatatatgcagttgcctgattttatgttagtgtggtgaatatttgcatcatgaactcagttgcacagcatggattacttgactcacag

SEQ ID NO: 639413 - DNA, 641 bp, Homo sapiens
gattcatcgtgataaaacatagaatctttgtttcctaggccaattacctaaaagataaaagccttttaccatttcctgttaagagcaaataaatacttcaagaaaacctatttgttttgacagaaaggaccaagttctagttttgcatcagtgtagttttgatagtaaagttcaatttttagaaagccttacaaataattccattctaattttagccagcttggtcatacctaaaattcccktcacaaaatccatgttctacaaatcctccacaaccttctaatatccttttcatcattggccttatacttctttctcattttgaaacaaccagtccttttaggacaaaaattactctttttctcttaaaaaaaaaaaaatcttttatacctcatagcttcacttaccaaaaacgtgtttactttccccgaatatggagtcatttgccctactatttccagtttcagttaccatatagtcattagaatatttaactcttagtaatcttaatttctactaaaaacctaggaagtaaagtaaagcagttttgaactttctgtcatatagtaacactttctgtatacacatttcagagtttctaacaacatatggggcttccccatagaaaaatattttttcaa

SEQ ID NO: 639414 - DNA, 598 bp, Homo sapiens
ggtgggctgatgtggagaagaaaaaaaattgaaaaacagaatgtctcctaaataataaataagtaaaatcraattgtaatttaattcgaatcctaccactgatggattgctcatgattcgtggtgtgacatgatgtgttgtttaccatttcctgacatgctgccttactacctctttgtctcccctacatttatcttgtgacatttaactacttgtttacactttgttgtccccagttacaccatgagctctgtgagggctgggagtgggcatactgccttcacagtgcccaactcacagcaggtattccagaaggctttgtcgtctggtttagtgaagcgtccagcccaggaatggaggacaggctagttgtatgtattcccttctcagatgcattagcttggcagtttggtcggcatcctctccctgtctcctttttgtgttggtcgattatagtctcatgctacaggagacaacctggtgccatggaatgagagcatctgatttggaatcagtgacataccagtgcaaatcccacctctgctccttagcaactactttctcaagctttagcagctaaaacagggataattatacc

SEQ ID NO: 639415 - DNA, 527 bp, Homo sapiens
cagaaagtataaactttaccacaaaaaatatttggcttgtaaatgttaatttgcctgcagtttgcagaagaatgtctgctataataaaaggtgcaaatacagtttgttgttaagtattatcagctagatttgaaaatgtatctcttgttttgaaatacagatgtacaactctctaagcctacaactctagagaagacaagagtgaaatacagcttttgtaacattcatttttttaaatcatcaccatcccacccccataaaatacatttgcagttttctgtgattatgttttagtttgattttaggttaacagaaattcacataagcattaaattccttgtttaaaatataaaatgtactttgtacataagtcttctcattttatgttactttgttttccaagttaactaaatcaccatgttatggaatgaataaggcaatttttgttacctgaaaggaaaacatacwattctgcttggttctttaatttctcagtgaagatacacacataacgccttaataaaaac

SEQ ID NO: 639416 - DNA, 585 bp, Homo sapiens
catgatgcatttgtgtgatggcaggggtatggcccaggtttggactcttggggtttttttgcctcccatggcagtgtcctctctgctgtgatttgctacctgtgaccttcatgaggccaaatggyacagaaagcaaatgccatggaagttcagggggagaggaggtcgctgtgtgcttggcttagagagccagagaaggcatcaaagaggaggaggaaatcaatataaaatctgaagggtgggcagaatttagataagtttcatttcacatgtggaggcaggaggacatcgcagactccagcaggttaacatgagagcatttgccatgcaaaatgtactgtctaggacttctaaggcacatccactttaatttgttggtcacttatttataggtgcattgctccgatctctgcccccatctttatttctcagccttttccatgtccttttctgtctctcacaaagacactgtcagtggatttagcatctatcctaaatccaggatgtgtataaatataggcacaagctcttaatttaaacaaataaggacacttgtggtcaaccagaattttcagttactcaaga

SEQ ID NO: 639417 - DNA, 466 bp, Homo sapiens
acatgaacagttttcattgctcactccctggcctccagctgtcctcatgtcacagtgggctgtgtcacatctgcatcacaggcctgtcctttgagggaacaggcacaggcccacccccaggaagaagaaaaacagttgagcacatttgtctgattgcatgccaggaagcctgtctttgaataggagacagcctttcctctggccatgatcgtggattgccgtttgttggtcactgttcctttgtaaggggatttattatgcgttagtgatctagaacgtatgcatcctttgataggagagactgcaaaacyagaagggttgcagcaggcctccctccttgccagtgagtgaggactgtttgatttaagtggcctagcaacagaatcaccatcagtcgacaagcacagcgctcttaaagctccgctctgacatgctttgcctttctgcaatggaatttatgactttg

SEQ ID NO: 639418 - DNA, 522 bp, Homo sapiens
tgagaccagcacaggtagtaggaatgtgggtgctcagagaaagtggaaatcccttcttggtggataggaattcaggaaaggcttccaggaggaggaggaagcaggttagatgtgtttggggttcagcaggggaggagtgtcgacacttagttcaacagataaagacttgaagacsttcccttccacacagcttgtcaggttgttagtgactccactctcacttccagcctagccactcactcagttttgttaactgccccacagtcctgatctatatcttaggaaggaggaactggctttctccacttttctttcccagtttgggaaccacaagcctggtgcttcccctctaaagccatgggggtaagtaaaaggagatgtactgtccctatggaggatggagcagccccaggacagggtccccaaaatcaccatcgacttgacgtcccagccggcagccttgacgcttctggcttagagtgggctctgctaaggatggcatcaccacatccatgtctgcat

SEQ ID NO: 639419 - DNA, 522 bp, Homo sapiens
tgagaccagcacaggtagtaggaatgtgggtgctcagagaaagtggaaatcccttcttggtggataggaattcaggaaaggcttccaggaggaggaggaagcaggttagatgtgtttggggttcagcaggggaggagtgtcgacacttagttcaacagataaagacttgaagaccttcccttccacacagcttgtcaggttgttagtgactccactctcacttccagcctrgccactcactcagttttgttaactgccccacagtcctgatctatatcttaggaaggaggaactggctttctccacttttctttcccagtttgggaaccacaagcctggtgcttcccctctaaagccatgggggtaagtaaaaggagatgtactgtccctatggaggatggagcagccccaggacagggtccccaaaatcaccatcgacttgacgtcccagccggcagccttgacgcttctggcttagagtgggctctgctaaggatggcatcaccacatccatgtctgcat

SEQ ID NO: 639420 - DNA, 536 bp, Homo sapiens
atcctgagaccagcacaggtagtaggaatgtgggtgctcagagaaagtggaaatcccttcttggtggataggaattcaggaaaggcttccaggaggaggaggaagcaggttagatgtgtttggggttcagcaggggaggagtgtcgacacttagttcaacagataaagacttgaagaccttcccttccacacagcttgtcaggttgttagtgactccactctcacttccagcctagccactcactcagttttgttaactgccccacagtcctgatctatatcttaggaaggaggaactggctttctccacttttctttcccagtttgggaaccacaagcctggtgcttcccctctaaagccatgggggtaagtaaaaggagatgtrctgtccctatggaggatggagcagccccaggacagggtccccaaaatcaccatcgacttgacgtcccagccggcagccttgacgcttctggcttagagtgggctctgctaaggatggcatcaccacatccatgtctgcatttcttctcat

SEQ ID NO: 639421 - DNA, 536 bp, Homo sapiens
atcctgagaccagcacaggtagtaggaatgtgggtgctcagagaaagtggaaatcccttcttggtggataggaattcaggaaaggcttccaggaggaggaggaagcaggttagatgtgtttggggttcagcaggggaggagtgtcgacacttagttcaacagataaagacttgaagaccttcccttccacacagcttgtcaggttgttagtgactccactctcacttccagcctagccactcactcagttttgttaactgccccacagtcctgatctatatcttaggaaggaggaactggctttctccacttttctttcccagtttgggaaccacaagcctggtgcttcccctctaaagccatgggggtaagtaaaaggagatgtactgtccctatggaggatgragcagccccaggacagggtccccaaaatcaccatcgacttgacgtcccagccggcagccttgacgcttctggcttagagtgggctctgctaaggatggcatcaccacatccatgtctgcatttcttctcat

SEQ ID NO: 639422 - DNA, 507 bp, Homo sapiens
acaggtagtaggaatgtgggtgctcagagaaagtggaaatcccttcttggtggataggaattcaggaaaggcttccaggaggaggaggaagcaggttagatgtgtttggggttcagcaggggaggagtgtcgacacttagttcaacagataaagacttgaagaccttcccttccacacagcttgtcaggttgttagtgactccactctcacttccagcctagccactcactcagttttgttaactgccccacagtcctgatctatatcttaggaaggaggaactggctttctccacttttctttcccagtttgggaaccacaagcctggtgcttcccctctaaagccatgggggtaagtaaaaggagatgtactgtccctatggaggatggagcagccccaggacagggtccccaaaatcaccatcgacttgacgtcccagcyggcagccttgacgcttctggcttagagtgggctctgctaaggatggcatcaccacatccatgtc

SEQ ID NO: 639423 - DNA, 546 bp, Homo sapiens
ccccattctttctggccttcaataaaagkgacatgggtgaaatgggactacttcccccacctcattggccaactcagtaaattccactaaaatgaattagagaatttgagtttcatcaacaaacatagtatctactgtgggataagggtatctctgttattgttgactacccaacaattcttctttctggtaaaaagataacagtaaatctatcatttctttggggaacccatttgatagggttgggatatcccacttccaagatttggacatgtgtatgactcaggcctatttacatggtatctttgatgcccagcagtgcctagaacacagtaggtgaacagttattacgtaaatgaatgaatgtgaatttcagttgttagagaagtcttggctacagcgattgattcattagtaagtacgtatctcagcagttctcaaactttttgatctcaatctacaccttttcatacttttaaatactattaaagactccaaagagctaccttttatcacagcaagccattttttccactacaaagagtg

SEQ ID NO: 639424 - DNA, 527 bp, Homo sapiens
agtactgaaaaaggagggtttcggtaaatgctcacacattgaattttgaagccctcagccttctcccttcacttgagttccagaatgacttcactctcaggcaaggatttggaaatgtcttctgtgggcattctagacaacccaaggaaaaggtcttaagaaactgaacttgtaatgcactggccaaatcacttacagtgaaacccagatgtcataaaatcataaaactatatgcaaacagattctattaatctgttttaaatacaccatgaataaactagagcagcygtctcaggatcatcagatattagagggaaactaccatttggcccagcagtggtatatattcaaaggaaaatagatcattacaccaaaaagacacatgtatttctatgttcatcaccgtgctattcacaatagcaaagacatggaatcaacctaggtgcccatagtagtggattggataaagaaaatgtggtacatatacaccatggaatactacacagtcataaaaaagaatgaaatca

SEQ ID NO: 639425 - DNA, 477 bp, Homo sapiens
tatcataaatatatcttatgtatttattatataacatactatgtattattatataaatatatacttatatttatatattattgatatataaaccatacatatttatatgaatataatctgagaataactagaatgcataygattggctaataaaatctgcctaggaaatgtttctgaaaaattccaggtctcacacatgcggagcagactgcaaatgacacttcagtttacaaacccttggtattgagtttgattcttcatttatacgattgctactctgccagatggtagagtggctttaatccagggaactaactgtggtgaaagtacacagaacagtgtaggtctgactcatgcaaaaactgcatataaaacactcagaaaccaaatagcagcagcaatagtacagtgtcaggccctattactgttattcaagtgttttcttgctcattgcttaatttattctgcacgacaatt

SEQ ID NO: 639426 - DNA, 482 bp, Homo sapiens
agctttcttttgtcacacgtttgcttgaccagaaatgtagttaggatgtgtgsccccactcaaacgtcatgtcaaaatgtaatcccagatttagaaggtggggactggtggtaggtgactggatcatgagggcaggtttcccctgaatggcttagtaccacacctctggtactgccctcgctacagcgaggtctcacaagatccggttgtttagaagtgtgtaccatcttcccccgctctctctctcggctgttctggctatgatttgtctgctccccctttgccttctgccatgattgtaagttttctgaggcttctgcaaagacaagcagatgccagcatcatacttcctgtacagtccgaagaaccatgagccaattacacctctttttttaataaattacccagtctcaggtatttaactgcagcaatgtgagaacaaactaatacagaaaattcctagcaggagtgaggtattgcta

SEQ ID NO: 639427 - DNA, 556 bp, Homo sapiens
ttgcagtgagctgagatcatgccgctgcactccagcctggcaaaagagcaaggctccatctcaaaaaaaaaaaaaaaatgtaaattcccaatgttggaggtgaggcatggkgggatgtgatgggctcatgggagtgggtttctcctgaatggtttagcaccatgtccttggtactgtcctcatgatagtgagtgaattctcatgagacctggtcatttacaaatatctggtacctcccctcactctctcttccccctgctctggccatatgatgtgtccactccttctttgccttcgtctatgattgtagggattccgatgcctccccagaagcaggtgctgccatgcttcctgtacagcctgcagaaccgtgagccagttaagcttcttttgtttttaaattacccagtctcaggtatttatttttagcaatatgagaacagactaatacaaccagtttctcacattcaggttacaaacacatttcaaatgcttttcttaaaactgcagcttctaagacttagcaagaaaatcatagaaagcaaagaagaaatat

SEQ ID NO: 639428 - DNA, 556 bp, Homo sapiens
ttgcagtgagctgagatcatgccgctgcactccagcctggcaaaagagcaaggctccatctcaaaaaaaaaaaaaaaatgtaaattcccaatgttggaggtgaggcatggggggatgtgatkggctcatgggagtgggtttctcctgaatggtttagcaccatgtccttggtactgtcctcatgatagtgagtgaattctcatgagacctggtcatttacaaatatctggtacctcccctcactctctcttccccctgctctggccatatgatgtgtccactccttctttgccttcgtctatgattgtagggattccgatgcctccccagaagcaggtgctgccatgcttcctgtacagcctgcagaaccgtgagccagttaagcttcttttgtttttaaattacccagtctcaggtatttatttttagcaatatgagaacagactaatacaaccagtttctcacattcaggttacaaacacatttcaaatgcttttcttaaaactgcagcttctaagacttagcaagaaaatcatagaaagcaaagaagaaatat

SEQ ID NO: 639429 - DNA, 556 bp, Homo sapiens
ttgcagtgagctgagatcatgccgctgcactccagcctggcaaaagagcaaggctccatctcaaaaaaaaaaaaaaaatgtaaattcccaatgttggaggtgaggcatggggggatgtgatgggctcatgggagtgggtttctcctgaatggtttagcaccatgtcctyggtactgtcctcatgatagtgagtgaattctcatgagacctggtcatttacaaatatctggtacctcccctcactctctcttccccctgctctggccatatgatgtgtccactccttctttgccttcgtctatgattgtagggattccgatgcctccccagaagcaggtgctgccatgcttcctgtacagcctgcagaaccgtgagccagttaagcttcttttgtttttaaattacccagtctcaggtatttatttttagcaatatgagaacagactaatacaaccagtttctcacattcaggttacaaacacatttcaaatgcttttcttaaaactgcagcttctaagacttagcaagaaaatcatagaaagcaaagaagaaatat

SEQ ID NO: 639430 - DNA, 590 bp, Homo sapiens
tcaagcaatttattcaccttgacctcccaaagtactgggattacaggcgtgagacactatgctcagacattgttgctgttcttctgaaaaatctttyaaatttccatattttagtaattgcattactgcttaaaaataatttatgcaattcctattgctgaatgcttatgatatatgacttttatttttaacacactgagatattaaaatgttataaactttattccataactaaattttttttgcatttttatttttgaggcatgcttgcttgtgatcttggttcaattttttatcaaggtggatctttttcctttctccttcaagaaagctttttacatattaaagacattaataagattactattatttcttgtttgttccaggcaataggatgaattttagcgtgacctctattggatcctgacgccccaggcaggttgaaattcaggcactgatatttactcgttacatgtctttatgaaaaggaatgaagaatggatccacttcatataattatagtaaaaaataaagaaataaggaataaaaattaataaataaaccttgactcaaggaaactaccaaataaa

SEQ ID NO: 639431 - DNA, 612 bp, Homo sapiens
tgacctgactctccaaacctgacagtccgttctacgattctttagaatttcttttgctgctrtgttcagaatctgtctattttaaattaaaatagcattttctgttttatgctgagagctgtgaggtaactgggccccttaaaaggaatctggtttattccagaatattctaaagatacttggcaatatcagtggctgcttgcattccacgcccagctcaaggaaatgctgaatgggaaagactgctaccccttgaacaatggtgttcagtcacagatgttgaggtctttgtcaccagtcgtgtatggagttacaaggcaagggaaccaggtatgtgagtctcactttctatttctgggcctaatttacctgaagtgccctggaagaacactatcaatctctcacttcttagtatgtattcacattttaccctacaacttaatgcattttgtaaactttagcaacaatacactcaattttactaggctgatatgagaaaaacattattcatagatttatagcacatatctgtagtcacaagaattctgacaaacaaaatccaactatggtaaaagtataacagatgtgatcatggtgactttacttgaataa

SEQ ID NO: 639432 - DNA, 539 bp, Homo sapiens
tagagattactctgttatggtaagaaagcagcttcattgaaaagtgattctagttaaattttaggtttattttatcagaataaggcaagatcaaaggctcttagtttatttcgaggctcaaatcaaataaaaacaaagatccatcaacatcttttaaataaacaataaggatttccttgtgaattattattttaacatgattcaaccaacatttctgtttaacctacatattacaacatccatgytacacatatgttcaccaaatttaaattattatgtatgtctataatttacttatgtggcatcattatcataaaaacagcattcatacattgtggtatttaaactataatgcaaagatagtttacataagtttatttttattagagaattgtttacaacttaaaacagacatgacacaaatgtaagaaaaataatcagcatactatatgtagacactaaaatggtaaataaaaatatatatagataaagaataaatatgatgtagatgcatagattgctaagataattgatgacaa

SEQ ID NO: 639433 - DNA, 551 bp, Homo sapiens
gctacctaccattaatgcttcctttctttacacaatatgatattttatggttccaaaatatcattttgctttggattatttttctctttgtgtctgaaatatttttccatgccttgtttaacagatggatgcctaatcatctttcaccacttgatctcatgtatctawctactgtatttctgcttcatttattcatttacacgtcttttgttttttactggactataagtcacttgatggctggagttaggttttgtatattcatctctacatactatttagaaattggcacaagcacatggcaataaaatattcattcaacaaactttcctggtgattcataagtgaaaaacaaacaggtaaaaataaggaagggagaaagaatgaagaaaaaagaaagatgtagtttaaaattagggtcaattctattgcctaattaattacttcttaaagaataatctgcctacacgtttagaagaaaaataaaaattagtagcaacataatagttttgaataattgtattaaaagcaattacaaaagatctcagaaa

SEQ ID NO: 639434 - DNA, 665 bp, Homo sapiens
ttagcagtataattttggatacacactgtatgttcattctcacgctgctataagaacatacctgagactgggtaatttataaagaaaagaggtttaataggctcactgtacacacatggctggggaggcctcacaatcatggcagaaggtgaaggaggggcaaaatcatgtcttacatggtggcaagtaagagagcaagtgcaggggaactgccctttataaaaccatcagatctcataagacttattcactactacaaaaacaatgcaggaaacatctgtccccatgattcaattacttctcaccaggtctcttccccgacacgtcgaatcatgggagctataattcaagatgagatwtgggtggggtcacagccaaaccatattacacacaaaaaggaaattaaaggtattcatattagagtttttaattaagcacctaatgcctcaatccaagctcagtgatacataattaacttattttgttgcttactgtattaaaggaaagcaatttaattaccccataggcattttttttcttcatgtgtcactaacatatattactggaccttaaggacgtatcttatagatgatgtgttttcacaacatgctactaaaagaccagtataggaggcattatattctccaggaatatcttatgtattg

SEQ ID NO: 639435 - DNA, 665 bp, Homo sapiens
ttagcagtataattttggatacacactgtatgttcattctcacgctgctataagaacatacctgagactgggtaatttataaagaaaagaggtttaataggctcactgtacacacatggctggggaggcctcacaatcatggcagaaggtgaaggaggggcaaaatcatgtcttacatggtggcaagtaagagagcaagtgcaggggaactgccctttataaaaccatcagatctcataagacttattcactactacaaaaacaatgcaggaaacatctgtccccatgattcaattacttctcaccaggtctcttccccgacacgtcgaatcatgggagctataattcaagatgagatttgggtggggtcacagccaaaccatattacacacaaaaaggaaattaaakgtattcatattagagtttttaattaagcacctaatgcctcaatccaagctcagtgatacataattaacttattttgttgcttactgtattaaaggaaagcaatttaattaccccataggcattttttttcttcatgtgtcactaacatatattactggaccttaaggacgtatcttatagatgatgtgttttcacaacatgctactaaaagaccagtataggaggcattatattctccaggaatatcttatgtattg

SEQ ID NO: 639436 - DNA, 601 bp, Homo sapiens
tctcataagacttattcactactacaaaaacaatgcaggaaacatctgtccccatgattcaattacttctcaccaggtctcttccccgacacgtcgaatcatgggagctataattcaagatgagatttgggtggggtcacagccaaaccatattacacacaaaaaggaaattaaaggtattcatattagagtttttaattaagcacctaatgcctcaatccaagctcagtgatacataattaacttattttgttgcttactgtattaaaggaaagcaatttaattaccccataggcattttttttcttcatgtgtcactaacatatattactggaccttaaggacgtatcttatagatgatgtgttttcacaacatgctactaaaagaccagtataggaggcattatattctccaggaatatcttatgtattgtagacgcagcttgttgcatcctttgcattgagataaatgtaaaatatttaactaattatgtcaatttatgttgttagaataaaatgctrtttgaaggattgtcaaattttagttattaaaagtctatatgtacttagagtctgtccaaaacaaaactgaaacattaga

SEQ ID NO: 639437 - DNA, 586 bp, Homo sapiens
  misc_feature 1, 2, 3, 4, 5, 6, 7, 8, 9, 10: n = A,T,C or G
nnnnnnnnnntcttcttaaaagctcctatataacctgcccctagaaatttctcactgatcaccctttaaccasgatgtggttaaaggaatgttgcgtagctgtaaaaaatgccttttattttagtatatttccacttaaattttctctctttgagactaccgaggtatttattatagtatagtatatattacgtattctaaatatttagtgccttattcagagaaatttgcacagctttgcatatcacatttattttcccagactgaatacaaagactttccttccccaaatcataatagcaaaaaattccatttatgtaatgctctaaataaaatgacagttttcaacctaaggaaaagtctgttgctctgatgattaacctctttaactattttaatgttttaaacacaaatacaataaacttcttttctcttccctggtcttcctggagtaagtaaaagctggattgagagggtgaaacgacaacaacaacgtcaataatggcaacaatttgtctccagttacattgagtttaagtaattaatagctgttttgattataatagctttataatatatttttaaa

SEQ ID NO: 639438 - DNA, 586 bp, Homo sapiens
  misc_feature 1, 2, 3, 4, 5, 6, 7, 8, 9, 10: n = A,T,C or G
nnnnnnnnnntcttcttaaaagctcctatataacctgcccctagaaatttctcactgatcaccctttaaccaggatgtggttaaaggaatgttgcrtagctgtaaaaaatgccttttattttagtatatttccacttaaattttctctctttgagactaccgaggtatttattatagtatagtatatattacgtattctaaatatttagtgccttattcagagaaatttgcacagctttgcatatcacatttattttcccagactgaatacaaagactttccttccccaaatcataatagcaaaaaattccatttatgtaatgctctaaataaaatgacagttttcaacctaaggaaaagtctgttgctctgatgattaacctctttaactattttaatgttttaaacacaaatacaataaacttcttttctcttccctggtcttcctggagtaagtaaaagctggattgagagggtgaaacgacaacaacaacgtcaataatggcaacaatttgtctccagttacattgagtttaagtaattaatagctgttttgattataatagctttataatatatttttaaa

SEQ ID NO: 639439 - DNA, 586 bp, Homo sapiens
  misc_feature 1, 2, 3, 4, 5, 6, 7, 8, 9, 10: n = A,T,C or G
nnnnnnnnnntcttcttaaaagctcctatataacctgcccctagaaatttctcactgatcaccctttaaccaggatgtggttaaaggaatgttgcgtagctgtaaaaaatgccttttattttagtatatttccacttaaattttctctctttgagactaccgaggtatttattatagtatagtatatattacgtattctaaatatttagtgccttattcagagaaatttgcacagctttgcatatcacatttattttcccagactgaatacaaagactttccttccccaaatcataatagcaaaaaattccatttatgtaatgctctaaataaaatgacagttttcaacctaaggaaaagtctgttgctctgatgattaacctctttaactattttaatgttttaaacacaaatacaataaacttcttttctcttccctggtcttcctggagtaagtaaaagctggattgagagggtgaaacgacaacaacaacgtcaataatggcaacaatttgtctccagttacattgagtttaagtaattaatagctsttttgattataatagctttataatatatttttaaa

SEQ ID NO: 639440 - DNA, 594 bp, Homo sapiens
taattttggagggatattttattcattcttttctgtgcatttatgaaagaagtaaattccttccataggacctcagtttgtcaaattgccaggattttattaatttatttaattattacttacatccaataaattcagcttcttatgcaagaaaaacaatctgttagaagayaggttttttgccctccttattaaattatttctcattatctttgtctttctattccctgtgtattctgatcatatttttattcttcttcacttctttgctcttttgaatcagtaaagcccataagagatgtgtacattttcacctagtgtctatgatattgactccaattttattcaagcgtctataaacaaaaatacacatttgcaaaaggtaactggaaattttcgctcagcttcagtgagctcaaatagcaagtctcattaccattttcaaggttactatacatggatttataaacatctctattcaattatggattgaacttctgatatacaaagttgttttgataaatttttccttttaaaactaaaaccattatttcatttgctagaatattttcaggattacaaactttatttttt

SEQ ID NO: 639441 - DNA, 564 bp, Homo sapiens
tttattcattcttttctgtgcatttatgaaagaagtaaattccttccataggacctcagtttgtcaaattgccaggattttattaatttatttaattattacttacatccaataaattcagcttcttatgcaagaaaaacaatctgttagaagataggttttttgccctccttattaaattatttctcattatctttgtctttctattccctgtgtattctgatcatatttttattcttcttcacttctttgctcttttkaatcagtaaagcccataagagatgtgtacattttcacctagtgtctatgatattgactccaattttattcaagcgtctataaacaaaaatacacatttgcaaaaggtaactggaaattttcgctcagcttcagtgagctcaaatagcaagtctcattaccattttcaaggttactatacatggatttataaacatctctattcaattatggattgaacttctgatatacaaagttgttttgataaatttttccttttaaaactaaaaccattatttcatttgctagaatattttcaggattaca

SEQ ID NO: 639442 - DNA, 596 bp, Homo sapiens
ggtctttttgtctttcttcactaatttttgaaaagttgcctattagtctaattaatatagttaaaatataatgcatccctttttactcactagtaaaagatttttaaaaattatttttaacattgttctgatgaaatatttctcacatttggagccaaagagattcttcaatttgcacatatttgattttgcctgctttgaaaatttcagctagtattagagtaaatattattttttctttattctctctctccactctttcagagactccaatggaatgtgttaacagttttcttatttcttatgagatttttacactcttttctgtttttatgcctatatcttttatatttctgcatcaatgaaaacttctctttttactataaattctagatggccrcgatcttttaacttttctgctgtgcagctcaagttgaaagtgactcaaaagtaaaaagctacagtgactgtaaatctcacctcaatcaatttcgcttctttttatggttttggcacctgaagtggttgatatcttggttactctgcaatgtactgaatagctgtgcttccctcaggtttatacaatgaaactgtaa

SEQ ID NO: 639443 - DNA, 614 bp, Homo sapiens
attaacagttctgtgattgtatgcatactagaacttaacaaatatgtaaataaattgcagatgagagactcgggtttcttattttctgagaaagaagttacaaatttaaaaaaggaagaatgcaagaataaagcctgggatgctgaattagagtcagagattgtgtgtgtgtgtgtgtgtgtgtgtgtgtgtatacacataggttattatacatacgtgagttttaaaactgtacactcagagacccaaaagcagtgacatccattggcaccatgcacattaactgttgagtttttggtttctaagtaccatttttcaataaaagaaatatggctccttagagaagtagttgatcccagggctggagcagaggataatacaaaagccttatgaattgtgtgatgccaaaggtaagaaagtccccacaaaaggatggaaatctttaaaaaaatatacataactacagaagccaatctgaaatagctcccaatgggcaaacctagaaccatttaygcaattaaataaatattgataattttgtattataagccatataataaaatgccaaataataaatacatatatatgtgtatacattaaatatatatgatatg

SEQ ID NO: 639444 - DNA, 589 bp, Homo sapiens
acaatctgagaataagagaataagaagagaaagaaagaaggcaggagtcaactaaaaagtcagaaatcacacttccagtaataaagaaagaaaaaaaataaaaaaaaatccacaactgggcaggggagacatctgaatgagttaagaaaaaaataaagagagtgaggaggaaaacaaaagagacttagaaccaaggagaaaaataawagagaaagacaaaacgaagtatgaagagaaaagaaacgatattaaaaaaatgatgtcaaagtgagaacagcaaagaaatttaagaaaggaggaattaaaaacaacactcaatgtggggaatgaaataatttaaaagatggaaagataatactaggaaaataagtataaaagggagtgtaggagagaaagaagttgaagccatttaactctggggagattcatatcttgctggcattactaaatgttattcttttgacggatcacaaaagaatgagtgtttaaaaacaatctccagaattctatatagctgaaaacagttgggagactttagattcatcgatatttttacaaaaagaaaaaaaaaataaatcaagagataacc

SEQ ID NO: 639445 - DNA, 417 bp, Homo sapiens
aaggaaatggggaaagttgaagatgccaaacaaaggtaaatcttcaggtaaatgtgtagcctctgcataatctcataagcggsctttggagtattaattatatctctatggtggctgcaattcaaggcgagatgacaagatttcatattctcacagcagttattggccaaggacttcgtagttggaggagtgggaatgggaagaaagcagacatacatttccagacatttctggttgtctacacacacagacagattggcttcagtagcctaaggcagttctccacagagaattccaggtatgggccctgggaagcacaggctgggagagatgcacagaattgatacacaagatctgtgtttgctgcagtctatgattttcaaagactggatccagttatgcctcccagtgatttcc

SEQ ID NO: 639446 - DNA, 417 bp, Homo sapiens
aaggaaatggggaaagttgaagatgccaaacaaaggtaaatcttcaggtaaatgtgtagcctctgcataatctcataagcgggctttggagtattaattatatctctatggtggctgcaattcaaggcgagatgacaagatttcatattctcacagcagttattggccaaggacktcgtagttggaggagtgggaatgggaagaaagcagacatacatttccagacatttctggttgtctacacacacagacagattggcttcagtagcctaaggcagttctccacagagaattccaggtatgggccctgggaagcacaggctgggagagatgcacagaattgatacacaagatctgtgtttgctgcagtctatgattttcaaagactggatccagttatgcctcccagtgatttcc

SEQ ID NO: 639447 - DNA, 540 bp, Homo sapiens
aaaaaacaggaactagggaggagcaaggaaagaatcatgatgaatgagggatctgacatctcattgtctagatatggtcatctggagactgtcagttctttgattttttttttttttttttgagaggccgagaggtcctttcctgaggaaraaccccagattaaacaaatggaagattcaagctttaagatcagaaaggtcaatttctatgtttattagaaaaaaaaaaactgtctatggaactattggggtgatttcaattcttctatcaaaataaaaagttatacaaacatttgcccattttttttactttcatgatttaatgtttaccctgctttctgtgacttacattttcccttttttgctaaaaaagatgttcccaacccaagtatatataaaaatcatataaagtttatagatagatattatattaatagggccaattggggagtattaactatattggtttaagtttaagaatatgcaacaattattctaagcacaaagtaaatgtaaaatatattatatcaatcagcagtt

SEQ ID NO: 639448 - DNA, 540 bp, Homo sapiens
aaaaaacaggaactagggaggagcaaggaaagaatcatgatgaatgagggatctgacatctcattgtctagatatggtcatctggagactgtcagttctttgattttttttttttttttttgagaggccgagaggtcctttcctgaggaaaaamcccagattaaacaaatggaagattcaagctttaagatcagaaaggtcaatttctatgtttattagaaaaaaaaaaactgtctatggaactattggggtgatttcaattcttctatcaaaataaaaagttatacaaacatttgcccattttttttactttcatgatttaatgtttaccctgctttctgtgacttacattttcccttttttgctaaaaaagatgttcccaacccaagtatatataaaaatcatataaagtttatagatagatattatattaatagggccaattggggagtattaactatattggtttaagtttaagaatatgcaacaattattctaagcacaaagtaaatgtaaaatatattatatcaatcagcagtt

SEQ ID NO: 639449 - DNA, 517 bp, Homo sapiens
aaggaaagaatcatgatgaatgagggatctgacatctcattgtctagatatggtcatctggagactgtcagttctttgattttttttttttttttttgagaggccgagaggtcctttcctgaggaaaaaccccagattaaacaaatggaagattcaagctttaagatmagaaaggtcaatttctatgtttattagaaaaaaaaaaactgtctatggaactattggggtgatttcaattcttctatcaaaataaaaagttatacaaacatttgcccattttttttactttcatgatttaatgtttaccctgctttctgtgacttacattttcccttttttgctaaaaaagatgttcccaacccaagtatatataaaaatcatataaagtttatagatagatattatattaatagggccaattggggagtattaactatattggtttaagtttaagaatatgcaacaattattctaagcacaaagtaaatgtaaaatatattatatcaatcagcagtta

SEQ ID NO: 639450 - DNA, 520 bp, Homo sapiens
aagaacatgcatattaaaataaaatgcaaaagaaaataagctgcattatttacatagtgttgttaccatatttgtatgattatttagcaagtatttctcattaagaggatttaagatgagtatttaaccacacatatgtaaaaagaataatagactgctattttcttgtttagaggttgcagtaatttttgaaatgtcaaaataaacccaagaacatatatgcatctacatgtgtgtgtgtatatatatatatatatatacacacataatgtatctacataaaatctgaatttgcccatatactatataatttattgtattaccaattgaaattgatggttcttattctataaggctaatatacgaaattacatgtatcttctggaaatttatgttttacatgtaatttatatgtaatgtttaaccaaaaataaaacagcattataacaaggcatattaaggtaatgaatatatatattcatatrtatataatatagactccataaagaaacagctgcca

SEQ ID NO: 639451 - DNA, 532 bp, Homo sapiens
  misc_feature 499, 500, 501, 502, 503, 504, 505, 506, 507, 508, 509, 510,511, 512, 513, 514, 515, 516, 517, 518, 519, 520, 521, 522,523, 524, 525, 526, 527, 528, 529, 530, 531, 532: n = A,T,C or G
tattcaggtaccctcttcaagtgtcctgaagagggaaataaagagaaaagcaactcattacgtataagggaatatgcagaagctatcacatatttctcagcagaaaccttacaagccagcagagaatgggataatgtactcaaactcttaaaaaaaaaaagaaaaaaaaaagaaaagaaaaacgctgcaatcaccaacactatacccagcaaaactgtcctttagaaatgaaagacaaatagacttkgctaaagaaacagctgtgagagttcatcagcactagacctgcctgtgcaagaaaggctagaggaagttcttcaagtgaaaatgaaaagacactaaacttaaacttgattacccttgagagtagaaaattcatcataaatgtaagaaagtatttaagagtaatctaacactataatggtgtggcataactactttcaatagtagtgcaaacgttaaaagacaaagtgttaaaataactatagcaacagtaatnnnnnnnnnnnnnnnnnnnnnnnnnnnnnnnnnn

SEQ ID NO: 639452 - DNA, 532 bp, Homo sapiens
  misc_feature 499, 500, 501, 502, 503, 504, 505, 506, 507, 508, 509, 510,511, 512, 513, 514, 515, 516, 517, 518, 519, 520, 521, 522,523, 524, 525, 526, 527, 528, 529, 530, 531, 532: n = A,T,C or G
tattcaggtaccctcttcaagtgtcctgaagagggaaataaagagaaaagcaactcattacgtataagggaatatgcagaagctatcacatatttctcagcagaaaccttacaagccagcagagaatgggataatgtactcaaactcttaaaaaaaaaaagaaaaaaaaaagaaaagaaaaacgctgcaatcaccaacactatacccagcaaaactgtcctttagaaatgaaagacaaatagacttggctaaagaaacagctgtgagagttcatcagcactagacctgcctgtgcaagaaaggctagaggaagttcttcaagtgaaaatgaaaagacactaaacttaaacttgattacccwtgagagtagaaaattcatcataaatgtaagaaagtatttaagagtaatctaacactataatggtgtggcataactactttcaatagtagtgcaaacgttaaaagacaaagtgttaaaataactatagcaacagtaatnnnnnnnnnnnnnnnnnnnnnnnnnnnnnnnnnn

SEQ ID NO: 639453 - DNA, 515 bp, Homo sapiens
cttgctactcaaatttgaattggcaatcagtagcacctgcatctgtctcctggaaatgtgttagaaatgcagaatctgacaggtcatcctagacttatttaatcaaaatgtgccttttaacaagattatctctggtgagatttatgtagattacagtttgggaagtacagttacaaattatagtttttttcttaatttttttaggtgcatttagtttgggggccagccaatcaattaagtgaggattttagaggaatcaacatttctgtatttttcattactttgaaaaacattctaatctctggagttcccacagaaaggtcatattgcttttggtttactagattggtgtgggtgtggaagacagttccmgtatcttaaactttttctttactgccatgatagacataatttcaacattcagaaacaaatatctcctaacttatgtcacagactttagtagttttcttatcgattttatttctaagaactttgggactaattaggtgttatta

SEQ ID NO: 639454 - DNA, 595 bp, Homo sapiens
ttgaaacacattgtctactgcctgttattgaaaatatgttatctatatcatggaccttgccaaggaaaaatattacataaaagagtggatcaatttttcttatctagattaattataatgcacttttaaacatctgtaatttttctagttaaactgaattttgatcctttatttttattacataaattattgacaaaaatcatacaacctccttctcagcaatcaaccagtgagtaaatactattttgacgcctttttgaaaaaaatagtaagctttatttctttgcatctgagttatttccacagttattttaaaaagctggacaccsaattaggaaatctaataattacattgcaaatacctgaaccaatatcaatgtacttatttttctatgtactattttgtagtaaaaaatctacaaagagacttccaagtttgtcatgttaatgctttcttcaatgaataaaacatggcatattttcaaaactatgatttattgagtgccaaacctctacactaatacaagtcttttaatttcctttctttataatggacattactaaaatgaatcaagaccaaggacaaagagaattg

SEQ ID NO: 639455 - DNA, 536 bp, Homo sapiens
tggaagctacatgacttcctgtgtttcaactttgaaagtatttctaccatgctctgaagatagaagctattccaagtccattcagattctagggaaggggatatagaatatatatcttgatgggagaagtgtcaaaaatatggggacrcattacaacacacacaccaaaatacaccactggccataactttcatatattccaaaatccaaaatgaaaccaacccctgcaaaacaaacaaacaaacaaacaaaaacactctaaaaagtcctattgcattatgatataaggctaaggcttgaggtttagattctctttatccaaatcaaattcaggtgcagatgagagtccttacattcagtttctcagacctgaagaattgtgaactaaagaaacaagttttctgaacttcacagatccaacttacacacagcagtcactggttcatagcattccttgaaaggagttcagacccactttctgggaacaaatgtccacggctcttgactttgccctctggtatcttaatattatattc

SEQ ID NO: 639456 - DNA, 593 bp, Homo sapiens
cctattgcattatgatataaggctaaggcttgaggtttagattctctttatccaaatcaaattcaggtgcagatgagagtccttacattcagtttctcagacctgaagaattgtgaactaaagaaacaagttttctgaacttcacagatccaacttacacacagcagtcactggttcatagcattccttgaaaggagttcagacccactttctgggaacaaatgtccacrgctcttgactttgccctctggtatcttaatattatattctgagtcattcttcctgaaaaaaaaggaaagaaaaaaggaaagagagaaaaagaaagaaaggtctgtggggcatatctcaagatccttaaaaagacgtttgtctatctgaaaacttctattaagcatcagattaaatcaattttccaagatgaaaatgttctagacatctgttatacaacattgtgcttataacaatactgtgccgtacacatcaaactttcttaagagggtcaatctaatgttgctgtttctgtactacaatattaataaataaatgaataatgtcacaagtttggcttcatctttacactaagacaacaacct

SEQ ID NO: 639457 - DNA, 603 bp, Homo sapiens
attgtcctgtaaaatagtcatatgaggttaaaaattcacttaaaatttatcaggatgccactttttttttgcaaagagaaatagaactgataagtgacctggacataacatgccctcaagacaccctgcattcttcctgaaggaaaaccaagatgagaatctaaattttagtcaaaacaacactgttgctcataatattagaatatgagaatttgatctgatcatttaattgtcaatgacattaagccaagatagccatccagctatttctatctttaawgataattccaccaaagaggatagatggctatgttaccctggacattgctgaatgaatactgtcaaattctctgaatctcattgacataaatattagagcaaaaatagtttctaattttacctcagaaaatagccatcagaatttgatttagaatatcttctattgtacagtctagcaaagattttaaaacatggttaagactcgaggtagataatattgttctcatacacttacattgacaaattcataactcattctaaaataccctgagtgaaatatatgaatacaaaaagatctcactaatgcaaccttttgctgtcatc

SEQ ID NO: 639458 - DNA, 327 bp, Homo sapiens
tagtcatatgaggttaaaaattcacttaaaatttatcaggatgccactttttttttgcaaagagaaatagaactgataagtgacctggacataacatgccctcaagacaccctgcattcttcctgaaggaaaaccaagatgagaatctaaattttagtcaaaacaacactgttgctcataatattagaatatgagaatttgatctgatcatttaattgtcaatgacattaagccaagatagccatccagctatttctatctttaaagataattccaccaaagaggatagatggytatgttaccctggacattgctgaatgaatactg

SEQ ID NO: 639459 - DNA, 598 bp, Homo sapiens
aaattggtaatgcatttcaatactgcttaacaaataattattaaaatgattacaaagataaatgtatacaaggaattcaggtttttggagatgcctcagccattctcratagcttaaactgcaagtgatgctttcttctattttagaaactaaaatatcctttgtttaaaattccttaataaggaaaagtttgctattaaaccacttagttttcacttttcagttactaaaagaagcaaaaaagaaactcttcaaaatataatgtttatgttaacctaaacttcatgaagttaggaactaacctgtgcacataggctaggcatggctattgaggcctataagcccagcactttgggaggctgaggtagaaggcttgcttgagcccaggagttcaagaccagcctgggcaacatagtgagaccccatctctacaaaaaaaaaaaaatgttaagaaactaaccaggcatggtggtgcatgcctgtggtcccaaatacttggtaggctgaggcaggaggattgcttgtgaccaggaggtcaagggtgcagtgagccatgatcatgccctccagcctggatgacagagcaagaccctgtctc

SEQ ID NO: 639460 - DNA, 598 bp, Homo sapiens
aaattggtaatgcatttcaatactgcttaacaaataattattaaaatgattacaaagataaatgtatacaaggaattcaggtttttggagatgcctcagccattctcgatagcttaaactgcaagtgatgctttcttctattttagaaactaaaatatcctttgtttaaaattccttaataaggaaaagtttgctattaaaccacttagttttcacttttcagttactaaaagaagcaaaaaagaaactcttcaaaatataatgtttatgttaacctaaacttcatgaagttaggaactaacctgtgcacataggctaggcatggctattgaggcctataagcccagcactttgggaggctgaggtagaaggcttgcttgagcccaggagttcaagaccagcctgggcaacatagtgagaccccatctctamaaaaaaaaaaaaatgttaagaaactaaccaggcatggtggtgcatgcctgtggtcccaaatacttggtaggctgaggcaggaggattgcttgtgaccaggaggtcaagggtgcagtgagccatgatcatgccctccagcctggatgacagagcaagaccctgtctc

SEQ ID NO: 639461 - DNA, 596 bp, Homo sapiens
tattttaacagaaattcctaactgcctttgtgttctacaattaaaaaaaaaaagcctgagtttcatggttatgagataccttcaaaagttttaaccaatttgtgagcttgttactatagttctctaccgatatgcggtggccgtaataatttctgaataagctaacatatcattggtgaatattatgatactaataaataggctcaataaattagcatacatatttatataactcttcttaagaggcagatcttaatgttttctgaagcaatgcattatataacagcaagaacatcaaagttaacatagacacccmataatatagatttgtccaaggactcttgctgtgaaaagtcatttaaaatattgtcaattctctcactttcacgaaacatgtcatttcagaccaacctccagtattttcacagttgctgattcattctttatccctttcatttaatgtcaggatttggaaaatacagtgattttttttttctatacacattcactttttattggaaccagtcatttccttcaattagtatacaagtaaaagaaaaagaatcatttatataatcatcacatgccaacatatc

SEQ ID NO: 639462 - DNA, 491 bp, Homo sapiens
ggccaacaggtgtatataaataaaaagctcagaattactaattatcagaaaaatgcaaattaaagccacaatgagataccatctcaccccagttaaaatggcttttatmaaaaatacagggaataacagatgctggtgaggatgtatggagttttggaaaacgccatacaaaaactaaaagactaaaaacagaactaccatatgattcgttttagtccaaaaactaaaaacaagactgccatatgattcagcaattctgctaatgaatataaaccccaaagaaaggaaatcagtatattgaaggatacctgcactttcatgtttatagcagcactattcacaatagccaaaacatggcatcaaactgagtgtccctcaatggatgaatgaacaaagaaaatgtggtatatataaacgatggagtattattcatgcataaaacatcctatcatttgtagcaacatgaatggaattagtggtcattaagttaa

SEQ ID NO: 639463 - DNA, 637 bp, Homo sapiens
ttgaacagctatttgtttagttaattgagctccttcaaaagaataataayacttcttatctccctccaaaaccaatggttccaccttgagatgggctcctactttaactctgaggatgtagttttacatttcaagagggtatgagaccaatgaccttggagaaatctacactgtaaacatggagtctgggctattctattccttgaagagactgatctatgttccatggtttagagaaaggattcaagccaattatgttttcaaggagatattttgaaggagggaagaagagagagctgcttccttttcctctataggcaaaaccaattatttttaaagattaatttatcctttcaatttcatacatgacagaaataatttatacaatgctgctttactgattttgtctaaaattgccattttaaggaataattgaaaatatatgacaaaattatatggaaaattacaacttccaaatgattggacatcaaactgaatcacaccattttaattattgtctaattattttcactttctgcctttttaaaatcttgaaataaacaatgtccaaaaataatttaatttttgacttttaaataaaccagaatagaaaaatgccacctatatttctacatta

SEQ ID NO: 639464 - DNA, 588 bp, Homo sapiens
ttagggcgtggtaatagagtgaagtgccatattcggtgaaatgaacaaacgaaaggtactaaatcacacaaacacaatattgaataaaaataaatcagctatatgaggatctacatggtaagatatttttatatataattttaaatgacataaagcaatactgcttattattgcatttatatataataaatatgtacagttgcattaccaaaatcaagactctggtcgtgagtgatggaaatgctaccagagattaactccaaggtctttattatatttgtacagctttatctttcaaggtttatggtaggtacacaattgttagttaacaatattgtttttagattttacrtgtctgatatatttcataatgtagcattatttaaatgcaatctggtacaaccatttttttaataaaaactaaggaaaatttattccattctcttcaatacagacagttcctcacctacagtgtttcaactttaaattttttgactttagaatggcgcaaaatcaataaacattcagtagaaaacatagtgttgaagtgcaggctagcttttcctgggctagcaatgtgtagtagga

SEQ ID NO: 639465 - DNA, 583 bp, Homo sapiens
caattgtagactaatgaaagtgttctgagaacattttcgtaggttaggtgtattaagtgcaatttcaactgaatgatattttcaacttgcagtgagtttattggcacagaacctaaccccattaaaaatcgagaaacacttgtactttaaccccatgacatggtgacaggaggttggggggatgtcgaaggggcaatgaaagggtttgatgaaacagggtcccaaaatattattctgaaatgaatgtgactcaggtattctctaaagccacaaagggctatctgcttaaattacagaaggaggtccttatttcatattgtaaatagatttcactggactgtyaatcacaaatggggtgttctaatttttcatgctatttagcagagagcggtgagaacgttcccgtgtaactattagtcatttgtttaattcaggaataactatgaatttttaagttaataaggactctacttagctttgatctcttgagcttttatcttgagacctaattataattattattacattagtaagaagccacttctgttattcatagatcatagtgaaatatgtgctttattta

SEQ ID NO: 639466 - DNA, 538 bp, Homo sapiens
acagcagacaatacctcaggcagaaaggagagagaaaatattatggatttaagagatcaacagaccagaagaagaagatagaatggcccaggaaattttcagaaaatgctgatggtatggaagcaaaacctctttctccccacacttgatgaataccactaccaaaaaaaaawcaaaagcaaaagccaaaaaaaaaaaaagctatccttaatgaaatgtcaacgaaccacaaaagcagtagttgaaactcctgtaggttcttggagaaattgaataatgaggaggttcaggctactgcaggctctccccagtgctcatcttcttctgttaccttctgtctgctcctgtatcctgggccttccctggtgtatcttatgctttggaagaaagggaagccaatagagaagcaacagcagggtttgtttctcacgaaaataacaattttcttattagtaataacagtagtgataatagccaacatttatagaatgtgtaagccagaatacaaactctggtacttgagtttcagcctcaagac

SEQ ID NO: 639467 - DNA, 562 bp, Homo sapiens
acatcatttataaagttagtgacagtttcctccaggaaaatctttttctgctctggacagctctagctcctgtatttcagattttttttttttttttttttttttwaaaaacagattctcggtctgttgcctagggtggagtgcagtggcatgatctagggtcactgcaacctctgcctcccgggttcaagcaattctcctgcctcagcctccggagtagctgggactacaagcacacgatgacacgaccggctaattttttgtgttttagtaggaatggggtttcaccgtgttgctcaggctggtttggaactcctgagctcaggcaatccaccagcttcggccttccaaaatgcgaggattacaggtgtgagccaccatgcccagcccatttgagatttttttttttttcttaaggcatgaggtcttatgaatgtactgaatattacagtgcctgtaattcttaattcagactttgacacccactttgatctcttgcctgctagtttactttgtccagcaagacagaggtgatagcagctctaaagataaacttggcccg

SEQ ID NO: 639468 - DNA, 562 bp, Homo sapiens
acatcatttataaagttagtgacagtttcctccaggaaaatctttttctgctctggacagctctagctcctgtatttcagattttttttttttttttttttttttaaaaracagattctcggtctgttgcctagggtggagtgcagtggcatgatctagggtcactgcaacctctgcctcccgggttcaagcaattctcctgcctcagcctccggagtagctgggactacaagcacacgatgacacgaccggctaattttttgtgttttagtaggaatggggtttcaccgtgttgctcaggctggtttggaactcctgagctcaggcaatccaccagcttcggccttccaaaatgcgaggattacaggtgtgagccaccatgcccagcccatttgagatttttttttttttcttaaggcatgaggtcttatgaatgtactgaatattacagtgcctgtaattcttaattcagactttgacacccactttgatctcttgcctgctagtttactttgtccagcaagacagaggtgatagcagctctaaagataaacttggcccg

SEQ ID NO: 639469 - DNA, 644 bp, Homo sapiens
tgtaggttcttggagaaattgaataatgaggaggttcaggctactgcaggctctccccagtgctcatcttcttctgttaccttctgtctgctcctgtatcctgggccttccctggtgtatcttatgctttggaagaaagggaagccaatagagaagcaacagcagggtttgtttctcacgaaaataacaattttcttattagtaataacagtagtgataatagccaacatttatagaatgtgtaagccagaatacaaactctggtacttgagtttcagcctcaagaccctttctttaccactatattttctggtggcaatattttgttgcactacctcaaattgtggtccacagattctgactggcaagccaattttgtctcttataacacatttgcaagcttagcatttgctctctttttctcacctcccaagtttagatgagaaagaaaaagcaaacagatctttaaggagtctgtgatacttacgatcaagtacttgtgrttatttctgagtgagaatgccttttgcacagtaattccaaattggggattaaaagacttatactttaatcttgcttatgcatttcataagctacgtgatgcagagtaagtcacttggtttagaattggcatttttaaaaca

SEQ ID NO: 639470 - DNA, 589 bp, Homo sapiens
gggatgtaggagcagtctctggttgcctagtacctggtcctgggataacagcaggggaaacattggcttggtgtgtgagaattcaataaggcagtgatttgggatgggttggtttgcataggaaagacatgcttcagctgtgccctttagtgtctctaagaactcactagccctgggtagggcagcttctccctcggctgagaggctacaagcaccagagcatcaagaatacagaaaataagaaaatatagctactaccattggctccctgataaatggaagccacacagacagatataaaaatctgagaaaacagagcagaaatatagatatcactatatctacatttgtatccaaagctttaattatagaaatccccaaatattaatggtaactatcaatgaakgtgggattaagcatcatttttttagactgctaacattcattgaatattattattttacctggtaatttgataatcacctctcatttagccctctcaacaaccatatttgataggctctgttattatttgtataatagtgagaaaaataaggctaaaagagattaagtgactttttacaagtca

SEQ ID NO: 639471 - DNA, 624 bp, Homo sapiens
tgcgtgaggctggcatactgtgtggtggtgggattgcccacggtacttttgatgggaatacctttaaggagtaaaacaactggatcactagggctgttgttgggttctagacggcaactgtgtgcacgccaggatcccacgaggcctggctctatatctatatcttcctgagtgtggtagcrttagctactcatttgttataatttgtcccccatgggggtgatggctgagtaggagccagtcacttctgtgttcactacgatgaatccctgcactcccttctgggtgtgaagtcatttcaggtgtctccttcacctctgccattttggtagctccatgtcaccaacactcagcccagtcccatgcctttctgctacagtagtttttgaataacagacaagggagcagacttctattggatcagtgacaacttggtgctttcaacaacaatcagatacaagacagataaagtgctgtttaacagcagctgagcttcaagtatctcctacattaaagaatcaaagaaagggcatctaattattgaagtagcttgcagatgttacaaaaaaaattgaagcatatatttagtttctaagcagatgaaaagaaagctttgagaaaaac

SEQ ID NO: 639472 - DNA, 641 bp, Homo sapiens
tctcaactcaaatagaatcacagatgtttctgtgtgtggtaatgcccattcytggttcatgagagtcagaatgatacataataatgtaccagtgtcttggacttgtaaagtcttatgagataatagtatagcattttggatgaatgtagtaagtaaaccaaagttctgaaaagttaaatgctactattgatgtttattttggttgagtattgtgctaaggagtgaatatggatgagctccttacgtccaacaaagtcctgggtagcattttttatacatatttaaatatgaattcgctgaaacttcagcaggtttaaatacttcaaaagggaaatttaataattagtgagtcaaggttcaaaatgcagtggttctgtgcaagagcattggctgtagaaagaacttggtgtataggaaaagactactttctcactgtaatcctaagcaaattgtttaccttttaattcttaagtttcatcatttttaaaacgggtgcaaagcatgatagtatttacttcacatggctttgtgagaattaaatgtgtttatatgtgtacagtaattagtatagggctagcatagaaagataccttcatatatagtagctcttattatcactatctataagctacagcagcagc

SEQ ID NO: 639473 - DNA, 641 bp, Homo sapiens
tctcaactcaaatagaatcacagatgtttctgtgtgtggtaatgcccattcctggttcatgagagtcagaatgatacataataatgtaccagtgtcttggacttgtaaagtcttatgagataatagtatagcattttggatgaatgtagtaagtaaaccaaagttctgaaaagttaaatgctactattgatgtttattttggttgagtattgtgctaaggagtgaatatggatgagctccttacgtccaacaaagtcctgggtagcattttttatacatatttaaatatgaattcrctgaaacttcagcaggtttaaatacttcaaaagggaaatttaataattagtgagtcaaggttcaaaatgcagtggttctgtgcaagagcattggctgtagaaagaacttggtgtataggaaaagactactttctcactgtaatcctaagcaaattgtttaccttttaattcttaagtttcatcatttttaaaacgggtgcaaagcatgatagtatttacttcacatggctttgtgagaattaaatgtgtttatatgtgtacagtaattagtatagggctagcatagaaagataccttcatatatagtagctcttattatcactatctataagctacagcagcagc

SEQ ID NO: 639474 - DNA, 641 bp, Homo sapiens
tctcaactcaaatagaatcacagatgtttctgtgtgtggtaatgcccattcctggttcatgagagtcagaatgatacataataatgtaccagtgtcttggacttgtaaagtcttatgagataatagtatagcattttggatgaatgtagtaagtaaaccaaagttctgaaaagttaaatgctactattgatgtttattttggttgagtattgtgctaaggagtgaatatggatgagctccttacgtccaacaaagtcctgggtagcattttttatacatatttaaatatgaattcgctgaaacttcagcaggtttaaatacttcaaaagggaaatttaataattagtgagtcaaggttcaaaatgcagtggttctgtgcaagagcattggctgtagaaagaacttggtgtataggaaaagactactttctcactgtaatcctaagcaaattgtttaccttytaattcttaagtttcatcatttttaaaacgggtgcaaagcatgatagtatttacttcacatggctttgtgagaattaaatgtgtttatatgtgtacagtaattagtatagggctagcatagaaagataccttcatatatagtagctcttattatcactatctataagctacagcagcagc

SEQ ID NO: 639475 - DNA, 509 bp, Homo sapiens
tttcttttgtagagatgagtctccctaaattgcccaggttggtcttgaaatcctgggctctagtgatccctccacctcagcctcccaragtgttgggattacaggcctgaatcactgcacctggccttcactgagttttggtgacagtgagaaataaacctctgttttgttaagctactgagattttcggggtgtgttgcagtggctaaatttattagcctgactaaaaaggaaagttttgacatgtgtctaagattcacaagctcctataaatatatgtgctgtttttgacgtgtttctttccccttttaatttttggaagagaaaaaacaaaaccattggctggcatgttctttgatctaactagacctatcttttcccattcttctagagagaacctagcgaaagaattgcatctatttacgcaattctgacaacccaattctggcttacttgtgaaagatgattgaatgaactctctatggatactcgttgtcacacttgaatag

SEQ ID NO: 639476 - DNA, 456 bp, Homo sapiens
ttttctttcatgaacaactaaggatagccattaatcaacatgcattctttttaatttgaactcaccaagtttcctgccctgctgcaatagggaccctagaacaggttttttgagcaaatacataagcaacaaaataaaactgaaygtgccctaaatccaggctcaacgaccattcttaaattatccgatatctgtgggaaaaaactccttgcctgtggttcagggggaaaaaaaatgttagtgcctggctttataaaggaagtgcagtgctttttcttttaaccaaaagtgctctttctatgttatatttatttctacaggaggggaattccacactctggcatctttaactcctctcagctactgaaaaattcacttacttcttggagtccaaactttgaaataaagcatagcatagtacctcctgaggaaaagcattaaaattaaaaatacccc

SEQ ID NO: 639477 - DNA, 429 bp, Homo sapiens
aagtgagaccctgtctctacaaaaaaataaaatttaaaaaatagccagctggtatggtggcaccagcctgtagtcctaagtactcaggaggctagggtaggaggatccccccttgagtctcagagctcgaggatgcagtgagctatgatcatgccactgcagtctagcctgtgcaacagtgtgagactctgtaataaaaagaaaaaattttctttcacaaaagcaaaaatatttggacattttatrtttaatatagctaagcaatatagtttatgttgacaagtttagttaattgttaggaggcacattacttatacaaaataattcaatagagagcagatattttaatcctttaagagcaaaatttctgatttatttttatgtattttatgaagaagatactccatgtataagttcaagtttggttgg

SEQ ID NO: 639478 - DNA, 670 bp, Homo sapiens
ttacatacacttgttaaaaatactacagaaaggccccatatttctttcacttactttttccacagtggtaacatcttgcataactatagcgcaatatatcaaccaggatattgacattaatacagtccatttacagagcattttcattaccacgaggtttcttcctatagctattacatagccacacctacttcccttctcccactgcatcatttttgcctcaacacttggcaaccattaatgtactttccatttatttaatatcattgtttcaaggatgctttataaatggtatcatatacaccttttggaactaagttttttcactcagcatagtttcctggagattcatccagtggctgtgtgtatgaatagcccaccactsttcattgctgagttgtattcccactgtagggatgcaccaccgtttgtttaaccatccctcccttgaaagacatctaggttgtttccagcttggagctgttatgaataaagctgctaggagctttcatgcgctggagttttttgttaacatacatttataaatatcacaggctggtttgttttaattttaattttatgttaagttctgggatacatgtgcagaacgtgcaggtttcttacatagttatacatgtgccataatggtttgctgcgcctatcaacctgt

SEQ ID NO: 639479 - DNA, 608 bp, Homo sapiens
actttggtaatgacttcacataaggagatcacagagacatgctcattgttctcactgacctcctgagatcatgaatttcttcaaagcaagaaactggttcctttatggtaaacaatgtacaaacacattggcaaggaaggactgctctattgcatgttgtaccttcatttaactgtgtcattcatcccttctcatcaatggttgactcaactccactttttttttccagtgtgcaagctgaaatcttcttttacttttgctttacaaagcatgcttgaaaataccttcagattcgtatgaaaacaaatagtgaactgcccattattaaagaacttacaattgatccaccccrtaccatgttagttgactttgtacagagtgcagagagcctgcatccgtatttacctgttcaatttaattttatccctctttgttgtgtgtaaaatcagatttaaaaaattttagcatcacagcccaatgcttcatgtactcaaattctacacttcactaaccttaatgctaccactgaaagtaagaaattcttgttatttcacaggttctttttcactgagcaggtataactacatttcttttctaatggaagaaaa

SEQ ID NO: 639480 - DNA, 527 bp, Homo sapiens
ataacgagaggaagcaaatttctacaaattttaattgacaaaatttaaaatatgataatcataattgagtgtgatgttttgtaataaggtctaccactgtgaagaatgaaattattttggggaggcataacattttgatcagttgagctcctttatgtttcctatctccacaatcaattgtaaatgttcatcatagagtgatatataaggagattttgtgtatttcatctttgaaaatgtcttttcacacatacttatgtgtgaaaagcatactgatatcactccactagcatgtgattttaattsggcacactcatcacttaaaaggaatttataaaatttcattaggttcttctcctgatattttcatttcagcatttgattagatagcaaatcaatcacttccaatcaacaatttggtggaaacttctccactacacaaaatgatgtcaaaatctgatcatttctttttcatctaaatcaaaatctgaaaaatgctgctgaaattgtagtttgagctaaaaaaa

SEQ ID NO: 639481 - DNA, 612 bp, Homo sapiens
cattttcaaaatcaaacaaaattatgagtcactttcacagattttgtcgtagaggcctccccggtgatctagggatagaatttctaataagaaagaaaatcatctagcaatgatgatcaactctgctgggtttcatgctcagattattgcttcacagcaggctaggatcgttctcatgatacaggataattagactgagttttccatgtmgagtactattgtcagaatttccaagaataaaatagtgttagctatcatttttagaagcctggaaacatactagacactgtattttatcttatttgaaatacacaacaaccttatgatgaagctatgtattattatccctgttttgtaatgagataactggaactcagagagaccaggtggcattcccaaaggcatagagttggtaaatagagaaggcagaattcatgcccatctgttcaaatgcagagcttgtactctgtattactgggctggtgtctggtaacggtggtggtgtatattctgtactcaggagtctaggaaaagtggagagcaggaagctcttacgacttcaggaggctaccacaacggaatgcagacaagcaatgaacttcaaaactacct

SEQ ID NO: 639482 - DNA, 584 bp, Homo sapiens
taatgccacacatctgcaaccatctgatctttgacaaatctgacaaaaacaagaaatgaggaaacgattccctatttaataaatggtgctgggtaaactggctagccatatgtagaaagctgaaactggatcccttccttacatcttatacaaaaattaattcaagatggattaaagacttaaatgttagacctaaaaccataaaaaccctagaagaaaacctaggcattaccattcaggacataggcatggrcaaggacttcatgtctaaaacaccaaaagcaatggcaacaaaagccaaaattgacaaatgggatctaattaaactaaagagcttctgcacagcaaaaaaaaaaaaaaaaaactaccatcagagtgaacaggcaacctacagaatgggagaaaattttcgtaacctactcatctgacaaagggctaatatccagaatctacaatgaactcaaacaaatttacaagaaaaaaacaaacaaccccatcaacaagtgggcgaaggctatgaacagacacttctcaaaagaaggcatttatacagccaaaaaacacatgaaaaaatgctcatcatc

SEQ ID NO: 639483 - DNA, 584 bp, Homo sapiens
taatgccacacatctgcaaccatctgatctttgacaaatctgacaaaaacaagaaatgaggaaacgattccctatttaataaatggtgctgggtaaactggctagccatatgtagaaagctgaaactggatcccttccttacatcttatacaaaaattaattcaagatggattaaagacttaaatgttagacctaaaaccataaaaaccctagaagaaaacctaggcattaccattcaggacataggcatgggcaaggacttcatgtctaaaacaccaaaagcaatggcaacaaaagccaaaattgacaaatgggatctaattaaactaaagagcttctgcacagcaaaaaaaaaaaaaaaaaactaccatcagagtgaacaggcaacctacagaatgggagaaaattttcgyaacctactcatctgacaaagggctaatatccagaatctacaatgaactcaaacaaatttacaagaaaaaaacaaacaaccccatcaacaagtgggcgaaggctatgaacagacacttctcaaaagaaggcatttatacagccaaaaaacacatgaaaaaatgctcatcatc

SEQ ID NO: 639484 - DNA, 553 bp, Homo sapiens
tctgcctgacctcatggagcacaacagtgtgatagcccttagccacctaccagtccagacttctatacagaagagaaataaatcttaacattgacttaagtccctattattttggtttctattaaarcatctgttcactattttaactactaaactacttcattaagttgttgagagtattaaatgagttattgcttattaaaatattaaagtattagagtattaaataaattattgcttataataatttataataatttatttattatttgagtattaaataattagtattagagtattaaataaatattagtattagagtattaaataaattattgcttatgattatttataattatttatttataatttattatttagttataacttataattatttataaaatattaaagtattagcatattaaataagttattgcttatcaagagtttaaaatagagcatgctacatactaagggctcaatgcccgtaaattattttccttcttattctctgaattgaaatgtggttctcttacccataattccatat

SEQ ID NO: 639485 - DNA, 467 bp, Homo sapiens
gcaaatgttacatgttctcttccctttttggaatatgctgagtttatcttttgttaaaggcatccagatattaaagttacttacttaataatttttaatctaattctctcaaaaagaaaactactactcattatattgtgagtatggggagttcttcaagctcgtaacagggcattttacttaggatttttcttaagagatccatcctgcatccctgggagattctgtatatcatatttttaggttataggccttctgctgcttaaggttcaccttctgctagtgaaggttattgttcatgccgaaaactrgagaatcatctctgatatccccctcatccccacatccaaccaagttttaataaatatgtccatggtctctccattcctctccatctttcttgctgtcattctagtccaggccatggttacttcccacctgagtgacagttactgcctcctaatagg

SEQ ID NO: 639486 - DNA, 467 bp, Homo sapiens
gcaaatgttacatgttctcttccctttttggaatatgctgagtttatcttttgttaaaggcatccagatattaaagttacttacttaataatttttaatctaattctctcaaaaagaaaactactactcattatattgtgagtatggggagttcttcaagctcgtaacagggcattttacttaggatttttcttaagagatccatcctgcatccctgggagattctgtatatcatatttttaggttataggccttctgctgcttaaggttcaccttctgctagtgaaggttattgttcatgccgaaaactagagaatcatctctkatatccccctcatccccacatccaaccaagttttaataaatatgtccatggtctctccattcctctccatctttcttgctgtcattctagtccaggccatggttacttcccacctgagtgacagttactgcctcctaatagg

SEQ ID NO: 639487 - DNA, 550 bp, Homo sapiens
aaaacaaaccatgtcataattccacaaagaaatgccactgttggcaacaaagaatgtaagactaagtgacaggtctgacttagttaattcctatgtttctgttgctcatggggttctttccaaaaacaccggttttccaaaccgtccattcaatttaaatagcatttattattttaatgtttgccatgtaccagggaccacgctaagtacagactaaaattaacgtttcctgttcaatcaggagtttgcaagttccatacaaattggcagatgataggwcacatcactaaaatgttactttttttttccttatttcttctccccatgaatatatcacaccaacacagaaacaatcataaataacatatacttgtgatacagtttggctgtgtccccacccaaatcttgaattgtggttcccataatcccatgtcataggaggaaccaggtgggagataactgatcatgggggcagctacctccatgtttttctcatgttagtaagtgagttctcatgagatctgatggtttcataaagagctttccccca

SEQ ID NO: 639488 - DNA, 539 bp, Homo sapiens
tttataacttagatattatattttctattctagcaagatagtgatcttccagaaggagccactgtccctgcattgggattatcaaataaagctgtctttcagggtaaggcttttgtcttcaaaattattaaacccatagtggtacttaaaccccagtcatacacttgtgtaatgtctacctaatgtttgttacagctgattttttttttaaatcacagtatatcttttctatcacctatttcgtgataagtactctttgtacacactcagaccactgaagtagatgcagttttcacaaagcatgttttttcccttttttttttttttttgagacagagtcttgctctgtcmcccaggctggagtgcagtggcgcgatctcagctcactgcaacctctgcctcctggcttcaagcaattctcctgcctcagcctcccaaatagctgggactacaggcatgtgctaccatgcccagctaatttttgtatttttagtagagacagggtttcaccatgttggccagagtggtctggaactcct

SEQ ID NO: 639489 - DNA, 617 bp, Homo sapiens
gctacatttttaaaaggcattgtctgtattttaataatttacctaagatcttactaattttaaactattccttgggtgcttaaaaagcatcaataactgtaatttwaaaaattgtaattagactgtgtgcagtagcttatacctgtaaccctagcactttgggaggccaaggtgagaggatcacttgtgcccaggagtccaagaccagcctgggcaacacaacaagatctcctctacagaaagcacaaaaattagccaggcatggtagcatgcatctgtagtcccagttattcaggaggctgagtagtgaggatcacttgaacttaggatgtcaaggctgcagtgagccatgattgcaccatcgcactctagcctgggcgacacagcaagaccttgtgtgtgtatatatatatatctttaaaaatctctctaggaaaaaaataactgcccctcatggtatatcaattttgatatactgaaattctgtatgtttttatacccatttgatgctgaaattttgtatgacattttcatatatatttaggaatgcattatgtgcaatggtagagcaccacttactacatcaagtttaaaccacatcagcacaatttcagttt

SEQ ID NO: 639490 - DNA, 499 bp, Homo sapiens
atgcaccacattaacagactaaaaagaaaaactgcatggtcaaatcaattaatgcagaagaggcttctgacaaaattcaacaatcattcatgataaaatccctcagaaatcaagaatagagaatttcctcaacttgataaaaagcacctaaaaaaaaaaaagaaaaaaaaaacctacagctaacattacatctaatggagaaagatcgaatgttgatcaggaacaaggcaataactgtttattctcatcagtcttaytacacatggtgctggaaattctagcaagtacaatagggcaagaaaaggaaataaaatagaaaaaattataaatgaagaaataaaactgtccttatttgcagatgacatgattatctgcatagcaaaccccaaggaatttatgaaaaaaaacgtttacagctaataagtgcattcagcaagagctgaattgcacaggctggagtgcagtggcatgatctcagctcactgcaacctccgcctcc

SEQ ID NO: 639491 - DNA, 557 bp, Homo sapiens
agaatatgggcttgaaatgtactttgaaactctttgtttctctcccctttctaccagacactcccttgcaccatacacacttatctaaccatctscttgtttaaaagttccagggactaatcttgaaacaaaccaggcatggaggccttgggaaatccatctttttaggggagtccataaacaattagttcaccaccaccagactgaagtcaagataacaccaacaagacctctgaatagatgattattcaagatagccatcagaacaaggcatgcagagctgcaccctgcaacactcctacatgattctcacagcaagtttctcttttgaaactccctcagtcagcccaaaagtttgagatgatctctttgtgacttgagctcagctatctccctcactgatggcatttgaaataaaggttacttttcttttaccatgcattgcttcttgtgtttttagcttgataggtggtgagcagctggacctgagtttggttacacttctagaactaataagtgaattgagctttgtacaggatacaatatcaacacacaaa

SEQ ID NO: 639492 - DNA, 557 bp, Homo sapiens
agaatatgggcttgaaatgtactttgaaactctttgtttctctcccctttctaccagacactcccttgcaccatacacacttatctaaccatctccttgtttaaaagttccagggactaatcttgaaacaaaccaggcatggagsccttgggaaatccatctttttaggggagtccataaacaattagttcaccaccaccagactgaagtcaagataacaccaacaagacctctgaatagatgattattcaagatagccatcagaacaaggcatgcagagctgcaccctgcaacactcctacatgattctcacagcaagtttctcttttgaaactccctcagtcagcccaaaagtttgagatgatctctttgtgacttgagctcagctatctccctcactgatggcatttgaaataaaggttacttttcttttaccatgcattgcttcttgtgtttttagcttgataggtggtgagcagctggacctgagtttggttacacttctagaactaataagtgaattgagctttgtacaggatacaatatcaacacacaaa

SEQ ID NO: 639493 - DNA, 422 bp, Homo sapiens
agaattcagagaatagaattggaacaatgggtccaggcatgggtggctcatgcctgtaatcccagcactttaggagaccaaagcaggtggatcacttgaagccaagagttttagaccagcctggccaacatggtgaaaccccatctctactaaaaatacaacaattagccgggtgtggtggcrcatgcctgtaattccagctactcagaaggctgaggcacgaaaatcacttgaacccaggaggcaaaggttgcggtgagtcaagatcgtgccacggcactccagcctgggtgacagagcaagaatgtctcaaaaaaaaaaaaaaaaaaaaaggattgagacactgggtaaagtcagacagtcagcaagcttcagcttaccataaaaactttttaaaaatgagccccccacccctgcaggga

SEQ ID NO: 639494 - DNA, 463 bp, Homo sapiens
tgctaaactttgattccccattgtttaatctagtgcctggcacatcatcaggcctccaagttgtttgctgattgagtgattaaaagtgtctgctagatctggcaggttgtttggacacagtggctcatgcctgtagtcccagcactttgggaggccaaggtgggaagattacttcagcccaggagtttgagacgagcatcgtcaattatagtgagacattgtctctatagaaaatgaaaaacgtagccaggcacggtggtgcgtgcctgtagtcccacttactcgagaggctgaggcaggaggatcgcttgagcccaggagattgaggctggggtaagctgtgttcacatcactgtactccagcctggrcaacagagcaagaccctgtctcaaaaaaaaataaaaaaaaagcaggtctctgaaagtggtgggtaagggacctggtgtgtgtgtgtgtgtgtgt

SEQ ID NO: 639495 - DNA, 646 bp, Homo sapiens
tcattttctgaaagttttcagttactttgccgatattcatcacaggaatgactatggcagctatatagccttacgaaatgtatttcttaaatagtgagacttgaatgtcaaaattgctcttttatctataagtggcagaacacgtgttagcaggcatgaacactagtcacattgtacatcttcatcagagctcttgggtgaccaggtatgttgtcaatagtaattttttattattgwtattttggagacagtctcttgttctgtcacccaggctggagtagtcatgcaatcacagctcactgtaacctcgaactcatgagtacaagttatcttcctgcttcagcttccaaagtagctaggactgcaggtgtgtgccaccatgcctggctaatttttaaatgttttgtaaagaagagttcttgctgtgttgcccaggctagtcttgaactcttgggtcaagcagtcctcccacctgggcctcccaaagtgctgtgactacaggtgggaatcactacatctggccaatagtaatattttgcaggtctcaacagttggcttaaaatactcagtaaactatgctgtaaatagatgtattgtcatctatacttgtttcttttatagagcacaggcagagtaaatttagcat

SEQ ID NO: 639496 - DNA, 624 bp, Homo sapiens
ttgactccaattttgaaagaggttctatggataagatgctatcaaacagcatcacatgctgttttctgtagaagattttctatggaagaaaagagtcaagtgatgtggcaaacttcattgttgtcttattttaagaaattgccacagcaactccaaactttagaaaccaccgccacagtcagcagccatcaacatcgaggtggcaagattttccaccaacagaaagattacaactagctgaaggctcagatgattattagcatcttttagcaataaaatatttttaaattgaggtacatatattgcttgtgtacacttcataaagtatcatgtaaacataagttttatatgtactaggaaaccaaaaatgtgtgactcactttattgcaatattcactttattgcaatggtctggaactgaatgtgcaatgtctccaaagtatatctacattgaggtcttactgtgaatatgatgctatgattcttaccacaaaaatgagaggacacrgctctgatgaacaatagttatatcaaaacatgtacacataactatgttgcaaagtaaaataaattcttaaattaaaaaaaatagaaaagtaccatagagttttgaagaaaagagag

SEQ ID NO: 639497 - DNA, 554 bp, Homo sapiens
acaggcatgcttatgcaagttgtccagcttcttggaatgcagagggcatatagagcagtactggtaactaagactataacattaaagcacaatccatagtataataagctttgactgtcaacgtgaagtattggtaggtgactgtgaattatggaagtcattcaagtaggasaatgatgttttcaatttttttgtggcattgaattgactccaggatttttcaacttaaagaaactggaagttcaatgatagcaaatcgaatgttctttgaatttggaaattaagtttagcgtatagggaaaatgatataaatgtagactatacatgggggtaccaatgacaatttccagataggcaactggagatgattcgctaggcatccaccataagtagatagtaaaactgagcaaatccatccctatggagtaaaggtggaagcaagaagtgtgtaaataatcacaagacacatgtttccactgagttttataatttacaaaatatctcatatattttatagtgttggaccctcacaattgtgaggcaggcaggaaaaa

SEQ ID NO: 639498 - DNA, 573 bp, Homo sapiens
attagggagggaataatgatcactactattaatagataacatcattgagtgcttattctgtgctaaaccctgttttagaagctttacatgtagtttttttttttttttttttaccttcacaacaaccatatgagctgagctatggttattccctttttacaggtaaagagactgaggtacacagagtaatttatggaagttgtcctgctagtaagtagtggtgctgttacacaggcaccctgtccacaaaacttaatagccctgcagctggcttttatttgcatgaaaacatttatagatagataaaaaatatattaaagatagagaaatacatagataaatgggtggatgatgtgacggttaatttcgtgtgtcaatagactgtgctacagagtgcccagattaaacatcatttctgggtgtgtctgtgagggtgtttctggttgagatcagcattttaattggtgaccttctcaatataggtsgtcatcatccaattcattgagaacctgaatagaacaaaaaactgaagaaggacggatttgtgttctttctgcctgactgcctgagttg

SEQ ID NO: 639499 - DNA, 289 bp, Homo sapiens
gtgagggggtagggcgcttgtgcaggatatttatttcttggaggatggtggataagagaccaagtatagaggagggtatctgtggtgacgagggcggatttgactgaaatgtgctatgtccaatgagcgactgaatgtgcgatgtaatattaaggatggmcagtactggtcaatatccctgggggttgggtgttatgtgggggttaaagttgatgtgttacctgtatttttgaataccctgtttaagacgtgccaatcagcttgtgttttttgcacatatcatgttgca

SEQ ID NO: 639500 - DNA, 398 bp, Homo sapiens
gaattcatctgtaaaaatcatcatgggtacttttccctcctgcaccccacatggtagttggacaagtatttgtgttagtcagattagtctatagtattagggacacttgtcrccaatatttatcttgtgaacaggcctgactgtcttccttccagcctatctcatcctcttctctccatcctggtttcggtgcatctcagatttgctgctctgctctgccttttaggtgtccgagtgtggaactcttctgactttcctatttccattttccaggttgcacagaatacaaaaagtggaaggctgaataaaagacaaggtacagacacagttcctcagaacattgttagaagttatagttgattaaaataggaaaatattacttgtgaaagattgtctac

SEQ ID NO: 639501 - DNA, 389 bp, Homo sapiens
gtacttttccctcctgcaccccacatggtagttggacaagtatttgtgttagtcagattagtctatagtattagggacacttgtcgccaatatttatcttgtgaacaggcctgactgtcttccttccagcctatctcatcctcttctctccatcctggtttcggtgcatctcagatttgctgctctgctctgccttttaggtgtccgagtgtggaactcttctgactttcctatttccattttccaggttgcacagaatacaaaaagtggaaggctgaataaaaracaaggtacagacacagttcctcagaacattgttagaagttatagttgattaaaataggaaaatattacttgtgaaagattgtctactctatggagaaaaggtc

SEQ ID NO: 639502 - DNA, 603 bp, Homo sapiens
gagacctgacccatctcccaatatgcactctgttctgggtctgatggatgaagagtcaaggcccctgccttttgctctcctgggtaataaatgtagcttactgtgtccacatgccagagatgtaggtgccagcagggcagagagggacacaggacttacagcacagagttcatgcgctctgtttcaggataatgcgtttttgactgccaggtgtaatcttcactcctctttcgtgcagcccccatctctcctctcactccctgtcctagattttaaatggttatactttcctatgaatcctcaatttttcttttgttttggagcctagtacactgaacatttcttctcatgcataaaagataccctggaaactcccaccacggctgcrtaagtatttatttattttttattttttgagaatcaggtgccgaggtagtacctttaagaaacaagcatttatagttttgttatatgatttggttcagtttttatctcccatactgtttgtttttcaggagcgaagagggaattaaaaatattacagaaagagagcttcccttggtggttaattttaggtattttgtgaagagatgaattggatgg

SEQ ID NO: 639503 - DNA, 593 bp, Homo sapiens
tgatcaatgctgtatcttctgtagggaagggttatttttaatatgtcttctttagcttgaaacacactttagctcattctctccctataatttggaaagaaggcagctaccatagcagttaatcatgaccgagccatagactacttaatcagggggaaaaaagtcttctcctgatgcaatttgctcrcaaaaatttcaaaggaagcagccctggagttaccgagggtgaatgaagtcagaatccaatacaatgtagatgcaataattctctatttcggcacacctatccaccaggttaatatagctgtcatttgtcacaaaaggcttttgggaaaccaaatgcaggattcttccctttagctagaaacttacttggctagaaggaaaattgctggggaggttacagaataactaatctccattcttccctcagaaatgtgctcaccctgaattatcttgcattaaaatagaagaaaagagagccctgagtattcaggtgagctaccctgtcagtccttggggtttggaatcctattagaggtgtctttatagtttcacattaactgcaaccgtttcaagagctctccagagat

SEQ ID NO: 639504 - DNA, 631 bp, Homo sapiens
aaatgtggacaattactttttatagcttccaatttccaatccttgccaacaaatttcaagtttggcctttactttctttgtttgtttttgtttttgtttttgagacggagtcttgctctgttgcccaggctagagtgcaatggcacaatctctcctcaccgcargcttcacctcccgggttcaagcgattccattcccctgcctcagcttcctgagtaactgggattacaggtgcctgccaccacacctggctaatttttgtatttttagtagaggtggggtttcaccatactgaccaggttggtctcgaactcctgacctcaggtgatccgcccacctcggcctcccaaagtgctgggattacaggcgtgagccaccacacccggccaggtctttgttttcttgagtatattataatgttgctttagagtgcctggtaatcccactgtcaataatgaccatgaatatctttctgttacttcttgtttgtgctgttctttgaatgttgtcttcattcctcatttgcttggttatttattactgtgtgttgaacattacgtttgaaaaagtatctgtagaaataatgtgagacttaggatgatatcttcttctggacatgattttcagtttc

SEQ ID NO: 639505 - DNA, 607 bp, Homo sapiens
tcttcctcttcattccatgcatctctcatccacctcccagtccagataggaagtctcaggaagactggggtttttcttgaggaaagggagccatggtttaaagagaaatagattcgagaatacctaccttaggccattatattccaaagcagagttgaattgaaagattttgactaggccgggcacagtggctcacgcctgtaatcccaacactttgggaggcagaagcgggtggatcacctgaggtcaggagattgagactatcctagctaacaccgtgaaaccccatctctactaaaaatacaaaaatacaaaaaaaaaaaattagctaggagtggtggcatgcgcckgtagtcccagctactcaggaggctgagacaggagaattgcttgaactctggaggcggaggttgcagtgagccgagatcacgccactgcactccagtctgggtgacagagcgagactgtgtcaagggaaaaaaaaaaaaaagaaaggaaagaaagaaaaggaaggaaggaaggaaggaaagaaaagagagagagaaagaaaggaaagaaaagaaagaaaagaaaaaagaaagaaactgaacttccaatggggagtaag

SEQ ID NO: 639506 - DNA, 607 bp, Homo sapiens
tcttcctcttcattccatgcatctctcatccacctcccagtccagataggaagtctcaggaagactggggtttttcttgaggaaagggagccatggtttaaagagaaatagattcgagaatacctaccttaggccattatattccaaagcagagttgaattgaaagattttgactaggccgggcacagtggctcacgcctgtaatcccaacactttgggaggcagaagcgggtggatcacctgaggtcaggagattgagactatcctagctaacaccgtgaaaccccatctctactaaaaatacaaaaatacaaaaaaaaaaaattagctaggagtggtggcatgcgccggtagtcccagctactcaggaggctgagacaggagaattgcttgaactctggaggcggaggttgcagtgagccgagatcacgccactgcactccagtctgggtgasagagcgagactgtgtcaagggaaaaaaaaaaaaaagaaaggaaagaaagaaaaggaaggaaggaaggaaggaaagaaaagagagagagaaagaaaggaaagaaaagaaagaaaagaaaaaagaaagaaactgaacttccaatggggagtaag

SEQ ID NO: 639507 - DNA, 589 bp, Homo sapiens
gctccatcgatggtgtggcaccaccattcaccttgtagcccaagctacaaatcaggaagccatccttgacacctccccctccctcaccctgcaaatcaactcatcacagagttctggtgattctgcctcctgtctctcatatccatgaacgtctctmcatcaccactgaagtccaagccaccatcacttctctcctgcactactgcaatggcctcccagttggcttgctgaattcactccagcaccctttcattcaccataatccagccacagcaatcttctcactccttgaaagcaccaatctccttgtttcaaggcctttatccacaagtttccctttgccaagggtactgttccctccacactccaccttcctccacctcctgcctattccttagatctctgcctaaacctcccttcctcagtgtggacacatgtgtttttaccctgtaagacaagtctacataggaagccaaatagcttgtgagtacaggattggacaaggagcattagttgcttggtctatatagttcagtttactaaaccataataccccagtgccatttccgccacagagctcacccttgac

SEQ ID NO: 639508 - DNA, 640 bp, Homo sapiens
agttcttgtagtggtggcttggtaatggcaaattctctcagtatttgtttgaaaaagactatcttttctttgtatatgaagcttggtttcactggatacaaaattgttggttgataattgttttgtttgaggaggctgaagataggcccccaatcccttctagcgtgtaggatttccactgagaaatctgctgttaatctgataggttttcctttataggttacctagtgcctttatctcacagctcttaagattctttcctttgtcttaactttacataacctgttgacaacgtgcataggtatgatctttttgtgatgaatttcccaggtgttttttgtgtttcttgtatttggatgtctagatctctagcaagtctggggaagttttccttgattattcccccaaataggttttccaaactttcaaatgtctgttcttcctcaggaacactgattattytaggtttggtcatttaatagaatcccagactgcttggaggctttgttcatattttcttatcttttttctttgtctttgttagactgggttaatttgaagaccttgtcttcaagctctgaatttctttcttctacttgttcgattctattgctgagactttccagagcattttgcattt

SEQ ID NO: 639509 - DNA, 603 bp, Homo sapiens
tatttctttttttttagctaattgggaaatttttgcctattaacatttaatattattctgattatattttgatacaccattttatttgttttcttttttgcccctctgatttttgttcttctgttacttctttcttgtctttttttttttttttacagaagctctttattttgtttaaattttagatttacataaaagttgcaaaaatagtacagagagttcctgtatacctctcacccagtttctgctgaagttaacatcttacattatcacrgtacattcatcacaactaagaaactaacattagtacactactattaattaagtgccagactttattcagatttctttgtttcttcacaaataacccctttttcctgtttcaggagccaatctagggtaccatattgcatttagtgccttttagaaattattatttggacatgttttagaattccagtttaatttacatattaatgttttttctatatattattgtagtttttacccaatgtccgctctaagaatcacgatatacattcttaactttttataatctgatttgagtttacattgtcccactttgcataaaatatgcaaacc

SEQ ID NO: 639510 - DNA, 583 bp, Homo sapiens
aacaagctctgctatttctttttttttagctaattgggaaatttttgcctattaacatttaatattattctgattatattttgatacaccattttatttgttttcttttttgcccctctgatttttgttcttctgttacttctttcttgtctttttttttttttttacagaagctctttattttgtttaaattttagatttacataaaagttgcaaaaatagtacagagagttcctgtatacctctcacccagtttctgctgaagttaacatcttacattatcacggtacattcatcacaactaagaaactaacattagtacactactattaattaagtgccagactttattcagatttctttgtttcttcacaaataacccytttttcctgtttcaggagccaatctagggtaccatattgcatttagtgccttttagaaattattatttggacatgttttagaattccagtttaatttacatattaatgttttttctatatattattgtagtttttacccaatgtccgctctaagaatcacgatatacattcttaactttttataatctgatttgagttta

SEQ ID NO: 639511 - DNA, 583 bp, Homo sapiens
aacaagctctgctatttctttttttttagctaattgggaaatttttgcctattaacatttaatattattctgattatattttgatacaccattttatttgttttcttttttgcccctctgatttttgttcttctgttacttctttcttgtctttttttttttttttacagaagctctttattttgtttaaattttagatttacataaaagttgcaaaaatagtacagagagttcctgtatacctctcacccagtttctgctgaagttaacatcttacattatcacggtacattcatcacaactaagaaactaacattagtacactactattaattaagtgccagactttattcagatttctttgtttcttcacaaataacccctttttcctgtttcaggagccaatctagggtaccatattgcatttagtgccttttagaaattattatttggacatgttttagaattccagtttaatttacatattaatgttttttctatatattattgtaktttttacccaatgtccgctctaagaatcacgatatacattcttaactttttataatctgatttgagttta

SEQ ID NO: 639512 - DNA, 575 bp, Homo sapiens
gttatgcttctgatgtaggcagagactttccaaaactttccaaaatttctgtcccaatgacctggtctaggctgcagggccctcaggactgggtttccctgaattgagatagtgcagctactctactgctctgaaaaacaagacattttcaacttaatatccttggatatctaacctcccacaaacataaatttaatagctgcaaaaatatgattgtatatatactcatctstgtgcaatttccccccctttattgttttttgatttgctctttattcctccttttttcccttcctcttgtaacagctggtctgtgtcttgcctgctgcctagacagagctgacttatcaagacaggggaattgcaatagagaaagagtaattcacacagaaagcgggctgtggaggagattggagtttttttattattcaaatcagtctccccaaacatttggaaatcagagtttttaaggataatttggtgggtggaggaagtcctgtgagtcgagagtgctgactggttgggttggagatgaaatcatgggaagttgaaggtgtcctcttgtactgagtcag

SEQ ID NO: 639513 - DNA, 585 bp, Homo sapiens
tccgtctcaaaaaaataaataaataaaataaaataaaaaaatagagaaagtcctataggaaaaagactctagaaagattagttttcatgggaaatccaaggaaggtggccatccagaactaggggagtatcatgcaaaggaaaggaatgaggcataagaggggtgtacaagaggaaacccaggacaatgcatcatttaaagtcgtgttcctctgaacatattgcagtgaagagacaagccagtcagcaaggatttgactcgttagtcaaatgaggtgtgagcccaggctaagaagcagcttccctcctccatgccatttacgtggttacttcctcttcttgtaatcttcaaatcccagcttgcctgctctaatggccatttgttgtttttgtcttccccgcatgcttcccaccttcttctagtaacagcgmctccccttccttaagggatctgctccttccccatccatggggtcctctgaggctgctggcctcaataccataatctcaaacacagtggagtcagtgactcagctgtaatcaatcatagtatctcaatcccctggccatggggattggtccaagg

SEQ ID NO: 639514 - DNA, 585 bp, Homo sapiens
tccgtctcaaaaaaataaataaataaaataaaataaaaaaatagagaaagtcctataggaaaaagactctagaaagattagttttcatgggaaatccaaggaaggtggccatccagaactaggggagtatcatgcaaaggaaaggaatgaggcataagaggggtgtacaagaggaaacccaggacaatgcatcatttaaagtcgtgttcctctgaacatattgcagtgaagagacaagccagtcagcaaggatttgactcgttagtcaaatgaggtgtgagcccaggctaagaagcagcttccctcctccatgccatttacgtggttacttcctcttcttgtaatcttcaaatcccagcttgcctgctctaatggccatttgttgtttttgtcttccccgcatgcttcccaccttcttctagtaacagcgcctccccttccttaagggatctsctccttccccatccatggggtcctctgaggctgctggcctcaataccataatctcaaacacagtggagtcagtgactcagctgtaatcaatcatagtatctcaatcccctggccatggggattggtccaagg

SEQ ID NO: 639515 - DNA, 462 bp, Homo sapiens
caggctggagtgcagtgacatgatcatatagctcactgcagcctcgaacttctgtgcacaagcgatctttccacctcagcctcctgagtagctgctgcagatgtgtgctgctacacctggctaatgttactatttttattttttaagagatggagtcttgctatgttgcccaagctggtcttgaactcctgggctcaagagatccttttacctccatctcccaaagtgctgggattacaggtgtgagccagtccctgaacgtgacttctgttgctgtcttcagtatgtttggttacagagactttacggaactgataactttaaaattaaagagaggaaaacaggggaatccttacctgttttgttttgttttgttttgttttgtttttgtttttgtttgtttttttttttttttgagagacacagtttcactcttgtcrcccaggttggagtgcagtggtg

SEQ ID NO: 639516 - DNA, 557 bp, Homo sapiens
gccactgtttccaaaaggttgtccatgagattccacaatgaagaggtccctgatgatcttgggaggcacagcttggagtggtgggcgcaaagccagagagccttagatttaagagagaatgggaggtgggaggtaggaagtgaggacaatgagttggaaaaccttggtgaagcgaatctgtaaagaatttaaaagagggaggcaaccagtgctggatgggagacgggaaggtgattcttttaaagatggaagacacttgggacaatttaaaggactgaaatttactgagtattcatatgtgacctcatttgaacctcctaatattcatgaggaagttttcccattctgcagatgtggaaactggaactgaggctaartgactcagaaacataggggaaattgatggtgggctttggaagaagagatacagccattacttccttgcctgaattcccactgccacttcatcatgctggaggcacaaggcagggaggcatggagagaaagacggaaaagaggattggaaaggaagactcacagtgctaagtccccattag

SEQ ID NO: 639517 - DNA, 481 bp, Homo sapiens
ttggtcttatgagaaccgtgtgataaacatcttaccttcacaaggcagaaaatacttccttttcttctttctccttctgcttccctcatgtcccctgctgtaccccctgcagcctttctcaaaattaaatttaatgatttcttatcaagaatttacaaggtattcttgctttcctaggaagatacggtggagtagaaatgttcaaaataaagygttttccacattcaaggtatttgtaatttcccaggggagatataaataaaataatcatagaataatacgtagcaataaaaatcatgaacagaaatgcatggtgtatgttacaattgcttaagtattcagaggaggtgacccatctgctccctcagtgtgtttttagaactttctttcagatttccagggggacccacctcaaatttattaattcagaatctcaggagaatcacctaggagtctgcatttcccaggtgatttctgtcat

SEQ ID NO: 639518 - DNA, 633 bp, Homo sapiens
tcccaggggagatataaataaaataatcatagaataatacgtagcaataaaaatcatgaacagaaatgcatggtgtatgttacaattgcttaagtattcagaggaggtgacccatctgctccctcagtgtgtttttagaactttctttcagatttccagggggacccacctcaaatttattaattcagaatctcaggagaatcacctaggagtctgcatttcccaggtgatttctgtcatcactggtgtttgggaaaccacaagcttgagtaataaggaaatatttcaggagttgctggaacatgagaaaaacattaaaagacaggcagaaattaggcagaaaattcagagggcaagtgctttggggaagccttcttggaagaaataggacctaagcttagatccatatcagctggaaaagtgagtgaatgagttcctgggatagctgcaaaaggggtgttttacagaggtatttgaccctctaaatcacaaatttttctggataatgaaattaaaatgaccttatgtaaaatatccacctctctatcttttcttagartagagtgcaccatggtctaacctctaaggcttttgaagatttacatttggacttgccactcagatttttaaatg

SEQ ID NO: 639519 - DNA, 604 bp, Homo sapiens
tgtcagttttgtttagttaaaacgtattcgtgtttgtgaggacggkggccactgaaaggcgacagcgctggagaaaataaattctacttttaccaacattaactcccttgattttgcattaattgtgatatgctttgtgtctggggaaaccacctctgcacaaagatttggggcactggaagatttcataaatcaaaataaatacccaaaggaaggctgggtgtgacagaggtcaccggctgggatgctgtacacctggggaaatggggctcctctcccgcacctgccgtcctgctcagccggaactgaggcctggttctgaggaacagacagaaattctaaagagctagaatttgcccttcccctcattatagtttcccactttgggtagttagtatgcatttaatccattcatatttgtattggaatccacagctctatccagacccaaaggagtgctactaaacagttttcacagctcagcatttttttgcactaaggaggaaagctggacaacaagtttataaaatgctgacagaaatacacaataatttagcgagcttccattcgcagtcttcaagaataactgccctacatctcccat

SEQ ID NO: 639520 - DNA, 593 bp, Homo sapiens
tacagcaagtaatttcatcattaatcttaaaaggaaaagggatggtgacaaacaaccagagttggttaaaaaaaaaaaaaccaacatctgtaaaatgtcttcctttttatggcygaaagtgatggtttggagaaagtatgtgaacctccttcaattagcagagctatcccatttttattcatattttctaaaagagaaattttcattcttagacaaccctaatcctgttatgaggctggtaatgtgtatcatttttaacccttgacatcatttttcatttgacaaactgggccttccttatcagttgttttaaaatttcttcctctgtgctgctactggcttttggcactttcatttaagcatagtttaaaaaaaaattcaaagaaaagatcattcttttccctgccttgatataaagatgaaccagtcaatcattcatggagtaccctgctcacatctcatagtacaatttcaaatgttgataatttacttttgatgctaattaattacaagtaatcataaaaacaaattaaaagcactatacttattgcaggttttcttatgctcctgaaataatgcatttttatgcatct

SEQ ID NO: 639521 - DNA, 593 bp, Homo sapiens
tacagcaagtaatttcatcattaatcttaaaaggaaaagggatggtgacaaacaaccagagttggttaaaaaaaaaaaaaccaacatctgtaaaatgtcttcctttttatggctgaaagtgatggtttggagaaagtatgtgaacctccttcaattagcagagctatyccatttttattcatattttctaaaagagaaattttcattcttagacaaccctaatcctgttatgaggctggtaatgtgtatcatttttaacccttgacatcatttttcatttgacaaactgggccttccttatcagttgttttaaaatttcttcctctgtgctgctactggcttttggcactttcatttaagcatagtttaaaaaaaaattcaaagaaaagatcattcttttccctgccttgatataaagatgaaccagtcaatcattcatggagtaccctgctcacatctcatagtacaatttcaaatgttgataatttacttttgatgctaattaattacaagtaatcataaaaacaaattaaaagcactatacttattgcaggttttcttatgctcctgaaataatgcatttttatgcatct

SEQ ID NO: 639522 - DNA, 599 bp, Homo sapiens
cactgacctccttggacctcagtttcctcatctgcaatgtgcaatgtatgtcttcagtctttcctatatcaaaggagctgctccacgtgaagatgggatgatgcaactgtgcaagttgtaacaaaaagagaaaagcaacaagaagagaaaagcaaaggctctttattgagagcgtgctacagcaagggggtcatccacaagcacctgaattttggcagagactcraaggcaggcaggaatgggaaagctttagagtggaaaacagggaaagcttcaggtatgccctgattagagcctgttgaaatggaaaagttggaagcagcctaactagaagtggggtgtgctatgtgattaattagaggtgcatatttggcttcctcttattggtcctaagttggaaacagggacaaaaaataggaaagctgccagttattaaacaaattctggccacttggagctgattgctacagaagttattgtatagcttcctagattgtcactagagacagcagactggcttcctgcaagtctgacttctagcaggctggctttctaggttgtttatagtagataaaaggttggtttcctggagagcttgc

SEQ ID NO: 639523 - DNA, 571 bp, Homo sapiens
attactcaaatgcaatttaattaacattcaacaactgccttgttaaatttaaaaatttattctagttgcatgtgatctgaagctaaaacatgagttggtattctaagtcttgggatctggttgtcaaatcaaacaatactttgaatttaccagacatgttataacacctgtaataatgcacattaaaaagtgccctatcttgagcctccatttccttctgttacaagtcttgcatygtaaaacagcaaaggcaaacattccacagaaggaaggaaaggttttagatttcttctcagtttttttccttttgatttgcagtttgtgaccacaaagggaaaatgcagagatgaatgtctcttgaaataagaaatgataggagatggctagggctgaaaagtttccatttaagttaggggaaagtgaaactttgaaagtgactttttaatttcttgaattaattggtaaatatcttacgtgctcttccacaagattatacattcaaaattagaaaatagattcattcaaattctctaccaactgttgtacatgctcttgctgatgggaaacggag

SEQ ID NO: 639524 - DNA, 546 bp, Homo sapiens
tgattgtgacaatgtagacgtcttgtgcaaactttctggtctgggtcttccagaggaagtaaagtgtcctgtggccatagatgttgtctgttcatatgacaccttactccacaggagatacacctgcttttcactgccagctaatagcatggatgcccttgtgccaactagcctttgcaggaatcacatctagagtacagatttgttgcctctctagttctcattagctcttctgcagagggttcaaggttggtgtccgtggtggcttagatggaaccactgggctaacatatatagaatgtaaactagtccttgaaaaaagcwtcatgcagagataagagaagagcctaagaaaaaatatagaagaggaaacaatcactcaaggccagacatgtgggtgtcctccagaggataaaagaggggggctctaggcaggcttttaattctgcacgccttcaaattgatggtctctaaatatgttcagaaaagaacaagaataggatgttatatgaagggaagggcagagaaaaggcagtgggtggcagc

SEQ ID NO: 639525 - DNA, 546 bp, Homo sapiens
tgattgtgacaatgtagacgtcttgtgcaaactttctggtctgggtcttccagaggaagtaaagtgtcctgtggccatagatgttgtctgttcatatgacaccttactccacaggagatacacctgcttttcactgccagctaatagcatggatgcccttgtgccaactagcctttgcaggaatcacatctagagtacagatttgttgcctctctagttctcattagctcttctgcagagggttcaaggttggtgtccgtggtggcttagatggaaccactgggctaacatatatagaatgtaaactagtccttgaaaaaagcatcatgcagagataagagaagagcytaagaaaaaatatagaagaggaaacaatcactcaaggccagacatgtgggtgtcctccagaggataaaagaggggggctctaggcaggcttttaattctgcacgccttcaaattgatggtctctaaatatgttcagaaaagaacaagaataggatgttatatgaagggaagggcagagaaaaggcagtgggtggcagc

SEQ ID NO: 639526 - DNA, 557 bp, Homo sapiens
ttctcattagctcttctgcagagggttcaaggttggtgtccgtggtggcttagatggaaccactgggctaacatatatagaatgtaaactagtccttgaaaaaagcatcatgcagagataagagaagagcctaagaaaaaatatagaagaggaaacaatcactcaaggccagacatgtgggtgtcctccagaggataaaagaggggggctctaggcaggcttttaattctgcacgccttcaaattgatggtctctaaatatgttcagaaaagaacaagaataggatgttatatgaagggaagggcagagaaaaggcagtgggtggcagcactcaaagatcttccttcccaaataaattcagctttggccccaagctccatgagaaccctgattttaagatgacccagtctcgtttgaaggttayttaaagaccatctgttgacctcaagcatgtctcataggggaacgcatctgccttccaagcagctcaccaaagaatcccttccctccgcatgtcagagtctccctgagaggagtattagaaatgcagtttgctc

SEQ ID NO: 639527 - DNA, 557 bp, Homo sapiens
tataaaaattagccaggcatggtgatgggcgcctgtagtcccagctacttgggaggctgaggcaggagaayggcatgaacccgtaaatcggaggttgcagtgagccgagatcgcgccactgcactttagcctgggtgacagagcgagactctgtctcaaaaaaaaaaaaaaaaaaaaaaaaaattcccattccaagaagccttaaaggaaatcattagcagattgaccctgtaaatcaatataaatctttgtagagaaaacttgagaagcaaagtaaagacaagcagcagactggaaaaaaatatgtgcaaattttataatagacaaaagttttctatccttaatatataaagaactcttgtaaataaatatggaaaatgcaaatcaggaaagataaaacaatttaatcttaaagattaagaatatccagtattggctaggatgtgaagacataggctcatttgtagattgttgataccaatgagaagcatttttaaagaacacttttgtaccatctttcacaatttaaaatgtacactgtatttggtagtaattgg

SEQ ID NO: 639528 - DNA, 557 bp, Homo sapiens
tataaaaattagccaggcatggtgatgggcgcctgtagtcccagctacttgggaggctgaggcaggagaatggcatgaacccgtaaatcggaggttgcagtgagccgagatcgcrccactgcactttagcctgggtgacagagcgagactctgtctcaaaaaaaaaaaaaaaaaaaaaaaaaattcccattccaagaagccttaaaggaaatcattagcagattgaccctgtaaatcaatataaatctttgtagagaaaacttgagaagcaaagtaaagacaagcagcagactggaaaaaaatatgtgcaaattttataatagacaaaagttttctatccttaatatataaagaactcttgtaaataaatatggaaaatgcaaatcaggaaagataaaacaatttaatcttaaagattaagaatatccagtattggctaggatgtgaagacataggctcatttgtagattgttgataccaatgagaagcatttttaaagaacacttttgtaccatctttcacaatttaaaatgtacactgtatttggtagtaattgg

SEQ ID NO: 639529 - DNA, 578 bp, Homo sapiens
atgattaccaaattagaatatttgcctttagttcttgatcctgtctaaaagacagcttttgattgctatggtatctattatgttcccttgaatcctcagaatgaaagcaaaatgcagttatstatgtttgaaatttagaattgaatggttctatggttaccaattacccaacaccatttgataggactagcctagatgatgatggctcaccaatttccttgcaagggcaagagctgataatcaactgactaatgaggattgacttctacaattgatgagcatggaattggatgtgcctaaatcaacagaagagggattttgatgtcatcacactgtagccccagaagacagaacgctcaaaggtgtcaatgggcagaatttgtagatgacatacagcatccaatggattactcctattcaggtattgcttaatgtagaacaaacaagaagtttaactggtggaaaaaaaggttataagatttaataaattagttttaagcaagaatgagtccaggattcctatcttagacaattaaatagtgtcattaatccagatgatattcattaatgttgaaatg

SEQ ID NO: 639530 - DNA, 623 bp, Homo sapiens
gctaaagctaggttctctggaacataggaccagcttagagactggcccatggatgtcttcaaataagttgaatcagttagtaacatgggctggagtcagggtcaagactagaaggcctaggaattttaagattcttatgggcatataacattatgtgtatgcatttctgcagcctccactgcatctacagtagtagtttacagaaaaattaattgctgctttgctgctaactagtaatatttattaagcatttgcaatttgccattaattttctaagcatatcacatagattaccttattttattctcacaatcaccctaaaagtcactcaataaatatccattgaatgaatggctgaacttaagtcagtcaaacaacacttggtgatactactttctccctttacaaccacaacatcatgacctccatttgactctattgggaagcacgtggatactagaaaggaaagggaataaaagrtcaccttcacggcagcacagagattgcactcatggaaaacagaatccttggaaaaggatgccatgactcagataagaaatgacgaagatctaaactaaggatgtgatcattgagttgaagaggagacagaatatttaagtgaa

SEQ ID NO: 639531 - DNA, 551 bp, Homo sapiens
ggctgctgctggaaccccaagtgatgtctyattaagtcttagatcaacggcaactggcaagatacctggaaaagcatttcagcattaaaacagttttaggtcaaatgaggcctggggaactgcagcttaatttgatccattgcagcaaagaaacaactaaaggcttttaggtatttggtggcacaggtcccaccagaaagtaatattcagcactctgggtcaattcaatatttaattatatcagttaagaagggaactaatcaaatacaggctttgtgcaaacgctctttctatatttaactctacatgccatgaacctgctagagaggaaaatttgagtttaataatatttaaaagctctttaaaagaagcaccgtctatccctttataggggcttgcgttttaaaaaatagaaaatctatctcttcggggcttagtgggagttaagccgcctgagaactggacagttactcaggagatactatgtggagatgagaatggtagctctgtcactaaattagaaggagctgaggctcacaggtacacacgca

SEQ ID NO: 639532 - DNA, 597 bp, Homo sapiens
cccgccctcagtgtcagatgcattaggtgtgagatttttgcatttctaacaagttcccaggtaatgctgatgctgctgggctgagaccacactttgagaaccactgactatgtagtagtttaaattttgatgttaggtgaattgcaggaagaaatttcctcttctgggtgccctctcttacacaaagggtacttatgcttgtgatmttccttgcacaaaagaaagatatctgcctgcaagtaattttctgtaaatcttcaagcatatttcagagctgatttaaaatctcatctgaggccgcatttcacagatcatgaggagcaaaagctgtcaactccaccatagggagtgactttggaccattgctcctttcatgggtggctaaatttgcccagtgctgccaagaccaggcttcctaaaggtatcagttacctgtcaagctgatgtgctctatgtggaggtgtagaaagcagcctatgcattcttcacccatttacctactcattctttacccttaatccaatcaaaagacgacccactctcataatcaaatcaatccagtcaaaagatgacccatctcattggggatgacaattt

SEQ ID NO: 639533 - DNA, 565 bp, Homo sapiens
  misc_feature 542, 543, 544, 545, 546, 547, 548, 549, 550, 551, 552, 553,554, 555, 556, 557, 558, 559, 560, 561, 562, 563, 564, 565: n = A,T,C or G
acccctgagcagcctaactgggaggcaccccccagtrggggcagactgacacctcacatggccgggtactcctctgagacaaaagttccagaggaacgatcagacagcagcattcacggctcatgaaaatctgcagttctgcagacaccgctgctgatacccaggcaaacagggtctggagtggacctctagcaaactccaacagacctgcagctgagggtcctgtctgttaaaaggaaaactagcaaacagaaaggacatccacaccaaaaacccatctttatattaccgtcatcaaagaccaaaagtagataaaaccacaaagatggggaaaaaacagagcagaaaaactggaagctctcaaacagtattaattgaaatcatgactgttatttcactccaaaagagaagatttaaaagtcgtaaagaccttgacaaagaaaaactctgctgtttgaggaggtgagtaggcagtggcctgggtagacactgcctttctaactatcaccacaaagcaagctcctctttcaccataggaatannnnnnnnnnnnnnnnnnnnnnnn

SEQ ID NO: 639534 - DNA, 624 bp, Homo sapiens
cattttgattgtgagttctgtcagttcctgttggtttctgacaactgtaggttgtatgggacttcatataaacccctgtgccttcccatattttgagtgagtaagtccagaaataaataggaggcaacgtaaaaacctgaggtgaaagaataactgggaaatttaataaagaagaaatgacacgttccatttgagactgaaattgctttatcagaacaaaatccgataacattgaagcccgcagccttcaatgctaacagtgcctaacttccttagataggaagaaatctactatctattctgagctggagtgttaaaagagttctattcattaaaaaacaaagcaaaacaaaccaaaacaactayttgtcttaaggcaacaaatcatttgatgccaaaaaactttaaaaggagtgttttttttctcttaaactttattaaaattattttttacatcacaaacctgaatgctgttcattgagcaagtattctgaccatcccttttagattccctggtttgcagctaaatcaatattttcttgaaatgaaaatataagttgaattctccagagatcaaaagtattctgaggaaaaatacctgttgtaattgcaactcactagtct

SEQ ID NO: 639535 - DNA, 461 bp, Homo sapiens
tgttttcgccctgtggtagaaaaacagtcatgttttaaaagttccctttctgtaaggcataggttagtcctcacggcatcattattcctgaggactttggttatacaagctgccagcacatgttctcagacagcagacttggtttggttctcctgatgatttcaggaacttgctttggggaatgtgaagagggaatarggagagacataaagctatcaagagctacaatctgaaagcctaaaaagccaattaaaatgctctgcatgaaatttgaaaggaaaccattgcaagaggatagaactttattagcatcagaccttctgcctgcattctctctctctctctctctctctgtctctgtctctctctctctctctccccctctctcccaaacctcatattaaattgtaatccccagtattggaggtggagcctggtggggttgggagggaattggattg

SEQ ID NO: 639536 - DNA, 579 bp, Homo sapiens
taagcttaagaaatgattttttttctcttatttccacctaggaattttagtagttgatgctaattgatcctagtttttaaaatagcctgtagtgcacacaagtcttctatttttaaaccctcttaaaaatataatgcctctaaaggcaagacaatgaagatatctgaaactaaataaataataaattcccaagaagtccattttcaataaaggatgagaatatgaaaagtgagaaaatctgtgttgggaattcccatctgaaatgacagcctcattttaatttccatgaatgtgcctcacttacaaattccaacatcccaaactagaagagagactgccagctctaaccctaggtttwtattgtttcttggttgaattcagggagttgaaagcataacactttctctagcatgcagttggctgttatagagttatttctctcagctctttgaaggagggaaaacctaaatgagaaattcgtcagatactagtcaggatgaaaagagacccaccatgctgcctgcaaaaggatttgtgacatgggtcttaccattgtgactcattacaaaccatagtaaa

SEQ ID NO: 639537 - DNA, 544 bp, Homo sapiens
ttctttcctttttttaaaaaagttcatatattaggtgtaacgtctttacctagatgaaatgctgtggaaactttgaatgaaagactgaacattatttctgtgcatctaactttcatggattgccagtttaacatacagcataaaagacagtgaattaatttaactttaacctgacccatttaatattaatatctatgcccacactctcccttgtttcattgtcatcttctttcctaccggttggcttatttttcactaacgtgctagctaacataggacaccttgagagtgtaaattgcactttcaaaatagatcttgtctctgttcatgtcccttggaaatttttaagtggagtaagtgaaacaaatagctgaaaggtaggcccttagggatgtttgctgacttcttcctttcagagatgtagagtgggcccacattgtgaattttttctcatcatktggacaagtccttcaccattaattgtgttctttctgctccaggtgcaaagcatctagattattcccaaataaacacaagtcatctt

SEQ ID NO: 639538 - DNA, 587 bp, Homo sapiens
ccatcagcatgtcccagaaaccctacctgacccctgggaatatgggcagggcactagtaatgacctcataccttatccaggaacagcagtattgaaccagctttgcctattcccagcagttaaaaacatgtactcatttaaccttgtaacaataaatgagcagagttttcttgcctgggctaacacattaactcaggttttccctgctttcagaaccagctgctacatttctccccattgccttcatggaaagttgtcctgtcagcaatgtcacaatgtgatttctttatcaaaggtcattaccgattattttataaataactgatgcttcagcaattatctgatttttacctttttaatattagtttttcatattttattattgtcacatgatggcctatttgtctacaaagaggcacatactaaaaccagcaactttgccttcacstcccattattgtcttatattttctttggcattttaactatgttccggagaaggtcatagctggttagttaaagtgctccatcaatggacacacagagatacaaatatatgcacagcatcctccccagcttttctgctgg

SEQ ID NO: 639539 - DNA, 571 bp, Homo sapiens
aaataaggtgctaggggaatattgctacagaggtaagagcattaacttatgtatctacttcagcatagccaactgggccctggggaggggacccagggactccgctcaactaaataaatagcaaatatggcctaacaactcaaagagcaccagatttattgtcctcagaattaaattgtattaggaataaaccagaaatagtgataaccccactcagactgatacaagatttaggcaacttcagcctctgagcaaagctcctgcattattggaactcaggcaacagtgagacaggtcagactgatgattgggtacaagtcaaatagatcccatagggagatatcagacwttttggtgaataagaggaagccaagcaagtagggaggcagcatggagagagacagggaaagaggaaaatacccaaggatggtttaggctgcttgcatgaaagaaaaaacttggtggtatatggtggtaaccaactagaggcactgaggtaaagcggcagagaccagcaactgaatctgatatctaggaaggattgagtcacagaaagtaagttaagagacca

SEQ ID NO: 639540 - DNA, 571 bp, Homo sapiens
aaataaggtgctaggggaatattgctacagaggtaagagcattaacttatgtatctacttcagcatagccaactgggccctggggaggggacccagggactccgctcaactaaataaatagcaaatatggcctaacaactcaaagagcaccagatttattgtcctcagaattaaattgtattaggaataaaccagaaatagtgataaccccactcagactgatacaagatttaggcaacttcagcctctgagcaaagctcctgcattattggaactcaggcaacagtgagacaggtcagactgatgattgggtacaagtcaaatagatcccatagggagatatcagactttttggtgaataagaggaagccaagcaagtagggagkcagcatggagagagacagggaaagaggaaaatacccaaggatggtttaggctgcttgcatgaaagaaaaaacttggtggtatatggtggtaaccaactagaggcactgaggtaaagcggcagagaccagcaactgaatctgatatctaggaaggattgagtcacagaaagtaagttaagagacca

SEQ ID NO: 639541 - DNA, 542 bp, Homo sapiens
gatggcaattaaaaccaaactttatatatcccagctattgtgtgaagtatgtacggaattgtgatcagagaaaagacaaaaataaccccagcttgaattatgttatgtattttaagaaaaggatgtgttttgaagtaattgacatttcaaagcttagcaggaataattagtcttgatgtcacctttatttaaatcaattttagtacaaatcagaaattaaaatattaaccaactagcttgattgtctgttttgagttaagcaataagtatttaagtgaagtctgaggatcragcactgtgctggtgggtgagtgggtggtgtataaaggtggtccctgcctgcgaattcttagagtctaataaaatagataaagtttacacacaagaaagtgctagaataagcaactttcatatccaatatcaggttacatcagtgattctcagtcaggggccatcatgccttcaaggggacatttggcaagatctggagacatttttgggtgtttcagctgagggtgtgctgttggcatctagtgggtaga

SEQ ID NO: 639542 - DNA, 453 bp, Homo sapiens
gaattcttagagtctaataaaatagataaagtttacacacaagaaagtgctaraataagcaactttcatatccaatatcaggttacatcagtgattctcagtcaggggccatcatgccttcaaggggacatttggcaagatctggagacatttttgggtgtttcagctgagggtgtgctgttggcatctagtgggtagaggccaggcttgccgctaaacatcctacaatgcacacgacagaattatccacatccacttaactggcatcaaatggcagttgggctggggccacatgcacgtaccctacactactccagcattgatttgtactagagaaacagagcaaaacatatgtcagctgtggttcgttggtaaagtccccaaagagttggggcttgaagctgggaagaccaaaactgtccatgcttgtggggccagaaagtccccttgttt

SEQ ID NO: 639543 - DNA, 600 bp, Homo sapiens
cactgcaacctctacctcccaggttccagtgaatctcctgcctcagactcccaagtacctgggattacaggcacatgtcacaacgccctgctaatttttgtatttttagtagagatggggtttcaccatgttggccaggctggtctcgaactcctgacctcaggtgatctgcctgccttgacctcccaaagtgctgggattacaagcatgagccactgtgcctggcctcattaagcagtttttaaaagttagttggagaataagcagatgygtaaatgagctactctaggtgctatagtcaaggggaggaggagaaggagagaggtcagaggaaggagggtttatacctccttcagagagtcaatgttggcttcatgacgaaagaggtattggaggtggactttgatggagggtagaattttaacaggtggggagtagcaggtgaggccaacttaaatagtggcagcaagcaggaagcctctgaagcaggacatcatggggcatattctagaaaaacccagagagcaggatggctgtggcacacggtattgtacaagaagagtaggagatcagtttgagaagggtcagtagcatggttgt

SEQ ID NO: 639544 - DNA, 600 bp, Homo sapiens
cactgcaacctctacctcccaggttccagtgaatctcctgcctcagactcccaagtacctgggattacaggcacatgtcacaacgccctgctaatttttgtatttttagtagagatggggtttcaccatgttggccaggctggtctcgaactcctgacctcaggtgatctgcctgccttgacctcccaaagtgctgggattacaagcatgagccactgtgcctggcctcattaagcagtttttaaaagttagttggagaataagcagatgtgtaaatgagctactctaggtgctatagtcaaggggaggaggagaaggagagaggtcagaggaaggagggtttatacctccttcagagagtcaatgttggcttcatgacgaaagaggtattggaggtggactttgatggagggtagaattttaacaggtggggagtagcaggtgaggccaacttaaatagtggcagcaagcaggaagcctctgaagcaggacatcatggggcatattctagaaaaacccagagagcaggatggctgtggcacayggtattgtacaagaagagtaggagatcagtttgagaagggtcagtagcatggttgt

SEQ ID NO: 639545 - DNA, 576 bp, Homo sapiens
ttagaccatttaattttcacttgagtatccagctttttgatcttaatgatgggtcacttcagtactggstgatcacttcagagaaatcggctttatctctttgttctttagctacacctatgttttaagacacaacttcctgatgttccaactatgtgtgctgttagagataaatttctgagctactgaagaaaaggaaaatcttgtggtcaaatgatgttccataactcaaaacagtgacactgtggtcatgtcctaagagtccttttaggatctttaatagaagattctaacatgacatagaggaatgaacacaggtaagaatctggaggttctatctttaataccagagtatttttatgcaatcctacagagatatctgtccctcccttcctttcattctaccttcctcttttcatctatatctccttctttacattttcctctgctttttctgtcatatacattgataaatcacttatattgtttatgtctctggggatataaaaacagaccctgccctcaaggaacttaaaggaaggcagccaaagaaattgtttactctggtgctatgca

SEQ ID NO: 639546 - DNA, 576 bp, Homo sapiens
ttagaccatttaattttcacttgagtatccagctttttgatcttaatgatgggtcacttcagtactgggtgatcacttcagagaaatcgsctttatctctttgttctttagctacacctatgttttaagacacaacttcctgatgttccaactatgtgtgctgttagagataaatttctgagctactgaagaaaaggaaaatcttgtggtcaaatgatgttccataactcaaaacagtgacactgtggtcatgtcctaagagtccttttaggatctttaatagaagattctaacatgacatagaggaatgaacacaggtaagaatctggaggttctatctttaataccagagtatttttatgcaatcctacagagatatctgtccctcccttcctttcattctaccttcctcttttcatctatatctccttctttacattttcctctgctttttctgtcatatacattgataaatcacttatattgtttatgtctctggggatataaaaacagaccctgccctcaaggaacttaaaggaaggcagccaaagaaattgtttactctggtgctatgca

SEQ ID NO: 639547 - DNA, 636 bp, Homo sapiens
agacaaatacaccaatggaatagagtggagagctcaaaaacatgtccatgaatatacaggaaatgattgtatagtatgattagtgctgtaaatcactggggcaaagaagagattatctagtagtgttggcaacactggcttgccatatgcagaagaaaaaaatataagccagcatccctacctaagactatttataaagatgagtgcatgataggttaaaaatytaaatgtgcaaggagaagctatcaagtaaatgcgaaatagtgtgggagtatgtctttgagacacagatgaggacacactttcttatttgttctaccttctattggttctctccctaccccacaagtgcatagtcttctttgatgtcacctccacttctccctggcctcttactgtgcgaaggccctggagctcagtacttggaccctttctcttttttattctaccttacttagtgggttattttagccagtctcaagattttaaataccatctctgtgttgagaaattttccaaattttaatctccagctgaacctacttgacacccccacatggaggtctgatgaacatgtcaaacttcgcaggcctaagattaaacttgtaatcttccctgtaaaatctgctgcgccca

SEQ ID NO: 639548 - DNA, 428 bp, Homo sapiens
ggcaaaattccaaactttcatagcacactgcattaggaaagctgtggagaaacagccctctcctgataggaatataagacggtaccaacttgtggaagggaatttgacaatgtctagaaaaagtatgcgcccataagctctgatcttcaaatcccacttttagaaaactatcacaaagatacactgtcaaaaactgaagagatgtttattatagcctactgattccagcattatatgtaataatgaagacttgaaacaacccaaatgtccatcaacagtattagattgaytaaaagcatggtgcatccacacaagagagtaatatttctaaatattgacataaagtgaactatttgaaaaacagaagacaatcatttttttaaattgccatattagtctgttctcatgtcattattaaagaattacca

SEQ ID NO: 639549 - DNA, 519 bp, Homo sapiens
tttcataaagggcagttcctctgcacatgccctcttgcctgcagccatgaaaaacgtgactttgctcttccttcaccttccaccatgattgtgaggcctcccaagccatgtggaactgtgagcccattcagcctctttttctttataaatwacccagtcacagatatttcttcatagaagtatgaaaatggatgaatacagatagcaaagttagagcctttagctgatgcaaaagatgtccttgttagaataactgagctgtgctccctcagagatattattccttttcttaacttaaaaatatatatatttttaaattgacatgtaaaaattgtatatatttatgatgtacaatgcaatgttttgaaatatgtacatacatgctgttgaatggctaaatcaagttaattaacatatgcattacctcacatatttatttgtggtgagaacatttaaagtctattctcagcaattttcaagtactcagtacattgttattaactataatcaccatgttgt

SEQ ID NO: 639550 - DNA, 567 bp, Homo sapiens
aattacactatatatacaaaattttaggttaataaaatggaaatgtaatttaaaggagaaatgaaaacaaacagacgttargagtcaccaaccttcttggaaatcagaaatctgtgaatctccggatatgcttatattctttgaaaagaagagtctagtttttccactgaatccacaaagctagattctagtattccttaatacaggaaatctctgtttgaatatctagcagattgctcaaccttaacatgtttgaattggaactcctattctttctgccatgttctcttcctcccagttttcccacctcagggaaggacaactccctgcttctagttctcaggcccaaagccttgaagtcattttgacttctctcatgcaccacatcccacccatcagcaaattattttggctcttcctttaatgtataccaagaacccaccctttctcacagcactgtggttgggccatcccgtgtcacctggattcctgcagtggcctccacaccatcccacccccagcagcccatcctaggaagaggcatgaccttgtagttttgacgtagat

SEQ ID NO: 639551 - DNA, 577 bp, Homo sapiens
gctttttttggccaacgctttagctacagctattaattagtatttaactaattaatagttaaaggtttactgtttaaagatttttcttctccctgtgacttgggaaaggccaaatgggggaaatttcctaattgaagtggtgaaatgagactgaatgtcccctttgttctgtgatttttgatagaaattctcgtattaattatgtaaagcagcagtccccaacctttttggaaccagggtccagtttcatggaagacagtttttccatggaccagggtggagaggatrgtttcggggtgattcaagtgcattacatttatttctatttttattacattgtaatgtataataaaataattataaactcactataatgtagaatcagtgggagccctgagtttgttttcctacaactagccagtcccatctgggggtgagacagatgttcaggcattagattctcataaggagcacgcaacctagatccatcgcatgcacagttcacaatggggttcgtgcacctatgagactctaatgccattgctgatctgacaggaggtggagctcaggaggtaat

SEQ ID NO: 639552 - DNA, 577 bp, Homo sapiens
gctttttttggccaacgctttagctacagctattaattagtatttaactaattaatagttaaaggtttactgtttaaagatttttcttctccctgtgacttgggaaaggccaaatgggggaaatttcctaattgaagtggtgaaatgagactgaatgtcccctttgttctgtgatttttgatagaaattctcgtattaattatgtaaagcagcagtccccaacctttttggaaccagggtccagtttcatggaagacagtttttccatggaccagggtggagaggatagtttcggkgtgattcaagtgcattacatttatttctatttttattacattgtaatgtataataaaataattataaactcactataatgtagaatcagtgggagccctgagtttgttttcctacaactagccagtcccatctgggggtgagacagatgttcaggcattagattctcataaggagcacgcaacctagatccatcgcatgcacagttcacaatggggttcgtgcacctatgagactctaatgccattgctgatctgacaggaggtggagctcaggaggtaat

SEQ ID NO: 639553 - DNA, 594 bp, Homo sapiens
ccactttttgtttcatatcaccatcttattttatctaaaaaaaattcaaggctagttttccttgactgcattttaaaagagatttaataaaccgtaactggtaatttctccttgtgactattttatcaacatgtgctaagaaaaaatgaaatgtgaagctgaacaccaaaccaatttctaaaattttgtttgaaatggaaacctctggagttctcttaattccaactgataatatcagctcctaattggcttgagtaaaatttggctaagtaacccttccagacatctctaacagatacattgaatttcagctgtagaaatgccaatttctcatactttcattttttttcccagggtatttgtcttgtacttcrtcatttacagtcctgttcttgtcaaagtgctatttattaagaatataaagacggcattatgacactacctcctgcattttaacagaagtgtgacatttacctatttgtaaccttatcagtaatttattcattctagtacagcttattgggtgtacatagtatatcattcttaattagccaaatagaattcttcattgtgtatccatttttagctagtaca

SEQ ID NO: 639554 - DNA, 594 bp, Homo sapiens
ccactttttgtttcatatcaccatcttattttatctaaaaaaaattcaaggctagttttccttgactgcattttaaaagagatttaataaaccgtaactggtaatttctccttgtgactattttatcaacatgtgctaagaaaaaatgaaatgtgaagctgaacaccaaaccaatttctaaaattttgtttgaaatggaaacctctggagttctcttaattccaactgataatatcagctcctaattggcttgagtaaaatttggctaagtaacccttccagacatctctaacagatacattgaatttcagctgtagaaatgccaatttctcatactttcattttttttcccagggtatttgtcttgtacttcatcatttacagtcctgttcttgtcaaagtgctatttattaagaatataaagacggcattatgacactayctcctgcattttaacagaagtgtgacatttacctatttgtaaccttatcagtaatttattcattctagtacagcttattgggtgtacatagtatatcattcttaattagccaaatagaattcttcattgtgtatccatttttagctagtaca

SEQ ID NO: 639555 - DNA, 594 bp, Homo sapiens
ccactttttgtttcatatcaccatcttattttatctaaaaaaaattcaaggctagttttccttgactgcattttaaaagagatttaataaaccgtaactggtaatttctccttgtgactattttatcaacatgtgctaagaaaaaatgaaatgtgaagctgaacaccaaaccaatttctaaaattttgtttgaaatggaaacctctggagttctcttaattccaactgataatatcagctcctaattggcttgagtaaaatttggctaagtaacccttccagacatctctaacagatacattgaatttcagctgtagaaatgccaatttctcatactttcattttttttcccagggtatttgtcttgtacttcatcatttacagtcctgttcttgtcaaagtgctatttattaagaatataaagacggcattatgacactacctcctrcattttaacagaagtgtgacatttacctatttgtaaccttatcagtaatttattcattctagtacagcttattgggtgtacatagtatatcattcttaattagccaaatagaattcttcattgtgtatccatttttagctagtaca

SEQ ID NO: 639556 - DNA, 606 bp, Homo sapiens
catatttaatttttgactagaattagtrcaatcacatatggtttccattagctttgtgaaaaatacagatttcaaagaaaaaaatctgttctatagctcattagaagcccaaacactaaagatataaattttgactaaaagagaatcacaaagaatatacatgaggataaggaaaactatgaatcaggccttaaaaaaatatcttgctatttattctttaattctcaagacattatatatgagcacagtttatacttgatcacaagtgtcactaatataggctgcctcagatggaatgtaagacccataaaattcaaacttacttgtaaaagttaacacagtcttttgtatttttttaaattgaccaacttttttttcaggtataacttgtttgtaaacaaatacccaactagcctcatggtttaaatagtaaaaaagcagttaatgtaccaagctgtttttttttccctagactctggccatgaatctatgttctcttattaaccatgaagtttactaataattattgggctcaaatcacctttctgttcttaggattgcaggaggagggatatcaagcctagtaatgctagtaacgctgtgttt

SEQ ID NO: 639557 - DNA, 578 bp, Homo sapiens
ttcaatgatttttggtaaatttactgaatggtgcaaccattagcacaatccaattttagatcacttcatcattccccaaatatccctggggcctgtttgcaatcactcaccgttcttaccccagccccagcaacccctaatctattttgtctgtttagatctgccttttctggacatttcatacagatggaatcgtacaatatatagtctttagcatctggcttttttcagttagaatagctgttgaggtttattcaggttgtcacatgtagctgtagttggttcctttttattgcttaactaggatttattccatgccatggctatgccgcattttgttcaccatttggtagacctttctgcaaatacttttgcatggtaaaacagatacattggtgcagcttctatggtagcataatgtgagaataactgatatgagccaacctcttatttggtgctttgactctcttctatgataattttaaatatgaatgccaagagttaaacatccaggttcctattaagcagtggtgttttctgtrtgtaactctccaacaaaccaatgttaagaacttctt

SEQ ID NO: 639558 - DNA, 515 bp, Homo sapiens
acctgtgttcctgtggagttctgcccttcaccttccataacttgtctatctcaaccagcttccaaagagaataatttacaaaataatttctgcccccttggtctacacatctctcccctgtgaagagggtatttaagcctcaaacatctggtccctctttgagtctcatactttgtgtctggcttccatgtatatgcaaaggaataaatcttgtwtgcctttttctcctgttaatctgccttttgtcagtccattttcagcaatcttttggagggggaagagggaagcttttcctctttgccacaatagtgaaaaggaggaaaaagagagaacaggaatagaaattgagggatggtacagaatatgtgatgatgggtaataaaatggggcattttaggaccaaaagatcatggttttagtaatattatatatactaggatataaatcctagttatctactgaaaatgaagaagatagcgtaagaagtgaagcctcaaataatatgaaaaatgatt

SEQ ID NO: 639559 - DNA, 614 bp, Homo sapiens
ctgactctttcattatggaatgtgaaatatcagtgttgtctataaatatttgaaggtatataaaaatgagatgatgtaatktatttataaatttatccaagtactgtaatccttgaattgttgtgtaactgtgtgtgagttttacgcttcatggtatttttggaaacatttttattgcttgcttattttgaaggtatatttatctgttaacatttagggcatagttaccttataccagcaacaagtctaagcactttacttgtattaatttattttatcttccccaaggccctcagaagcagattattcctgttttacagagaaagatactgagagtggttgagtaatttgcccagctgctaactgtgaagcaaaaatttgaaccttttgacttggctattgatattcattctacttgctcacatggtggtctaagaaatttcccagctatagaaatctctctatttttgccactttaatcaacacatagcttcctggatgactgcctgtgttattttgtggatgacagtaagaaacaacaaatactgataaaatcaatattttgctgaaatgagttgatctttcaccagctggactaccattgtgagaactca

SEQ ID NO: 639560 - DNA, 556 bp, Homo sapiens
tgactctttcattatggaatgtgaaatatcagtgttgtctataaatatttgaaggtatataaaaatgagatgatgtaatgtatttataaatttatccaagtactgtaatccttgaattgttgtgtaactgtgtgtgagttttaygcttcatggtatttttggaaacatttttattgcttgcttattttgaaggtatatttatctgttaacatttagggcatagttaccttataccagcaacaagtctaagcactttacttgtattaatttattttatcttccccaaggccctcagaagcagattattcctgttttacagagaaagatactgagagtggttgagtaatttgcccagctgctaactgtgaagcaaaaatttgaaccttttgacttggctattgatattcattctacttgctcacatggtggtctaagaaatttcccagctatagaaatctctctatttttgccactttaatcaacacatagcttcctggatgactgcctgtgttattttgtggatgacagtaagaaacaacaaatactgataaaatca

SEQ ID NO: 639561 - DNA, 505 bp, Homo sapiens
ggcgggtcttgcctcaatgttgatggctgctgcctcatcagggtggtggttgctgaagattgggatggctgtgacaaaatttmttaaaatgagacaaaaatgaagtatgccacattgattgactcttccttttatgagagatttctccgtaggatgtgatgctgtttgatagcattttatccacagtagaaattctttcaaaattgaagtctatcctactgttttatcaagtaaatttatgtaatctcctaaatcctctgttgccacttcaacaatgttcacagcatcttccccagcagattcaatctcaaggaaccactttctttgctcatccataagaaacaactcctcgtccattaaagttttatcatgagattgcagcaattcagtaacatcttcacactccacttctaattctagttatcttgcaatttctacaacatctacagttacttcctccactgaaatcttgaacccttccaagtcttccataagagttagaatc

SEQ ID NO: 639562 - DNA, 595 bp, Homo sapiens
aagaaatttcccagctatagaaatctctctatttttgccactttaatcaacacatagcttcctggatgactgcctgtgttattttgtggatgacagtaagaaacaacaaatactgataaaatcaatattttgctgaaatgagttgatctttcaccagctggactaccattgtgagaactcagttcagacaaacttccctgctaaaaatctgtttatcatacatttattatttatgactttatgtcacattgaagaatttcttcatgatacattttcaggcacacttgtaggaaaattaggatcatgagtcctgctttaagtatttgcagtgtagtaagagaatccatcttttactaggagaccagattccttttatacctcattcatcatgctggattgtaataaatttcagattttggaatgggcttatttaactgacctracaatcttgatgatttccattagaataacttattctaaggtcaaaagtggaaagacactgttggtttttattttgatttcactatactcatttttgaacatggaaatacagtggtgaaaccacctatgcaaaaatgataacagtgaggaaatt

SEQ ID NO: 639563 - DNA, 524 bp, Homo sapiens
atattggtttggatgatagcatgtgttttaataactcattctttctgactaaagcattattcgtaggcctattccctccatatataattctcttggctgtaagatttagcatgggcctgtttatcatacggactcctcatttttatgttagatatagtgccagtatggtttgttgccaattgttattctctttatctttccacatatttttttcagttagctagcacattttacgctgacmaacccaatctaagatgcacactttctctctctttctctgtctctgacctgaaggtacagcacttttataacatctagaataagagtaggcaaacttctctgtaaagggctagatattttaggtttttagtacaatacagtcactgttataactaggcagccctgctgttacagtgcaaatgcagccacatataagtaaatgaatatagtttattctataaaactttatttacagaacaggcagcagatcagatttggcttataggttgtcatttgccaactct

SEQ ID NO: 639564 - DNA, 468 bp, Homo sapiens
gtgacatatgtcattgacctcagcttccttttatattttattgactggcaagtgttactcagcttttgggttgacttgttaatagagaagttcamatcaggaggaataattggctgatgggttaaggaaagaatagtgaggggaaaactaagcttgggaattgacactttcaaatcatgtcctacaagcaaatgtccacaataagttgtgagtataaacattatgatttaatattaatttaatgtgcatgaagtcagatgctccattaagcacttttcatgcattatctcatttaatcctcacatagctctgagaaggttggcattctcatctgaatttttctgttgaggaactgaggcttagggagtttaaatgattttccaagacctcccagctggtgatgaagtggaacagagtcttgtaggcagaacaactgagtccaaatcccttgtttttaagccatgcagc

SEQ ID NO: 639565 - DNA, 468 bp, Homo sapiens
gtgacatatgtcattgacctcagcttccttttatattttattgactggcaagtgttactcagcttttgggttgacttgttaatagagaagttcaaatcaggaggaataattggctgatgggttaaggaaagaatagtgaggggaaaactaagcttgggaattgacactttcaaatcatgtcctacaagcaaatgtccacaataagttgtgagtataaacattatgatttaatattaatttaatgtgcatgaagtcagatgctccattaagcacttttcatgcattatctcatttaatcctcacatagctctgagaaggytggcattctcatctgaatttttctgttgaggaactgaggcttagggagtttaaatgattttccaagacctcccagctggtgatgaagtggaacagagtcttgtaggcagaacaactgagtccaaatcccttgtttttaagccatgcagc

SEQ ID NO: 639566 - DNA, 489 bp, Homo sapiens
actgttattctacagtccacccaaacaggttctctggcaggattcactcatttttctttcaacgaatatttattgatcacatcctatttgccaggcactgttctagatgccagggctacagtagtgggcagtttgggggtggggtatacggggaggggcagggaagaaagaaaaagtctttaccttcatgggaatatattctagtgaggagagacagataatacagtcagaggtgtctgaagaattgaagaaaagtaaagctgaacccacaaataggaagttttagggatgacagtgtggttkcaattttaaattgggtgataatttaacaaatgttaactatagatttgcaatttaaataggagaggaagactcaatatcatctaaatccttacctatgcatatattttgtcatatttcctttgtataaatcattccttttatttgattagtaagttatccttccaattctttgaatgctgagcagta

SEQ ID NO: 639567 - DNA, 360 bp, Homo sapiens
gaattcttccctctctttgctcagtccacttctacgtctctgttccccagcttcaagacctggatatgtttcccatcccctgtgatgtcttcctcaacatccccaggccagagggatcttcctctcctctgaatttttctccatgtattgcctttctgatgcagatttataatttactgttttattgcaagtaaattaatcccagataaattatactcatgcaatttttattctcagtctccatctggtcaggctggaragaaacttaaactaagtcattctgggtttgccctctgcctgggttgtgccacagtcagggtcttaggcagtgctaagtcattaagtgggatacctctgatt

SEQ ID NO: 639568 - DNA, 276 bp, Homo sapiens
ggaacaaaataacccaaatatgacctcttttctcatgtaacttatcaagtaaatgggatggggtggaggaaaaatcaaacmattatagaaataaatgtgccatgaaaagtgttgtgtatcataatgagtgtgcgtaatgatacttgactaatccagtgagttcagagaagacttccattgagaagcaacgtatagacaagattcaaaggataagtaaaaggttgctaggcaaatcagggaaggaagagcatgccaagtagaagaaccagcatgtgc

SEQ ID NO: 639569 - DNA, 546 bp, Homo sapiens
attcaatccttccataaatatctgctaattatgtcaggctcagggtttggttcaaggactataatgggaacaaaataacccaaatatgacctcttttctcatgtaacttatcaagtaaatgggatggggtggaggaaaaatcaaacaattatagaaataaatgtgccatgaaaagtgttgtgtatcataatgagtgtgcgtaatgatacttgactaatccagtgagttcagagaagacttccattgagaagcaacgtatagacaagattcaaaggataagtaaaaggttgctaggcaaatcagggaaggaagagcatgccaagtagaagaaccagcatgtgcaagggtcttgcagctaatcytttgactctcaactcaaaagtcacttccctggtgagacctcccttttccaccactgcccctccagacagggtcagtgttcctctttgcatttccttctcaacagtttgtaatcccatatttacttatttttgtccctaccagattataagctttatggaagcataggacatggacatgtttgca

SEQ ID NO: 639570 - DNA, 549 bp, Homo sapiens
aaatgcaagttaaaaccacaacaagatacaactacatctgcttttctggctgagatttaagaaactgaccactctaagtgttaatgagaatgtggaaaaactggaattctcaaacactgcttgtgggaacataaaataggacaaccattttgcaaaacagtttggccatttcttaaaaagttaaacttatacttaccatatgattcagctatttcattcttaggcatttatgcaagacagatgaatgtctatgtccatgtgaagacctgtacatactgttcagagcagctttatttgtaatagccccaaatctggaaacaacctaatgtccaccaacaggagaattaataaacaaattatggtacygtatatccagacaacaaaatactacgcaggaataaagagaaataaacccaacaatatggatggatgccaaataattatggtggtaaataaaggcatacaaaagataatacatcttttaattccatttataaagtcctagtacatgtaaactaatctgtagtgataaaaagcatattagtggtt

SEQ ID NO: 639571 - DNA, 594 bp, Homo sapiens
gggatgcatgtatctgatagggatgagtagagaagaggaaacctgctagctcactgtaacaagaaccaaaattggaaacaagagaataaaacattgaagggcaaagacaatgacgagttcaattagagacatgttggctttgatgaggccagggcagttggccctgttattctgggctcgccagaaagataagtcctcaagatagaagcatacactgagaatctaaatcaagagaaggattgaaggccaaagagagrcattcgcccctttcctatctgctagtcactggatacttgcataattgttgcctaaggaacctcttgtcctggttattagccattcttattgactattcttacacagtcacatccagcatgatataccacttctaggaggtgccaaagtgaggcagcagacccaagattaccaaatccagcacattggattcaaaggggttctagaaacaattttactcattatcctcaatttacaacatcattgcttcaaaaacattttggtaatctactactaaatgagccatccaaaatcatgtctattccagaaattaaaggtacaaaaaccccactgtagatt

SEQ ID NO: 639572 - DNA, 579 bp, Homo sapiens
atcctcaatttacaacatcattgcttcaaaaacattttggtaatctactactaaatgagccatccaaaatcatgtctattccagaaattaaaggtacaaaaaccccactgtagattaaataatgtgtctaaacagcccttaattatttagagaaacagaagcaatagacacttattaatcacaagaatgaagcattatctgtgtgtgaatgtctctggatatgagagaacatagtatctttcattgtgctaaattgtaacctaaaaaatttagactaatgatggtatcacttgtctcaaagctctttaaaatgcccagagatataaactatcagctatagcctctcataaacctcagacttgaactatacattgtgcatgccttccccctgctggagcatttatttgtacatgagaaatgaaagactgatgcagaaccatagtctttgatacatccgtaagagtggccaaatatyctggttgtcaaagtaaacagagagacttctgtctgggcttttccgtgattacatttcttactttttgacaacaggcatttcagagctcccctgtgctaaatgtg

SEQ ID NO: 639573 - DNA, 529 bp, Homo sapiens
tacaactatgatttatttaaggcaaaacttttggtttggaacataactctcaacagatacatgatttctataaaaacttattgcctgatttttgacaactcaaattttaaaagggtttccaagaactcattaaaaccaaaagcaaggagtactggttttctttgccagcagtggtcatggtggataggaagaaaagagcccggtgatccagggaacttttctcctctgggagtyctttcttcctcctttttctccccatggagggaaggagtgacttgtcttcctgagttttgctttcccctgaacatgataagaggttgagagagagctctcacacatttgatggcagaataaaggttcctaactaggttgatgggttagaaactcggagtgggcttttgcaacagtgtgaaggcacatggtgtagaacagtgggtctcaaacattaaggtgcatcaaagtcatgaggtgggcttgtaaaaccacaaatcgctgagttccaaccaccaccctctacctcccggtccca

SEQ ID NO: 639574 - DNA, 557 bp, Homo sapiens
ctttcctttataaattacccagtcttgggtacatctttattagcagcgtcagtacagactaatacactgggtgattaaatgtgtgtgtgtgtgtatgtgtatacatgtttgtgaaatatatatgtgtagccaatatatttttaaacacctggttataacattaaatttgcatagtcttttacgttgattttagtcattgtcacagttactgtattaaatattttctaycttacttctagctttcaagtaatggaaacacctccttttttcctgtggtggtctttctatcctagcagtttttttcctctccctataggtgataaaattgactcatataaccctatcttttaaaaaatgtttaattcttcttagccagttttaaatatcaccagaaaatttctgcttaactctaccgaaattatttactttctttctggttttgcatatctttcatcatcttaatttacagctctgacactcatcttatatttcttgcatttctagtttcttcgctaaggacctgctcctagggaaatgcattttcagaaattactcca

SEQ ID NO: 639575 - DNA, 596 bp, Homo sapiens
tggtccctactccctctctgttctcgtctcctcctctcccttctccccaactccctccaccctgactcctggctattccttgagtgtgtctggcaggctctggctttacactctttgcaccattggttgtttgctatgcctggagtatcctttgggtatctgtatgctgaattccctcaccaatttcaaatctttgctcaaatgccaccttgatgacatctttctaatcctcttatttaatgcagaagacctctttccactatacgctgatctaattttctttcttatttttataaagaactgatcaccctctaacaccctagatatttctttgggtgttttatttactgcctattttctgccttcccccgcctttgtgtccactggtatatcttcagcaatatstggcatataagatgtactcaatagtgtttctacaatgaattaatttgtgagattagaatagcagaaggaagagtaggttttaaaggaaaattgagtgtttctttttaaaactttttatctaaaatgcctcccagatatccagttgcagacagctaacaattacatatctcaatgtattagactaaagttct

SEQ ID NO: 639576 - DNA, 514 bp, Homo sapiens
caacatccaggcttatgcaatttttacagattgtaggtatcatacatatttgtgatgacttattactttgtctgagctttatgtagaggcattcagtttgtgaagtaacaagaaaatgaaatcagtatgactcagactctyttggttgaaataacagagacttgattaagctactacaaaaaagacagtttctgttaggttaagattagatagatatggtcataaaaaagagacagaaaagtcaaaaagatttgtcttcttaaaaataaggttgactccatatttctattaccattactggtaattgacacaggtaaaatgctttgcagttttcagaataacctcaggtaacttctttattttattcctttcattcacctttctgggaaagagatgaagttctaattgagttgtccaagattgctcaatctctcagaaattatagagctcggagattttgctcctacattctcatacatagcaaagcattagctcattctgctatacaagattt

SEQ ID NO: 639577 - DNA, 503 bp, Homo sapiens
tataattacatgactctctaagtctgttccttgaaagggaagggagctgatgttctgctgttcatcactgtgtcatcgttccccccagctaccttttggtcgcagacacttttatatgggtgtgtcctttaaagtgcaacccactggcaactcagcattgctcatgatccctaaccattttaagtctcactttccagatctgggaagtgaaattgctcacttgactatgttgtagagaaaacactggctctggacaggaggaaacagcttggcattgagctctgcatgaataggatgtggggcactggaagtctttggaattcaatttatagttataaaaatggtacttgaggctgagtgcggttgctcacacctacaatcccagcacttcgggaggctgaggcaggtggactgctcaagtccaggagtttaagaccagtgtgagcaacwtggtgaaaccctgtctctacccaaaatacaaaaattagccaggcatagtggtg

SEQ ID NO: 639578 - DNA, 607 bp, Homo sapiens
gaaaagcatgtattctacattttcttagaagccaaagcttttcaattctgctttaatttcaacatttgctttatatttttattcagttgcattgtagaggaaaacatgatcaaaaattatgttgagacattggaaggcagagcatgaatcccagatacagacatttgcctcctttttttaggcttgacccttccttatgttttcttcctccagttttgcttgtgtacctctttattaagattgggctaggtgcagtggttgatgcctgtaatcccagcactttgggaggctgaggtgggcagatcacttgaggtcagcctggccaacatggtgaaaccccgtctccactaaaaatagaaaaattagccgggcatagtgatgggtgcctgtaattcccagctactcaagaggctaaggcaggagaatcacttatacccaggagcyggaggttgcagtgagccgagattgcatcattgcacttcaggctgggtgacagagtgagactttgtttaaaaaaaaaaaaagactgagtgctttaacagaaagataaataacaaagctcaaaagaagatcaagtggcagcttacttagatatatttttacattt

SEQ ID NO: 639579 - DNA, 567 bp, Homo sapiens
ttgaggctgagtgcggttgctcacacctacaatcccagcacttcgggaggctgaggcaggtggactgctcaagtccaggagtttaagaccagtgtgagcaacttggtgaaaccctgtctctacccaaaatacaaaaattagccaggcatagtggtgcacacttgtggtcccagctattcgggaggctgagtggaaggcaggtttaggcttggaggtggaggttgaagtgagccgagatactgtatccagcctgggtgayggagccagacactgtcaaaaaaaaaggcacttcgactagaaaatcataaccaattgcctttactcttaaaatctgtgccaggcactagctgagcacttgacgtatttttttatctcattttaaatctgtggagaaggcgttattattatatctgtaattcagatgaggaaattaggcacagagaggttaagtaacctaaatgaggtcatgtaaccagtgagtggctgtgctaggatttgtacctgagaacttgtgctctaaccactcctgttcttagctgttgcatgaactcccagaattatgagagt

SEQ ID NO: 639580 - DNA, 514 bp, Homo sapiens
ctgtctctacaaggtaaggtctctgtcytcttccaccctgtcttcacaacctatgttgaacatgttagacattcaacccactcaagaaagattccagtctgtcactgcttatgtaatcatttgtttactgtttttctcccagtttctattcagaactgtgttaatcttgttcatcatttaatcctcaaagcctaacacagaaatactaaataaattaatgaacaaatttagatatctctttttttcttctttgccctaattaacaagcccaatctcaactccaacacctagacattacagatcatctcctttattgtctttcttcttctgttgctcaagttttttatgccattgatggacattttaatctttaattgttggcattttttgaaattgctatgttgtcaactctaataaattattaatataaatatcaccagggcaagaatagttctttttaatttcctgcattgctaaggacaaggttcttcaacagctatctaataatgaatga

SEQ ID NO: 639581 - DNA, 560 bp, Homo sapiens
gttagctttggcattgaaggtaagttcccaaggctataatgataaagtaagatccacatcaatctaaagttyccattcttccatcccaccacaccctccttcccccaacaccatgtttagactggggaaaaggataaattatacatggaaatacagtaactacctctgaatactccatgaaaaaacaacagagaagctactattggggtccaggagttcgtgtatcattttctgcttactgggtgggctgatggtccacaaagaatttgagtttccttccagttctgctactgttatgtcttctttttcataattttccagaaattgcatagcaccctgtatgtgcacaaatgcacatgcataaatagattatatgcatcatgctgtataaagaaagcagtcactcttccttttaactggcagtatggaaaaggtttctccctttgaagggaatatttttataatggatggtcttgagtgttccattgcactaatttggcttccttacccacaggtatgggcagtttccagttacattatccaatcccagcagttgctac

SEQ ID NO: 639582 - DNA, 560 bp, Homo sapiens
gttagctttggcattgaaggtaagttcccaaggctataatgataaagtaagatccacatcaatctaaagtttccattcttccatcccaccacaccctccytcccccaacaccatgtttagactggggaaaaggataaattatacatggaaatacagtaactacctctgaatactccatgaaaaaacaacagagaagctactattggggtccaggagttcgtgtatcattttctgcttactgggtgggctgatggtccacaaagaatttgagtttccttccagttctgctactgttatgtcttctttttcataattttccagaaattgcatagcaccctgtatgtgcacaaatgcacatgcataaatagattatatgcatcatgctgtataaagaaagcagtcactcttccttttaactggcagtatggaaaaggtttctccctttgaagggaatatttttataatggatggtcttgagtgttccattgcactaatttggcttccttacccacaggtatgggcagtttccagttacattatccaatcccagcagttgctac

SEQ ID NO: 639583 - DNA, 560 bp, Homo sapiens
gttagctttggcattgaaggtaagttcccaaggctataatgataaagtaagatccacatcaatctaaagtttccattcttccatcccaccacaccctccttcccccaacwccatgtttagactggggaaaaggataaattatacatggaaatacagtaactacctctgaatactccatgaaaaaacaacagagaagctactattggggtccaggagttcgtgtatcattttctgcttactgggtgggctgatggtccacaaagaatttgagtttccttccagttctgctactgttatgtcttctttttcataattttccagaaattgcatagcaccctgtatgtgcacaaatgcacatgcataaatagattatatgcatcatgctgtataaagaaagcagtcactcttccttttaactggcagtatggaaaaggtttctccctttgaagggaatatttttataatggatggtcttgagtgttccattgcactaatttggcttccttacccacaggtatgggcagtttccagttacattatccaatcccagcagttgctac

SEQ ID NO: 639584 - DNA, 560 bp, Homo sapiens
gttagctttggcattgaaggtaagttcccaaggctataatgataaagtaagatccacatcaatctaaagtttccattcttccatcccaccacaccctccttcccccaacaccatgtttagactggggaaarggataaattatacatggaaatacagtaactacctctgaatactccatgaaaaaacaacagagaagctactattggggtccaggagttcgtgtatcattttctgcttactgggtgggctgatggtccacaaagaatttgagtttccttccagttctgctactgttatgtcttctttttcataattttccagaaattgcatagcaccctgtatgtgcacaaatgcacatgcataaatagattatatgcatcatgctgtataaagaaagcagtcactcttccttttaactggcagtatggaaaaggtttctccctttgaagggaatatttttataatggatggtcttgagtgttccattgcactaatttggcttccttacccacaggtatgggcagtttccagttacattatccaatcccagcagttgctac

SEQ ID NO: 639585 - DNA, 614 bp, Homo sapiens
cttgactgggtggtgggccagggccagtgcgtagtgcactctgcattcagtgtgcataaggcaatgcaccctatggatctgcactatggagactgcatgaagttcagatggtagcagtgcattttgatatttttgcactggcatttgatactgttgactattttcaacagcatcaaatatggatagcagtagcagtgtattttgattttcttcccgattttctatattgaaaggaagactagggtcccatattttaaaatctgaaatatatattcacaaatatatatacacacatacatgcttccacacatagatatgcaaacaagtgtatagatttgctctttcattattttctcagtgaggcaaatttagatcataggccactcctgtcactccaacagcacccacactggatcatgaaagttttgcaagttaaagaagattaatgtatctctgccaagggcrgttttagtctgttccacctgaagtgggaccacattggttcctctcctgaaggccagtctctttgaggttcatctcaaaaattcccagaggcttctccctccttctgctcagccctcacactgcctttccaggggacaacaggggaaagg

SEQ ID NO: 639586 - DNA, 619 bp, Homo sapiens
aatgaggccacgttctgaggttccagaggtacatgaagttgggagggacactgttcaacccaggacaggtcagttgtctggaaactgacttggagatggagatctgtgcataggaggcttaggggagggtgygctggcagcaggacatgagttaactgagaggcagctgcgaattaaggggagtgaagcacgctaacatgatgggtgatgattgaggttttatttttattttaaatttaggggtacatgtgcaggtttgttacacagggaaactggtgtcatgggagtttgttgtaccgattatttcatcaccaggtattaagcctattattcattatttttcctgatcctctgcctcctcccacctttcaccctccagtatgccccactgtgtgttgttcccctctatatgtccgtgtgttctcatcatttagctcccgcttataaataagaacatgtggtatttgtttttttgttcttgcgttagtttgccaaggataatggcttccaactccatccatgtccctgcaaaggacatgatctcatcccttttttatggctgcatagtattccatggtgtatgtaccacattttctttatccagtctatcattgatggg

SEQ ID NO: 639587 - DNA, 619 bp, Homo sapiens
aatgaggccacgttctgaggttccagaggtacatgaagttgggagggacactgttcaacccaggacaggtcagttgtctggaaactgacttggagatggagatctgtgcataggaggcttaggggagggtgtgctggcagcaggacatgagttaactgagaggcagctgcgaattaaggggagtgaagcacgctaacatgatgggtgatgattgaggttttatttttattttaaatttaggggtacatgtgcaggtttgttacacagggaaactggtgtcatgggagtttgttgtacmgattatttcatcaccaggtattaagcctattattcattatttttcctgatcctctgcctcctcccacctttcaccctccagtatgccccactgtgtgttgttcccctctatatgtccgtgtgttctcatcatttagctcccgcttataaataagaacatgtggtatttgtttttttgttcttgcgttagtttgccaaggataatggcttccaactccatccatgtccctgcaaaggacatgatctcatcccttttttatggctgcatagtattccatggtgtatgtaccacattttctttatccagtctatcattgatggg

SEQ ID NO: 639588 - DNA, 619 bp, Homo sapiens
aatgaggccacgttctgaggttccagaggtacatgaagttgggagggacactgttcaacccaggacaggtcagttgtctggaaactgacttggagatggagatctgtgcataggaggcttaggggagggtgtgctggcagcaggacatgagttaactgagaggcagctgcgaattaaggggagtgaagcacgctaacatgatgggtgatgattgaggttttatttttattttaaatttaggggtacatgtgcaggtttgttacacagggaaactggtgtcatgggagtttgttgtaccgattatttcatcaccaggtattaagcctattattcattatttttcctgatyctctgcctcctcccacctttcaccctccagtatgccccactgtgtgttgttcccctctatatgtccgtgtgttctcatcatttagctcccgcttataaataagaacatgtggtatttgtttttttgttcttgcgttagtttgccaaggataatggcttccaactccatccatgtccctgcaaaggacatgatctcatcccttttttatggctgcatagtattccatggtgtatgtaccacattttctttatccagtctatcattgatggg

SEQ ID NO: 639589 - DNA, 619 bp, Homo sapiens
aatgaggccacgttctgaggttccagaggtacatgaagttgggagggacactgttcaacccaggacaggtcagttgtctggaaactgacttggagatggagatctgtgcataggaggcttaggggagggtgtgctggcagcaggacatgagttaactgagaggcagctgcgaattaaggggagtgaagcacgctaacatgatgggtgatgattgaggttttatttttattttaaatttaggggtacatgtgcaggtttgttacacagggaaactggtgtcatgggagtttgttgtaccgattatttcatcaccaggtattaagcctattattcattatttttcctgatcctctgcctcctcccacctttcaccctccagtatgccccactgtgtgttgttcccctctatatgtccgtgtgttctcatcatttagctcccgcttataartaagaacatgtggtatttgtttttttgttcttgcgttagtttgccaaggataatggcttccaactccatccatgtccctgcaaaggacatgatctcatcccttttttatggctgcatagtattccatggtgtatgtaccacattttctttatccagtctatcattgatggg

SEQ ID NO: 639590 - DNA, 603 bp, Homo sapiens
aaaagcacttcggggagtgcctagcacataggaaggactctagacgtgttcctaaaaaaaaataaataaaaactgcgtgggacagtttttgtttttgttgtctttctgatgcagctaggagctatgtatrcatgtgcttatacacagtcacacacaaactcatgtgaagaacatgcgcacaggagtgaatatgagaagatttgaaaatatatttgaacctcactttaatgtaaggccaagatttaaaccaaagacaaatgaagttgactcttttcttcatgaacaatttctttaaagggtgaaactccctcatttacagaacttttggctcacacatagctgtgttcacaccactttcagccagctgtccagaccgcgggaagcgggacgcgtgggcagccttgcttctgagcttccacctccactgcttgcctgagaacatcagggaatctgcctacttccctttgttcagccagtagcagatgtctgagctcactttattagaaggagtttgctgggtcacaaggggttagaacttgggaggggagttaatacaagcacctgaaacaagcacagtccagacaaaagtgacaggcagatggg

SEQ ID NO: 639591 - DNA, 511 bp, Homo sapiens
ttccaacagaatttacctttaaggtttatttagatgggcagtttcacaactcttttttatttttctttttttttttgaaggagtctcgctgtccaggctggagygcagtggcttgatctcggctcactgaaacctccacctccctggttcaagcgattctccttcttcagcctcccaagtatctggattacaggcgcatgtcaccaagcccagctaacttttgtatttttagtagagacggggtttcatcatgtttgccaggctagttttgaactcctgacctcaggtgatccgcctgtcttggcctcccaaaatgctgggaatacaggtgtgagccaccggacccagccactttcacaactcttaatccatggggaaaactgctgctgagggaaagtcctctgcattgcagtggatagggaatgctgccatctacaaggccccagtatgccaggtgtgggttggtgagaggctgccaaccagtaccacccagcaagggaactgtggacat

SEQ ID NO: 639592 - DNA, 596 bp, Homo sapiens
ttgcccattttgtgaaactgtgctagaaggacccaaacaatgctgatgacaattatcaggatgataagcaacctggaaagacaacgagtgatrtaaatcatagacaagtcatgataggcgcctccatcgtgcttcagtgcttgcattcattcttgtgctattttattacttttaccaaacaaaacacagctccttgacatcacatgaacctatgcctaatgagaatcagttagtaaaatgcccgtgactagtaatcttcacctatgcaattaaacattcattcataaaatagttcaaatgtaagcgaatgtgttgaatgaaaagtacattaatacattaattagaaaaaacattctattaaaaagaaattatttgtatgataaaagagatcaccatttttgtactttttcacaaacttacagaaaactaagtcagcttacacaggtgaatcttaaaaacctctaacccagaatgtaaagtacatcggccaaaaatgctaacctaacgcatttcaatactacaggattcatgtaggtagaactaaccgaataaaatactggtagtcagtataatcctatctgtggttcctggggtcc

SEQ ID NO: 639593 - DNA, 625 bp, Homo sapiens
gcagtgacagcaggattctcatttgcatgtgccagcagcagcagtagcagcagcagcagcagcatagtggggtgcacactcatcaactgcagcagggtgctagtgggtgccggcatgcctgccccgctgtgggcattcaccacagtggcagaggcaacacagctcagggaagggtagggggctgctgctggcgactgtgtatgtggttgcattggtgatagtgttgccttgggggcactggcggrctcaggtctgtgccttctctgtattgcatgagcaggagtggtcactcagggcaggagaggatctgctgttctctgtacctagtttcactcccacggcagtgttggcacaagggcagagcagggcactggtggtgggagtagagctcgctggctgtgtgcccaccaaggctttttctaaatggtggttagcagggggagggcggccgactgcactcttgctgcagcagtgacagggtggggtgtatgcacacatgcatgtgggtcggacaaggaaagcaaaacccgtccccacagacatgctccagccaagcgacgtggggagttgctgtgggcccaagggaagctacagtttggggagggagtatgcgggctggtgcttt

SEQ ID NO: 639594 - DNA, 625 bp, Homo sapiens
gcagtgacagcaggattctcatttgcatgtgccagcagcagcagtagcagcagcagcagcagcatagtggggtgcacactcatcaactgcagcagggtgctagtgggtgccggcatgcctgccccgctgtgggcattcaccacagtggcagaggcaacacagctcagggaagggtagggggctgctgctggcgactgtgtatgtggttgcattggtgatagtgttgccttgggggcactggcggactcaggtctgtgccttctctgtattgcatgagcaggagtggtcactcagggcaggagaggatctgctgttctctgtacctagtttcactcccacggcagtgttggcacaagggcagagcagggcactggtggtgggagtrgagctcgctggctgtgtgcccaccaaggctttttctaaatggtggttagcagggggagggcggccgactgcactcttgctgcagcagtgacagggtggggtgtatgcacacatgcatgtgggtcggacaaggaaagcaaaacccgtccccacagacatgctccagccaagcgacgtggggagttgctgtgggcccaagggaagctacagtttggggagggagtatgcgggctggtgcttt

SEQ ID NO: 639595 - DNA, 384 bp, Homo sapiens
aatatctgtctgttttcactttttctctaaggcatttcaaacctttactaaacttactttctaaatcagagttggcawtttttttttcccccatagaaggccacatagtaaatattttaggctttgggagctatagcatctttgtgaaaactactcaactctctggttatagcataaaggcaaccataaacaacatataaacaaatgggtgtgactgggttccaataaaactttatttacaaaatgattttataatacttgacatcaattctatggtgttatgacatttactaggaatatcatgatattctgttatttattgaattacatggagtagcagttactttcaaactcagattttaagctttataatagtaagacaaa

SEQ ID NO: 639596 - DNA, 573 bp, Homo sapiens
ggctccagaaaaggatgaatccctrttcaaatcttagcccttttctctctgcattggcattaggtgattctagtcatattcctcaatatctctgaattctacttggcaacccctagtgagaactaagtgagactgtgtatgtttcagagtctatagcagactcatatgtagaaaacctgcattgaaggacttggttgttgagggagctattcaataaggcatttcacaagcatatgaggtggggctgagtataatctttaggaaaaaaagaatcaataaatcatcataggtggcttaagttcttaagaacttaactcttccatgaggaaaatacaaaagaagcgctgaaaaaatatttgttcccttaaagaaatgtaagtttatttaagaagatgccttagtccatttgggctattataacaaaatatcatggactgtgtgacttatacttgaaaggtatttcttatagttctggaggctggagagtccaaggtcaagacaccaacagatttgttgtctggtgagagcccatttcctggcttgtagatagacgtctttcacttgtgtcctcat

SEQ ID NO: 639597 - DNA, 593 bp, Homo sapiens
gtatgtttatcttcctaacaaatgttattagaaaatctactatttgccaagatcagggttcaagtaccaagggaggagttaccagctttgcttttctgcttttacagtgtattcctaacagctaggattctctgaaaatagctgttgatacagtgatagaaataatattactttcaaatattcatcagctttaacttagaaccgcagtgttcttggtctagcttaaatctcacctctaccaataagcctttcctgaatgatatggtttggctgtgtccccatcaaaatctcattttgaattcccacatgttgtgggaggtaattgaatcacggaggcaagtcttttctgtgctgttctcatgataatgaataagtctcatgagatctgatgattataaaaaggggagtttccctgcacaagctctctcttttgtctgctgccatccacgtaagatgtgactcactcctccttgccttccaccatgattgtgaggcctccccagccatgtggaactgtaagtccattaaacctcttkcttttgtaaattacccagtcttaggtatgtctttatcagcagtgtgaaaacagacta

SEQ ID NO: 639598 - DNA, 609 bp, Homo sapiens
ccttcggtaacacaaattaacacaaaaaactrtaaatactgttgtgatttgattgttttaaaaagtttttaaattatacaaaatggttttttacctacatcacataaaatgtttttgaatagcgcttacatttttgaagttatttaggatcatttaatggtcgatggtatattggcaccacatctacccaatctttcatgactccatcagtctgtgcacagcaggattcctcatccatcacagcttccttgtttgttcagctcacagataagtgctgagtgctcactgcatgtgagatactctacttataactgcaagagttaaagagatgtgtgagataatgtgcctctcttcaggtatagattctggagggggatcagacgtgcaaatgaagaacattctggacggagtccccagtgaagttccagacacatagtctcatagagaaagaggagcagacgtcctgtctcattgtctctgtcatgttgaatctcactgcacctcagttttctcacctggcaaatgaaaatcataattgtactcaacttgtgcttttcttttgctgttttaatgagtgaaggtgcataaagcccttagaacagcaccggg

SEQ ID NO: 639599 - DNA, 508 bp, Homo sapiens
ccagaaacagcttacatggggctctttatacctaaggcacctcaggtgctccagttcctccacataaaagttgagccttcctatgtggacagctgggtctccactaagtggtaagaatctaaggaccaactgccttcttagcaatttataaaaagagcttgattcacaggtagatttccatgactgctgcaggtctttcctctttcaccatgagaacttttgaagctyttcacgtgtgccagatgctgggattttatcccaaggtaagcaaccagaaagcaagttgacctttccttgaaagaagagctctcctcatagacatcagaaaaaaatatttttgcaaaactctattcaactattgagcaaacacttgaatcttttaaccttatggaaactcttatgtctcaaggaacctcagccagtgccagcttgctgtcccaagaaaagtcaaactaatttttctgcacattactcagctacatttcaactcccctcatattattgccat

SEQ ID NO: 639600 - DNA, 508 bp, Homo sapiens
ccagaaacagcttacatggggctctttatacctaaggcacctcaggtgctccagttcctccacataaaagttgagccttcctatgtggacagctgggtctccactaagtggtaagaatctaaggaccaactgccttcttagcaatttataaaaagagcttgattcacaggtagatttccatgactgctgcaggtctttcctctttcaccatgagaacttttgaagcttttcacrtgtgccagatgctgggattttatcccaaggtaagcaaccagaaagcaagttgacctttccttgaaagaagagctctcctcatagacatcagaaaaaaatatttttgcaaaactctattcaactattgagcaaacacttgaatcttttaaccttatggaaactcttatgtctcaaggaacctcagccagtgccagcttgctgtcccaagaaaagtcaaactaatttttctgcacattactcagctacatttcaactcccctcatattattgccat

SEQ ID NO: 639601 - DNA, 421 bp, Homo sapiens
caaacctcaagtagaagctgccattttctccagatcacaagccctgtaagtgccccattgccatgtccagaccagtattctttcacttttatgcaaaaaaaaaaaaaaattcaacgaaaaaatccttctttgaggttttagccaccatatgtacaagctttaatgttttctaaagaatgcccatgcattcatccacattcagygaagactttggaacctggttccattcttcttccataacacatcataattaatcactaaaatatccacttggtatatccagtggagagacctttgctttcataggtcctttttcccataaaccccagagttcttcctcttccatacatgtctccctaatctcttttagacaagcaagtgtgggccatgggtggtgaatagcactgggatattgagaata

SEQ ID NO: 639602 - DNA, 391 bp, Homo sapiens
tcaccctgcaaaggtctgagaacaccagggatgtgaaaaaatatacataagtttggagaacaatggaaggtaaattgaattatttcagtcgaattgacctttcattactcaataaatatttgttgagccaatgaataatgtgtttgtgatcctatacggaaaaactatgcctttttaacttckgtagtatccttaacatagttctctagaatttgacactttaattagtacctttggataaggctgctgctgcttctataaatgatctcagcctagacaattaattcagttgattcccttcaaaaacatactgatctacaatctttaaatacaaaatgatagaaccagaaggatccttggagaccttctaataaaataggcacaaataagc

SEQ ID NO: 639603 - DNA, 612 bp, Homo sapiens
gaaatgcttgaccaggttaaagctactggggaagagtactagacagggaaataaaagaagcaaacacaaaattgtggtccttatttctgctctgccacttccataagcaaaccagctaaccttacagggttttcaatttctattaaagaaggcaattataccagagggcatgcaacttctctttcctctctaaaaatattgtcattctatatagggtcacttttcattgcattcgttgctaatatacaacgatacacacacatacacacacgcgcgcacgcacactatctttttctataatgccgttcacacatttcccttcctatcgttctgtcaatttgggagttaaattgacatttgctattaacattataatggactatgtaaataytgttcacagttgagccatgtaatgaactacaattaaaatataattcttgcccaactttttctttactctgaagttaataattgtcattctctctcgctcttcctctctttggtttagttttcaaattcaccccaaaactttctgatagtgcagataatctctaaatatagtacaaggtcatatagtaatcatcgttgcacatttccttttttttttttttt

SEQ ID NO: 639604 - DNA, 574 bp, Homo sapiens
gattaagtctgctaacaattcattccctacatttttgttcattaaaatatcctcttggccaggcgtggtggctcatgcctgtaatctcagcaatttgggaggccgaggcaggcggatcacgaggtcaagagatcgagatcatcctggccaacatggtgaaaccccatctctactaaaaatacaaaaattagctggctgtgatggcacgtgtctgtagtcccagctacttgggaggctgaggcagaactgcttgaacccgggaggcagaggttgaagtgagcagagatcgtgccactgaactccagcctggcaacagagcgagactccctctaaaaaaataaataaataaataaayatctctctctctcaacaaggtttcactttgtcacccaggctggagtgcagtggcacgaagtattgaatgtctatagcatatataatagtaaaatatgtgatagtaataacaggaggatggaggaagaattagaaatagttttaaggtccttttactacaagtgaagccatattatattatttgaaatagattcgagtttattttaaaatctatactgct

SEQ ID NO: 639605 - DNA, 542 bp, Homo sapiens
atttgcagctgtggtaagtcctttggcagcagaggctgaatattttgggttcagtatctagaacaaggacactgataggatagcaacaactaccagtcaatcttggtttctaagggaaagcatttatatacaaatgacttttaaaccatccattgtttctacagagaattttgaggcgttatgaatttacctttatatacactataatgaatactccataaaggcaggaattattatccgttctattgcctattctgtcctcatcccctaaaacagtgcttggcacttagaagaagttccatgaatattgctgaaagaatataattcagattagagaagagggaagtaagtagtgtaggcatatgaataaacttcgaccccacactccccgtttagctcaagagtaaccaggttgaagcttccctaacatgccagtttctaccatcttcaatcawgggaactctgttctccagggtctgacatttgtctcctgatcatccacttcctccctgatgggctgctgtgtgctgtcctccccttct

SEQ ID NO: 639606 - DNA, 591 bp, Homo sapiens
ttatgaaaaacatgattcttaagggataaaaagataacatcagtttaaaacayggaagcaatcataaccacttagaatcattattagtttggtggaaccaatgacaggttgctttttagaaaccagagggaatggggttcctgaagcagaggggaagaaaacattcagtttcttgttatgctaaacttatccccagactcccgagactcctttgatgaacagttcattaaaatttccgaccgcagatgaatttgagctaaaatacacaaatgttttaattatacattcctttttaattacactaatgacttgtaatgtgtttatgttggtttagagtttaatttcttcccttagattaggtggttgacttaaggactgtgcttttcagtaaaatagcatgattcatcaatgtttgattatgaattaatgcccaaatgtagaagagctgctgcccttggagggattgctctgctcatgaacaattgcctatcttttgggccctagggaaagcatagatctggccatgttgcaggcctaagggataggagttttgaggaaaaagtcatgaatagttcctaggaggggaaggtg

SEQ ID NO: 639607 - DNA, 575 bp, Homo sapiens
atgtaattcagatgaaaatcttgaaatgggagattatcttggattatattcacttataagttctcttatctaatcataagagaccttataagtgaatgagagaatcaagagagttagagaaagagatatgacagtaaaagcatggtcagagtgatgcaattgctttgaagatagaggaagaggcaacaagtcaacaaatgcaggcagcctctgcaagcaggaaaaggcaaggaaataaatgtttccctagagtctgcggagatgaaggcagccctgctgacatttgatttcagcccctaagacccttttcagacttctgaccaccagaattataagataacgaatgtgtgctgcttcaagtcactatattcactgtaatttgtacagcaccaataggaaacttacgtatttgtgggggaagatgttattgctyagctgagagcttgatgatctgaaaaccatcatgtctgttgcatggaaagaagctattaaaaaactccggaaagaggcaggatacttgatgatgctatttgaatctcttggtcagcttggcctaaaaccatacccgactgttc

SEQ ID NO: 639608 - DNA, 567 bp, Homo sapiens
tccctaactgtcattgaaaagttctctcattacatcatgtctgtgtgaatccaaaygccaaaaaaaacaaaaaacaaaaaaacaaacaaacaaaaaaacacaaaacactggcttttctacaaagtctactggataaagttcaaacaacttggcctaacctttcaggccttccacaaacttaaaatgaagcacattcaagtttattctgtcacccacctggtaaaactatatggccatcatttccagaataatctctgtgcttttctccttccatgcccctgcccatgccttgctctcaaacacagcgacggaccagtatcatcctcatgtagtgactttcttctaatcctttaatgctttgtcaagtctttctcaatcttgccagaaatgttctctagctactttattgaactttgtttgcactattcaaatggctcttgtcacatcccaccttctgtcacaggtattttgtcactatctcttctaatagaaagcagagattctaatgtacatctgggatcctgcagtttccagcatattgaatgctgagcattataaatatctgat

SEQ ID NO: 639609 - DNA, 582 bp, Homo sapiens
aggctaaaatgagcctgcaggggaaccagttaagggacttgcacaggtatcctggtataaggagataaaagcacactctctctggtagaactgagacaggaagggagcaagcaagttggaaagacatttctatccaagacatggtgcatgcaggagataaaaatgacggtttttgcttgggagactgaacatgttggcaccatagaccaaatatgtggacagaaactgtcaacctgttaggtgcctccttgttgatataaggtctgaggtgttttttkttttttttttaataattgcacatttttgttacttcgctgaaagtttttgcattctcccaggcacagatattcagataagtaagctgtgttcatacgagttctcatgctcagtgcagttgcctcagggctacctgggactgcagaaagaaagaataggcagggttgtgggacctccagcaactgcccagcctccccacttagagtgatcttgataactgcagtttagcataagatcactcctgaatagaagctttgcactgctttcaaatgccttgaaacatttgctctagagatggggtaagca

SEQ ID NO: 639610 - DNA, 582 bp, Homo sapiens
gtgttttccataattgctgaaaagatgctaatgtagtagcaagtaaatagtttaaaatattctggctcaggagattttgggaagtcaggtcatgggataacctggagatgccaagcccagatcagatcaccagtcaaagaagtgctaaatgattgtatcgctggctatttataatgcctgaggatgcctgggaggctgtttatcactctttgccaccacagagagagatgggattcttggtgttttatgatctaatttcatggatgtcccacagatttagttcattaagttgggaacagtagaaatagccagaaacaggtaggtctctaatagtgacagcactgaacacgctgaagctttagcatgtaagggcctgtaccctgctacaaagtgtcataggggaagggagaggttctgaaggctccctccccctggtggggtttgcatgtttgtggaaggcttatccagaaattccaggcrgggttaattgagatctaggcactggtctattcagcagtctcacacagatggctttggggatcatagctattcattcatccgatctatggacaacacagctca

SEQ ID NO: 639611 - DNA, 582 bp, Homo sapiens
gtgttttccataattgctgaaaagatgctaatgtagtagcaagtaaatagtttaaaatattctggctcaggagattttgggaagtcaggtcatgggataacctggagatgccaagcccagatcagatcaccagtcaaagaagtgctaaatgattgtatcgctggctatttataatgcctgaggatgcctgggaggctgtttatcactctttgccaccacagagagagatgggattcttggtgttttatgatctaatttcatggatgtcccacagatttagttcattaagttgggaacagtagaaatagccagaaacaggtaggtctctaatagtgacagcactgaacacgctgaagctttagcatgtaagggcctgtaccctgctacaaagtgtcataggggaagggagaggttctgaaggctccctccccctggtggggtttgcatgtttgtggaaggcttatccagaaattccaggcagggttaattgagatctaggcactggtctattyagcagtctcacacagatggctttggggatcatagctattcattcatccgatctatggacaacacagctca

SEQ ID NO: 639612 - DNA, 569 bp, Homo sapiens
gggcatgaggaggagaggtggttgcaacagataagccctacgcagagggagggcagggatttgtcttcacactgaagtggaagtggttgatcctggccaacgtcattgacttttatagccctcatgttttgcacaatgctagtttctctctacgtctctgtacccactgcagatatgggggtgtggcagcatggaggctgatgttttcccatcgccctgtggaacagctgcaccctactgggctgtgattcctgagaacaagttcaggccagggaaaatgatgtagaggccaaggagaatttttgttggtcttcatctatcccccatctggaattctctctcctctttgagcagattcccttttcctcctgggagcccgggtggctgcctgcagagagcctatgtggccatcttcatgtttgccccttcaggtgcctcctttccccttacccatcctaactaatctgtcctytggcccatttcttcaaggacaatcattcaagctaactacaactccgggttttatccctgatagaggtctgtcttctcaccatcaactcatttctttc

SEQ ID NO: 639613 - DNA, 575 bp, Homo sapiens
ctgtcagtattgatgccatttagaccttaatacctaattaagcctcttttattttcttcacagcccatttttccttgacattctacagtggctttcctcacatgcccctccaccccttgtccacactatagcacactatagaatgccctctttacctgcataattagtgcaaaaaaataagctttggtttatagtcagtgtatttggttcaagtaattaaaacagatatttcagatatttactatccagcatttgtttttttttttttttgcatcctggtctctgtcaacatgtataattataattacttattaattcaggttctctataaagtgatggctagctgttctgtggactaacctatgtaccttgcttgaaaatgaaacagcattcataaaattttctggaaaacagaccmaagagagagggttttttttttctccccaataaaaacaaacaaacaaacaaacaaacaaacaaaaaaaacaaaattaaaagtataccttccaagtaacttattgacattgtatcaaacaccttgctaacccttaacaacaaatctgctatggcctcag

SEQ ID NO: 639614 - DNA, 505 bp, Homo sapiens
cttgctggaggagaatatgcttataatattttattgaattgtgcattcatattttatacattttatatgtgttatttcacaataaaaatgaataaagatacaggaaacatatagtatgttataatatgagatattctcattcaaataattaactgaaaaaaatgctagaaccatttatcttatcacattatctttcctaatgacaggagataaatgaggctcctctttatcccattttcagatatgctatatattcttgtagatgttggggaaggagaggaattttcattctatcttgggttttatttgaaagttaacttgtacacaaaacagccaagagacatttgcaaacggatctcaaaaggtaggtcatgattcagacccttgctgccttgatggcrtctctttaattaacaaagcagaggctctaatggagaggcctctgagtgccacagcagttaatggtctgttagcatttcactttaaaggcctggggatagagggc

SEQ ID NO: 639615 - DNA, 536 bp, Homo sapiens
tctccttgtggtttcatcagagctctttttagcaaacctagctacatttttttcttgtttgtgttaaggaaaaaaggacttttcttttccttacccatcttggacttttttccaattggatcgtcttagatcaagtgcctatccttgaactgattactatggcaaggagcttgggattggcttaggtcaattaaggccaatgcttggagcagggaactactccaaccagagtcaaacacctctttggaaggagaaggaaggtgtggaagctggggatgcagygagtgatggaaaaaaaataggtcaggtgagaacttgataaatgtttgtttggaattttcccttgagatatactaataaaaagtatttaattcatataaatgcaaagttgtacatgatacttctatctataacatcttgttattcattcttatttttattttttaccttcaaaataaaaattcaagaaacaagcagagaaaggcataggtaaaagaaaagaataggaaagccatattataatttatcaaaaagag

SEQ ID NO: 639616 - DNA, 536 bp, Homo sapiens
tctccttgtggtttcatcagagctctttttagcaaacctagctacatttttttcttgtttgtgttaaggaaaaaaggacttttcttttccttacccatcttggacttttttccaattggatcgtcttagatcaagtgcctatccttgaactgattactatggcaaggagcttgggattggcttaggtcaattaaggccaatgcttggagcagggaactactccaaccagagtcaaacacctctttggaaggagaaggaaggtgtggaagctggggatgcagcgagtgatggaaaaaaaataggtcaggtgagaacttgataaatgtttgtttggaattttcccttgagatatactaataaaaagtatttaattcatataaatgcaaagttgtacatgatacttctayctataacatcttgttattcattcttatttttattttttaccttcaaaataaaaattcaagaaacaagcagagaaaggcataggtaaaagaaaagaataggaaagccatattataatttatcaaaaagag

SEQ ID NO: 639617 - DNA, 463 bp, Homo sapiens
aggaactgaaacctactggtcagtgcttgacaaccagaaagcgtatgttgagggccagagagttttgaataacaaaggaraattattggatcagcctcagggtagtgacattcagtacaagaaattttttatgaatccacttttttagccctggtagataggttctcgggaaagactatcacccatcatgtattaccaaccatgtaattagccaggcaagcaaataaattgaacttctttaggaaggtagtctttacatatgtgtttaccttttatttgtagcagaagttgactggtgcacaagacagggcagaaaaggggactcccagcgcaggcctgaactctggcctccatcagccgaatgagctcctgcaattagccacagccacacactttggaaggcagtctagccacctgttaagtttgggcacatactccacaagggcttcccttttgtctgtac

SEQ ID NO: 639618 - DNA, 635 bp, Homo sapiens
gctgggattacaggcgtgagccaccatgcccggccaaaaaaactttttaaaagagattatccacaacaactcactcaagaggaattagataacataatagtcttaaaattctattttataaatcgarttagtagttacaaaccttccaaaaaataaaactgccaatccagatgactttcctagtgaattccaacaaacatgtcaggaagaaataatggcaattctacagagtctcttcctgaagatgaaagagaaaggagtactctccaactcgttttatgaggtcaacattacactgcaaggtaaatatgttacaagaaaagaaaattacagaccagtagtcttcatgtacatgtacattaaaatccttgatattagcacacaaaatccagcaatacaaaaagatgatgaatcatgaccaagtacagtttgtcccagtcatgcaaggttggtttaatgtgtaaaaaccagtgtatcacaattcactcatattaacatactaaaagagaaaaaattatgattatcttagtttatatagaaaaaaattgtcaaaagcccatgttcatttctattagatactcttgacaaataaagtatataaagtacttttgaccaataatttatataaaaaactg

SEQ ID NO: 639619 - DNA, 576 bp, Homo sapiens
tcagaaatagtccagcatatgtgtgtgtgtgtgtgtatatatatatatatatgtatactatatatgtgcatatatgtatatataactgattttcagtaaaaatgcaaaggacattcatagagaaaaaaatctttttataagacaatctggaacaattggatatccatatgcaaagcaaaatgaagtttgattcatacccccaaagagataaaaaattttaattaaaaatagatcattgatctcaatgtagaacttaaaactacaatgtctagaagcaaacttaggacaaaatctttatgacctttagttaagcaaagatttctttgttatcccacctaaagcatgatccattgggggaaaaaaaggataaacagaagtttgtaattttaaaaaaatattttctttgaaagatactgggaagaaaagagataagccccagactggaagaaaatattaatttatataataaatgattgatatctaagatatgtraatacaaaagttccaatgaaatatataaaagtcctgaaaggatttgaacagacatttttccatagaagacatatagatggtgat

SEQ ID NO: 639620 - DNA, 433 bp, Homo sapiens
ttactcaacaataaaaaaggaagtgaacttatgtgcagcaacactgatgattttaaaaagaataatgcagagtgaaagagaccagaccagaaaagagaatacactgtatcattcaatttatataaattatataaaattcaacgttatctatagcagtaaaaagcagatcagtgtttgcctgaggatggaggtcgggagaagggaggagagggagagacagactataaaygggtatgagagaattgggggataatggatatgctcattatcttgattgtggcaatggtttcataagtgtatacatatctcaattcttattaaatactatacttttatatatgcaattacttctacatcaattataactttaatgatttcttttaaagatctttttatgagctcctggtaggcgccacctctgtgtctctcctgg

SEQ ID NO: 639621 - DNA, 433 bp, Homo sapiens
ttactcaacaataaaaaaggaagtgaacttatgtgcagcaacactgatgattttaaaaagaataatgcagagtgaaagagaccagaccagaaaagagaatacactgtatcattcaatttatataaattatataaaattcaacgttatctatagcagtaaaaagcagatcagtgtttgcctgaggatggaggtcgggagaagggaggagagggagagacagactataaatrggtatgagagaattgggggataatggatatgctcattatcttgattgtggcaatggtttcataagtgtatacatatctcaattcttattaaatactatacttttatatatgcaattacttctacatcaattataactttaatgatttcttttaaagatctttttatgagctcctggtaggcgccacctctgtgtctctcctgg

SEQ ID NO: 639622 - DNA, 578 bp, Homo sapiens
tatattgacttactgcacactggtaaaattaacctcttacaaaaatgcctggtaacaatgtcaatctagaggattatttttctcagaaatggtgatgaaaaattctaaccaataacactaatcaccgataataataataataaagctgatgataacattaattatggtaataaggagaataataatagtaatttatcagaaagccagatactatttgtaagtacttctgattttttatcctcaatacatgcttatgaggtaattaatatccccatattcaggtaagaaaccgtggtatcgtgagcttaacgtcttgttgaggggtacatggagagttttttgycttcttggtatctggtaggtagtaattgtcagccagcatagtgatgggaaagaacatatccaatgcattctattgtggaggaactatttatatagcattgtggtaagggttaaagaaatcagctaaggatggtgaaatgcccagagactacaaagtatgggaaactctaagccatcacaaaccctgaacggtcaaggggagaaatcgtcttatcaaaatatagagaaagtttggt

SEQ ID NO: 639623 - DNA, 550 bp, Homo sapiens
aataccatagggaatattttttcaactgtaaaatatttttagtaatcttcatgtctacttggctaaaatacctaaatttcatttatggcaatatttccatcagcggtgatgagtttccagagacccaaggttatattgtttctcaacatatacactgcttttctgggcatggacaaccagactgcagcttggatcgcagtaattgtccttcataaccttactccatcagtgaggccaaactgttaatgagacccagttcagggttttacaatcatcacatctgccctctggcctttggtcaagagttcagccaaagagaactcttagtaacaaggaaggcaaagtgtgactatgtatgtactattcatcaaagaatttgttccacaagcattttctgagtgcctcctaatttcaagaagatttatgwcacattatgttcacaatggtgatcatgatatttcattttggaggaaattaggggtacaatatggttggggcaatgtggcacacctttgtataggctgatttcttatggggaaaatagaaatta

SEQ ID NO: 639624 - DNA, 538 bp, Homo sapiens
aatattttttcaactgtaaaatatttttagtaatcttcatgtctacttggctaaaatacctaaatttcatttatggcaatatttccatcagcggtgatgagtttccagagacccaaggttatattgtttctcaacatatacactgcttttctgggcatggacaaccagactgcagcttggatcgcagtaattgtccttcataaccttactccatcagtgaggccaaactgttaatgagacccagttcagggttttacaatcatcacatctgccctctggcctttggtcaagagttcagccaaagagaactcttagtaacaaggaaggcaaagtgtgactatgtatgtactattcatcaaagaatttgttccacaagcattttctgagtgcctcctaatttcaagaagatttatgacacattatgttcacaatggtgatcatgatatttcattttggaggaaattaggggtacaatatggttggggcaatgtkgcacacctttgtataggctgatttcttatggggaaaatagaaatta

SEQ ID NO: 639625 - DNA, 555 bp, Homo sapiens
aaacaaaattaaccatgtctgggtatctcagggtcatcatcacgaatatcaattatcctactgcactcgaatagaataatgctcccagtaactatgtgcttcccaagaaaaagctctaagattaggaatctcctgctttctgttgtgttccattaccattatttatactttttttgatatttctttatgttcattctgcttgcaaactgtagctcctaatacactcrgagtttttgttatagtagcaaaaccgttagttttgatattgtacagcattgaggatggccttgaaccatttgcaccggttccttaaacctcacttttctcattttctttcagatttcttaacctcttttacaatcagcttttttatctgttaaatggggaacataataaaacaaaaacttatatcacaggaaacccacaaggataaaatgaagtaataaatatattttggagacccctgtacatggtgaacactcttaccattagctaatattgatattatcatcattaagtgagacaatggatacagatataaacttcccagtatgt

SEQ ID NO: 639626 - DNA, 600 bp, Homo sapiens
ggaaggttcatgagagggtggatttttcttgttctctagtgcctagaatgatgtctagtatgctgtagccacttgataacatctttcttgaatgaataaatgcatcaatgaaggaatcaataaatgaatatatagaactcagtttccttggaaacyatgctcagtttttatgtattttcaaccttttctcccagttctcccctagatgacatccaggtgtatgaaatatgggcgcaaacttgtgtcacaagctgtgaagtctgtggcccaaacctgagatctattctttcatatagagcctcctgttcttatctcattgccttgtggcagcctcagctttgtctttagttgaaagtcactctgattcctgaaaagaaccttcagttcatatcctagtgctgactaccttcctatcatttctatggtgggtccaccttgcttcttgccatcaccttggtgatgatactgttatcatcaccctcctttcatgtcttctataagatatgctggaaattatggatcccttctacatcacacagaagcaaagagaattgcaagatattaggtactcctttctcaaccatattcttcagctagttt

SEQ ID NO: 639627 - DNA, 566 bp, Homo sapiens
aggctgtctaaatatagagaaataccatgttcacgaattggaagattcagcatagtaaaaatgtcaattattctcaaattgatgtacaaatttaatgcaatttatatcaaaatccaagcaagacttttatagatatawacaagataattctaaaatgtatatggaaaaactaaggaactagaatagttgaatcaattttgtggaaaaaaaagaagcaatctgtctgctcatttttgatacttattatacggctatgttaatcaagattgtgcagtattgatggatgagttgacacaattaatggaagagaccccagatcaaaggagcagaatagagaacccaaaaataaatgctcaaaatgtgcctaactgaattttgacaaagttatgcactcaattccatggaatacagagcctttttagcaaatgttgcttggagcaattagatctaatactgaaaaaaaaaagaagaagaagaagaaaaataccaaacaataacataaaactgtgacataagtattatgttatatacaaaacttaactcaaaataagtcacagaaaatgtaa

SEQ ID NO: 639628 - DNA, 439 bp, Homo sapiens
taactgaattttgacaaagttatgcactcaattccatggaatacagagcctttttagcaaatgttgcttggagcaattagatctaatactgaaaaaaaaaagaagaagaagaagaaaaataccaaacaataacataaaactgtgacataagtattatgttatatacaaaacttaactcaaaataagtcacagaaaatgtaaagcataaaacaaaaatatttaggaaatatataggagaaaattttcagaatttaaggtaagctaaagacttatttaacttgataccaaaagcacctatcaggaaaatgtcataaatttgatctaattaagatatttkgtgctacaaataccctgttaaaggataaaaaagggatctggcaagatggccaaatacaaacagctctggtctgcagtacccagcgagacaaatgcagaaggc

SEQ ID NO: 639629 - DNA, 663 bp, Homo sapiens
tcacgggtgtatgaaggatagttgtattatgttaggcataattgtgaccttacgttgtctttatttgaagattatgtctgaattcaggagatgtgtatgggttcaagttgacaaggggtagacttgtgatagttaatactgagtgtcaacttgattggattgaaggatccaaagtattgatcctgggtgtatctatgagagtggtgccaaaggagattcacatttgagtcagtggactgggaaagacagacccacttttaatgtgggtggacacaatctaaccagctgccagtatggctagaatataagcaggcagaaaaatgtgaaaagagarcatgggcctaggctcccagcttacatctttctcccgtgctggatgcttcctgctcttgaacatcggactgaagttcttcagttttggaactcagactggctctccttcctcctcagcctacaaacaacctattgtgggaccttgtgatcatttgagttaatacttaataaactcccctctatatatatgtgtctatttaattacttctgtccctttagagaaccctaaaataatgtctcaccttcatgaccactgctttctatatggtgtgacacacatattctcttttctctttcctccaggaagagaaaaaggtatctgactgaaga

SEQ ID NO: 639630 - DNA, 564 bp, Homo sapiens
caagtcctatcaaaactaaggtttccgtggtaattttcctataaaaagaaatgtaaaatttattccaaacgggggtggggagggagatgcttgcctgaattctggaagccagggcttttgagtaaaattagctcatgctgcttctggcagaagtcacattttggcccctcatttcatgagaaaaccatttgttgtgaaatagaagaattcagcctgtgtgtgcatgttcgtaaatcccccattccacaccctcgactgaacagtgacgtgggtccccatcccttcatgcctcgttagggccaggctgggccagctcgccaggctgtcygtgtcctcaggcctgggcatcattgtccctgagctcacccagcccgcatccctttgaagccgctccaaagaaactttatccctctgttccagctggtgtttcattaagccctggcttcataggattttccactcccattgacacatcagagcaaagatgtagccattaaaataatgaagaaaaagggagcaggcagaggaaaaacggtttgaggggaaattgaaaaggagtacaag

SEQ ID NO: 639631 - DNA, 542 bp, Homo sapiens
gacgtgggtccccatcccttcatgcctcgttagggccaggctgggccagctcgccaggctgtccgtgtcctcaggcctgggcatcattgtccctgagctcacccagcccgcatccctttgaagccgctccaaagaaactttatccctctgttccagctggtgtttcattaagccctggcttcataggattttccactcccattgacacatcagagcaaagatgtagccattaaaataatgaagaaaaagggagcaggcagaggaaaaacggtttgaggggaaattgaaaaggagtacaaggttatataaaaaaataaaggccaactgcagaaaaataaaatgtacccacttgctcaccactctctttttttttctcccctatatgtrtgtgtgtgtcctaagctgtccagatttttcacaaagcctcataaggagcgacttcagagaggcactggctctgtgaaaaagccgacagtcacaggtctaaattagaaacagctgataagaatcccaaagtcattctgagtacacatgaaggcaaa

SEQ ID NO: 639632 - DNA, 514 bp, Homo sapiens
gtgaactgcaaaagagatgctgatggccagattaaatgttaacgtatttcactaataaggcttttctcagttaccaaaattatctggttgtgagcatattgactatattggtattattcattttgacacctcagattccaaacacatcactaagcttcgaagacatccttaaactatcccttctgggcatttcctcatgggatgaagtaatcatagtcagaaaacctgagttggccaactcacctgttcattgctgaagtgtgaagacccaactgcctagattcagggtttaactcctctgcctttcaactaacaatgtcgtgataaactgccactcaactttgaggatcaatttcagaatggactgtggtgtggtggctgtaaatatttcctcctcccataagataggtataatgttttactctcttatcttgaagtagtaggcttttgawgagtcaagttaactttctttgattgtgaggaaatacacagaaaagatagttttgggaaatgt

SEQ ID NO: 639633 - DNA, 565 bp, Homo sapiens
ctgagcagtcttgaagccaatcaaaatctgaatgttcagcaatccctacaattgagaaatacctacattgcttacatttggggataattttggtattcaagggaaattcctttactaaatgcaaagtaagtacataagcttcaggtccttttatattctaattatctcaataagttgtccaaaaaataagtggaaacaagaatgaataatatttccaaaagtctcttgcaagagaaacaaatttgtaaatttaataaatatcaattataagtcaagtgaacctaatgaaaacaagatcattattgtgcaatatagagcatgtgtttacttaaaacttttatctgtccatcactatcataattccagaacccttttggacattttttggttacttgttttcatttttgagaagtccaataccggtaaaatttttactagaggtagtcgctaatttaccagagtttcattttcattttctcgataagattaactgccccgaacttctagtaattttatttatgttcacattttctctggtcccmaaatactaaactatctccacctt

SEQ ID NO: 639634 - DNA, 607 bp, Homo sapiens
gctctcctgcatctgtgaattcatggaagattcattggtgggtcccagaaacaatggcaggacactcaaarttaggcttgggtttttaaaatggaaaagtgaactacatcccaatataatatcgaaatagacgtggaaaatttaatattttttactaattcccataaacaatactaatgtagatagtgcatactgatgttattctacttccactctaggagtcagaagatacaattttgaggatgtgcaatatcttgatgtttttcaaataccactaactgtctaataggtaaaagaaaatgcatgtgtttctatcattttatgaacataaaattaattttaacttccaaaattatgtttatccaccatttgtaaatacattataatatctatgttgaaggaaagattgaacattttgcatggaaataagcatgtttaattacattttcagccaaaatgataaaaattgccattctttttgccaatatctatactagagattaattttgctctaagattctatgcttatattttcaaaagtcatgttctactttcataagctcacttctctacagtgcacacatctttgcaactaaagagttcaaaa

SEQ ID NO: 639635 - DNA, 607 bp, Homo sapiens
gctctcctgcatctgtgaattcatggaagattcattggtgggtcccagaaacaatggcaggacactcaaaattaggcttgggtttttaaaatggaaaagtgaactacatcccaatataatatcgaaatagacgtggaaaatttaatattttttactaattcccataaacaatactaatgtagatagtgcatactgatgttattctacttccactctaggagtcagaagatacaattttgaggatgtgcaatatcttgatgtttttcaaataccactaactgtctaataggtaaaagaaaatgcatgtgtttctatcattttatgaacataaaattaattttaacttccaaaattatgtttatscaccatttgtaaatacattataatatctatgttgaaggaaagattgaacattttgcatggaaataagcatgtttaattacattttcagccaaaatgataaaaattgccattctttttgccaatatctatactagagattaattttgctctaagattctatgcttatattttcaaaagtcatgttctactttcataagctcacttctctacagtgcacacatctttgcaactaaagagttcaaaa

SEQ ID NO: 639636 - DNA, 607 bp, Homo sapiens
gctctcctgcatctgtgaattcatggaagattcattggtgggtcccagaaacaatggcaggacactcaaaattaggcttgggtttttaaaatggaaaagtgaactacatcccaatataatatcgaaatagacgtggaaaatttaatattttttactaattcccataaacaatactaatgtagatagtgcatactgatgttattctacttccactctaggagtcagaagatacaattttgaggatgtgcaatatcttgatgtttttcaaataccactaactgtctaataggtaaaagaaaatgcatgtgtttctatcattttatgaacataaaattaattttaacttccaaaattatgtttatccaccatttgtaaatacattataatatctatgttgaaggaaagawtgaacattttgcatggaaataagcatgtttaattacattttcagccaaaatgataaaaattgccattctttttgccaatatctatactagagattaattttgctctaagattctatgcttatattttcaaaagtcatgttctactttcataagctcacttctctacagtgcacacatctttgcaactaaagagttcaaaa

SEQ ID NO: 639637 - DNA, 624 bp, Homo sapiens
atgttctactttcataagctcacttctctacagtgcacacatctttgcaactaaagagttcaaaagggcaaggactagagagaagagcttgcaattctcagattaaataacttttaataaactcaaggaggatataaagaggatatttgaggaatttttaaaactcagtgcttataattatttttaaattttctgctaagtataataatcataaatttccttgaggtgaaggcattttctaagattctgcttatataagcaatcacatggaaacagaaytgtgcagtgtctctactatgatgactaaatctaaagcttcttactgtggttctgaagtggaaattgggctaaaaatgaaggaatagcataagaagagaaaagttatcttactccagagagtttaaaaaatattagaaaaagatacaaagaataagacttgataaattagagaaagtggctaaagctgacagtaacaccaaggagacctgaatttttacccaaaatttattcagtgacattcggttcaaatgtgaaccttaagggcaagttgtataaatgtatatcagatgggagaaaggaataattttaagggcaagttgtataaatgtatatcagatgggagaa

SEQ ID NO: 639638 - DNA, 624 bp, Homo sapiens
atgttctactttcataagctcacttctctacagtgcacacatctttgcaactaaagagttcaaaagggcaaggactagagagaagagcttgcaattctcagattaaataacttttaataaactcaaggaggatataaagaggatatttgaggaatttttaaaactcagtgcttataattatttttaaattttctgctaagtataataatcataaatttccttgaggtgaaggcattttctaagattctgcttatataagcaatcacatggaaacagaactgtgcagtgtctctactatgatgactaaatctaaagcttcttactgtggttctgaagtggaaattgggctaaaaatgaaggaatagcataagaagagaaaagttatcttactccagagagtttaaaaaatattagaaaaagatacaaagaataagayttgataaattagagaaagtggctaaagctgacagtaacaccaaggagacctgaatttttacccaaaatttattcagtgacattcggttcaaatgtgaaccttaagggcaagttgtataaatgtatatcagatgggagaaaggaataattttaagggcaagttgtataaatgtatatcagatgggagaa

SEQ ID NO: 639639 - DNA, 571 bp, Homo sapiens
catcagtattaatcattccctactcattaaagtaataaccaaggtaaattataattttcttttggatttttaaagaaaacattgatggataaagacaataataaatcaaaataacaaatttataatccagaatattctacaagtacacatataacaattatatgaaaaatgtaaaaaaatgtaaagagacatgaaaatattaggtcttacaataagggaaaaaatcatttcagttggcaagcagagggattataaaacattcctccctgggctggtttgtgataacctaaagagctcacacaattttaagaagtggaaatgaaaacaacaatgggataaatgcagactaaacaaagaaagcagcttggggaaaacagtgyggggtactgtagggcttaagaaagagtgtgttaccagtttggttgatataaaaaatatgggaaataatagcagaaagggtagaaaagttgagtacaatattccttgtttggttcaccagtctcatagaatgttctcagaatagaaacaatactgttgacattgcatattttccttccttaaacttgtcact

SEQ ID NO: 639640 - DNA, 649 bp, Homo sapiens
gataaaaatttaccaaacaaatatcccaaagctgtcatactattagacattgaataaataatagttaattgtcattagctcaaatccccctsccctgctttgctctaccaacttctctctccgcagcctccattaccttaatcaagcaactcagtgttttctagttcccaaatattttcatccaaacctctttgaaattcttacttaggttaatgaagtctattccaagtttacatcttacacaaatatgacatttcttcctttactaccacgtaaaaatcaattgcttcttttcacatatacaaattattttattcttcacaagtcaaaaaatattttcattttagtcatgtcactcacagttctctctacaagattgcctttctgtagattaaaggggtcaattcttaaactcactctgtacagcatctaacactgatggaagcatatatgtacttcataaatgtgtgatgctgatggcagcaactgtcagcaagggctgttgttttaataattcagaaaaccagaaaaatctggaaagcctggcagttaatgggaaagagactgcatatatttttatggatcccaagtgaaggaatcattagcatactaagcttataaaagtcagagcctatacccttaacaaggt

SEQ ID NO: 639641 - DNA, 649 bp, Homo sapiens
gataaaaatttaccaaacaaatatcccaaagctgtcatactattagacattgaataaataatagttaattgtcattagctcaaatccccctcccctgctttgctctaccaacttctctctccgcagcctccattaccttaatcaagcaactcagtgttttctagttcccaaatattttcatccaaacctctttgaaattcttacttaggttaatgaagtctattccaagtttacatcttacacaaatatgamatttcttcctttactaccacgtaaaaatcaattgcttcttttcacatatacaaattattttattcttcacaagtcaaaaaatattttcattttagtcatgtcactcacagttctctctacaagattgcctttctgtagattaaaggggtcaattcttaaactcactctgtacagcatctaacactgatggaagcatatatgtacttcataaatgtgtgatgctgatggcagcaactgtcagcaagggctgttgttttaataattcagaaaaccagaaaaatctggaaagcctggcagttaatgggaaagagactgcatatatttttatggatcccaagtgaaggaatcattagcatactaagcttataaaagtcagagcctatacccttaacaaggt

SEQ ID NO: 639642 - DNA, 649 bp, Homo sapiens
gataaaaatttaccaaacaaatatcccaaagctgtcatactattagacattgaataaataatagttaattgtcattagctcaaatccccctcccctgctttgctctaccaacttctctctccgcagcctccattaccttaatcaagcaactcagtgttttctagttcccaaatattttcatccaaacctctttgaaattcttacttaggttaatgaagtctattccaagtttacatcttacacaaatatgacrtttcttcctttactaccacgtaaaaatcaattgcttcttttcacatatacaaattattttattcttcacaagtcaaaaaatattttcattttagtcatgtcactcacagttctctctacaagattgcctttctgtagattaaaggggtcaattcttaaactcactctgtacagcatctaacactgatggaagcatatatgtacttcataaatgtgtgatgctgatggcagcaactgtcagcaagggctgttgttttaataattcagaaaaccagaaaaatctggaaagcctggcagttaatgggaaagagactgcatatatttttatggatcccaagtgaaggaatcattagcatactaagcttataaaagtcagagcctatacccttaacaaggt

SEQ ID NO: 639643 - DNA, 439 bp, Homo sapiens
ctatactgtaatgctattaatccttacttgagctaccaaatttttctatgaattcatcaaaagagtatttgctttattgtttctctgaagattcattagcaatctgatgatttggtgtctaattgcagcaaggtggaagtaatcgatgaaaaacttacctgattaggcactttgcaattagttctgaatggtgcagttttctatggaaaagaaatgtagtcaggctacctgctgtgggacagacttgttttaataaaataaagataaagcttgatcttcaccagagatcattacactgatgtaaaaatgttatatattttcagagataacacacggcttgagatatatgagaaactcaayaaacaaaaatgtgttttaaaacaaaagaatgaatgagtctactgtgtccaaaggttcattattgtcaataattttgttt

SEQ ID NO: 639644 - DNA, 588 bp, Homo sapiens
ccatagcactccagtcagggaggcagaatgagactgtctcaaataaataaatttatgaataaaataataataaattaaaaatagagtatacagtttgaacaactatgaagattttcaaactgaaaatcttgtctagtaccctattcattgctgtctgaatttggttcccttctagtaataattttaagtgtaatgaataattaaatataaagactaagattcaatttaaatatctaggagtccaatccagtttaattctattactgtttgtttgtttttaaattctattgcactttgactactgaaaaaaatctgaacacaaaaactcagatcataagtctatggttataatatgttgtcttattcacttgaagagtccacataccacaatctgaagttacaaattttaaactgattcttgccaattaaaaattggcagtcattagatatagcagaaacaaggtaaggtgtaatgattatatgctttactataaactaaatgctgtttcacccaaccragttcctagtctgaaatttctaacattgtaagcaattaagtttgcatgctcagttaataccagcacctgg

SEQ ID NO: 639645 - DNA, 635 bp, Homo sapiens
taaaaatagtcttcaaatctggattattcaagtaaagtcaccatgatcacatctgttatacttttaccatagttggattttgtttgtcagaattcttgtgactacagatatgtgctataaatctatgaataatgtttttctcatatcagcctagtaaaattgagtgtattgttgctaaagtttacaaaatgcattaagttgtagggtaaaatgtgaatacatactaagaagtgagagattggatagtgttcttccagggsacttcaggtaaattaggcccagaaatagaaagtgagactcacatacctggttcccttgccttgtaactccatacacgactggtgacaaagacctcaacatctgtgactgaacaccattgttcaaggggtagcagtctttcccattcagcatttccttgagctgggcgtggaatgcaagcagccactgatattgccaagtatctttagaatattctggaataaaccagattccttttaaggggcccagttacctcacagctctcagcataaaacagaaaatgctattttaatttaaaatagacagattctgaacatagcagcaaaagaaattctaaagaatcgtagaacggactgtcaggtttggagagtcaggtc

SEQ ID NO: 639646 - DNA, 623 bp, Homo sapiens
agatcttttgtaattgcttttaatacaattattcaaaactattatgttgctactaatttttatttttcttctaaacgtgtaggcagattattctttaagaagtaattaattaggcaatagaattgaccctaattttaaactacatctttcttttttcttcattctttctcccttccttatttttacctgtttgtttttcacttatgaatcaccaggaaagtttgttgaatgaatattttattgccatgtgcttgtgccaatttctaaatagtatgtagagatgaatatacaaaacctaactccagccatcaagtgacttatagtccagtaaaaaacaaaagacgtgtaaatgaataaatgaagcagaaatacagtagwtagatacatgagatcaagtggtgaaagatgattaggcatccatctgttaaacaaggcatggaaaaatatttcagacacaaagagaaaaataatccaaagcaaaatgatattttggaaccataaaatatcatattgtgtaaagaaaggaagcattaatggtaggtagcatgtgggtcagatccactattttatatctagaaggttgcattttattttagaagagacaaagtttttgaggagtattg

SEQ ID NO: 639647 - DNA, 593 bp, Homo sapiens
taaaatgacaatttattcgacttttattttgtcatccatttgaatacgttttttagctttctttctttgacttttaaatgcttttttattatgtttcagttttcattctgcctcttctcctctctgtcttcctccttccttatttcttccttcccttcctcctttgatcttaaactttactgatagatgctaagctttgaaagttagacaccttgccttttaaatcttatttatctagcagtaacatcttgaattttcaaccacttgtggtaaatggagtttccactgatcttgctctttttaaaaatttactgtgatatatcaagttcaatcagtgaaaattcatttgctttcattccaaattttgaattttattttgtgatgatacattacattcatctttaaaaattaattggcagcataagataattttcctaaataacacgttataattattgatgattccaaataggtcttttaaagaaatcttgcatgatgtaattattggacaagaaycctcccatatcatttgaatttttctaataacactttctgacttaattggtagtattcaatagagcatacttattgac

SEQ ID NO: 639648 - DNA, 572 bp, Homo sapiens
aataattgtagttcattgtcttatactactgtacttttttccatctagaatacatatagtcattcctatttttctattctttaaaacaacccaatttctaatatttgaagtcagaattgtagagtgattaagagtgttgattctggaaacaaaccacctcatttacactacttactagctcaatgatcctaggtgagttattttacctctatttctctttgataaaatagagataaaaacagaacttaggctggacatgattcctgcctgtgattccagcacgttgggagacagaaacgggaggatcacttgaagccaggaatttgaaaccagcctgggcaacatagcaagaccgtatctctacaaaaacaatattaaaaaacttaagaaaatagaacctgccaatattttagttgtagagattacatttattgatatatgtctaatattttgaatattgcctggcacaaaaaaaaaaaccttacatggacatgtggcctcttattagtagtgattkggatccagaaaagaccctacctaacagacattaaatatatgtatcaaattttgtg

SEQ ID NO: 639649 - DNA, 556 bp, Homo sapiens
tctaagaaaaagtaaatacagttatttactaaacattttccagattcataactatattactcccctcaattctgttgattttaccttcaaaatgcatatgaagttcctccatttttcaccttctcaccatgctttgctatcaacatattcttactccatactgttaccttcttcwtctatgcacactcctaacaaaatcccccagggcagtatatttcatcacttcttatctactcggggacattactccaactaatcgcatcattttctcttacatttgtatatatatttactctatagtattgttcacaacagcatataatgatacttttagtcttaccatattaaaaaattattttttaatctacattagctactgccacttctcttcatgtgtgtgtgtttgtgtgtgtgagtgtgtgtgtgtgtgtgtgtgtgtgtaatgatttatttcaaaaaactgtctcatgtggttgtagacatttggagagtccaaaatctgataaggaaggtcaacaagctgaagactgagaaaagagctgcagtttgagtccac

SEQ ID NO: 639650 - DNA, 556 bp, Homo sapiens
tctaagaaaaagtaaatacagttatttactaaacattttccagattcataactatattactcccctcaattctgttgattttaccttcaaaatgcatatgaagttcctccatttttcaccttctcaccatgctttgctatcaacatattcttactccatactgttaccttcttcttctatgcacactcctaacaaaatcccccagggcagtatatttcatcacttcttatctactcggggacattactccaactaatcgcatcattttctcttacatttgtatatatatttactctatagtattgttcacaacagcatataatgatacttttagtcttaccatattaaaaaattattttttaatctacattagctactgccacttctcttcatgtgtgtgtgtytgtgtgtgtgagtgtgtgtgtgtgtgtgtgtgtgtgtaatgatttatttcaaaaaactgtctcatgtggttgtagacatttggagagtccaaaatctgataaggaaggtcaacaagctgaagactgagaaaagagctgcagtttgagtccac

SEQ ID NO: 639651 - DNA, 555 bp, Homo sapiens
ttcttttcttatccagaagctgtttaggttaattaggtcccgcttgtccatttttgtgttgcaattgcttttgtggacataggcaaaaattacatgtcaaggccactgttgagaagggtagttcctaggttttcttccagtatttctatagtccaaggtcttacttttaaatttttatccacttcgagtatcttttgtatatagtgagaggtgagagatcagttgaattaatcaccatatggctagccacttgtctcagaaccatttattgtatagagcatcctttccctattcttrtttttgtcagccttgtcaaagatcagatgattataagtgtgtggttttatttctaagatttctattatgttccattggtctatgtgtctgttttcataccaatattatgctgttttggttattatagccttatagtatggttcaaagtggggatatagcaaggttaaattgtgtatacaaattatatttgataagttgaagaaccagatgcttgccaaacccatataacgtcaaagttctagtgtctcttaagacttc

SEQ ID NO: 639652 - DNA, 536 bp, Homo sapiens
  misc_feature 1, 2, 3, 4, 5, 6, 7, 8, 9, 10, 11, 12, 13, 14, 15, 16, 17,18, 19, 20, 21, 22, 23, 24, 25, 26, 27, 28, 29, 30, 31,32, 33, 34, 35: n = A,T,C or G
nnnnnnnnnnnnnnnnnnnnnnnnnnnnnnnnnnnataagtagacattgtttgccaagagatacctaagggatcactgaaatgccaratatattccttcctgccctcaaaacatagcagccattctacttcttcaggataatcagtgtagcattttttaaatagtaaactatcatttaaagatatttataatcaagaaaattttgttgtatgtttatccatgttaccatcttgatgctcttcaaaacatatttcatctattacctttttttctcttcttgaagaactttcttttacatttcttgtactgtgggtctgctgctgatgaattcttttaaacatgcttattttactttcatggttgaaagatattttcgataggcatagcgacataaagagtcacaaaatccatattacttagctactgctttgttgatttgcagtagccccctcttatctggcatgatttatccagtttttcagggcatagacttatgaattaagtgcatcctttaaatatttggatatgatatcaat

SEQ ID NO: 639653 - DNA, 326 bp, Homo sapiens
acagtattcattcagcaatgtccaggtaacatagccatctatcctctttggtggaattatcwttaaagatagaaatagctggatggctatcttggcttaatgtcattgacaattaaatgatcagatcaaattctcatattctaatattatgagcaacagtgttgttttgactaaaatttagattctcatcttggttttccttcaggaagaatgcagggtgtcttgagggcatgttatgtccaggtcacttatcagttctatttctctttgcaaaaaaaaagtggcatcctgataaattttaagtgaatttttaacctcatatgact

SEQ ID NO: 639654 - DNA, 562 bp, Homo sapiens
aagcattttctacacataataaagagactgttacgtatgggtactacatgatccatgtcttatatatcatgtgtatagtttataagatcttgtatacatatgtttctgttgtayataacatggtctcacacacatatgcatatgtatgtatcttttttcaagtgttgcttaaatatcctatacttagtagcattccattttttaaacaaacctagtaaaactgtgatcttcattaagagcaacgtaaattgtttttgttgactagtgtgtctgctttgcgttttacaaggactagaagtcaaggagaagaaaggctgccagatggaagctgaatgctctaagccccaaaggcactacagaaagcaagatttaaatctctctagatactgccattgtgtgttctcactgttacatttattatttagtaagcaagaagtacttattgcttaagaaatgctttatacctggccataatggatgagtgctaattcagttatctatatccttagatgtactctcttcattttttaggataaaaatcttccaagattattttgctaaa

SEQ ID NO: 639655 - DNA, 562 bp, Homo sapiens
aagcattttctacacataataaagagactgttacgtatgggtactacatgatccatgtcttatatatcatgtgtatagtttataagatcttgtatacatatgtttctgttgtatataacatgrtctcacacacatatgcatatgtatgtatcttttttcaagtgttgcttaaatatcctatacttagtagcattccattttttaaacaaacctagtaaaactgtgatcttcattaagagcaacgtaaattgtttttgttgactagtgtgtctgctttgcgttttacaaggactagaagtcaaggagaagaaaggctgccagatggaagctgaatgctctaagccccaaaggcactacagaaagcaagatttaaatctctctagatactgccattgtgtgttctcactgttacatttattatttagtaagcaagaagtacttattgcttaagaaatgctttatacctggccataatggatgagtgctaattcagttatctatatccttagatgtactctcttcattttttaggataaaaatcttccaagattattttgctaaa

SEQ ID NO: 639656 - DNA, 562 bp, Homo sapiens
aagcattttctacacataataaagagactgttacgtatgggtactacatgatccatgtcttatatatcatgtgtatagtttataagatcttgtatacatatgtttctgttgtatataacatggtctcacacacatatgcatatgtatgtatcttttttcaagtgttgcttaaatatcctatacttagtagcattccattttttaaacaaacctagtaaaactgtgatcttcattaagagcaacgtaaattgtttttgttgactagtgtgtctgctttgcgttttacaagractagaagtcaaggagaagaaaggctgccagatggaagctgaatgctctaagccccaaaggcactacagaaagcaagatttaaatctctctagatactgccattgtgtgttctcactgttacatttattatttagtaagcaagaagtacttattgcttaagaaatgctttatacctggccataatggatgagtgctaattcagttatctatatccttagatgtactctcttcattttttaggataaaaatcttccaagattattttgctaaa

SEQ ID NO: 639657 - DNA, 562 bp, Homo sapiens
aagcattttctacacataataaagagactgttacgtatgggtactacatgatccatgtcttatatatcatgtgtatagtttataagatcttgtatacatatgtttctgttgtatataacatggtctcacacacatatgcatatgtatgtatcttttttcaagtgttgcttaaatatcctatacttagtagcattccattttttaaacaaacctagtaaaactgtgatcttcattaagagcaacgtaaattgtttttgttgactagtgtgtctgctttgcgttttacaaggactagaagtcaaggagaagaaaggctgccagatggaakctgaatgctctaagccccaaaggcactacagaaagcaagatttaaatctctctagatactgccattgtgtgttctcactgttacatttattatttagtaagcaagaagtacttattgcttaagaaatgctttatacctggccataatggatgagtgctaattcagttatctatatccttagatgtactctcttcattttttaggataaaaatcttccaagattattttgctaaa

SEQ ID NO: 639658 - DNA, 566 bp, Homo sapiens
ttgccaagtttagaaatgctctcatcaagcaagagcggcttgggtgtttcaatctatcacatttcccagtacttagaaaatcagaatcctaatttatttcactggcctctttggcattactgttattacacacacacaaacaaagcacagatagagtaggcctggttcttcttttttaatgaaggctgtgggcgagtagggaatacttctctctggaaagcaaataccctttctctcttttttttagtccctgaatctcatccacctccacatacacattagtgaataaatattacacaccgttcttactaccaaataggcaaaactctcagaagctgatactgtttctttctagcccatgtggagctttaaagagaatcaccatgcccctggtggacaattgaatgttgygttagccaagtaaccttctcccacagaactattaatggagactctggggcgcctcttcttaaagctcctgctttgaatcactgctatgttcaactgagcaagtgaaaaagtgaaaattctgacacagtgaaattgagatttgaagattcctggaa

SEQ ID NO: 639659 - DNA, 604 bp, Homo sapiens
gtttttctcttcatctctttagttcctggttgttagaaattacagggaggctttttgctacataagaatgggcgtaaaattctctatgaacactgacgatcacaaagagttttcaagaaaaaaaaatgtggagagaattagaatacagccaagtcgtgtctgattttctatgtcatagaatgtccttcctttgtcagttgagtctctggtcactttaaattagaactaaagcatattgctatagtcaaagtctacagctgaaatatctcttggtgacactawactttataaattgaattcataataaggcttaatcttttcatagatggtaaaattctcttttgctaaaatgtgtctcataattcctttttcttgccaatagtgatattagccagagagaaaatctaaaactttcatcattcctgacaagaagaatgatatggcttgtctctgtgtccccacccaaatctcaccttgaattgcagtaatccccatgtgttcaagggcaggaccaggtggagataattgaattgtggctgttctcttgatagtgagtgtgttatcacaagatttgatggttttataaggggcttcccccttcgct

SEQ ID NO: 639660 - DNA, 540 bp, Homo sapiens
tcttctgttgtagtactctgattttactagttattaactgattcatgtccactgcatgtcagcctcatggacagggcattttaatattggataaaaaatacactcaaatttggccaggtgtggtggctcccttttgtgcttaggctgaggcaggcaaatcacgaggtcaggagtttgagaccagcctggccaacatggtgaaaccccgtctctacaaaaaatacaaaaaaattagctgagtgtagtagtgggcacctgtaatcccagctactcaggaggctgagccaggagaattgcttgaacctgggaggtgaaggttgcagtgagctgagatcgcaccactgcagtccagcctgggctacagagcaagactccatctctaaataaataaataaatwaattaattaattaattaaattaaaaaatatacacacaaattttgcatagttaacttttttttaatatactttaagttctgggatacaagtgcagaacttgcaggcttgttacataggtatacacgtgccatggtggtttgct

SEQ ID NO: 639661 - DNA, 535 bp, Homo sapiens
atagtgtgaaaaaaaaaaacacctcaggagtataaaactgtaaagaaaagaaagaaaagataagcaaaaaatgcaggataatgtttacccaaaatacaagccttgttctcagtgatagatatataggaactctgatagctctagtaatattttatttctaaagctggtggtggcctaarttattctttatacattatatatatctgaatgtgtatgtatgtagtatatttttttatttcataaaattggaagattttttacttgtagtatcatttattttctttattaaaccacattattgagggatgattgacatacaaacggctgtacagtatacatctgtgaaaccatcaacacaatctatgccataaacatattcatcacctccagaaatttccttccacgctctttttttggggcagataaaaacacttaatgtaaaatttaccctctcagaaaaatttccagtatgctatacagtatcactaactatagtcactatagtatacagtagatccctaggatttattcatga

SEQ ID NO: 639662 - DNA, 384 bp, Homo sapiens
ctctacttcccatctgtgtttcagccagtcacacagctggggagaaattaaaatagagagtgctgcagcaatacttagaacttggagctctaattagatgccctgccacwtagaccatggcttccaagccaaaaagatctgaactataccacatatcttcctgctccaaaaggggcacatgtgtgctgtggggtgcccagtgaaatgccaataattccctattgatgtgaggatgacggggaactctctgaataaaggagtcagtctaaataacaaatagagagaggctccctaaaagaaatttatttgggaatagggcattgcaatggacatatgcataccatagtaaattatgtgtatgttcagggaggtaaaggaagacaa

SEQ ID NO: 639663 - DNA, 562 bp, Homo sapiens
cccaggctggagtgtaatggcatgatctcggctcactgcaagctctgcctcccaggttcaagcrattcccctgcctcagtttcctgagtagctggggttacaggcatgcaccacaaagcccggctactttttgtatatttagtagagacggggttttaccatggtggtcaagctggtctcgaactcctgatctcaggtgatccacccgcctcagcctcccaaaatgctgggattacaggcgtgagccaccgtgcctggcccacattctcataattacatcacatgtactcaccgtgatatgaaggcggagtaaagaatgccacatgtagtatagagatatatacttaagggttaaattggtgttctaagtatgatagtgcataaaagatagagaccacagaatgaacaggagtcaggaaaagtttctgagtagttagaaagatgtgtaatgtttctgtttcttcacttcagcagtccaacattactcagaatggttcctgtttatgagttctctgaaactgaaacaacatcattaacaacaatctcttgcacttttctgtgt

SEQ ID NO: 639664 - DNA, 578 bp, Homo sapiens
gccttcagacacattattcctcatacttgaaccttttctagggaatcgagaatttagtgattatcaaattttttttttgcagatgagaaaatcagagcccagaaaggtagtgatgatatcattttctcatagctaattaaaatactgccagctcagaaattccagttttctaatcccttctacatcacatgggtagctttccttcctttgccgtgatctgaatcctgtgcatgcttcttagtcaattatattcttcctgtttttttttattaacccatatctaacaaaccmagcctttattgagaataatttttttgtatattttcatcacttatgaacttaaaaaattagcaattaattatatctttcttattttctttttattcaaggaattaggtttgtgacactaagcaaatgttaaacattttagagtacaacatctatgcttaaactgtgtttaacacttatgttgcacttatattgcttggtagatttttaacattaaaaaattcaattaaattgctgccatttgaacaaataaatgccatttagaaaaatactttgatgtgctaactcta

SEQ ID NO: 639665 - DNA, 632 bp, Homo sapiens
agagtcgatgcaagctttgtaacatcaaaatcaaaaggtatgggaaggtaggctttaagaacattcccaattttcaaattcatatattatccttaggatgtgacactgaggaagtggagagattgctaccctccttttactacctcctccaatgtacttctcctcactgctgcctacccaacactagactcgaatacaggtatcctgttactataatcttacaatgtgtattctgttcacatacttcttaaatcactccatgctggtattacctagtccatctagaagtaaggcacatttttaaaaactctagaaataaggcttaacctgaagtacttgccatatagtcagaaatatatgaggaaaagttaaaagaaaacttgataaagaacagttaaaaatacagccagatatttaagtacaaactgattttataagcattstcattaggagaatcaacaaatgctagtccagctttaactatgagaagacagaatatgtttacaaccatactcacatcccaaactgatagaactaagcataccctttgatcttggggaaaatgggccaagttcattatgatccattgttttggctctgagatgcttgaaaacaatttattattaacatta

SEQ ID NO: 639666 - DNA, 614 bp, Homo sapiens
tttctttatcatatattattaagttgatacatagtaaagagattttgctcaaatctctgagtcccatcagcctctactgcatcttttagtaaaacatacacacacacacacacacacacacacacacacaccacatccacatggaaacatatacgtgttgtgtaaagagttggtatagaaaatgtcatctaagttaaaatatcctccmcattcattatgatagcttcattacatctgttttattggtggaaagattttctgttggggaaaaaaaaagcttaatacttttctgattaagcttacataaaaaacactgccacatttatatttaatgcagctaaaagaggatttcatgcctgttctcccagtgaaaggttctattctgccagatttgtaccagagataataataggcttgatttgtattgtattttaaaaattcatcaaagcattttaacatctcttctctcatttgagcttttctactgccctgtaagactggttaagtgtgtgtcctaatccatctttaacaaagggggaaattgaggcacagagaggttatgtgacatgtcagaaaacatgctctaagtaagtaacagtcctagaggtcatgta

SEQ ID NO: 639667 - DNA, 602 bp, Homo sapiens
taattcacaggtgaatgaagacggaagcaacatgttgaacacagcatttttccttttaaagtgatttctttatcatatattattaagttgatacatagtaaagagattttgctcaaatctctgagtcccatcagcctctactgcatcttttagtaaaacatacacacacacacacacacacacacacacacacaccacatccacatggaaacatatacgtgttgtgtaaagagttggtatagaaaatgtcatctaagttaaaatatcctccccattcattatgatagcttcattacatctgttttattggtggaaagattttctgttggggaaaaaaaaagcttaatacttttctgattaagcttacataaaaaacactgccacatttatatttaatgcagctaaaagaggatttcatgcctgttctcccagtgaaaggttctattctgccagatttgtaccagagataataataggcttgatttgtattgtattttaaaaattcatcaaagcattttaacatctcttctctcatttgagcttttctactgccctgtaagactggttaagtrtgtgtcctaatccatctttaacaaaggggg

SEQ ID NO: 639668 - DNA, 490 bp, Homo sapiens
tgtctgtatgtatcttggcctaactgtggataacttgaaaatagttttagaattctattttgatgtatttatgtttttcattatagctgtttatataattttcttagtagttgcctgctggtgtcaatgtgttaccatttcaagttaagtataaaaaccttacttcaatttagatccccttaaycgctttcaggtataattgtctcaatcatttcctttgcatacatagaacaccatgtcagatggtgttcgtcttttgctccaactataaaatataatttttaaactcatgaaatgaaggatggtcttattatgtttacagcaatttttactcattctattctttactttctaaagatcccagtcatcatcttttataatttttttttttagtttagcgtttccttcagctattctgtattttaagaaaataaattgttttattgtattagggtgatttgatttttagctttgcaaaatataaacttga

SEQ ID NO: 639669 - DNA, 458 bp, Homo sapiens
aaaccacatagtaataaataacattaatgtaatatgatttaagcagttttatgattctactttgctgcatattcagtattatgtatgtctgtatagatgagacactgtgagagacagatttgattttttactttgagaagaaaagaaaatttgtattattttgttgctgccatatggcaaatagaatcataataatgggcagagcatataattgcatatgtcttgggaattcaagatggctgggtgtcccaaacagaggaacatatcctcccctgcctatttaaaattggtattcaatattgaaaaaasaaactttcatgtcaagagatataaggcttaaaatgaaaacattgctggaaaaataagtgtataagcagatatatatatgtatatatatatatacatatatatatatatttcaatttgcttcatttacttttaattgataaatgggaaaa

SEQ ID NO: 639670 - DNA, 579 bp, Homo sapiens
tttattttttttctgaaggtgtttttatcttgacaaacaatgctttgtatacctcaatggccctccaattttttccattcccatcttccaataaattattatttagaattttatttgcatcttttaaaattttgaaatacttgattaaacaatatataaaaaataatatatgtaaattataaagtacacaataatagaatgaacatctgtaaacattatacccaagaaacagaacatcctcagtaattttgaagctccctatgggactttcactggttgcaatctgttgtccttttctgaatttatattcttaataatttgctttactttrgggttttacaacataccaatatactaatcaccatcatgacaaattaaaaaaaatgttataggcaagaaacataaataccagtagttctgaacgtctcctttacatttgtaaacttactgagaatcccccaaagagcttctgtttatctgcgtcataccttttgacattaatcaaattaaaaattaaggtataatttttaaatttatgaatgatatttatattttatttaaattaacaatgtactcatt

SEQ ID NO: 639671 - DNA, 579 bp, Homo sapiens
tttattttttttctgaaggtgtttttatcttgacaaacaatgctttgtatacctcaatggccctccaattttttccattcccatcttccaataaattattatttagaattttatttgcatcttttaaaattttgaaatacttgattaaacaatatataaaaaataatatatgtaaattataaagtacacaataatagaatgaacatctgtaaacattatacccaagaaacagaacatcctcagtaattttgaagctccctatgggactttcactggttgcaatctgttgtccttttctgaatttatattcttaataatttgctttactttagggttttacaacataccaatatactaatcaccatcatgacarattaaaaaaaatgttataggcaagaaacataaataccagtagttctgaacgtctcctttacatttgtaaacttactgagaatcccccaaagagcttctgtttatctgcgtcataccttttgacattaatcaaattaaaaattaaggtataatttttaaatttatgaatgatatttatattttatttaaattaacaatgtactcatt

SEQ ID NO: 639672 - DNA, 572 bp, Homo sapiens
tcctgtcattgtctctacagattaaatttgaagtggacgttgaatccatgccttctcacaagtgagagagaggaaaacaaactttttttattttttttgtgacggagtttcactcttgttgcccaggctggagtgcaatggcacgatctcagctcactgcaacatccacctcccaggtacaaatgattctcttgcctcagcctccccagtagmtgggattacaggcgcttgccaccacgcctagctaatttttgtatttttagtagagctggggtttcaccatgttaaccaggctggtctcgaactcctgacctcaggtgatggccagccttggcctcccaaagtgccaggattacaggcgtgaaaaacgaaaactgtaccagcaaatctaaagtctgcctttgattgccttctactgtacctgccacatcccccatcttcctggtttctatcccagagaaaaccactgttatcagtttgatgtgtttccttatagatttttgaatgcctattcatgatttactaagcccatattgctgtgcaacttgctccttccactctgcattgtgact

SEQ ID NO: 639673 - DNA, 517 bp, Homo sapiens
catgtgtattgttctcaatgtcagaaaataggaaacattttctatttgatctgaaatctttaattggtaatgactagtaatcattgtaagctgtgcaaargttataattgaggctctgagtattataaaacaggacaatttaagtcactacaagaattactagaaaaaaaaacaaagactactaggataaaatgttttgaaaggagtttccaattcatatcttatatctaattgcataagattaaaatgccaaagtttaattaatttattatcataaaactatctgcagatttcctccttagggataagagggaaattcaccctctttctccctctactgatacttgaggcttccacttccaaactaggttcttcataacttgagaagagactaaatgaacacctgcatttatgttcatcatatttacctggaggggcaaagcccaaaggcatttaatccctctactaaaactacttctctatgcatagagcaattatggttagtgctgaacttttt

SEQ ID NO: 639674 - DNA, 517 bp, Homo sapiens
catgtgtattgttctcaatgtcagaaaataggaaacattttctatttgatctgaaatctttaattggtaatgactagtaatcattgtaagctgtgcaaaagttataattgaggctctgagtattataaaacaggacaatttaagtcactacaagaattactagaaaaaaaaacaaagactactaggataaaatgttttgaaaggagtttccaattcatatcttatatctaattgcataagattaaaatgccaaagtttaattaatttmttatcataaaactatctgcagatttcctccttagggataagagggaaattcaccctctttctccctctactgatacttgaggcttccacttccaaactaggttcttcataacttgagaagagactaaatgaacacctgcatttatgttcatcatatttacctggaggggcaaagcccaaaggcatttaatccctctactaaaactacttctctatgcatagagcaattatggttagtgctgaacttttt

SEQ ID NO: 639675 - DNA, 395 bp, Homo sapiens
tagacctaactcagaccactttggaaatggaccatccagagaactgctaacacaacactgtgaattcagtatatagactcaatcytaggcaaagaagagtaagtaggtgatctttctataagacaccaggatttcagtaattctatttacacatttttatctcaaagaaaaatagatactcttagttttcttctaggtattttgtcactaacacatgttttatgtacatgatcctaaagctgctttatttgtcaaatgactggggtattttcttcaactacattttcaagcgttgtgctttgcatagattcaaagcaacttcagattctgaatgtgaatcaggcagcacaatgtcagataagatttaatacgggcaaaacaatttagtaatgcag

SEQ ID NO: 639676 - DNA, 570 bp, Homo sapiens
tatgagcatgtaatacctataaatacattgagattaaaactcaatcatcaaatccctaattgtcataatcgaagcctgcaattgacaagttctgtccaaccacttagagtttattaactttgaaaaaaaagttttattttttaatgcttcacttttaattattagcagacaatattgggtgacctatcatttgaggaacatgaaaactagaaaaactagaaaccaaaacaaacaacatttaaaagataatttggaggaggtagaggaggaaacttaagaaaaaaactcaaaaaagtaacaaaatatactgttatgaaaagaacatataaagaatgaagattatcaacttgcagaaagagaaaacaaaaacaaataaaacaaaaaagaagtcaggtgatatgcaagtgatcataaatgaaaatagcttctgctttgtrtaatataatagcaacaatgaattttaaaaacagtgaagcaatgccttaaaaactctgaagataaatcccaataaaattcatacccagctcacttagtaaataatactgatatttcagaattcaaaatatcaaa

SEQ ID NO: 639677 - DNA, 521 bp, Homo sapiens
cctgtaccttttgttatcaaatttttggaagatattctctgttacaatgaaggagtagaacaatacaggagaaaatgtgatattcaggcaagaagtgatttggctcaaaataaagagaaaatttctaggaagatggtgaaagtgtcccaggatgaaagctgttcataggtttggaaagaaatcattcagattggaagcagtcagaagtttctagtagaagattctttaaaaagatcgacttggtaaaatacctgatgtatttaaatatattgagagaaaatgagaataatttgaggagattttgatattgaattagtggtaagtacatagaaacataaacaaagaccaaaatagttgtaaaccctagggaagattttttaagtagtggagagattacaagggtcacttagaacagcacttartactctagtcaaaatacgccataaagatatgaggaaaatagatgagtagaagtaagaattggtggcggggggtggggggcggtacagaaagctgaattc

SEQ ID NO: 639678 - DNA, 521 bp, Homo sapiens
cctgtaccttttgttatcaaatttttggaagatattctctgttacaatgaaggagtagaacaatacaggagaaaatgtgatattcaggcaagaagtgatttggctcaaaataaagagaaaatttctaggaagatggtgaaagtgtcccaggatgaaagctgttcataggtttggaaagaaatcattcagattggaagcagtcagaagtttctagtagaagattctttaaaaagatcgacttggtaaaatacctgatgtatttaaatatattgagagaaaatgagaataatttgaggagattttgatattgaattagtggtaagtacatagaaacataaacaaagaccaaaatagttgtaaaccctagggaagattttttaagtagtggagagattacaagggtcacttagaacagcacttagtactctagtcaaaatacgccataaagatatgaggaaaatagatgagtagaagtaagaattggtggcggggggyggggggcggtacagaaagctgaattc

SEQ ID NO: 639679 - DNA, 606 bp, Homo sapiens
tacctgatgtatttaaatatattgagagaaaatgagaataatttgaggagattttgatattgaattagtggtaagtacatagaaacataaacaaagaccaaaatagttgtaaaccctagggaagattttttaagtagtggagagattacaagggtcacttagaacagcacttagtactctagtcaaaatacgccataaagatatgaggaaaatagatgagtagaagtaagaattggtggcggggggtggggggcggtacagaaagctgaattctcaccttccatagagaaagtcaagagaaaatgcctaacatagaaaactcaggaagttacaatgtaagtatggtttgtagtgacatggagatttacaccaaaagaataacgaaatgttttgaaagttgttgccaatggggaataagtttggaagcaggtggagagagaggcaggaaattgcagtgtttgattatataacttatacacacatacacacacacacacacacacacacacacacagagttgaatcttgaacaacatgggtttgaaatgcatggatccacttatattyaaattttcttctatctctttcacccctgagatagtaagac

SEQ ID NO: 639680 - DNA, 576 bp, Homo sapiens
aaactcctaaaacatgcttttaaacaatagttcagctacatgaactcagcatattgaataaggagggcagacctggcattgactaaagattttgcctgcataccaccaagcatctgtttccacatgttcaaaggtttgctagtcatggagaaataaaaacatcagcaacagcacaacacaatttactagtacattacaatatgtaaagtgctatcctctgtatattctctctcattccagcctcacaaaaattctatgaagtaggtacattacctttttttwaaaaaaaaaaaaaagagagagagaaagaaggcaactggggcttagaaaaaataaagtaacttgcccgaggggtaaagtcaaaatttgaaacaaaatgaaacacaagagcatatccattgttacttatctcaaaggacaggaatgtcatgctaaaactacagagagaataaaggaaaatatgggatgagaaactaaatgaatggcaggaagtggggaaaagaggtggcagacactctagtagtagggagagccgagagacaggaaagcaatatgtagaaaagatgagggtgccag

SEQ ID NO: 639681 - DNA, 567 bp, Homo sapiens
tccttggtcctgcacatacataaatagaaattaagcattggccaattcttactttttcaattaaaatttattttctaatctaaagacttcaacaatgcaaaygtaaacagtttcttctattgtaaagatttccatgtcagtcacatacaaatactagttgtgtttatgcaaaacagtttaactgaaacatggatcctcaacaaatctgcaagtataaatatataaaaaagtagaagaaaacttcttttacatagacctcaattaaattacaatattaagcaggctgcagcaagagtccattaaagatttagttaccttctgtagtgaacattaagaagctattactcaagctctatttaaactgttaaaaggaattaaaatgtataagaaagaccattacatatcatgagctaatattctaacgtaagcttagcagctgatagattgtttaagcctctccaaggttttagtttcatactcaataattcagggatgggagcagggttatgttgattcataatttgctcccttccatctctcagtggaatgatgttgtgatggagaatc

SEQ ID NO: 639682 - DNA, 546 bp, Homo sapiens
ttttttgttttttacttaatataaaaattcacatatagagaaattattttttaaagcaagatgatgaaggacaatggagatggccctggatattcactttcctccccagtttggcagtctggcaaagggtgagactgaatgagtctgtgggacaaagccattggctaatgttcacatccctgacatacaagatgttcccagggcatttgtacacactccctaccatggttcctgtgtccccagatcatttgaaataagtcttgttacttagagaagctaagtgttacttaaccactcttaagttaatgtatagatattttgtaaggtaacatgataaattttgttgtttccctcagagtactttcacttgtaagcccagmacactggccaaggcagcttctacccttctacacctttggccatgagacatacagaacatctacacctggttggcccaggctgaggaataatgagttttggcgattgtgtttgctttcttatttcttggcttttaagttttcctcagtagtatgcgtccatgacatt

SEQ ID NO: 639683 - DNA, 576 bp, Homo sapiens
ttatcctttaagctttccctcatgacttgtggattcactagtttaaagaaaacacataaaaaagggagaacttatttacatgattctgttgttaattatgagttttactgtggtcagcagcagtgagctgtgttggacttttggtgtgtaagatgagggacaaatgggctatatccgaaacaaccatacaggaatggaaagttttaaccagatcaaagaggacagggtacaactggggttcaaacaacttttacatcaggcctaaaaatgaatgttggtgcagcaactataataaaaawtgtatgacgagatgataaaggcaagaccatataaagagaaacagtattttccaatacttagtgaagtattgaggcaagtagtctctgagcagttattatctaagaaatcagaactgaaatactgtcatgtacaactggggtccccaaaacccaggcaatggacctgtactgatccgtggcctggaaccgggctgcaggagatgagcagtggggcagcaggcatgactgcctgagttccacctcctatcagattagctgcagcattagattctcatag

SEQ ID NO: 639684 - DNA, 222 bp, Homo sapiens
attcaagcccagtccggactgtcatctgtcacagacgttttataattggtgtactaaattaggagaaaggctggggaaaaaaaggccattgaggttcctgattctgtgatgattctgatattccaatttccacttgaatactaccaagagtaaattaaataatgaattaaakagtggcattcttgtgcctgatcatctttaagtcattggtgaaccttccct

SEQ ID NO: 639685 - DNA, 510 bp, Homo sapiens
agcataggggaaccagcccccatgatccaatcatctctcaccaggtccctcccttagtacatggggattgcaatttgagatgaattttgggtagggacacagagtcaaaccatatcaattattaatttttaaaaagtagaaaaaagtaaaatgcttttctcttatttttcaacataccagatcctctcctctgtcatgcttaaatatcaaacatccaggatagaaggtaggattaggattgtggtagttgcaatacagagagatctaaaaaattttctggcattcaaaatagtatgcttggaaataatatgaataaaagccagtcatatttaaaggagataaggtgttctaggtttgtttagcccctgtttagcacaagcctactgaaagggagaagaggaggtgtattggataatttgatgaaaatagaggacagagagactctggatrtatttatttttagaaactctagaagaagattgctctgcagaatctcttaacaaaatgggt

SEQ ID NO: 639686 - DNA, 560 bp, Homo sapiens
gttcattactaagctctctgcagcctagtagagactacatagaaactgatggaaatttttatgtttcttaaaataggtagcactcctcctagaragggtattctcagtctattctccccatcctcttcctaattggagatcaaaagaaatggcatcatttttgttcaagttctaaaggaacagaagagtacttccagaatgttgaagtaaggatgtctaaaaatctgcttctccataaaagcaatgagaacactggaaaaaattattaaaatcaactttttcaaaactctgaaaattaaccaaatgcttgcaacaattctatgagtacttattaaagaaaaatgtctgaatctctgtaagaacaacaagctttgtggcatttttaacttgccccattcccatctccttcttctcagttccatggtcttaaaacaactgtcttagaaacatggtatctgttaaaaactgtagcctagcagccaccagagagggaaacaggttttgagctccctagaaacttaatctctacagcactgcatgactcacatgaaatttcccaa

SEQ ID NO: 639687 - DNA, 612 bp, Homo sapiens
gtactgataaatggtacaacatggatgaatcttgcaaacattatgctacatgaaacaatacagacataaaagaccacatattatgattccagttatatgaaaattccagaattggkaagtctacaagaacagaaagtagattcgtggttgccacagcctcagggaccagataatggggaattggaatcaacttcaaatgtctatgaagtttcttttgaatgcgataatgatgttctaaaattacatagtgttgaggtttgcgcaattttttaaatataataaaaaccactgagctttatactttaagtgggtcaattttatggtatgttaattacattccaatacatcttttataaaaaattctaatggggcaagtttccattcaggggactcctttgtggcattcacgctgcactgtctacttctgtgggtttctcctctcccgttcttgtgcctagtcatacatttttgtccctcttctagtgaagcttctgaaaatagcacactgctattggggctcactgggagagtgcaaagtgcctctactcctgagagctcttagattccagagcagaacaggtattcatacagaagtgcagagatggtcctctt

SEQ ID NO: 639688 - DNA, 521 bp, Homo sapiens
ccaccacgcctggctaattttttgtattttagtagagacggggtttcaccatgttggccaggatggtctcgatctcctgacctcgggatccacctgactcgacctcccaaagtcctgggattgcaggcctgagccatgcgcccagccctttacctaccttttaagagttcaagggttaaaaaaaattgaaaaccattgcctttcaatttttgcttctatgcctatgactgcttctagaaataagatgtgataggcaacattgagcacatgttttgagaatcctccacatttttctgtgtttgttgcttttgtcttgttttgcttcccaaacacayatctctagatgttatattcagtaattgattctaaaacaatcagcaaaattaaattattgaatacacaactggcttattgtcaaaattagacaagattctgtgtgaaaagttacatttaaaatgataagcacaccacaaatgtaaagtatcaagtagctctgcagagatagaaaagagaaaaagcca

SEQ ID NO: 639689 - DNA, 628 bp, Homo sapiens
ttaggtaaaaatgttgactttagttgattctaacaaaaacataataatagaaatattactggctttagaaatcaataggaatctgataaaatcactaaacaattttgggcctcagctctctattctgtagaagaattttggaagagattattttctaattttatttcaggtttgacaaattataaggctaagaggctcagctgaagtcatcaggacctgctttaccctatttctggatcacactttctctgggatgactgaattttttgtgttttgactgcaacccattatatgaggtcaggtatggaattttccacttgtggcatcgtgttggtacatcaaaatgtttcaaattttggagcattttgaatttcagatttttggatatgggatgctmaatctgtaataaactttatcttagtttgaggtaggaagacataaattagtgtcctattaaagtcttagctctgcttatggtggttgataaatatctgagaagcatatttataagaattctagtcccaccatctcctataatgtatatttacattaatacactttcttatactgagaaaaatacattgaatatacttattatattcaataaaatgatagtttggggaaataa

SEQ ID NO: 639690 - DNA, 541 bp, Homo sapiens
atatgtagctgtttctaatgcttgttctttttggttgtaaataacagctgaagcaaactttctagtgcctaatccggactcatgggctttagggtatcaaagtaaacccacagattttggttttcaaattctgaggcgtgtaatcaagaagacattgcaaggctaaaaaggcaacatgtctataggaaaaacaaagcaatatgaataaaatgggctttggactgagacaaagctgttttgatgctttgtactaatgctgcctcttagtagctatgtgaccagggacgagtcatttgacctccttgaatttcagttttctcactataaatttaagcctcatgccccttaattgccatggaagattagaggtagtattacatgacatacagccagagatcttggcataarcatacactaataataatagtaatttttattgttataattattattagaaaatgaagaagaacttctagaagttattttaaaaatccatcaggattccagtccatcatgttttttaaccaaaaatgatatgcag

SEQ ID NO: 639691 - DNA, 366 bp, Homo sapiens
gggtgtgcattaggactgtgtatccaggtatgacagttggaagaagaaaacgacagctgtctccatagatagtttgaaaaatkatgcattagtgaacccagtgtgtctgtctgatgttggtaacgacaactagagtccttcccatcttatcaatcaggagcagtattctcgagagtctttgtattggggaaaggtttgattaaattcttatgcaaatcagaaagcatcttaaaaactgtgatgtacttaactcatagctcttttccttctgaagggagatgggaaacaggatgatatatcatttctgaatattttggtaatctcgaagtaaagtgaacattactttactcagcagaggctaaaaga

SEQ ID NO: 639692 - DNA, 552 bp, Homo sapiens
tggatgttcccatgtcactgtctgtgcctggggtcttgctagctatattgcaggtggttcttaattaagtaactattttcaatcaattgcagaagaaaataatatatcctggatttttctggttcaagactattttctattaaacatattcttattcctaagaatcttcaaaggccctggaaaagaaatatgttgcatttcatctgaaaatcaggaaaagatggtatttggggaaccaaacctctccattagmaatcaattctgcaattaggcagcagagatgcttaaatgctcctattcaaggaacgtggattattccttgcaacatggataggtaaatagcatgctgattttgactttaatgagcaactggagacacactgtgaccaaaagagttggaaaatatattgtctcagagccattaagtgccctcaaaagtaggtaaaaaatgtcttctgatcaatagaatttgaagaggagccactttatataggattgtcctgcagaccatttgtgaagtttatttgtatactagcatcctgtgaattctga

SEQ ID NO: 639693 - DNA, 540 bp, Homo sapiens
aagcttgatgccatccgtgttcttttcagttccctgaatggttaaatcctctgtcatttgtcctcagacgaagaatggatatttgtctacagcttctattgataggatctgaaagttgaaaaccaataaacagtgttatcgtgactctgtctcctggattattatacctttgcatgccctctgggttttaattaaaatactttataccatttgaaaaatgacagcataatttctgtttgtttagtactttagaatctacatttatttgatwttagatggcagcatactttgcttgctctgaattgggaaactgtctattcgtttttcttgatgtcctttggcattacatattgaaatgaggctttgtgtcttataaatgtttgatcacatgacacagtagccgcatgggtctctctgtgagtttttagcaacaggtaagccattctaaggtagtgctagccaaactttggatttcaatgcttttcatttcttttttttaaagaccaatacagagatgctaactttttattttgccagaat

SEQ ID NO: 639694 - DNA, 562 bp, Homo sapiens
caagaggagcatttatatatttttaaaaagattcctcagagttttaactccaaaagctgccaagaaaattagattctgctaattgcatcatcagcaaacactgaaatctgttcattcaatattggcttccttctgtattcaatgaactgtcttttctttaaaaaatatctttaagaaatagtttggtacctgcaaaactttgatcactttttttcttttttaacaggtggtrctttgcatatcagttgatgtatctcaagactataaccaagtagagaatgtcataaaacaagtaagaggttgggctaattggaattcaccaatgtgcttgacttttgatttgttcttgccattttgctatgtggcttggaatggacacaacttctctataggtttaatagttttgtaaattttatttatcagcatggatttgctgctgagtggtttttcttctctgtttcttaatgcctgctctgctacatttttctaggcacaggagaaactgggtccagtggacatgctggtaaattgtgcaggaatggcagtgtcaggaaaatttgaa

SEQ ID NO: 639695 - DNA, 442 bp, Homo sapiens
taaaatgatgaatttatgaaaaagtaattcttgtgtgaagttttttttttttttacactttttgttttaatctgaagagttatctttgaaaaacaggatgcaattcagtgcttccttttatagcctcttgggagaatgactaatgtcattattttataggacctaacaggagcaaaaagcctagaaattactgcaagtggattagatgtcaagaagcacaccacatgtttttattacattttacaaagtgtgctcatactargaggccaaatagagaaaaggccaagaaaagtagatgattgatgtgaacatctgatcttatttgaccaaagttgacaaaatattgatgccactgtttggtgtttaaaagtaagattaactaaaatgccccaatttaaatttctaaaatttaaatcctcttcttgaattgtttgtttgttga

SEQ ID NO: 639696 - DNA, 650 bp, Homo sapiens
aaaccaaactcaggattctgtttttgtgtaagaaccgtaccacatggctgacatatgttcagtccatggctggcagaagcctcctgaacacatcccccatccagtacctccccggcagtgacccatctcatatttgcatatgttcccctgtcacaagattgtggggagggtgcagtttgcagctgactccttacctagctacagctccaactaagggcgtgcattcttggggagatgttgggagcatcacaaggtccccttccgttcccagaactcagtttcagaggtcagccagaaagagaattccagaggtcagccagagagagaaggtagcaaggacagagcccctactgacatttttcttcccacccatcccatctccagggcaatggtcttcagcagggaacaacgggccctcattccctgccaggggagctgagtacacacaaactgctggatgggcgagaagttcccccagtgatctttatttttccrtttagaaagaatccttattccagccccttctctccagctgctgcgtgtgagcctgtctctgtctcttgggtggtgcagctgcaggtgagccagctgtgggcggccctgaaggacagcgaggtagggagcctggttgtgaggtctctgctccctgg

SEQ ID NO: 639697 - DNA, 623 bp, Homo sapiens
ctccaaacttagaactgtcagtctctttaattttagccattctggcatgttcacaggagtatcacattgtgggtttaatttgcatttccctgattacttattactaataatcttttcatatgcttattttcttttagaacgtgcctatgcaagtctcttgtccatttttcaactgttttctatttcttatgaatttgtaggagttctttgcagcttctggctatgcatccttcattaattttgtgtgttgcaaatatattcttccattttgtgacttgtctttttagtctcaaaacagaatcttttgatgaraagaatttcttaattttgatgtaacctcatttatcactcttttccttcatggttggcacttgttgtgtcttgtttgacaatgttgcctatcccaaagtcatgaagattttctcttatgttaacttctaaaagttgtatcatttgtcttttatatttatatctacataatgcacctggaattgagttatatgaatgctgtgaatttgggaggggcgtgtttcctttttttcccacatggatatccaatcaactcagccacatttactgggggaagacatctttttttctaatgcgctgtagtgttaggtttt

SEQ ID NO: 639698 - DNA, 553 bp, Homo sapiens
ggattgagttttgggcaggtgatggagagtgaccctctaaactgggaactgtgacgacattcagcttcatgtcttaggagagagtgagataggagccactagaagaatgagatgattcagacaagagattgtaggagattggctttattctgttgacaagatggtaatccgacttattttttggttttttggtgttggtggtttaggaagacaggaacttctccacacccggtagagttcagctgccttttcattagtcagcaagcagtttttcctttctcaaggcagtccacatccagcaaaacatttgattaactggaaagcaataccattctcatgccagtgtacaaattacatgaaagagcatcatttttctagtgtctgaggattggctgcttatggccaattttggcagcaaracgataggattaaaaatagcttgaagatgatctagtcttaaataatatatttcatgatgaactttccttgggaaagtgcatctttctgcctacaagaatcacatgacccctttcaataatttatgtagtagaga

SEQ ID NO: 639699 - DNA, 589 bp, Homo sapiens
tccgtcttcattccccaggccaccaaacaaaaagcttttgattgccagttttcgccacctgctggttgtttcacagcgttactctcttcatccatccaagaaagttctttcatccatcatcaatataaatrttctccaagtttatgaaattcaaaaggtacattattctaacatgaacatactaatgtttaatataggtatgtatcggccaggtgtggttgctcatgcctgtaatctcagcactttgggaggctgcggtgggtgtattgcttgaggccaagagtttgagaccagcctgcacaacatgacaaaactctatctccacaaaaaatacaaaaattagcggggcatggtggtgtgtgcctgtagtcccatctactctgaaggctgagataggacgatcacttgagcccaggaggtggaggctgtagtgagctgtgatcacaccactgcactgcagcctgggtgacagactgataccctgtctcaaaaaaaaaaagaaaagaaaagaaaaaaaaaatcatgtgtgtgtatcaaatcttcccagctagtaaactttttattgaaaatgtgggtagaatgagactat

SEQ ID NO: 639700 - DNA, 613 bp, Homo sapiens
caggcaagctatacaaatatgttttgaaggctgaattgagaattaagagcataaattgagaattgagtgtctggttcattgtaaacaatcaaatgtttctattatcaaattttaaaagacaaatattttgcttagaattacaaaggacaaaaagctcaacaaagttaccttgcccagtgagtttgagtttttaaaaggctataaatcactggtttagaacacagttacatatgtaagacacacataagatgcagaaatcaccataacacccataagcaaaaaaatttgtgatgtttaaaataataatttaatgattttcctttagaaaatgtgaaaattaatgaagaagtaagttaaaaccacttataatttcatcacctgaagaaaactgttaaaatttggtgyacagccttctaatctcatccgtggcagtggtttctcaaacttcttgatctcacaacacctttataaacttaaaagatctttaaggatccccaaagggcttctgtttttatggattatatttattgatatttactgtattggaaattcaaacagaacattttaaaatatgtatttattgaaaataagaataagcctattacatattagc

SEQ ID NO: 639701 - DNA, 613 bp, Homo sapiens
caggcaagctatacaaatatgttttgaaggctgaattgagaattaagagcataaattgagaattgagtgtctggttcattgtaaacaatcaaatgtttctattatcaaattttaaaagacaaatattttgcttagaattacaaaggacaaaaagctcaacaaagttaccttgcccagtgagtttgagtttttaaaaggctataaatcactggtttagaacacagttacatatgtaagacacacataagatgcagaaatcaccataacacccataagcaaaaaaatttgtgatgtttaaaataataatttaatgattttcctttagaaaatgtgaaaattaatgaagaagtaagttaaaaccacttataatttcatcacctgaagaaaactgttaaaatttggtgtacagccttctaatctcatccgtggcagtggtttctcaaacttcttgatctcacaacacctttataaacttaaaagatctttaaggatccccaaagggcttctgtttttatggattatatttattgatatttactgtattggaaattcaaacakaacattttaaaatatgtatttattgaaaataagaataagcctattacatattagc

SEQ ID NO: 639702 - DNA, 577 bp, Homo sapiens
aacagggaaatgaaattataaygtaatgctgctgctttgggagagctgtggatgcaaatgctgctgacgctgctttgcaggtatagtgctgggaccccaaggaggatagataaggtgccctgaatctttaaaaagactcatcatgtagaaaatgaacccagaacatctttcctttttctcactcattcatttagctaacatttcctgagttatactactaagcatcagacatcgttcgtggagattttattgtgtctaggggagaagataaaaatatcagcaataataacaaaataccagatactaacaccatgcagacttgaagcaggaagatatgatagttctctgggcagctatttcagagaaggcctgaccttcagcaaagttcttgaaatttaagatgaacctgaagtacatggccatgtgaagatcaagaggaaaacatctcaggacatggacatagctggcctgaggtgggaatgaatttggcatgtttgaaggaaagaaagagggccattgtgactggagtagagtaggagagcagaggcagggacacaaagaggcaggggagaccacc

SEQ ID NO: 639703 - DNA, 577 bp, Homo sapiens
aacagggaaatgaaattataacgtaatgctgctgctttgggagagctgtggatgcaaatgctgctgacgctgctttgcaggtatagtgctgggaccccaaggaggatagataaggtgccctgaatctttaaaaagactcatcatgtagaaaatgaacccagaacatctttcctttttctcactcattcatttagctaacatttcctgagttatactactaagcatcagacatcgttcgtggagattttattgtgtctaggggagaagataaaaatatcagcaataataacaaaataccagatactaacaccatgcagacttgaagcaggaagatatgatagttcyctgggcagctatttcagagaaggcctgaccttcagcaaagttcttgaaatttaagatgaacctgaagtacatggccatgtgaagatcaagaggaaaacatctcaggacatggacatagctggcctgaggtgggaatgaatttggcatgtttgaaggaaagaaagagggccattgtgactggagtagagtaggagagcagaggcagggacacaaagaggcaggggagaccacc

SEQ ID NO: 639704 - DNA, 381 bp, Homo sapiens
ctacatctcttaaaattttacagaaaatacatagccagatagtctagcaaaagttcaccaagtcctaaattgcttatccttactwcactaagtcatgaaatcattttactgaaaagaacatcacctaggttttgtggtttctttttttcttattcatggctgagtgaaaacaacaatctctgtttctccctagcatctgtggactatttaatgtaccattattccacactctatggtccttactaaatacaaaattgaacaaaaagcagtaaaacaactgactcttcacccatattataaaatataatccaagccagattagtcaacatccataagatgaatccaagctgaactgggcctagattattgagttcaggttgg

SEQ ID NO: 639705 - DNA, 381 bp, Homo sapiens
ctacatctcttaaaattttacagaaaatacatagccagatagtctagcaaaagttcaccaagtcctaaattgcttatccttactacactaagtcatgaaatcattttamtgaaaagaacatcacctaggttttgtggtttctttttttcttattcatggctgagtgaaaacaacaatctctgtttctccctagcatctgtggactatttaatgtaccattattccacactctatggtccttactaaatacaaaattgaacaaaaagcagtaaaacaactgactcttcacccatattataaaatataatccaagccagattagtcaacatccataagatgaatccaagctgaactgggcctagattattgagttcaggttgg

SEQ ID NO: 639706 - DNA, 500 bp, Homo sapiens
taggatcaggagtcactgaaaatatcaagcaagaatgacatagtctgattaagtctttaaagttgtatagaaaatagtctacaaaaagtgaaagctgggaaaccagccagcatatgttacaatagtccaactgtgattgtggggacataaattatggtgcaagcagtggaaacaggtatttggatttgggttatattttcatggttatccactaggatttgctgatgtattagatatgaggtgagaaaataagtgaggtatcagtaatgactctagagtttggggctagagcagcaggtgtgtaaatgaagttacaaacctagaagatgcatgtttggaccaatgcatcaaagttctgctctaaacatattaatttgaggggtctgttagaaatacaagtggagatgctgagaatacagttgcatagttgaktctagagtttcttggaaaagctgggtctaggactgtaaatttggtaatcattaatgtctagatgatat

SEQ ID NO: 639707 - DNA, 574 bp, Homo sapiens
ttcacattccctttttagtactctcttctcatattcttttttaagctatgttaggtcaaaacaaacaactactttaataacttagcaaatatctatcaggagtccactgtgtagttagcagtttataaagcttcagatctacattagtgagtgaaatggacctagcccctatccttacagggcagcaagcctggtggaggaagctatgttctctgaaggcaacaaaaacagtcatgcgtcatttaagagtagggatacattttgagaaatgtgtcatgaagtagtcaatttcatcaytgaacatcatagaatgcatttacgcagacttagatggtatagcctactacacacctaggctgtttggtgtagcccattgctcctgggctacaaaccgatacagcatgttactctgttgaattttgtaggcaactgtaatgcaatggtaagtatttgtgtacctaaacatatctaaagatagagacagtacagtaaaaaatactatcttatgaaaacactgttgtatatgtggtctgtcattgactgaaacaatattatgtagtgcaaaccatacagc

SEQ ID NO: 639708 - DNA, 615 bp, Homo sapiens
ttgggggtaatccaaggatgttagtactctggagcataaagaacatgggaaagagtatgtgattagaaagaaaagacataacagtttgaactcaccccctgctttccccaccctaaaatagatcagttttgcaaggagaaagaagcatagtgctctattaagctccccaggtttcaacaggggcagatgatgcatatattaagggagagagctagatagtggctcctagtggggtgaactcccctatttatcatatgccatgtaacctgtttgtggtggcttatagcttataagtgttcctaaatgtcttataactcctggtggtgataatgtaggtaaacagcaaagatggcagcaaatggaatgctctgagtggtttaatatagtgacgtgttttacacttgttgtagartcacaatgttatgttggaccgaggagaagaaataatacgcaatttgagccatcaacctacggtttatgagtgagtgagtggatctagacagggatgtgtttctcaaaaccagaatataaactgtgggctgttgtctgaagaaaatggtagcaactgatgttatgttagattttcatctttttctagatttccaggaaaatgtt

SEQ ID NO: 639709 - DNA, 478 bp, Homo sapiens
ctaggtgtgatgttaggtcattaatttgaratctttctaactttttgaggcaggcatttagagctgtaaactctcctcttaatattgtttttgctacattccagagattttggtatgttgtgtctgttttcatttattttaattttttttatttctgccttgattttattgtttactcaaagttatccagagcaaactttttaatttccatgtaattgtgtggtttgtacagatcttcttgatgttggtttctctttgtattccactgtgacctgacagtatgactggcatgattttgactttttaaaatgtactgagtcttggtttatggccaaggatgtggtgaatcttggagtatatgttctgtgtacagatgagaagaatttacgttctgtggttgatgggtggattattctgtagatgtttattagatccaattggacaagcattgagtttaagtccagaatttctttgttag

SEQ ID NO: 639710 - DNA, 478 bp, Homo sapiens
ctaggtgtgatgttaggtcattaatttgaaatctttctaactttttgaggyaggcatttagagctgtaaactctcctcttaatattgtttttgctacattccagagattttggtatgttgtgtctgttttcatttattttaattttttttatttctgccttgattttattgtttactcaaagttatccagagcaaactttttaatttccatgtaattgtgtggtttgtacagatcttcttgatgttggtttctctttgtattccactgtgacctgacagtatgactggcatgattttgactttttaaaatgtactgagtcttggtttatggccaaggatgtggtgaatcttggagtatatgttctgtgtacagatgagaagaatttacgttctgtggttgatgggtggattattctgtagatgtttattagatccaattggacaagcattgagtttaagtccagaatttctttgttag

SEQ ID NO: 639711 - DNA, 624 bp, Homo sapiens
ggacccactctgtgacttttaaatgggacattgtattagtccattcttgtgctgctataaagtactacctgagactgggtaatttatgaagaaatgacatttaaatgactcatagttctacaagcttaacaggaagcatagctaggcaacgtcaggaaacttacaatcaaggcagaaggtgaaggggaagcaagaacatcttaccatggcagagtaggagaggtgggtcaggggagtgccacacacttttaaatcattatatcttgggagaacccactcactatcatgacaacagcatgggggaaatttgcctccatgatccaataacctcctaccaggttcctccctcaacattgggaattacaattcaacrtgagatttggatggggatacagagccaaaccatatcattctgcccctggcccctcccaaagcttatgtccttctcagttttcaaaacacaatcatgccttcccaacagtcccccaaagtcttaactcattccagcattaacccaaaagtccaagaccaaagtctcgtctgagacaaggcaagtcccttccacctatgatcttgtaatatcaaaaacaagttagttacttccaagatacaataggggtatgg

SEQ ID NO: 639712 - DNA, 529 bp, Homo sapiens
gcagtcattaaatattaaagctccaaaataatctcttttgtctccatgmctcacatccagagcatactgatgcaagggatgggctcccaaggccttcagcagctccaccctgtggctctacaggatacagcccccacagctgcttttacaggctggcattgaatgcctgcaggtattccaggcacacaatgcaagctgttgatggatctacgattctgaggtctggttgatggtggtcctcttctcacagctccactaggcagtgccccagtgggaactctgtgcaggggctccaaccccacatttccctttcacactgtcctagtagaggttctccatgaggtctctgcgcttgaagcagacttctgcctggacatccaggcatttccatacatcctctgaaatctaggtggaggtttccaaacctcaactcttgccttcttcatacccgcaggcccaataccatgtggaagccaccagggctttgggtttgcatcctctgaagccctggcccaagctgtaccttggc

SEQ ID NO: 639713 - DNA, 579 bp, Homo sapiens
tgaaattcttggttgaaatttcttttaagaacgctgaaaacaggcccccaatctctcctagcttgcaaacctctgctgagaaatctgttattatcctgatagagttccctttttatgtgatctgcacttttctctggctgcctttaagattttttctgtaatattgcctttgaacattctggtgactatataccttggtgatttttttttttttgagatggagccttactgtgtcacacaggctggagtscagtggtgagatcttggctcactgcaacctccgccctccaagttccatggattctcctgcctcaacctcccgagtagctgggattacaggtgcctgccaccgtgtctggctaattttttgtatttttagtagagtcagggtttcaccgtcttggccaggctggtcttgaactcctcacctcatgatccacctgcctcagcctcccaaagtgctgggattacagacatgagtcaccacgcccagccagtgatgttcatgtttgtggtgtctcacagatgttctctggatttctagctctctagcaagattaggaaagttttcttgaatta

SEQ ID NO: 639714 - DNA, 545 bp, Homo sapiens
ggctcactgcaacctccgccctccaagttccatggattctcctgcctcaacctcccgagtagctgggattacaggtgcctgccaccgtgtctggctaattttttgtatttttagtagagtcagggtttcaccgtcttggccaggctggtcttgaactcctcacctcatgatccacctgcctcagcctcccaaagtgctgggattacagacatgagtcaccacgcccagccagtgatgttcatgtttgtggtgtctcacagatgttctctggatttctagctctctagcaagattaggaaagttttcttgaattattccctcaactatattttccagtttgttttctttttctcctactttctsaggaatgccaataattcatagggtttttttgctttatataatcttatatttctcaaaaacagctcatttaaaataatttttttctttatttttatcagattgggttagttcacaagaccagccttcaagctttaaaattttttcttctgcttgatccagtctattgataacgaatttcaaaa

SEQ ID NO: 639715 - DNA, 596 bp, Homo sapiens
tccccaagttcactgcattggagcctgcagccaactgatgtccttctcatcagtctggttgtttaccctaaacaccatctcacacatgctagctggggatggtcctcagactattcattctcatttctttgcttaaaatttttctgtgtttgtatgggatgtcttttatggtttgccaactagaacttttcagtagtatctacaagcatttattattttctagactcagtaaaaagttagaattgaggggttcaaatatctcctccattgtagttgactttatttgaatgattaagacatatacatttaaaaaaatcaattctagtatagttttggtttttggaaaatacctgatttcactttatatttcctgttgtctagcatctttgttttctttgaagtatatacaaaggcacactstgttttgatctggaaattggaggtgaatcctgaaaaatggaaggcaagcactatcagtgctataaaggattgttaaagtgtagtgccagtggactgatcccagcactgcgcagtggtcattatcattttggtaatctgaagtagaagcatgcctctagacatccttccataatttt

SEQ ID NO: 639716 - DNA, 612 bp, Homo sapiens
agtggtaagaaaaggaagtgagattcatacaacttccactcacataccatagagagtaagatttttagccatttgccacttcacaaaaaggaagaaaaagaaactatttaatgaatagtacttacgctttccacaaattctaatcaagattctaatgagatttggggagaagagggtgaacttgacaaacctactgaaaatccatctttaaaactagaagaataaatagataagcattataaaaatatgcagggaattagaaagctgctrttaattaatacaggatgggagaagagatatactgaacttttgggcaaatcagacaagtatatattagaatataaatagtatagtggaaaccacaaatcaatgagtctgaaacaaataaatgttaagaaaaatagttttatatttggaaaaaaactgtttggatatgtagctcaaattatatccttgaataacagataattgagttaaatgtaaacactcaaataattaaaaaacaagctagaagaaatagaaatcatcttcaatctcaaataccttttataaaataaatgcaaggagaagattggcaaagtaaaactttgataatttggtagttatgaactt

SEQ ID NO: 639717 - DNA, 612 bp, Homo sapiens
agtggtaagaaaaggaagtgagattcatacaacttccactcacataccatagagagtaagatttttagccatttgccacttcacaaaaaggaagaaaaagaaactatttaatgaatagtacttacgctttccacaaattctaatcaagattctaatgagatttggggagaagagggtgaacttgacaaacctactgaaaatccatctttaaaactagaagaataaatagataagcattataaaaatatgcagggaattagaaagctgctattaattaatacagsatgggagaagagatatactgaacttttgggcaaatcagacaagtatatattagaatataaatagtatagtggaaaccacaaatcaatgagtctgaaacaaataaatgttaagaaaaatagttttatatttggaaaaaaactgtttggatatgtagctcaaattatatccttgaataacagataattgagttaaatgtaaacactcaaataattaaaaaacaagctagaagaaatagaaatcatcttcaatctcaaataccttttataaaataaatgcaaggagaagattggcaaagtaaaactttgataatttggtagttatgaactt

SEQ ID NO: 639718 - DNA, 612 bp, Homo sapiens
agtggtaagaaaaggaagtgagattcatacaacttccactcacataccatagagagtaagatttttagccatttgccacttcacaaaaaggaagaaaaagaaactatttaatgaatagtacttacgctttccacaaattctaatcaagattctaatgagatttggggagaagagggtgaacttgacaaacctactgaaaatccatctttaaaactagaagaataaatagataagcattataaaaatatgcagggaattagaaagctgctattaattaatacaggatgggagaagagatatactgaacttttgggcaaatcagacaagtatatattagaatataaatagtatagtggaaaccacaaatcaatgagtctgaaacaaataaatgttaagaaaaatagttttatatttggaaaaaaactgtttggatatgtagctcaaattatatccttgaataacagataattgagttaaatgtaaacactcaaataattaaaaaacaagctagaagaaatagaaatmatcttcaatctcaaataccttttataaaataaatgcaaggagaagattggcaaagtaaaactttgataatttggtagttatgaactt

SEQ ID NO: 639719 - DNA, 492 bp, Homo sapiens
tagtcttctgattcgggaaggaagagaaaaaatcctctgtcaagatgcaatgactcactgactcaaaagttgttttggcaygcttcaaaagcagaaaaatgaggcaaaatactgttctaatattctgatactgataattgcaagtagtctggtgaaatgacacaaagaataaagtatgtcctaaaaaatgcaaggtttaaaaattcaaagcattgacctaaatggagttttcactaagttaactgaaatatcaagacaaaatttatgcaacggaagtgtttccctcataccccctctgtcacatcaatttcactgcaacgtattgatgtacaggatgaggacaatttaaaggtgacaccgaattgtgaattagtacttttaatttaaactctaacatctacagtaatttttaagaccctccttgatcagcctataacttacacctctaagtttactttccattattcagttcaaaataaatttcttttcaat

SEQ ID NO: 639720 - DNA, 593 bp, Homo sapiens
caagttagttgacattctggctaattagtgaggatcacttaacaaaagtctgtcttccacagacttattagttttattacacatgagtgaatgaacgaaataaatttcttttacatgcaaaactgatgaccagatgctagcatgtgctgtaccaaaatgcatycacaccatgagcccagccttgtggcttttctttctaaaccactgtataattattagatattgaacacagcaggtacataatagacatttattgagtgaataagtgaataaaaactgtaagcttatttcaagtcaattgaaatcagttttaagtagctaataatactaaagtactttctatacatgtgtccatccaagtcctttctcagaggtcaaatagtcactctagctcactgaccattttcataattcattcaatagtgctattcccaaaatgcagaccatgaaaatatggctttaaaagtccacaggccacaagagactttgataatctcaatgtttccctgtttgcaattaatggaaacagtatgggtaatactagtgttgccattattctgatttactacacaaaaattacattttgcagcatt

SEQ ID NO: 639721 - DNA, 540 bp, Homo sapiens
atgataatgatcaggtaaacttagtacatttgagatgaccaaaatgaaaaaccttcacatagagaagtgatggattatcactaattgtgtttaacaaatgttaaaaaaaaaaaacactcttttccttttaagtgacttgacctgataatttctgacaaaagccctgttacagctgtccaaatttagcttaaagaattaacagaaagtatatagtgaagagwtggcctggggctgggtgtggtggctcatgcccgtagtcccagtgctttgggaggcgaggcaggagagtcacttgaggccaggaatttgagaccagccaagacccagtctctacaaaccaatttaaaaagcttgtccaggtgtggtggtgcacacctgtagtgctggggaggctgaagttactggggaggctgaagcaggacgatggcttgagcccaggagttctaagctgccatgagctacaatcatgccactgcactccagcctgggtgacagagtgagagcctatctcaagaaaaaaaaaaaaaaaaaaagatggcc

SEQ ID NO: 639722 - DNA, 642 bp, Homo sapiens
gctaatattatgtatttaggagtcatcgaaatatagtggtagttgaagacaagactatgaatgagcttatgcagactgtgtagagtgagaaatgactggaaaagatagaacccagaacacaaacaaatttatagtgtgggtggaagaacaaatccacacaggagtcgggaaatgtacatagggagagaaacatatctacctggaaggggagtgacaaatacctaagcaagagtcttagcaagaaatagttactttgccaatagtcccagaggtaggtgaaacacattaagggctggaaatattcatctaatttgacaagtaaaaatttttgttgccactggcaatcataatttcagtggaatagggtgtgagaaaaaccatggtttagtctttatcaacacatttattaaggcctttactctcagtatgctactctcatttctctctcatcatttttttctggagagcaataatttaatttagtcttctgattcgggaaggaagagaaaaaatcctctgtcaagatgcaatgactcactgactcaaaagttgttttggcaygcttcaaaagcagaaaaatgaggcaaaatactgttctaatattctgatactgataattgcaagtagtctggtgaaatgaca

SEQ ID NO: 639723 - DNA, 579 bp, Homo sapiens
aacaattttccttttgtctatttcctctctatccattccctttaataaaatcttggttctgaaaaacaagtcatgttttccactatatttttctaaaatttaatttgacattactgttcaaaatgttaatttgctttttctcagctattttcagaaaagctcattttttaaatgacttaaaataataagcaaataggccagtcacagtggctcttatctgtaatccaagcactttggaaagctgaggagggtggaccatttgagtccagaagttggacaccagtctgggcaatatatggagatctcatctctataaaaaaaatatgaaattattcaggtgtggtagtcccagattttcaggaggatgaggtgggaggattacttgatcccgggaggtcaaggctgcagcgagccatggtcgcacmattgcacttcaatgccggtgacagagcaaggtcctgcctcatcatcatcatcatagtaataacaataataagcaaatagcttcacaccataccctaaggataaactaagtcaaacagaaatatttaagtttgttttattggttaaagcagaata

SEQ ID NO: 639724 - DNA, 579 bp, Homo sapiens
aacaattttccttttgtctatttcctctctatccattccctttaataaaatcttggttctgaaaaacaagtcatgttttccactatatttttctaaaatttaatttgacattactgttcaaaatgttaatttgctttttctcagctattttcagaaaagctcattttttaaatgacttaaaataataagcaaataggccagtcacagtggctcttatctgtaatccaagcactttggaaagctgaggagggtggaccatttgagtccagaagttggacaccagtctgggcaatatatggagatctcatctctataaaaaaaatatgaaattattcaggtgtggtagtcccagattttcaggaggatgaggtgggaggattacttgatcccgggaggtcaaggctgcagcgagccatggtcgcaccattgcacttcaatgccggtgacagagcaaggtcctgcctcatcatcatcatcatagtaataacaataataagcaaatagcttcacaccayaccctaaggataaactaagtcaaacagaaatatttaagtttgttttattggttaaagcagaata

SEQ ID NO: 639725 - DNA, 612 bp, Homo sapiens
ttttgatgtttcttttccaaataaaaacctcagcagccaaggaactcaaaataaagtaaagcaacacacttcatgagggcagcctacccaaagagaaagaaagtgggggttggtggggggtagagagagaaaaaggtttcagtctcttagcagattatggtcctttttaaggtcatatttaattcagtgccaggaacagcaattgtaagaaaaatgttgcaaataaacttctcagttatattaacaaggattacagcttcttttaaaactcctctgttttctagctctgaaggtcaatgaacattcccatgaatctttgtatgtttgtaccaaaagtgcgctgtgaacttrggcaaaggaggtaactctggcttagctgggctttttaggttgatactacaaatacaattgaaacctagccagtttcacactattgcaaagcattaaaaaaatacatttgtaagtggcatccaaagactcaggagtgattccagagagagttgtgaaagtggagatttatcttttgcaacgctaactgctcttagttctctgccatccttccttagggcatcttcacgtttgtagagtcccaatgaactcagtctgcaccag

SEQ ID NO: 639726 - DNA, 597 bp, Homo sapiens
tccaaagagtaaatagagtatgcctccctgtgacatttacctgttaaaggaaaatatgtctcattcaaagtgaatgttgctattgctgttatcaggcacacgtctcttagggagaagttttggggcagtgtcgtcttaaaatttagattaatagaagtgctttttttgaaaggattgtatttttgtaggtgatgatgactacagctagaaattgagagcaatgaaagtctaatgtctctccaattacagctatgagrgaagatgtaaatattttctaatgaaactcagtattcacatatcaacgcatttagatttacaagtgggccctgataatacttccacataaatctgcatttattccttagaggtctgtttgagatctggagaaataaatgaagcagtaaatatgttagccagtccacaatttgtgtttactgttagaagtctccaaacatcttacaaataacagtctttagggtgggaaagagctagagaccattcctctgccctttgattaaagaacttaaaacatatgcccttagtacatttcaaaggggacctaaggtgaaccttttcttttacccttgagaggtttgt

SEQ ID NO: 639727 - DNA, 597 bp, Homo sapiens
tccaaagagtaaatagagtatgcctccctgtgacatttacctgttaaaggaaaatatgtctcattcaaagtgaatgttgctattgctgttatcaggcacacgtctcttagggagaagttttggggcagtgtcgtcttaaaatttagattaatagaagtgctttttttgaaaggattgtatttttgtaggtgatgatgactacagctagaaattgagagcaatgaaagtctaatgtctctccaattacagctatgagggaagatgtaaatattttctaatgaaactcagtattcacatatcaacgcatttagatttacaagtgggccctgataatacttccacataaatctgcatttattccttagaggtctstttgagatctggagaaataaatgaagcagtaaatatgttagccagtccacaatttgtgtttactgttagaagtctccaaacatcttacaaataacagtctttagggtgggaaagagctagagaccattcctctgccctttgattaaagaacttaaaacatatgcccttagtacatttcaaaggggacctaaggtgaaccttttcttttacccttgagaggtttgt

SEQ ID NO: 639728 - DNA, 597 bp, Homo sapiens
tccaaagagtaaatagagtatgcctccctgtgacatttacctgttaaaggaaaatatgtctcattcaaagtgaatgttgctattgctgttatcaggcacacgtctcttagggagaagttttggggcagtgtcgtcttaaaatttagattaatagaagtgctttttttgaaaggattgtatttttgtaggtgatgatgactacagctagaaattgagagcaatgaaagtctaatgtctctccaattacagctatgagggaagatgtaaatattttctaatgaaactcagtattcacatatcaacgcatttagatttacaagtgggccctgataatacttccacataaatctgcatttattccttagaggtctgtttgagatctggagaaataaatgawgcagtaaatatgttagccagtccacaatttgtgtttactgttagaagtctccaaacatcttacaaataacagtctttagggtgggaaagagctagagaccattcctctgccctttgattaaagaacttaaaacatatgcccttagtacatttcaaaggggacctaaggtgaaccttttcttttacccttgagaggtttgt

SEQ ID NO: 639729 - DNA, 527 bp, Homo sapiens
ggttcaaatggctctaacagtttgagtaagaatttaaggaaattgtaatccaatattttcagatgtttcttcccacctcatacttatcagttaatgttatatttcctataggattactgttacatgtataacaaggctcagatacttttgaggctttatacatcagaaataaaaacaaaataggtattaagtcttacaatgaaatagaaagtgtaatccagcttaggtccctaaatcatgtctatggactcttacactattaacttagaatgcctttttcacttttttcaaactacagctgaactattaataattccttgtaaacttaaatttacaagaaaaaaacaaycccatcaaaaaagtgggtgaaggatatgaacagacacttctcaaaagaagacatttaggcagcaaacaaacatatgaaaaaaaaagctcatcatcactggtcattagagaaatgcaaatcaaaaccacaatgagatacattctcatgccagtcagaatggcgattattaaaaagttag

SEQ ID NO: 639730 - DNA, 552 bp, Homo sapiens
tttttaaaaatacataaaaacctttaaagaagtatatctaatagtgttttctttgcccattaaagttttgaaatctgatatttgaagccatttattcatcattgctattctatgcagcactgctaccaatatctcatttagtggtttttaatcctgcacctgagaatgtacagctattgagcttatattttttagccaaatcacttgatacaaccaagagacttagcatactattcatgtagttccagtatcataatgaacatgaaaattatcaagtcttggtacaaactctatyccttacctagggctaaaagaagaagcaatgagaagctataacttcccaatagagttttactatttctgaaaaataaataaagggcttttaagaatttgtactttttcgttattgcagttccttacattgtttctacacctgtaacatttggacaacatctatttttcaggggtcagatagggaacaaataatactatcagctgctattgactcaggactatttcatgtaatactaattatctatgagctatcatatt

SEQ ID NO: 639731 - DNA, 552 bp, Homo sapiens
tttttaaaaatacataaaaacctttaaagaagtatatctaatagtgttttctttgcccattaaagttttgaaatctgatatttgaagccatttattcatcattgctattctatgcagcactgctaccaatatctcatttagtggtttttaatcctgcacctgagaatgtacagctattgagcttatattttttagccaaatcacttgatacaaccaagagacttagcatactattcatgtagttccagtatcataatgaacatgaaaattatcaagtcttggtacaaactctattccttacctagggctaaaagaagaagcaaygagaagctataacttcccaatagagttttactatttctgaaaaataaataaagggcttttaagaatttgtactttttcgttattgcagttccttacattgtttctacacctgtaacatttggacaacatctatttttcaggggtcagatagggaacaaataatactatcagctgctattgactcaggactatttcatgtaatactaattatctatgagctatcatatt

SEQ ID NO: 639732 - DNA, 552 bp, Homo sapiens
tttttaaaaatacataaaaacctttaaagaagtatatctaatagtgttttctttgcccattaaagttttgaaatctgatatttgaagccatttattcatcattgctattctatgcagcactgctaccaatatctcatttagtggtttttaatcctgcacctgagaatgtacagctattgagcttatattttttagccaaatcacttgatacaaccaagagacttagcatactattcatgtagttccagtatcataatgaacatgaaaattatcaagtcttggtacaaactctattccttacctagggctaaaagaagaagcaatgagaagctataacttcccaatagagttttactakttctgaaaaataaataaagggcttttaagaatttgtactttttcgttattgcagttccttacattgtttctacacctgtaacatttggacaacatctatttttcaggggtcagatagggaacaaataatactatcagctgctattgactcaggactatttcatgtaatactaattatctatgagctatcatatt

SEQ ID NO: 639733 - DNA, 555 bp, Homo sapiens
acagaccttcttgagtcaaaaggctcccagaaatctaccacctgaaatgaaattaccaaaggagaacaactggcatagggtctaggacagtmagaacctaatagggctgattcctcctctttgcggtagctgctttctagcccataactgctctaatcctactccaaaacaagcagttccggaccatgacgaatttggactcagaggttgatgctaatagatttagttgatgtttcaagaagcatttgccaagttccacctcagcataaggatgtggcctctctgctacaacaaagcagcagcggagaaaactctcacggcccatggatgatgctccaaaactaaaaacagagattacagtcaaagggttctgttaataagatttagatgaagtgaatttcacattgataccagcagatcctaaatctgaggatctcagactaagcactcgataaaaaattcaagttttgtttctaatgcccaaatgagtctattttagaagacctcttttaaatattcaggttcttggccatttcccggtcacatccattcttc

SEQ ID NO: 639734 - DNA, 517 bp, Homo sapiens
tcatagccaccccaaccttcagcaaccaccaccctggccaatcagcagccatcaacatttagacaacaccctccaacagcaaaaagattttgactcaggraagactcagatgattgttaccattttctagcaataaagtgttttttagttaaggtgtgttcactttttaaataatgctgttgcacacttaatacattctagtgtagtgtaaatataacttctacgtggactgggaaacaaaaagatgcatgtgattcactttgttgcaatatttccttcattgccgtggtctggaaccaaaccggctatatctccaagatatgcctgtgtaacaaagtggctggatataagataaatatttaaatattaatacctttctcccatatcagcaggaaggcattagaaaacttaatgaagcaatttttaaaattacaacaaaaagataaatcatctaggaataatcttaatggcaaatacttgagatttatataaagaagacaaaagtttactaagagat

SEQ ID NO: 639735 - DNA, 517 bp, Homo sapiens
tcatagccaccccaaccttcagcaaccaccaccctggccaatcagcagccatcaacatttagacaacaccctccaacagcaaaaagattttgactcaggaaagactcagatgattgttaccattttctagcaataaagtgttttttagttaaggtgtgttcactttttaaataatgctgttgcacacttaatacattctagtrtagtgtaaatataacttctacgtggactgggaaacaaaaagatgcatgtgattcactttgttgcaatatttccttcattgccgtggtctggaaccaaaccggctatatctccaagatatgcctgtgtaacaaagtggctggatataagataaatatttaaatattaatacctttctcccatatcagcaggaaggcattagaaaacttaatgaagcaatttttaaaattacaacaaaaagataaatcatctaggaataatcttaatggcaaatacttgagatttatataaagaagacaaaagtttactaagagat

SEQ ID NO: 639736 - DNA, 515 bp, Homo sapiens
tccttcttgctttcattttgtggccacagaatggtacctctaccctcagcttttcatcccttttacaggcaggaataataaaagggaagtcacaaaaaatgggtggggtagcacttattacaagaaaacaaaactttcccagtaacttcccttttaggactttcacttacatctcaytagcaggaactgtatcagattggccccatattgcaaaggaggctatctgagaaataaagggcaaatagttgccctaaacaaaatctaagtttcctttaaggaaggagggaggatgagattttgagtaggcaatttatatagagctcctgccctggatagagctccttccctgggcccatagtatgtggctgtgtggaactcacagtctagtagaacacaaatagatcatgaatagatgcaaaccaggtattctacacttcagtggaatgacagtgcagggggctatgcagactcttgaaggggagaagattcagggtccagttcctgaatttaacacc

SEQ ID NO: 639737 - DNA, 515 bp, Homo sapiens
tccttcttgctttcattttgtggccacagaatggtacctctaccctcagcttttcatcccttttacaggcaggaataataaaagggaagtcacaaaaaatgggtggggtagcacttattacaagaaaacaaaactttcccagtaacttcccttttaggactttcacttacatctcactagcaggaactgtatcagattggccccatattgcaaaggaggctatctgagaaataaarggcaaatagttgccctaaacaaaatctaagtttcctttaaggaaggagggaggatgagattttgagtaggcaatttatatagagctcctgccctggatagagctccttccctgggcccatagtatgtggctgtgtggaactcacagtctagtagaacacaaatagatcatgaatagatgcaaaccaggtattctacacttcagtggaatgacagtgcagggggctatgcagactcttgaaggggagaagattcagggtccagttcctgaatttaacacc

SEQ ID NO: 639738 - DNA, 499 bp, Homo sapiens
tgcaatatttccttcattgccgtggtctggaaccaaaccggctatatctccaagatatgcctgtgtaacaaagtggctggatataagataaatatttaaatattaatacctttctcccatatcagcaggaaggcattagaaaacttaatgaagcaatttttaaaattacaacaaaaagataaatcatctaggaataatcttaatggcaaatacttgagatttatataaagaagacaaaagtttactaagagatccaagtattcattaaaaagaagggaaaaaaaagatccagattacatgcagctgtaaactaagtcaaacyaagtatttaagaagcatgtagaataaggccaggttctcttttgagcaaatgctaagttaaatgcacaatccattgatacaggtctaaaataggtcagctgaagtgttctttaatatacctattaattcttatgttcttccagtgaactagaagtttatatgtcctgatattgatagt

SEQ ID NO: 639739 - DNA, 517 bp, Homo sapiens
cttctaattctgttattttaatagtaaagattttttaaattctatttttgcataatggggtctaattttgtgttcatgtttattgccaattattaaattaactaaagtttattaaaattaaattaaatgtattatttattaaataaaatttaattaaatgtggtattaaaatctaattacataaactaaatgtatttattaaaaagtaatttaataaactttggttaataattggcaataaatgtaaaagaacacaaaattagaccccgttcatactttatgcaaaaacaatttaattttgaattattaaatttcattgttayattttttctgcatatagttgaatatgctttcttttctaactaaatttttgtttaatgccaatactgtactgttttaatttctgtaattttaaattatattaataatcatacagtacaagtattgccattactcttcttcctcaaaaatggtcttgatccatttccaacacgttcgtctttcttttttttttttt

SEQ ID NO: 639740 - DNA, 520 bp, Homo sapiens
cctttccctttgccctaggatagcatctgctttctgcattgctatttctgtgttccttagaattctctgttaagggctgagcacagcggctcacacctgtaatcccaacacttcaggaggctgaggtgggcagatcacctgargtcagggattcaaggccagcccggccaacatggtgaagccctgtctctactgaaaatacaaaaattagccgggtgtggtggcatgcacctgtagtcacagctatttgggaggctgaggcaggagaactggttgaacccgggaggcagaggttgcagtgagccgagatcatgctactgcaactctgcctgggcaacagactgagactctgtctcaaaaaatatatacatatatatatgtgtgtgtatatatgtaaatatatgtatataaattctgttaagctctttagtagttgatcaccttttactagttaataaacctttatattaattttaacctgttctaattactggtgtgatttctgtcttccagctggaca

SEQ ID NO: 639741 - DNA, 520 bp, Homo sapiens
cctttccctttgccctaggatagcatctgctttctgcattgctatttctgtgttccttagaattctctgttaagggctgagcacagcggctcacacctgtaatcccaacacttcaggaggctgaggtgggcagatcacctgaggtcagggattcaaggccagcccggccaacatggtraagccctgtctctactgaaaatacaaaaattagccgggtgtggtggcatgcacctgtagtcacagctatttgggaggctgaggcaggagaactggttgaacccgggaggcagaggttgcagtgagccgagatcatgctactgcaactctgcctgggcaacagactgagactctgtctcaaaaaatatatacatatatatatgtgtgtgtatatatgtaaatatatgtatataaattctgttaagctctttagtagttgatcaccttttactagttaataaacctttatattaattttaacctgttctaattactggtgtgatttctgtcttccagctggaca

SEQ ID NO: 639742 - DNA, 520 bp, Homo sapiens
cctttccctttgccctaggatagcatctgctttctgcattgctatttctgtgttccttagaattctctgttaagggctgagcacagcggctcacacctgtaatcccaacacttcaggaggctgaggtgggcagatcacctgaggtcagggattcaaggccagcccggccaacatggtgaagycctgtctctactgaaaatacaaaaattagccgggtgtggtggcatgcacctgtagtcacagctatttgggaggctgaggcaggagaactggttgaacccgggaggcagaggttgcagtgagccgagatcatgctactgcaactctgcctgggcaacagactgagactctgtctcaaaaaatatatacatatatatatgtgtgtgtatatatgtaaatatatgtatataaattctgttaagctctttagtagttgatcaccttttactagttaataaacctttatattaattttaacctgttctaattactggtgtgatttctgtcttccagctggaca

SEQ ID NO: 639743 - DNA, 509 bp, Homo sapiens
tatttctttaattgacaaactcttctcccagagccaagccatttgattatctcaaagatcattttacacctaatatagaacacacactttaatcatttgaatttctwctttatgggtacaatcacaaaagagaaactcttctctttcctccaccaagaatggagtttatattctctcatcttccctaatacattggcttaacatttctttcccttaatgggcagaactacacacagtggggagtagacacactgacaaatatatttgcctataccactgtaactggatttctaaccaaaagagataaggtacattgaacatgctctgcaaccaaaaggttcctgtcagagaaaaggatgaactaatgaatttatgacacagttcctatagaaacaggcttagtaaaatgtcttactggacttttaatgaataattaaaatgtcaggaagaatgccatcatattaaaaatggagaaggtaaaacagaaggagcacagaattgtagtcaga

SEQ ID NO: 639744 - DNA, 526 bp, Homo sapiens
tcttacagaagtggacgtacccactctacagataaagtattcccaatgtattcaacttgtgggattcccaagagttcttctgaaacactcaactccyctctgtatccctgggagacacagcaaatatacaaacgctcacttacactgagccaggccgctgatagccattgcttgaggcagtgtctagtcttaatctcctgcacattttcggaggcaggtctgggtttggtgaagctttgggtgtctccttggaacctacagaagttaagctttgaatagatccactgtagctcttgtttcctaaaaagaaagcccaagaaaataggcaaggtgctattagacaacataatagcaataacacgtacatgtgcataacaaaaggaagcatttttctctgagcccaaatgggaaggtacagaatgttctttgagtacagcaacccatcacttggggagatcaaaatctacaataattacaaagacatcacttcacagacatggaaagattcaggaaaaatgtcacagtg

SEQ ID NO: 639745 - DNA, 529 bp, Homo sapiens
ggaaataaacaccagtgcagagaacagaagaaaacttctaacatcctcagagaaataagaatgatacggtatccatgacatgagaacagaaaacatttttaaaacagacatttagcaagaaaatacttttggataattaaatgaagaaaggcagaaattgaaaattcaatgaaagggctgaaatggaaaggaaaatctgaggaaaaataaaagatcaaaacatggaaaattagaaagaagagttatagtaaatttagtattcaggagattctagcctccaattaataggaatgtccagaagaaaaaatagagaaaatcaaggagagaaattwgtgtaagaaatcgcaaaagttgctggaactgaaacatacgagttttctaacaaaaagggtccggtgtagaggcactgcacaattgaactaaggtacattattgtaaaattgtaccaggccagaaatgaagagaatattttaaagtataccagtgatgaaagaaacaggtcacatagacgttatcaggattcagaatg

SEQ ID NO: 639746 - DNA, 571 bp, Homo sapiens
ttagtgtaagaaatcgcaaaagttgctggaactgaaacatacragttttctaacaaaaagggtccggtgtagaggcactgcacaattgaactaaggtacattattgtaaaattgtaccaggccagaaatgaagagaatattttaaagtataccagtgatgaaagaaacaggtcacatagacgttatcaggattcagaatgatgttggacttctctgcagcaacactggaagccagaagacagtggagcagtgccttcagaatttgatggaaaagaaaatcttcaaagaatttcatacctagccaaaccatcaaacaagtacaatggcagcatgaaagtattttccaacttgcaaggtctcctagagtttacctcggatacaactttctcaagaactgctacaggatgtcttataacaaaacatgggattaagccaaagatccaccccaacagagatgcaaagtgatgtcccagaacaataactgtgcagagcagtagttagtctagatgggagcagtaatacaaagggttctaggataccagctccaggaaaaatgaatggaactgagaga

SEQ ID NO: 639747 - DNA, 558 bp, Homo sapiens
cgtattagcccattgatatggtttggctgtgtccccacccaaatctcatctygaattgtagttcccataatccccaagtgttgtgggagggacccagtgggaggtgaggtaatggaatcattgggcggttaccctatgctgttctcttgatagtgagtgagttctcacaagatctgatggttttatacggggcttttccccctttcctcagcacttctctctcctgctgccatgtgaggaggcaccttccaccatgattgtaagtttcccgagtccttcccagccctgcggaactgtgagtcaattaaacctctttttcttataaattactgagtcttggatatttcttcatagcagtgtggcaatacacccatagagagctcctagagattcaacccagtgtgaccagatgaagccccagattcctctccttatcttacaaatataaagacaatacagaagggctgttctgaaatgttagcattattacataaacacaagcccaacagatttttagcccataatgacaacggtaaatgtaaaatgtaagaactcatt

SEQ ID NO: 639748 - DNA, 558 bp, Homo sapiens
cgtattagcccattgatatggtttggctgtgtccccacccaaatctcatctcgaattgtagttcccataatccccaagtgttgtgggagggacccagtgggaggtgaggtaatggaatcattgggcggttaccctatgctgttctcttgatagtgagtgagttctcacaagatctgatggttttatacggggcttttccccctttcctcagcacttctctctcctgctgccatgtgaggaggcaccttccaccatgattgtaagtttcccgagtccttcccagccctgcggaactgtgagtcaattaaacctctttttcttataaattactgagtcttggatatttcttcatagcagtgtggcaatacacccayagagagctcctagagattcaacccagtgtgaccagatgaagccccagattcctctccttatcttacaaatataaagacaatacagaagggctgttctgaaatgttagcattattacataaacacaagcccaacagatttttagcccataatgacaacggtaaatgtaaaatgtaagaactcatt

SEQ ID NO: 639749 - DNA, 585 bp, Homo sapiens
gtttacaaatacacgttactaacttctcagataacatatgtcaactcttcctgctaatattttaaattgatctatctattcatatcatatgacggcaatcacagatctaaacaaatgacataaatgtgatcattgcaaataaaatatgagggagaggggattgatggaagcacctgctgtctgccaaaaatatttgactcatctccagaytgaggaatacagcacatgagcatgtgcagggacataatcgtctgtacgtatttagagtcctgcttagttgctcttaaaagaaactggtatttgtcattcaaataaaatgaaattagaataataattcctcatggttctttataatcaccacacttacccaatgaggtctcactaagtgtcaaaatatttcagttaattctgcaatttcttattggcttctaaaacacattataaattactaaatatcagattaacaacttttttcttttttttaatttgagatggagtttcgctcttgttgcccaggctggagtgcaatggcgcgatctcgactcaccataacctccgcctcctgggttcaagtgatcctcctgc

SEQ ID NO: 639750 - DNA, 607 bp, Homo sapiens
cacgaggtgattcacttttgcaaaataaaaataagtcgtaagaatggagatgcaatccagcagaaaaccataaaaaaatctttatgatataaatgctggatattgactttagctaaaaattgagccaaaagctctctctggggagaagagaacatgtatgtagttgaggaagagagtgtctagtataagagagcttcattttcttcatttcctatagtagaaactaaaactaactttagtggaaatatagaaatatcaaaagacacaggctacaaaaagttgaaggtagttgtgtctagggagctggaatagggatgggaagaagtctatcaggaaactgctaggctctattgatgctgctgctgctgctgtttttgtttttataatcatgtggtactacttgactttyaacattatacacatgaattactttgataaaaattaaacgatgttggattattggcataggaagaaccaatatgttgttatataaaacagctagattagcaaatagaatttatgaaacatgtgtaatattgtgtgtatgcttgggtatgtctgtatacatgtataaaaagaaaaaaaacttgagtaatacaccaaaatg

SEQ ID NO: 639751 - DNA, 545 bp, Homo sapiens
aactcaaaatagatccccagacaaaaaaatatatatcaaaaaaattatgataaaaaatcaagaaagggtaacagcaacaaactaaaaactgaaaaaaattctaggcacagcaagccaatggaactgaattgattgacagaaaggcgtgaaaaatctgtgcctaacaatggaactagaggtactactrtgaagaggtatttattatgtgttgttaggtgacaaaagtaatcgacaggacaataaggcctattttctcaaaatgtaaaaatttgagggtatgtatgactgtttctattttcctaagaaaaaactccacaaatatatatgcaaactactggtaaggagaaagagggcaaaagttagaaattgtcatttttaattcactaggcattttgggattatttgacattttgaaaaatatatatatatgtgtgtatatatatgtgtgtgtgtgtatgtgtttagtactctaaaaagaacttcaaaactctagaaataaaaatgtcaaaactaaaataagtattgccatccatgggaagtggctc

SEQ ID NO: 639752 - DNA, 577 bp, Homo sapiens
catttttaattcactaggcattttgggattatttgacattttgaaaaatatatatatatgtgtgtatatatatgtgtgtgtgtgtatgtgtttagtactctaaaaagaacttcaaaactctagaaataaaaatgtcaaaactaaaataagtattgccatcmatgggaagtggctcatttatttctttgtccccagtgtcctaggtcaaaagaacagaactcagtgaatactttcagtgaactcaacacacaaaaatgaatggccatggcatctcatcagagtgcagctaatgacctacctacatgagagtgaagcttttcttggacaccaaagagagattgcttgcttccaataaccccaaaatgcccagcataacactaagcattcagacattttaaaatactttttgaatataggagacaggtaagatggaaaagtgaggaatcatttaattttcagttttaaggacaacaaaaactgagacaaaaaaaatgtaaccctaggtaaaagcaagacactagcatttttatatcaactaaaactgcaagttcctgacatttaaaatgtttggtactag

SEQ ID NO: 639753 - DNA, 578 bp, Homo sapiens
tacagtcacagcatagttttattcttcattccatggcatttgttctctgtaaattcatactatggccctattttagaacattagatatttctcacactgttgcttgtaggattttcagtgaaggcacagatgttatgattgcttctaaatggctggcattcaaacaaacgtttacctaagttatatattttaccatcctaaacttcattgtcttcagcagttcaaaaacacaaatacatattatgcaaaactgagtttccaaaggacaacaagagtattttagaataagtggaagccatctgaattatggaggatataaatgagtactcttcgaagtggcyggtgagttagggctggtactggtttccaataccagttacaggagaagttacatactgaaattgatgcaatgctacctttaggggagtcaaatatcaactaaaaagaaatacaagatctcaagaacaggatgatgtacaaaaaaatggttagagcgcctgacaaaaagaaagatataaactgatttaagcacttaacacaatgagctcacatgacttattcaagacctaacaggtata

SEQ ID NO: 639754 - DNA, 671 bp, Homo sapiens
atttaattaagcatcagtatattctgatcaacttgactatgccaccattcagaagccctactcaacactgtatataggtgcaattgtcttccatgaaggatttgtccttgggtaatttgaatttgaaaggactaaccttatagtgcwtatcaacaatcaaactaatgttagaaaacacatttcacactcttctcaaatgcaatttatacaaaagattattttttaggtaattatttagaatgaacattcagtacatacaaaactctcaccatttggttaatgtatctgtgattagataaaagttggcaataaaggattttatactaatcactttccttgattccaataaggaagtaaatgtgagaataaaaactggaaatagttttttaaaatattatttaaaaataatttttaaattatgttatttaattattgaaacatcttttatatcatgcattttcttttgataatttctgaagttaatcactagaaagcatttaattcagataaaataataggtttttaatacattcaatatttataactttcaaatgagtgctttcctagtttatatttattccattctaactcatatttccacagcaatctaaatgtcagggttggccaggcacagtggctcatgcctgtaatcccagcactttgggagacca

SEQ ID NO: 639755 - DNA, 636 bp, Homo sapiens
tgctattatactttagtcgttatcttagtggtctcttctggatatttcttcaatgcatttgaatagcagaatagttaacatgacaaatgtccttgatcagcctcaaaagttaaattactgtctaccaaaaaggaaataaaaatccttttgtggtttctgttttataatcgtaaatctattgcctgccttgccaaagccattgaaaatgtattagtttgaggaattataatgaaatataattttctccctattttatatcattaaatgatcattaaaacacattttcatggtttctttatctctttatctttgcagcttttgtcatttcttcagggcttatttactttttaccatgagggatatgaacttgcccaggaatttgcaccgtataagcaacagctgcagttcaacttgcagaatgtaagagtatacctgttcttactgtctctcagcaaatctgcaaatctgatttcacagggcaactaattacaatttttttctagctgctagtggaaartacaacccacaaaaccctaatcttagttagaaaaatttatactagcaaattttataaaaataaatattacccagttggagacacctgaaagtttattaacttttgccttcatccagtgt

SEQ ID NO: 639756 - DNA, 620 bp, Homo sapiens
aagccaaagcctttactgacatgaatcatcctggtgactgtgataatagttttaccctctggcagcattattttatttaattttgtgccctgtcagttttcaggcrtataattggtaatcatggtaatgtcaaattggcgctctttacttcctgaggttcggaaataagtaccaaagccaatagagcactattataattgcctcacactaaggacatttttctcacaaaaatattaaaaagccattcggacttgtataactggagttttttgtgcatgttacttgtcattaagtggaattagttggactattttgactacattcacgctttcaaaccggatatgccctaaggcatcattctcgtgctgtttttggtgaagaaacagttgtgtgtgagtttccagcccatcgtggaccaatgtgaaaggcttttgatatactgtatgtgcaacatgattaagtgatgctcatttgttggagagcaggacacacacaaatttgatttgatccagcagactctgcaaacatttattactgcatggacttgatgatagaggaacactggctcaagagatctgggttttagaatgtttctctctcataactacctaccttggcca

SEQ ID NO: 639757 - DNA, 620 bp, Homo sapiens
aagccaaagcctttactgacatgaatcatcctggtgactgtgataatagttttaccctctggcagcattattttatttaattttgtgccctgtcagttttcaggcatataattggtaatcatggtaatgtcaaattggcgctctttacttcctgaggttcrgaaataagtaccaaagccaatagagcactattataattgcctcacactaaggacatttttctcacaaaaatattaaaaagccattcggacttgtataactggagttttttgtgcatgttacttgtcattaagtggaattagttggactattttgactacattcacgctttcaaaccggatatgccctaaggcatcattctcgtgctgtttttggtgaagaaacagttgtgtgtgagtttccagcccatcgtggaccaatgtgaaaggcttttgatatactgtatgtgcaacatgattaagtgatgctcatttgttggagagcaggacacacacaaatttgatttgatccagcagactctgcaaacatttattactgcatggacttgatgatagaggaacactggctcaagagatctgggttttagaatgtttctctctcataactacctaccttggcca

SEQ ID NO: 639758 - DNA, 620 bp, Homo sapiens
aagccaaagcctttactgacatgaatcatcctggtgactgtgataatagttttaccctctggcagcattattttatttaattttgtgccctgtcagttttcaggcatataattggtaatcatggtaatgtcaaattggcgctctttacttcctgaggttcggaaataagtaccaaagccaatagagcactattataattgcctcacactaaggacatttttctcacaaaaatattaaaaagccattcggacttgtataactggagttttttgtgcatgttacttgtcattaagtggaattagttggactattttgactacattcacgctttcaaacyggatatgccctaaggcatcattctcgtgctgtttttggtgaagaaacagttgtgtgtgagtttccagcccatcgtggaccaatgtgaaaggcttttgatatactgtatgtgcaacatgattaagtgatgctcatttgttggagagcaggacacacacaaatttgatttgatccagcagactctgcaaacatttattactgcatggacttgatgatagaggaacactggctcaagagatctgggttttagaatgtttctctctcataactacctaccttggcca

SEQ ID NO: 639759 - DNA, 520 bp, Homo sapiens
caccctcccacccccgctgctgcggtttcacaccctccaggtattccaacagtgggggctcctgaggaaaggcccacccccgccaatctcaacagcatcagctctgggagttgttgggtgactctaaggccctactaagaagttcactcatgctctcctgtatctcctgcagttggccccacctggctggctggtgtgtcctgaggaccaggttcctgtgaaggagggagcggagggctggccagggtsgggcactcccaggggctacctgtggatcagaaaagagaccctcagagagcacctggtaccaccacaagtccatgttccctgtgtccccagccatgggccacacatgggcccactgcaagaaaaggcagtctttggtgggccccagagccacttgggcctgtcctccctgatccctgtgctcaccctgggggacttctgagcacacctctgcagcagctcctccttggttaagaagtggtgaccattaggattctgaaaccaaggtagaaaa

SEQ ID NO: 639760 - DNA, 520 bp, Homo sapiens
caccctcccacccccgctgctgcggtttcacaccctccaggtattccaacagtgggggctcctgaggaaaggcccacccccgccaatctcaacagcatcagctctgggagttgttgggtgactctaaggccctactaagaagttcactcatgctctcctgtatctcctgcagttggccccacctggctggctggtgtgtcctgaggaccaggttcctgtgaaggagggagcggagggctggccagggtggrgcactcccaggggctacctgtggatcagaaaagagaccctcagagagcacctggtaccaccacaagtccatgttccctgtgtccccagccatgggccacacatgggcccactgcaagaaaaggcagtctttggtgggccccagagccacttgggcctgtcctccctgatccctgtgctcaccctgggggacttctgagcacacctctgcagcagctcctccttggttaagaagtggtgaccattaggattctgaaaccaaggtagaaaa

SEQ ID NO: 639761 - DNA, 328 bp, Homo sapiens
aacatatcatattaaatgaagccccaatatggcttgcagctgaaaggaaataatgctaatgtgcaaaaagaaaacatttgaaggtataaaaaactcagtggtaaaagtaagaatatagaaaaattcagaataatactttaactgtgatatgtaacttacttatatcttaagtataaagactacaagacaaaactattaaagaaaataataataatcatgacaattggtaaagagataggcaatacaaaaagatgtaaatcaaaatatcaaaaagtcaaaatttgtgtgtgkgggggaatggtgttaaagcatagtttatttttgttaa

SEQ ID NO: 639762 - DNA, 565 bp, Homo sapiens
taagttttgacaactgtatgtgtcatgtacccatcactcaataagatctagaacatttctgaccctctggaaagcttcctgatgatcttttccagtcaattcaacacattcctttctcactccccaccacccctcccctccatcacagagccaaccactttcttatttccaccagcatagacctgttgtgcctgtttgtggactttatataaatggaatcctccaatctgattttttttgtgtgggtacatacattttgtgtgggtatatatatttataggatacatggcatattttgatataggcatacaatgggtaataattrcatcagggtaaatgggatatccatcacctcaagcatttatcctttcttttatgtgacaaacaatccaattatactcttttagttatttttaaatatacaataaattattgtggactgtaatcaccctgttgtgctatcaaatagatcttattcattctttctaactaactacatttttacactcattaaccatccccacttctcacccccctgactacccttcccagcctctggtatcca

SEQ ID NO: 639763 - DNA, 565 bp, Homo sapiens
taagttttgacaactgtatgtgtcatgtacccatcactcaataagatctagaacatttctgaccctctggaaagcttcctgatgatcttttccagtcaattcaacacattcctttctcactccccaccacccctcccctccatcacagagccaaccactttcttatttccaccagcatagacctgttgtgcctgtttgtggactttatataaatggaatcctccaatctgattttttttgtgtgggtacatacattttgtgtgggtatatatatttataggatacatggcatattttgatataggcatacaatgggtaataattgyatcagggtaaatgggatatccatcacctcaagcatttatcctttcttttatgtgacaaacaatccaattatactcttttagttatttttaaatatacaataaattattgtggactgtaatcaccctgttgtgctatcaaatagatcttattcattctttctaactaactacatttttacactcattaaccatccccacttctcacccccctgactacccttcccagcctctggtatcca

SEQ ID NO: 639764 - DNA, 600 bp, Homo sapiens
tcttgcatatggtaagttccagaaaaaaataatttggaaaatgtttatttagccattgttatgtttaagacccaagcaatccaaagatgaataggacaaaatccctgacctcaagcaactgataatattgtttagaataaagcaagatctccgattataacatggctagaatgctgtcagtgggatatgggaaaggatgataacagctagcacaaagtacacaggtactatgtgctttatgcatattaatatttcattttcatagtatccctaaatatagatattactattattcccattatatagatgaagatattggggcatggagagattgagtgctttgcatcatcttctctgttcctctccaayttactatcctctaatattcaagctcctctttgctctgttttcatcacagtagtctcagtttctctaggtgggtcccctacctcctgcccaggactttgcagacactatttcctctgctggaaccattctccctcctctaagccctgttatcgtccactcatttattagctctctacaaaaacatcacttcctcagggacttccagataggtacaatctgactgttataggt

SEQ ID NO: 639765 - DNA, 589 bp, Homo sapiens
atgtgcttcctgaaggaaatactcaccaccacttatgaaatggtctgcacacacacacacacacacacacacacaaatgtgaatctgattaagtctctagatttacctacctatttgyaaaaaacatagagaacagtgaaacatgttcaccatgacaaatgaaaaatggcatcatgaagatgagtcagcaacatcaaggctgtgggaaatcctataggaataacaacttgttttcttcaacaaataattgcaaggagaggaaaacagatgaagggtgtattactagataaaaaagacatattattcatagaaatgaaaaacaatgaatggctcttaattgaacctgattcaaacaagctctatctatctatctatctatctagctagctagctagctagctagctatctatctatcttctatctatctatcatttatctatcatctatctatataaagaaaaaattcatggacagaatattttaaatttaaaaattatgattaacatttaggtaaaataaattcattatagcttttttgtatttctttcagaaagacatactgaaatacctatggatgaaattacgtct

SEQ ID NO: 639766 - DNA, 589 bp, Homo sapiens
atgtgcttcctgaaggaaatactcaccaccacttatgaaatggtctgcacacacacacacacacacacacacacaaatgtgaatctgattaagtctctagatttacctacctatttgcaaaaaacatagagaacagtgaaacatgttcaccatgacaaatgaaaaatggcatcatgaagatgagtcagcaacatcaaggctgtgggaaatcctataggaataacaacttgttttcttcaacaaataattgcaaggagaggaaaacagatgaagggtgtattactagataaaaaagacatattattcatagaaatgaaaaacaatgaatggctcttaattgaacctgattcaaacaagctctatctatctatctatctatctagctagctagctagctagctagctatctatctatcttctatstatctatcatttatctatcatctatctatataaagaaaaaattcatggacagaatattttaaatttaaaaattatgattaacatttaggtaaaataaattcattatagcttttttgtatttctttcagaaagacatactgaaatacctatggatgaaattacgtct

SEQ ID NO: 639767 - DNA, 606 bp, Homo sapiens
atatacaagtggccaacaaacctatgcaaaaaagttcatcatcactaatcatcagagaaatgcaaatcaagaccgcaatgagataacatctcacaccattcagaatgattattattttaaaaataaaaaatagcagattctgtcaaggctgcagagaaaagggaatgcctatacgttgttggtgggaatgtaaattagttcagccactgtggatagcaggttggagatttctcaaagaacttaaaacagaactaccatttgaccctgcaatcccatactgggtatatactcaaagaaaaacaaaacattctaccaaaaagatacatgcaaatgtatacrcattgcagcactatgcccaatagcaaagacatggaataaatcctggtgcccatcaatggtggattggataaagaaaacatgctacatatacaccaaggaatactacgcagccataaaagagaatgaaataatgtattttgcaacatggatgcagatggaggccattatcctaagtgaattaacgcaggaacagaaaaccaaataccacatgttctcacttataagtgggagctaaatattaggtactcatagacaaaaagatgaaaa

SEQ ID NO: 639768 - DNA, 606 bp, Homo sapiens
atatacaagtggccaacaaacctatgcaaaaaagttcatcatcactaatcatcagagaaatgcaaatcaagaccgcaatgagataacatctcacaccattcagaatgattattattttaaaaataaaaaatagcagattctgtcaaggctgcagagaaaagggaatgcctatacgttgttggtgggaatgtaaattagttcagccactgtggatagcaggttggagatttctcaaagaacttaaaacagaactaccatttgaccctgcaatcccatactgggtatatactcaaagaaaaacaaaacattctaccaaaaagatacatgcaaatgtatacgcattgcagcactatgcccaatagcaaagacatggaataaatcctggtgcccatcaatggtggattggataaagaaaacatgctacatatacaccaaggaatactacrcagccataaaagagaatgaaataatgtattttgcaacatggatgcagatggaggccattatcctaagtgaattaacgcaggaacagaaaaccaaataccacatgttctcacttataagtgggagctaaatattaggtactcatagacaaaaagatgaaaa

SEQ ID NO: 639769 - DNA, 598 bp, Homo sapiens
tttatccatgagccaggtattgctgtaggcactgagagtaaaagagggggattaacaggcaaagtacctgctcctattgcatgtatattctagtgggaagagccagaaaataaacaagcaaataagtaaaaagaaaaaagattatgatatgctatgagcatataaaagtattgatgccataattttgggggttgcagctacttccatttgggtggtcaagaaaggactctctggggaggtgatatttgagcttaatcatgagagraaccctgttctgtgatgatctgagggaagactgttccagaatctattatgtacaaaacgctgtgctgggaacattaagaggcagagttagataagaagaaactcgatgcccacagataccaacgtaagaattgcttgggttagtagaagctgtgagatatcattgtaagccagtagattatgagaaaccctaaactaaaaatcctaaaccataactaaaacagaaaggcataaatacagcacctgggttaggggagggaatgtggcatgtacgctacttatcttcctgaaggaatgacatgtcccattctcggaaatagcatagaaccacaaa

SEQ ID NO: 639770 - DNA, 593 bp, Homo sapiens
ttacttaggtataatgaataaattcaagttaaaaaacaaaatgaataatttactcttcacaaaattcaaaattataacaaacttaaaaaaaaattctgctgcagtaaatagtatttaatgcaagagctgtgttattatacgtgtcatgaccagggtggacattgggcctgtgaaggcctcagaaaggctccactggccttccaggacaatgtccctcttggtcacagcagtggctgtggatgaaggaggctgcagctgccctctgggtggagctgggtctctcaatgcagggggctggggcatggctgggactgggggcatttgccatcagcagctgtggtctcaggaactactggagatggcgaaggrcaaggcagtccctctggctacacacaggagaccaaaaccccatctgtcctcttctctgcctgagcaaggagaacaacgcattcagctgtgggctccagaaactgcctctggctgctgctgtgtggagaaggggctccatggagcgagcccaagggcagaaagatcagggaggtggtcgtagcagggtccagtgagaggtgatggtggtctggcctgcagcacgg

SEQ ID NO: 639771 - DNA, 392 bp, Homo sapiens
tggcaccggtgggaagggttccccactttgagttctgtgggtttctacttttacctggtgggtgtggtggggtcatagcaagcctcatgaagaaagtggggtttgaggtcaggagttcgagaccagcctggccaggaagtggagtttgaattctttctcaaaggtgggccagtggtgcatatgggagatgacaatgttaggcacagagagaagagcacagatgattgtcatggctgttgaagagaatgaaagaaaagacaaattttagaaccaagacatcatgagcccctgtgaggtactgtcttcacttcccatggcaggyacaacaaataaccacaaaccaagtggtttgaaacaattcacattgattctctgaaggtctggaggtcgaa

SEQ ID NO: 639772 - DNA, 654 bp, Homo sapiens
tatcttgtttattttttacttgcttattgtttgatatcccactttccaacccactgttgactgcaaattcctttgggggaatcccccaggattttgcccgtcttacttactcgttttttattccccagaactgtgtttggcacatagcagatagcaaaaaaagaaaagaaaaagaaaaacaaactaaaaacgttgacagaatgmatcaatcaaagaacccatgcaggagggcactgggaggaataacagtactgtaccattggcagaaaagagataagcaggaattagctagggtggggttcaggtttgcacaggtttagtttcagatgacagcagaggagccaagtagaagcttctgatagacatttggagatatagggatggagggaaatgaagagggttaggaatgtagattttagagcgatccttaaccatcaattaatgtcttattcacccttccactcttctatcaatgcatctgtcttttcatccacctatgcatgcatctgttcactgattcatcccataaacttttgagtaaatcatgagccaagccctggacctcagggatgcggtgaccaatagacagtcttggccatcaagactacacatctggagggaatgggaggggagtactagacgtaaatttaaata

SEQ ID NO: 639773 - DNA, 654 bp, Homo sapiens
tatcttgtttattttttacttgcttattgtttgatatcccactttccaacccactgttgactgcaaattcctttgggggaatcccccaggattttgcccgtcttacttactcgttttttattccccagaactgtgtttggcacatagcagatagcaaaaaaagaaaagaaaaagaaaaacaaactaaaaacgttgacagaatgaatcaatcaaagaacccatgcaggagggcactgggaggaataacagtactgtaccattggcagaaaagagataagcaggaattagctagggtggggttcaggtttgcacaggtttagtttcagatgacagcaraggagccaagtagaagcttctgatagacatttggagatatagggatggagggaaatgaagagggttaggaatgtagattttagagcgatccttaaccatcaattaatgtcttattcacccttccactcttctatcaatgcatctgtcttttcatccacctatgcatgcatctgttcactgattcatcccataaacttttgagtaaatcatgagccaagccctggacctcagggatgcggtgaccaatagacagtcttggccatcaagactacacatctggagggaatgggaggggagtactagacgtaaatttaaata

SEQ ID NO: 639774 - DNA, 654 bp, Homo sapiens
tatcttgtttattttttacttgcttattgtttgatatcccactttccaacccactgttgactgcaaattcctttgggggaatcccccaggattttgcccgtcttacttactcgttttttattccccagaactgtgtttggcacatagcagatagcaaaaaaagaaaagaaaaagaaaaacaaactaaaaacgttgacagaatgaatcaatcaaagaacccatgcaggagggcactgggaggaataacagtactgtaccattggcagaaaagagataagcaggaattagctagggtggggttcaggtttgcacaggtttagtttcagatgacagcagaggagccaagtagaagcttctgatagacatttggagatatagggatggagggaaatgaagagggttaggaatgtagattttagagcgatccttaaccatcaattaatgtcttattcacccttccactcttctatcaatgcatctgtcttttcatccacctatgcatgcatctgttcactgattcatcccataaacttttgagtaaatcatgagccaagccytggacctcagggatgcggtgaccaatagacagtcttggccatcaagactacacatctggagggaatgggaggggagtactagacgtaaatttaaata

SEQ ID NO: 639775 - DNA, 546 bp, Homo sapiens
ctgccagatctagcggccaccctcagtcctcatctgcgccggccctcccagctttcgagccggcctcgctgtctcctgattgaatcactccgggcaccacagttccctggttcctccttacagctccgggccagcccctctgaacttatactgggcgattctctctgacctcttaagtccgcaacgcttggaacwggacccacatctctttccattctgacactctctgagggagcgcagcgtccttcatgtggggcttgtgaccatcctccccccagccccagggcagctgactaccaggccctgtttccagacgtctcttcagaggtcaagccttggtagccagtggcctggacatctgcccccgggtgtctcggaggccctcagggaaaccttgttctgcttctcagagatggcgccacggttcgcttggcctgtggaaacgtgtgtgtcatgggacctggtgtgtgggtcagaggaaggactgggaggaggaggaaggtgtccacatgcgatttttttttttgagacagagtctcgctctat

SEQ ID NO: 639776 - DNA, 599 bp, Homo sapiens
cccccacccccaccttggcagcagccctatcagatcagcttcaatagttttgtatctgcctctctagactgggcactttcaggccagggaccatgcctgcttcatctctctttccctctctccctcccctcctctcctctctctcttccctgcctcttgcctccttccgtacttccacaaacatttactaaatgcctactatgtgccaggccatagggatcactagcatagggctggcacatggtaggaggcctactttctcaatgaggagttttaaaatagctcatacaagatcaaattctaacaaccgcatttacatgacatgaaaatgttttcctatttttaacttagcaccttttttggccctccaaatgataacatctctttaaggtttctgagataactttacatacaaggcatttgattctcacaacaatggtgtcagccaggcagacagaaagccctctcctcaccttccagaagcgaaaacgcggtgcagaaagctgaagtaagttgcccaaagtcacayagtgagttcgggcaaagtcaggaccttaatggaggagctctttcctctctatagtatcccctccttgtgg

SEQ ID NO: 639777 - DNA, 603 bp, Homo sapiens
cgttcataatagtctttgaggatcttttgtatttctgtgggattggttgtaatgtgacctttgttgtttctgattgtgcttatttggatcttctctcttttttcctttgttaattttgctagtggtctattgatcttgcttatcctttcacaatattaaaaccatattatggctttaatttgtatttccctgatgtctagtgatgttaatatattttcagtgcttgttttattttactttttttgttttttttttaatttattattttcataaagatggcgtcctgccatgttggccaggctggtcttgaactcctggtctcaagcaatcctcctgctttagcctcccaaagctctgggattacaggtgtttgccaccatgcccagcctcagtgcttcttttacatatttaaaaattacrtttatcattttaattgtaatcataaacaacatggttattaaaatttttgcatgtattgatctccatttagcaactatactaaacttcctagttttagtagttcataggttatcttgaatggcttgttcacataatgacaattttgcctcctttctcatttttatacctctcatttctttctct

SEQ ID NO: 639778 - DNA, 561 bp, Homo sapiens
tgcagagaggcgttcataatagtctttgaggatcttttgtatttctgtgggattggttgtaatgtgacctttgttgtttctgattgtgcttatttggatcttctctcttttttcctttgttaattttgctagtggtctattgatcttgcttatcctttcacaatattaaaaccatattatggctttaatttgtatttccctgatgtctagtgatgttaatatattttcagtgcttgttttattttactttttttgttttttttttaatttattattttcataaagatggcgtcctgccatgttggccaggctggtcttgaactcctggtctcaagcaatcctcctgctttagcctcccaaagctctgggattacaggtgtttgccaccatgcccagcctcagtgcttcttttacatatttaaaaattacatttatcattttaattgtaatcataaacaacatggttattaaaatttttgcatgtattgatctccattyagcaactatactaaacttcctagttttagtagttcataggttatcttgaatggcttgttcaca

SEQ ID NO: 639779 - DNA, 603 bp, Homo sapiens
tgttctttttgttttgttttgagatggagtctcgctctgttacccacgctggagtgcagtagcacaaccttggctcactgtaacctcctcctcctgggttcaagcgactatcctgcctcagcctcccaagtagctgggattacaggcacacaccaccacacctggctaaatttttttatttttagtagagacaggggttttaccatgtcagccaggctggtctcgaactcctgacctcaagtgatcctcccactttggcctcccaaagtgctgggattacaggcgaaagccatggcacgcggccggcaaagggactgatattcttactggggagacaattgcttaaacagataagcacgcatgaaaatttaggtagtgataaaggctataaaaataaaagaagatgtggtgattggaagtggctctctagaytggaagtggctctctagatagggtggccagggaagacctctgagaggagattgactgttgtaaagccagccatgcgaagacctgggcagacaggcagcatatgcaaaggcgctgaggtaagactgaattgggagtaatgctgcaggaacaggaagaccaccatgcgtctgc

SEQ ID NO: 639780 - DNA, 564 bp, Homo sapiens
ctgccatccaaagcttccataacttcctaagggtaatggattttttttcagcccatctttcttccccactcatatttgcttgagaattccaaatggattctatttactgtaattactgttctaactgcagctcacttgcaatgcatcaggttaatgttaacaagatactcagcggatgctggtaatgtgtattcattgttcaaactctttacccaccccctttggtgttgtctcaattctattctctgaacccaaaggggagggagcaaagccaagaaacacgggtggatttctttctgttttattcttctctaatgtcatgggctttttctcaatggataytcattgttcttgggttttcctattcctgaatttacgtgacattattacaaatgttatgctttgcttaaatactgatttacacacttccctctctcatttttccatgctactagtgtcattaaattccatgttatttgattactaataacaaaaattaacatcaacaaagtcctgacaatttgcaagacacgtttcacctatgtaatctctataacaagcgaa

SEQ ID NO: 639781 - DNA, 576 bp, Homo sapiens
tgaaagagaaacttctccactcagcaactttctactcaccctctttcatttaacaagcaatgttgattgcttactgtgaacgtcagactcagattacaattggtggctgggaagagtgaaaagagcatgggcctgatccatggtcaaatcccagctctggctyatgtaagttgtgtgacactgagaaagttacttaactcctctgaccatcagcttctttatctgcgaagtgaagatctttatgccagcctttcagagctgatgtgagaattagcatttctcaaacacctagctgaggccttcaagtcagtccttaagaatactcactgcttttaccatttctactactaatcatggttaataagacatgctcactgcactaaaaaggtccaaagtgttactggtggatgggaagcctgttatctatagtgggatccagtgaggaagaggtcaactctaccgggatggaatgggcaagacagacttcaagggagactcatgagcacaatcttttcaaaacaaaaggtctgtggcaagaggcttaaaacgtagatacatcctgagaagtacaagctt

SEQ ID NO: 639782 - DNA, 608 bp, Homo sapiens
atagaaaaacaaaaacaaggaagtcagctcttcttgaaagagaaacttctccactcagcaactttctactcaccctctttcatttaacaagcaatgttgattgcttactgtgaacgtcagactcagattacaattggtggctgggaagagtgaaaagagcatgggcctgatccatggtcaaatcccagctctggctcatgtaagttgtgtgacactgagaaagttacttaactcctctgascatcagcttctttatctgcgaagtgaagatctttatgccagcctttcagagctgatgtgagaattagcatttctcaaacacctagctgaggccttcaagtcagtccttaagaatactcactgcttttaccatttctactactaatcatggttaataagacatgctcactgcactaaaaaggtccaaagtgttactggtggatgggaagcctgttatctatagtgggatccagtgaggaagaggtcaactctaccgggatggaatgggcaagacagacttcaagggagactcatgagcacaatcttttcaaaacaaaaggtctgtggcaagaggcttaaaacgtagatacatcctgagaagtacaagc

SEQ ID NO: 639783 - DNA, 608 bp, Homo sapiens
atagaaaaacaaaaacaaggaagtcagctcttcttgaaagagaaacttctccactcagcaactttctactcaccctctttcatttaacaagcaatgttgattgcttactgtgaacgtcagactcagattacaattggtggctgggaagagtgaaaagagcatgggcctgatccatggtcaaatcccagctctggctcatgtaagttgtgtgacactgagaaagttacttaactcctctgaccatcagcttctttatctgcraagtgaagatctttatgccagcctttcagagctgatgtgagaattagcatttctcaaacacctagctgaggccttcaagtcagtccttaagaatactcactgcttttaccatttctactactaatcatggttaataagacatgctcactgcactaaaaaggtccaaagtgttactggtggatgggaagcctgttatctatagtgggatccagtgaggaagaggtcaactctaccgggatggaatgggcaagacagacttcaagggagactcatgagcacaatcttttcaaaacaaaaggtctgtggcaagaggcttaaaacgtagatacatcctgagaagtacaagc

SEQ ID NO: 639784 - DNA, 455 bp, Homo sapiens
ccaaataaaatgaagaacaatgcctgatgtcagttccctctctcagtggcataaggaggttgcaagcaaagactgccatggaatagctcaccagacaccatcttgatattaagttaacatgtcaaatggtcccaagtctaagataataagactttggcctatcataccaaaggccagccaaaactctgataaggatgatatctatcttgtgaataaaggagagcagcaaaataagttgttttgggggtccaataggtgccaggctctagcctgaatacgcactcatatggcctccctgaattccctagcttctgaagaagatacgatacacctattttasaggtggctgaataacacccatggccagaagaagagaagagaaggcaggactgaatctaagccacataacttcagagttctttccactcaatcaaagttgccctgtagttaacaac

SEQ ID NO: 639785 - DNA, 501 bp, Homo sapiens
taaccttcatgactctcccatgaacctccctcctagtgtgtacatggtggccaccacacacgtctgctcacccttctctagacaggttctgcccatccctgcctctacacctttgctcatgctcttcctcttttggagcaatccaaacccttccaggttctacccctgcccacctgtgtgaaacatkgccctgcaacttaagcccttgcagccttcttggaattccgtgatgttcagataaatggccataattttgattttctttttccctgggatggttttatttgcttcagggtcctgaatgagtctctgaactgttcaaggcctccacatactcacaaggaggagagcctccaaggcagggctggtgcggaccctcaccctgctatcttcatgtgaggagttcctcctagccttcaaaacccacaggaagagctccctcctccaggaagcttccctattaagctggccttgttctctcccatctacagctccccacag

SEQ ID NO: 639786 - DNA, 432 bp, Homo sapiens
gtccaaaaacgaaacagccaaccttattaatgaattttacccacagatatgctggtaaatatttgacaactgactttccagaagaggggaaaaaaaaggcttgatttgtagtgtttgctgatttccatggtgtaaatactccaaccatggctggtttcaagctaycaagttgacgtcattgaaggtggagttggaaagagatgagtgataacagccatcatatagcatttccacctatttacctgttttacacaggtaaaatagacatcagtaacctctggggtagagtataatgtagtaaaataaccagaaactggtgagtgtcaagtacttagtccctttgtttttaacataatttaagtgtgaatttatgcaacttaatttttaataatggctgtttaataactagctcacagaattcctgaaaaatta

SEQ ID NO: 639787 - DNA, 607 bp, Homo sapiens
tacctccctccctccatgtgtttctcacctaccttctactgcagtggaggttcctggcagggcaggagaacatagctcatcgtagagcatggagagcccagagcgcatacgcaaggcacagttcatgggttccccttcctcttcccttctgcaccctctgactcctgaaaacatccccaggagtgaaactggatgcaagcgtttgcactcagtgtttacctgtggaagtttcggtcacccacttaaccaagatccctgagctgtgcatgttagttgctttttcatcatgtctccatagcatggaattactgaggtacagctgcatgatgcaaactatctaaattgtgggcaatggctcctgttgcgacaaacacagggtgtgrggagggctgcccggctttggttggaggaatcttactttaaaatcaatcaaaatagcagttgagaaagaaataatgacgttgtaaattttttacataaatgatgtgacaggtgagttatttctagtcctcacgagcagctcctcagggtaactattgctatcccacttcttggatgtggtaaactaagtctcaggaaagttgagaagcttgtccaatgttacact

SEQ ID NO: 639788 - DNA, 692 bp, Homo sapiens
tgatcaggttggggtaccaccatgttcaagagcaggaattttgacaaagtcacatttgcaaaaccccacatcatcatagttggattgaggcagaatgctaggtgggagtggacaacacccccaggtgaattcagaatggttcaagcgattccctagaaaactggatagggattgtccccaggttaggtttcacaaacagaatgctctcacagcaagtcaggctgatgtaagagttggctatgaaagtggcctcaggacagaaggagaaatattctgaaccaaatctgcaacacaggcatctttggggacaacctaaaagaatgtgtagcattggagatcatgccattgctttgggaacttccaggtaagtctccagtcctcagacaaggcatgtgccagttactgccctgtttagtggrccatttaaaaggacgctgcccacagtcactcaatgaagcatctcgcaccatgtggaatgtggcaccagcacctcatttgctctgtctcctagccttttgttgggggcagagtgaaagaagagaagagggtctctggcctgggacagatttttcttgttggtaaaattaagataacaccttcccacccaattccctccagcagcatactgaggtctgagaagtagattctcttactagaatatggtagacatcaaaaaaaggaaatctctcata

SEQ ID NO: 639789 - DNA, 586 bp, Homo sapiens
ggtcaacatggctgagccctgattggtaaaggcaggtgagctctagttggttcaagtgagctctgaaattctaaaagttaaaaaggtttggctttggtttttagggaactcttgtcaacaaatggcttcttggctctcttttaaatgtagacccagttagccgctagggatccatcttgaaggattagctctttcaggttcacatttgttcacaacatcaaataaaatcatacatatggaaattcttcataacctaccaacacactgcacacatagaatattattttattcatgccagcttatctttaggatagacttaaacttttcagacttcaaattctttttttktttgtttgttattgttttggggcttctttgcatatgacgtagggagaattatcacatatctgtgcaactttaatttttcagcaacacataatcagaaaagggatggattgagggtctttgttttatcctctgaagctactgtatttcagacctctttggtacacaggaacacttaagtatttggaggcaggctgatgggtcaccactgagtctttcttttctaagtaaaaatcaccag

SEQ ID NO: 639790 - DNA, 610 bp, Homo sapiens
agttctctgctggactagttcatgtccctaccacaatgtcagataattattttttaagtatgaactaaattcatcatcagctccaaacccttcaatgaatcctcatccatcgagcaagttttcctaggttctaatacgtgtatcttctcttcaccccttagacttagttttgtcacactcccagtgttgctagtctctgggggcttcagcactgcttcttgagtccctgtccttatccacacctttgtaaatagtccattcattgaactcttcagtcaccccttttgagagtgctgtctatttcctgcagagaccctgaatggcacaaatagactactttgaaaagaagaagaaagaaagtacagttgcttttccagatagcaagatatgttatttaaacygtgtgttatagatggaaaataaatatcgcaacagaaaaaaaaaatacagagactatgtatctgtgggatttcaaatatgctggaagtggcagtcaaatcaataggaggaaagaatagactattcagtaaatggtgtcaggacaatttggttagtcacgtagcagaataaaacctgtatcatagaaatgcaagtaacatatgtttactta

SEQ ID NO: 639791 - DNA, 618 bp, Homo sapiens
tgtaaccaataggtaattttctctttgggcactaacattaggtgttaattccctggtgctgctccactgtacggtgcctggcagtcaacttccctgtctctgccataytcattgtaagctccttgaggcctgggaaggtactatattctttcttgtgtttctaggcccagtagggtagccagaagttaaaatagatctaaacacaggagaaatcacatcacaataaacagtggatggatcaatgaatgaatgagtaatacaagtcattatagaaaagttcctatcattcattttatagctctgccagaaggctatatatcagtgaaagcctagtcacccattcacagctcccatttgagacttatcaatattttcttcctccttggatcagaaaataataatacaataggtatcatttacatatcttgggcaaaaatgtgctacaaaagatgaacactaaactttggaattatttgaaccaggattcacatcctcattcttatacaaattggctggatcactttcaacaagacttttcttgggcctttggctccatttccttatctgtaaaattgggaaactaagggctaattcacatggcaaaattgagaagatgaa

SEQ ID NO: 639792 - DNA, 618 bp, Homo sapiens
tgtaaccaataggtaattttctctttgggcactaacattaggtgttaattccctggtgctgctccactgtacggtgcctggcagtcaacttccctgtctctgccatactcattgtaagctccttgaggcctgggaaggtactatattctttcttgtgtttctaggcccagtagggtagccagaagttaaaatagatctaaacacaggagaaatcacatcacaataaacagtggatggatcaatgaatgaatgagtratacaagtcattatagaaaagttcctatcattcattttatagctctgccagaaggctatatatcagtgaaagcctagtcacccattcacagctcccatttgagacttatcaatattttcttcctccttggatcagaaaataataatacaataggtatcatttacatatcttgggcaaaaatgtgctacaaaagatgaacactaaactttggaattatttgaaccaggattcacatcctcattcttatacaaattggctggatcactttcaacaagacttttcttgggcctttggctccatttccttatctgtaaaattgggaaactaagggctaattcacatggcaaaattgagaagatgaa

SEQ ID NO: 639793 - DNA, 569 bp, Homo sapiens
tgcagcctgtcaccccctgagttaagtagcggatgaaatcagcatgtataatttctcatcttccaaggttcagaggggcgcattacatttcagcatgattaacactgctttcactttttttttcttttgcatttacccttcccaaggaccagtgatagggttcaaagaaatggagaggaacagaggtgggcacttcaatagaacaggtgctcaactttaagtgaaacactcaaacaattgatagccagggaaagagatcttcctttyctcattctctgccagatttagcaatttaccagcaagccttcacaggctaagagagaggacagggtgaagaaatagtcaacctcttaaactcaggctcatgtcactcatccaaccatccctctgtccatcctacaagctcttccctctctaccagcttaacttttattcatctgtagaccttatcccatatccttccagaaccttctctcaacggcgtgagtggcaaattcccctcgagatttcacagctctgagtagatcacttaaagcactgaccatggtggcaaacatcacctttatttg

SEQ ID NO: 639794 - DNA, 568 bp, Homo sapiens
tcactgttttgaaacggttactgggctgcattttctgtcttcctttttctatcttggagagatgggcaggaatcagggaaggcctggggagtggagacaaggctagcaggaaaatgaggaaaccaagggtgtgagtacctgcctggtggagttgtgttgctctcaattggtttgcttgtttgcaggccgcagggcagcagtgtcttctcacctgcagagtgcaaagcgcatttctgggctggcacagaaacatgcttgccctgctttgcctacaggcatcttttgcacataaataacttaaaagcaccaaactttgcaggggaaatgtttgcatgtggcttgcgtctgagaagcacaggcatacacagcataaatgttgaaggattaaacacacacaaacacatgcccgcatgcgcacacacacacacacacacacacacacaccgcgctcacacatacccagcaccttctaacttctgtgaggattgtwtattcccatgaatagatttaacttggtgatttttagagtcagggaatgttagggctggaaggaatgtaggagattatt

SEQ ID NO: 639795 - DNA, 567 bp, Homo sapiens
gagtttggggttacaagtacatttctgggaatagcaaaattcacaaatacaattttgtgaataggtagtccatgaataataaggactgactctaccttatttcatttacatctcactcatgcccaaaactctcatgttttgatataggaaagtaagatttaaagagaagaagtgacttgtccagtgtcagatagctgaaatgtggttcattatattatacttgggtcagttaactacagcccacagacctgttgcctrttttgtaaacaaagttttactgaaacacagtctattcatatacatattgtctatgtagctgcttttgagctacaatggcagagctgagtagttgcaacagaggtcatatagcccacaaagcttaaattatttacagcccagccctttagggaaaagtttgttgactcctgtagtactccagattttctctttgagttcacagttgagaaagttctctcttgtctcaataccagaattttttgtgcttttccctggcaatttgtctttccctcttgaacactgggaattttatacctgattatatttcct

SEQ ID NO: 639796 - DNA, 588 bp, Homo sapiens
gattatatttccttctttacactgatgttaagaagtttaaagcctagtaaaactgcagattcctagcactcgcttgataggaacagaaaggatcttccattttggttacactagcaggatgttagattgttttggcacagtcaaaaactcaaacaatttataggtgatacaggtgtytgggatttttcagtaatgaagtggtacatctggggcaggacctgggctctgtaagaatcatagttttccctaatgagacaaatacctactttctgtgaataatctttttgttttcaacaaactacagtttatcaagaatttattatgtgccagatactggccttaagtgctagtcataccttatataatttattctctaaggaatatattgtataggttaagagagtctataccatggaggtaaagatgattatcctcttttacagatgaggaaatgaaggaccagagatgttttaatttgtctaggtcacaaagcaaggaaataggagatttcaaatttaaagccaggtgtgtctgactctaaaccttagtccctactatatactccattattctatatagtttacctag

SEQ ID NO: 639797 - DNA, 424 bp, Homo sapiens
tttcatctccaaacacatagcrctcctcctcctaaagaaaagcaaaccaaaaaaattgtagaagccatcacgtcctacaaaacccacagctctctctctctgtatattcccagcccagcctccagacccaaggaaggtgggaagagctgtccccaggggttcctggtgtggggttccatatagagccgaagatactgtgggggctcattcccaagccaagccaatctattttaggacatttccatcatccccaaaagaaaccaggatgcttcccccagcatttcatggaatcacagcaagcatttcttgaaggaattcacaggaacaggcctagcatgggaccgggaacagagtttgtgtctaatgaatgtccattccacagcccctggtgcagggtttggtacaggtttgtggggtcagatct

SEQ ID NO: 639798 - DNA, 517 bp, Homo sapiens
ccatatgtgcccctccagcccatctcctaccacctgcatgcatcctgtgctcaggccacctcttctgcctggaatgctcctgccttccttcattcactgctctgtctctcatatccacaacatgcccactcctgcttatcctttaaattgcagctcagtggttgctttctacaggaagactttgtcactgatcctgactagatgaggagccatctgttatgtcttgctcatcttggtcactccacaggcccttagtaattgcacagtgaccagatggatggatgaatgaggacatgattagtaacgtaactgagtttccacctcactctcaagccctattcccagaaagccctatcaccsaatgaaagcctgaaatctgaaagtctcctgtgtgaggctcagagtccaggagccacaaatgagacaggacctttaaaagttaaaatccaagagacaaagtcattgataaacagcaggattcctaacaggtccagacaaacctgacatggacagtctt

SEQ ID NO: 639799 - DNA, 577 bp, Homo sapiens
ttatttttgtagtactttatattttgcaaggttcttttgtatttgattatttcattagccatgcattaaagacaggactaggattgctctctctgggacaaagagaaatatgatgtgacttgcctactgtgagcccctgaaggcctgacctggagacagcataagccatcctggcaatgatgtgaggtcaaggtatgcaaaactggggatgcctgggagagctcagaacctctttctgcctacaggtccatgcccattatctaccttggtcctagagggcctgccctatttagaacattctgcctggttcttgccagaaaccccattggtgtgcyagcctctggtccctgtggctgcagtcattggctcagaacggggtccaaaccgggtaagccattgagcatcagagtcctgcctcacagcctaggtggacatgttgcctgggccttcaaagccacccagacagactctctaggggtgaggaacaatagccatctcgcatgcattttccaaacaccccttagtcgctgcacttcaactctagccaacagacatttatgaagcacctaccatatac

SEQ ID NO: 639800 - DNA, 583 bp, Homo sapiens
atttattacttttgtaaccagcaaaaatgcctaataaaaatgattgacaggtctccatttgagtgtcaccttttctgggaattattgtttattcctttgcatctcaaagagtctgaggctccggggttagacagcctcagcacgtgtgcttaccctgttggggaacttgttgcactgtgttctttctgtaaatcggctcttccattagtctgtgagctccgagagggcaggaatcatggttattcatctctcatttccagtgcctagcacaaggcttgcatacataactgctcaatacatgcttgttctttaaaggaagagagggagggaaggaggcaggaaaacaaaaaggtgaaggacaccagaattctcaaatgttatacctccrtggatcccttgtattatttcctgtccccaagatcctttgtttattaagcttttgaatctactgtaccactgatttttcactcggtagtttgaatttttctgttttttagtaatcataggccttataaatcccaatcagagcttctcagggccaagtctggcatatgccacctgctgtcccaagtctgacttgggc

SEQ ID NO: 639801 - DNA, 589 bp, Homo sapiens
tctcaaatgttatacctccgtggatcccttgtattatttcctgtccccaagatcctttgtttattaagcttttgaatctactgtaccactgatttttcactcggtagtttgaatttttctgttttttagtaatcataggccttataaatcccaatcagagcttctcagggccaagtctggcatatgccacctgctgtcccaagtctgacttgggcagagtgccccctgcctgacacctaggtcatggcatgcagggctatctccagttctctggagctgagtgtaccttctggagcttcttttaaagtggaacgatggcaaactgcaatgtctgtgggaggaggagagcaagggaacagataacataagaakagaagtgacaattgcaaacttcaattgtgtgtttcctctgtgcaggcactgtgctatgcatcaacacgcactgtcccctcagccctcacagcagctctgtgacacaggcactattacaattgccattttgtaagcaaggaaactgaggcttaaagatgcattagatggggaaactggaatttgcactgattgcagagcttaagtccagcactgcatc

SEQ ID NO: 639802 - DNA, 582 bp, Homo sapiens
ttccagtgtcccctcgagggcaggcagtgctttcccatctgccctaggtccactctaccagcctctacttggggcccccagcataccttatctgtcttccatctcctcagttctagaacctaacacactgtggcactcttttttttttttttttttttttaaagcatctgactatcttctatcacagggccaggtactcaaaatatatttattgaatacagttgaatatattctgtgatcatccctgatcatgttaagttctattgggtccatactatttagtagcctaacccaggtaggactaaaactaagccacttgtttgtgcagcagtttctgattacaagtggtttrtattcctgtccgcactcagtgaagaggagctaccactgttagtatttccataatgtgaatagatgagaaaaccaaagcatagagaggttagatggtctgcccagggtcatgcagtttgtaagttgcagtggcccacagcccagctctctctcaggaccctgagaggtaaggctggatgaacattgctgactgttaaaagcacctgaccactgagccaggtgagatgcgcc

SEQ ID NO: 639803 - DNA, 503 bp, Homo sapiens
agaaaagcttacagaaggatcaagctttcatctgagtcttaaaaatgtgttggccatgaagtactagagatggatgggaagracataggcagggggaaggtctgagcaaaggtgcatccaggaaaataaatgcatgaggacttgatgtttgttgcacacctgctgagagctagacacttggtatgcctaccaactataaactaagactaatattattgcctccattttacagatgagtaaactgaggccaaggagctccaactagctctttggctgctcaagaacagggacaaatatgtcttacttatctctgtatcctgagtacagagttccagaacaggcctctgataaatattcacggatattaaaggccataaagcagagccaggattcaaactcaaaatccccccaaggcctgtgttatccagttattggagtgagtatgaaagtgtttctaaaagaggagtgggcagtaaatgtccagagaggattgaggggaattc

SEQ ID NO: 639804 - DNA, 529 bp, Homo sapiens
caaatccttttgatccaggagcacacaaagaaacatgtgggtgtatattctccctgygactttccttttctaaagggactttcactagcaagcaacccagccatcctggctgctaatgtaacctgtcacttcaatgccccaaggccatcagcaattcacaacgtgcgtatctcctaattagccaatgaagtaactgttccatttcccttgctccctctgcctccaagttcacaatatgttctctcctgctcagcttcagctcatgtcttctgtgtctgcccagaacttccctgtgagcaaacatcataaggaaagggttatcttgggatgtaagacaggggattaaggtttctgctctgagacccagctccatctccaaacccatccttcagagttcctggggctaagccactgtggatgttggctgtccttgacctcagaactggatttttctgtctgagaacaggctgatggagtctgtgttggttataagtaaatgttttctgtaatatcaactgcatgaaagagg

SEQ ID NO: 639805 - DNA, 529 bp, Homo sapiens
caaatccttttgatccaggagcacacaaagaaacatgtgggtgtatattctccctgtgactttccttttctaaagggactttcactagcaagcaacccagccatcctggctgctaatgtaacctgtcacttcaatgccccaaggccatcagcaattcacaacgtgcgtatctcctaattagccaatgaagtaactgttccatttcccttgctccctctgcctccaagttcacaatatgttctctcctgctcagcttcagctcatgtcttctgtktctgcccagaacttccctgtgagcaaacatcataaggaaagggttatcttgggatgtaagacaggggattaaggtttctgctctgagacccagctccatctccaaacccatccttcagagttcctggggctaagccactgtggatgttggctgtccttgacctcagaactggatttttctgtctgagaacaggctgatggagtctgtgttggttataagtaaatgttttctgtaatatcaactgcatgaaagagg

SEQ ID NO: 639806 - DNA, 529 bp, Homo sapiens
caaatccttttgatccaggagcacacaaagaaacatgtgggtgtatattctccctgtgactttccttttctaaagggactttcactagcaagcaacccagccatcctggctgctaatgtaacctgtcacttcaatgccccaaggccatcagcaattcacaacgtgcgtatctcctaattagccaatgaagtaactgttccatttcccttgctccctctgcctccaagttcacaatatgttctctcctgctcagcttcagctcatgtcttctgtgtctgcccagaacttccctgtgagcaaacatcataaggaaagggttatcttgggatgtaagacaggggattaaggtttcygctctgagacccagctccatctccaaacccatccttcagagttcctggggctaagccactgtggatgttggctgtccttgacctcagaactggatttttctgtctgagaacaggctgatggagtctgtgttggttataagtaaatgttttctgtaatatcaactgcatgaaagagg

SEQ ID NO: 639807 - DNA, 599 bp, Homo sapiens
gttggttataagtaaatgttttctgtaatatcaactgcatgaaagaggaaagccaattttatttcttggatcccaataatatattgattttttttttcaragagaaataaaaaatcatttggctatgccaaaccaattttctgtatcttttggtggaggggaacaataggagtgctcacagctgtcccgtagaaataataaatgcatgtccacagtccatcattgaaagcccttggggtgaggcgtgtttcagaatttggtttgtttttagatttttgaaaggaaatagggtgcatatactgtatattatgtgatacgtctgaggctgtgctccataatcaaagccattaatttctctgcagcaaaatgtatgattgtacacactaagtaggaaagataaagacagtaaatagcttcacattacttcatgtcaggtttttcacccaatgagttataaaaaaaacccaaccttttggttttagaattttttgagtgtcaggattgataagggcctgtggctctctgattaatatttgctactttactatataaattcatagagagatgaagattgcctgtatgagactgcataaatcaat

SEQ ID NO: 639808 - DNA, 599 bp, Homo sapiens
gttggttataagtaaatgttttctgtaatatcaactgcatgaaagaggaaagccaattttatttcttggatcccaataatatattgattttttttttcagagrgaaataaaaaatcatttggctatgccaaaccaattttctgtatcttttggtggaggggaacaataggagtgctcacagctgtcccgtagaaataataaatgcatgtccacagtccatcattgaaagcccttggggtgaggcgtgtttcagaatttggtttgtttttagatttttgaaaggaaatagggtgcatatactgtatattatgtgatacgtctgaggctgtgctccataatcaaagccattaatttctctgcagcaaaatgtatgattgtacacactaagtaggaaagataaagacagtaaatagcttcacattacttcatgtcaggtttttcacccaatgagttataaaaaaaacccaaccttttggttttagaattttttgagtgtcaggattgataagggcctgtggctctctgattaatatttgctactttactatataaattcatagagagatgaagattgcctgtatgagactgcataaatcaat

SEQ ID NO: 639809 - DNA, 599 bp, Homo sapiens
gttggttataagtaaatgttttctgtaatatcaactgcatgaaagaggaaagccaattttatttcttggatcccaataatatattgattttttttttcagagagaaataaaaaatcatttggctatgccaaaccaattttctgtatcttttggtggaggggaacaataggagtgctcacagctgtcccrtagaaataataaatgcatgtccacagtccatcattgaaagcccttggggtgaggcgtgtttcagaatttggtttgtttttagatttttgaaaggaaatagggtgcatatactgtatattatgtgatacgtctgaggctgtgctccataatcaaagccattaatttctctgcagcaaaatgtatgattgtacacactaagtaggaaagataaagacagtaaatagcttcacattacttcatgtcaggtttttcacccaatgagttataaaaaaaacccaaccttttggttttagaattttttgagtgtcaggattgataagggcctgtggctctctgattaatatttgctactttactatataaattcatagagagatgaagattgcctgtatgagactgcataaatcaat

SEQ ID NO: 639810 - DNA, 599 bp, Homo sapiens
gttggttataagtaaatgttttctgtaatatcaactgcatgaaagaggaaagccaattttatttcttggatcccaataatatattgattttttttttcagagagaaataaaaaatcatttggctatgccaaaccaattttctgtatcttttggtggaggggaacaataggagtgctcacagctgtcccgtagaaataataaatgcatgtccacagtccatcattgaaagcccttggggtgaggygtgtttcagaatttggtttgtttttagatttttgaaaggaaatagggtgcatatactgtatattatgtgatacgtctgaggctgtgctccataatcaaagccattaatttctctgcagcaaaatgtatgattgtacacactaagtaggaaagataaagacagtaaatagcttcacattacttcatgtcaggtttttcacccaatgagttataaaaaaaacccaaccttttggttttagaattttttgagtgtcaggattgataagggcctgtggctctctgattaatatttgctactttactatataaattcatagagagatgaagattgcctgtatgagactgcataaatcaat

SEQ ID NO: 639811 - DNA, 632 bp, Homo sapiens
attttaatgaaattcagtttattaacytttttcctttttgattagcacattttatgtcttgtttaagaaagctttgcctgctgcaaggtcaagaagacattctacattttcttgcaaaatctttattgttttaccatttagatttaggtttgtggcccatttggaattgatttttgtgtgaagtatgaaatcgtgatcaaggttcattgttttgcatatggataaccaatagacctaacaacgtctattgtaaagaccactttttccccacggtaccacagggtcacctttgccatagatcaggtggctgatcatttgtgggtctgcttctggactcctgcagttaaagtttcaggccagggctatctgattctaaagtatatcttcttttcattattctataatagaaagaatttgagtaaatgattttggaacaatctaaggatgaaagaacataatatgctgtttttttgagggggattgttctgtgctgtttaatagagacacaacaggtactcaaagtctcaaatggcaagtggggtttggagggtgcaggtgtgtggtaacttggagggaggaggggcacagggatcctgtgtccacagactaagagagatggtgttaggaaaagt

SEQ ID NO: 639812 - DNA, 632 bp, Homo sapiens
attttaatgaaattcagtttattaacttttttcctttttgattagcacattttatgtcttgtttaagaaagctttgcctgctgcaaggtcaagaagacattctacattttcttgcaaaatctttattgttttaccatttagatttaggtttgtggcccatttggaattgatttttgtgtgaagtatgaaatcgtgatcaaggttcattgttttgcatatggataaccaatagacctaacaacgtctattgtaaagaccactytttccccacggtaccacagggtcacctttgccatagatcaggtggctgatcatttgtgggtctgcttctggactcctgcagttaaagtttcaggccagggctatctgattctaaagtatatcttcttttcattattctataatagaaagaatttgagtaaatgattttggaacaatctaaggatgaaagaacataatatgctgtttttttgagggggattgttctgtgctgtttaatagagacacaacaggtactcaaagtctcaaatggcaagtggggtttggagggtgcaggtgtgtggtaacttggagggaggaggggcacagggatcctgtgtccacagactaagagagatggtgttaggaaaagt

SEQ ID NO: 639813 - DNA, 632 bp, Homo sapiens
attttaatgaaattcagtttattaacttttttcctttttgattagcacattttatgtcttgtttaagaaagctttgcctgctgcaaggtcaagaagacattctacattttcttgcaaaatctttattgttttaccatttagatttaggtttgtggcccatttggaattgatttttgtgtgaagtatgaaatcgtgatcaaggttcattgttttgcatatggataaccaatagacctaacaacgtctattgtaaagaccactttttccccacggtaccacagggtcacctttgccatagatcaggtggctgatcatttgtgggtctgcttctggactcctgcagttaaagtttcaggccagggctatctgattctaaagtrtatcttcttttcattattctataatagaaagaatttgagtaaatgattttggaacaatctaaggatgaaagaacataatatgctgtttttttgagggggattgttctgtgctgtttaatagagacacaacaggtactcaaagtctcaaatggcaagtggggtttggagggtgcaggtgtgtggtaacttggagggaggaggggcacagggatcctgtgtccacagactaagagagatggtgttaggaaaagt

SEQ ID NO: 639814 - DNA, 583 bp, Homo sapiens
atgcctttctctagactataactattttagaaattaacccattatcatttttttctcttaaactaccaagagtaaagcttagtaataatttctattagtgagcctgtgaaaaaactaggatcctcatataaaacaaattttagaaaactttttgaccaagcttataccatgacttagtgatatcatttttgaactcttcaggatataatccaaggtttatgtgtagatatatctatatctatatagatatatagatatagatatatatagttggaaacaaggtgaaattaatatctgacactaaggaaatgggctttccagtaattgtgctcactcagtgggctaaatgcaaccatttgaaatgctagttttaaataacaggagtcagtatgtaaaatgtttatcgccttagtttctatgtcgatgtgtgggtgtgtgcaaatttatgtataaagattgaggcgacaaatgactttgccacatagggacacagatgtcctccccacacccacctcaatccctgcaaaagtacrggtattgctattaattatgtattaatagccatgtgtgttggaggcgattt

SEQ ID NO: 639815 - DNA, 547 bp, Homo sapiens
tcttgactgtattgtaaaccctgggatgtccatctaataagtattggattgaccctttgagactgrgattggaaaaaataaaaataaaatcaccactcaaaatatatatcacaagctggggtaatgatacaaaagtcaatctttctattccaaacttttggtgacccttctaaaagctcatgaagttcatctatacacgagggggatagaggcagggcaggagcactgctgtttgggctctcaaaggatttctttcatttcctactccaaattctatccctgacaccttgggctctcttcctcagttcatcgcagctgccattcacacctacctcttatctctgctcactttgtaaatggtgtttggggaccatttgccccaatcatcaggataaaaggtagctctgagctcaggaagtaaaataaagtctctttcttcagaattacagggggctggtgatgtaggtgatcatatttgctatgtgcattccccagggggtttcttgacttcactagtaacaacaattatcatattaacaacagatct

SEQ ID NO: 639816 - DNA, 534 bp, Homo sapiens
atcctcttcctgtcctgctcaccaccagattcaggttggattctccaatagcaaccaggaactaggttgggattaataagcaacctctctcccctgagaatcgccatattctgacacagaaccatgaagcttggtgttccacactcagttcccatttaactgagtctctttgtcccgttccctagagctttttcatgttcatggctgtctcctaagctaggcagacaccttcttttgggaaggaaccaggtctatttatctctgtctccacactccagtgccaggcatatggwgcattttggtaaacatctattcgccattatataaattaggaaacagactaacaaatgagtaaaaaagaaagaaaaaacttgatcagaagctccttacgggcagagcctcatctcacttatttttctctctccctttaatgctctggctgcagaaagagctcaattaaatatatggtttgccctgaactgagtgatactcaggacttgattcttaaaacagaacattaatctccagaaatgc

SEQ ID NO: 639817 - DNA, 534 bp, Homo sapiens
atcctcttcctgtcctgctcaccaccagattcaggttggattctccaatagcaaccaggaactaggttgggattaataagcaacctctctcccctgagaatcgccatattctgacacagaaccatgaagcttggtgttccacactcagttcccatttaactgagtctctttgtcccgttccctagagctttttcatgttcatggctgtctcctaagctaggcagacaccttcttttgggaaggaaccaggtctatttatctctgtctccacactccagtgccaggcatatggtgcattttggtaaayatctattcgccattatataaattaggaaacagactaacaaatgagtaaaaaagaaagaaaaaacttgatcagaagctccttacgggcagagcctcatctcacttatttttctctctccctttaatgctctggctgcagaaagagctcaattaaatatatggtttgccctgaactgagtgatactcaggacttgattcttaaaacagaacattaatctccagaaatgc

SEQ ID NO: 639818 - DNA, 534 bp, Homo sapiens
atcctcttcctgtcctgctcaccaccagattcaggttggattctccaatagcaaccaggaactaggttgggattaataagcaacctctctcccctgagaatcgccatattctgacacagaaccatgaagcttggtgttccacactcagttcccatttaactgagtctctttgtcccgttccctagagctttttcatgttcatggctgtctcctaagctaggcagacaccttcttttgggaaggaaccaggtctatttatctctgtctccacactccagtgccaggcatatggtgcattttggtaaacatctattcrccattatataaattaggaaacagactaacaaatgagtaaaaaagaaagaaaaaacttgatcagaagctccttacgggcagagcctcatctcacttatttttctctctccctttaatgctctggctgcagaaagagctcaattaaatatatggtttgccctgaactgagtgatactcaggacttgattcttaaaacagaacattaatctccagaaatgc

SEQ ID NO: 639819 - DNA, 472 bp, Homo sapiens
actcttcccatctcacccattgcttcattttgtttggatatccaatgttgttgttcccccacttctcagataaataaactgagactaagagcttaagtagactatatatctttccatgaatgatcattacaaattactgaatattaaggaccttgaatatacagtctgcacctctacgttgtcctggctaagcagctcacaacttctgcttgctcacctcctctggtgccrgggatctcactcctatgagagcaatgtgaatcatttttaaattgttctagtctttagaaagtcacctaaacttcaacccgcctgtctcactctgaaactctggaggtatacccaattccccttctacatgacaggatttgtcaaccttcaacagtgaatatagcaggggaacaaggtagaaatttcactgaacacctccaaggcaggaagttcagtgttcagtccttaccatactttttat

SEQ ID NO: 639820 - DNA, 521 bp, Homo sapiens
aagacaccagagtacctctgatgtatgggagtgactctataagcactgagaccagaaagggacaggattaattcatgaggtctgttccacctcagtctttcacataaggcctgtgtgcatcttggctcaggagaagcctagaggggacatggtctgggaaaatgttttgcacaaagaggagagactgccaactccccygactgagttataggagcccgcagcttgcagtgactaattctgcctgaaagataaggagaggttgcctaggggtctcaaagggtaactgggaatcaccagactagtatgggatgagctcttacagacagcagaccgctccctccctttcaagtgggccatctgggaccacttcctctaagcagctctctttgctgattccctgtctaagctccctgagcagtgtgctagatgctttcatggaggttatcactgtttatagatgaggaagctaaagctcaggggacttgaatccaggcctgactaacacatgtgccatgaagtta

SEQ ID NO: 639821 - DNA, 322 bp, Homo sapiens
aaattttctgggtgaccttgagccagtcgcttgatattcctgaggccaaaaggcctgaagtctttggctggacctaggttcaaagtcccagctgaaccttggacaagtcacactcacggagcctcagtttcctcaactgtggaggagaatgctgccatccagctgagagtaatgtctgctcagggcatccaaatgggctttgactcaagaccaacatggaagttgagyctactctggagattgactcagttcactttggggctagaaacccaaaggccgagccttgaagcgggagatgatggagctgtgttggcaacgcctg

SEQ ID NO: 639822 - DNA, 586 bp, Homo sapiens
gcatcagtaagccttctctgcagccaacccctagcatggatagcttgggcacaaggggatgggaatgaggagcttcctcctcctggcccctggaagagggagaagagagcatttactgaccactaagcrctctgtgcccagcatgggagcaggtgcttcacatgcattatggttaagtgatccttatcacttttcaccttatgatgcagatatttgaaatcattctattttacagatgagaacacagaggctcaggaaagtgaagcagcttggcctacggtttcacaaatggaaaatgttagagctgggtcacacacagaggtctgctggctccagagcctgagctttggctttcagggtctcagtttctcacttataaaatgggtatgacaaaaaaaatccctccttcacagtgttcttgtgagcattaaaaaagtagcaatgttaacctatataaagcagatagtagagtgttgggaattcagctgatgcttgataaaaatggccctgactcacctttttaaaaaggactccaatgcttaatatggtctaaagaaaatacagtgtagctaagtttaaaaaaaaa

SEQ ID NO: 639823 - DNA, 552 bp, Homo sapiens
tgctaacaaataaacaaaacaccctatcctgttcttggacagctgtaattgtcagttagtcattccacataagctgaaaattgcttttttggaactttcacctatgattttcctatttctggtctctggaataacaataaataatactgatctaccacaaatatttgaagatagctatcrctggttctaagccttcccttttctttctgttttttttttttggtggggggaaggggaaggtacatgtgataatttgatacattcatgtgatttgtaaagatcaaatcggtgtaattgggatatccatcatgttaaatgtttgtcttttctttatgctaaaaacattccaattattgtcttctagctattttgaaatatataatatattattataaactatagtcacctcttttcaaaggtgaataacccatttgaattgacattcttttaaaaattttagtaccttgaatggcaatttttttcttttattttttgttgatacatattaataacaatcatacatatttatggattacagtgtgatattttgac

SEQ ID NO: 639824 - DNA, 586 bp, Homo sapiens
ctggaggctggggtcctagaaaaggaaaggcaaaagactacaaaaatgaagaagtgctcattaagctgaggaatacgtccagggayagaactgggaaaaatcatagaacagataacagagtggttagggaaatgattttagacttgctagcatctctcttgttatcttggattggtcatctattcaatacacagaaaataaaggacttcctagaatgatataacagaaagatcagtagctctcttaacagacgggcttaggttttaacctcacactctgtgagtgatcttggcaagtcacttcaatttattgggcctgggactcttcatctatgaaagaggcaggatgatatctactcctagggtgttatgaggattaaatgagataatgtaggagaagctcagctcagctcagcatggcttggcaaacaggggacattcaatacgtatgtgctctttttctctcttctctcttctctttttctcataggagatagggctcacatagacctataaaggcagaattctttcacaagctgcctttaggcagagagaacagaacttggtcaagaactgtgaagggctga

SEQ ID NO: 639825 - DNA, 648 bp, Homo sapiens
taaaaaattatctttagcttttttaaaaaaaattataattttactgggattatattaattttctaaattaagttagagaaattgacatctttgcaatgttggatccccccaatctagaacattcatgtctttctgtttgttaaattttactatctttagttaattttacagttttcttaatatgtcttggacttttcctgttaattttctttcaaggcattttatcttattgtgttgctattgtaaatgctattgtaaagatcccttcttctatcttatactccaagtggttattgtttatatttataaaaaacattgatttatccatatcgattacatatccccactgtttttttttttattaacacttttattcagttgattttcttggggttattccaggttattgccaagcatttttaaatactgattttgttttccaccttgtttccaacttagtacctctatttttttctattccaattctgttgactagtacttctagcataatgttaagtaatagtgttgattatgggcaacttctttatgtttttaggagraattctcctgtggttttgcaataaagaatgatactctatttagtgctcacatatacatatattatcatattaagaaattatttaaccc

SEQ ID NO: 639826 - DNA, 521 bp, Homo sapiens
cccccacccctgtcaaccactgatttgctgctttttacctatggctttgttttttccaaattgagtggaatcatacracatgtaacctttttgtatcttgcttatttcttttagcaaaatgcttttgagatgcatccatgttgttgtatttatcagtagttgtttctttttattgttgaggagtcctttgtatggatgtactatggtttgtttctccaacatccatttgacaggcatttgggatggatctaggtttcagtttgctctaaacaacctacatgtctttgtgtggccttatgtttccatttctttggggtaaatatccaggagtgaaaatctgaattgtatagtaagtgcatgtataactttataagaatttgccaaactgtttccccaagcggctgtatgactttgcatccaccccaacaatgtgtgaaacttgcagttgctgtatattcttgtcagcactttgctttgtctttttttgtagttttataagtgtacagtaatatttcattgtg

SEQ ID NO: 639827 - DNA, 521 bp, Homo sapiens
cccccacccctgtcaaccactgatttgctgctttttacctatggctttgttttttccaaattgagtggaatcatacaacatgtaacctttttgtatcttgcttatttcttttagcaaaatgcttttgagatgcatccatgttgttgtatttatcagtagttgtttctttttattgttgaggagtcctttgtatggatgtactatggtttgtttctccaacatccatttgacaggcatttgggatggatctaggtttcagtttrctctaaacaacctacatgtctttgtgtggccttatgtttccatttctttggggtaaatatccaggagtgaaaatctgaattgtatagtaagtgcatgtataactttataagaatttgccaaactgtttccccaagcggctgtatgactttgcatccaccccaacaatgtgtgaaacttgcagttgctgtatattcttgtcagcactttgctttgtctttttttgtagttttataagtgtacagtaatatttcattgtg

SEQ ID NO: 639828 - DNA, 618 bp, Homo sapiens
tgagttatttttagtttatcctacttggagtttattgaacttcttgaatgtatagattaatgtttctcattagatttggaaattttagccactatttattctttctggatattccttttttgcaatgtcttttctgccttcttctttcttctgtccttctgagagtaccattacatgtatcttggtgtgcttgttgatatcccaccggtctcttaaggctctgtgtatttwtttgtatccttttttattttatttattcaacctacataattttttttgtttgctctgtatgattttattattattttttatttttttccagaagttattgggtacaggtggtatttggttacatgagtaagttctttagtggtgatttgtgagattttggtgcactcatcaaccaagcagtatacactgcactgtatttgtagtcttatatccctcgcccccctcccagtcttccccccaagtccccaaagtccattgtatcattttaatgcctttgcatcctcttagcttagctcccacatatcagttagaacatacgatgtttggttttccactgttgagttacttcacttagaataatagtctccaatctcatccaggtcactg

SEQ ID NO: 639829 - DNA, 593 bp, Homo sapiens
caatggactttactcacagcacagcaagcartaagagtattagcatatttgctttgaccctccaagccccaattcccacagaacaatgtgaagagagccaggcaatacctgcacacactgtggggtggcttatgagagagaagccctgagtatagaaaacccaaattttgcataatggaccctaagtgcacctgccctatgctccagcccagctccgtttttccatatatgtttccactatggaaacatccttaaaaagagagcccagcacaaggactgtcagcacctgccagatgtaaaaatgtaagacacatggaaaattgtttcccaaaagggataacagaaataatccctttccttcctgtcctcttaccaggttcattagcagtggcaggctttctgcacaacattacttttccctgtgaacatgcagtctcacacatcccacactccccgtgtttccctctttatctcttctcccattaatgtaagtgctcaagcacctcatcaagaactttctatccccattttgacctttttagagaagtgccagagcccacagttggggaggctgctggcctgaccaaaggaca

SEQ ID NO: 639830 - DNA, 601 bp, Homo sapiens
aacatccttaaaaagagagcccagcacaaggactgtcagcacctgccagatgtaaaaatgtaagacacatggaaaattgtttcccaaaagggataacagaaataatccctttccttcctgtcctcttaccaggttcattagcagtggcaggctttctgcacaacattacttttccctgtgaacatgcagtctcacacatcccacactccccgtgtttccctctttatctcttctcccattaatgtaagtgytcaagcacctcatcaagaactttctatccccattttgacctttttagagaagtgccagagcccacagttggggaggctgctggcctgaccaaaggacagggcttttctctgggaatctcgtttaaagttttatgaaaaacataataagaggggaataagagaggaggtcaagggagagaatgagacatctctccttaactctctgcacttggggaacatttgatcccagcttggaggtgaaaacggagccaagttggtgtcactgaaatgaagcaggaagtgttctgagtctcagatatctcccttcaggtgcacgggcccagagccagctggatgtttggagagagcaa

SEQ ID NO: 639831 - DNA, 565 bp, Homo sapiens
tatttacctacctcccccagactttggagtgcaggttggttgcaaactgtagttggtttgctcagtgctgacctggattggaacatgcgatggattttcacgaaggggaaakcagcagaccccagaaggtgagcctggctcccttcgacatagttcctgtggtattcatgtcactgctatttgtggcagggagactccttgagaagtgtagaatgcgccgaatttaaagtctctgaggtagcagtttccacctttaaaatatttcttggcttctccagagtgccccctactcattgctctctgtttaaatctcagtgggaattctgatactactgttgcaccttggacccaaaaatatgtctcaaaatatgtttctgtattcctttaattttacttctgcacactcagcacttttgacacacttatctattttacaaatgctcaggtaaactaatcgcatcttgttgaagctcttcctttctgcgctgtcatcagttaattatggggtaagcaagatgcacagggtatgattattattaacaacacctcagatttacacaaaccc

SEQ ID NO: 639832 - DNA, 537 bp, Homo sapiens
tttaagaatgagatcatatcttttgcaggaacatggatggagctggaggctattattccttagcaaactaacacagcaacagaaaaccaaatacggcatgttctcacttataactgggagctaaattcatgatgagaactcatgaacacaaagaaggaaacaacagacattggggcctgcttgagtggggagggtgggtggagggagaggagtagaaataaataactgttgggtacaatgcttattacctggattatgaaagtctgtacaaaagactcccatgacacgagtttacctatataacaaacctgcatatgtaccccaaacctaatacaaaagttaaatwaaaaggataattaaggagaagttgtgatagaaaatttgatgtgagcagcaaaatctaactttctctgttttataattgtatccagtgctacatgagttagtcatagccactattccaggaagcaggaggccaacaccttctctgtaaagagagagaattcaatcagagcctcaacacaaagcccactgctg

SEQ ID NO: 639833 - DNA, 529 bp, Homo sapiens
taatttaagttttcttaaatttattgaggctcattttatggcccatcatatggtctatcttggagcaagttccatgcactgttaaatagaatgtatattctgcggttgttggatgaaatgttctcatctgttaagggcatttgttccaaggtgtagtttaaatccattgtttctttgttgacttcctgtcgtgatgacctgtctggtgctgtcagtggagtattgaagttccccactatttttgtattactgtctatctcatttcttaggtctattagtaattgttttataaatctgggagctccagtgttaggtgcatatatgtgtagggttgtgatattttcctgtcagacaaggccttttaccrctatataatgttcctctttgtctattttaactgctgttgctttaaagtttgttttgtctgatatgagaatagctacccctgcttgcttttggtgtccatttgcatgaaatgcctttttccactcttttaagtttatgtgagtccttacatgctaggtgagtt

SEQ ID NO: 639834 - DNA, 619 bp, Homo sapiens
gctccagtgttaggtgcatatatgtgtagggttgtgatattttcctgtcagacaaggccttttaccgctatataatgttcctctttgtctattttaactgctgttgctttaaagtttgttttgtctgatatgagaatagctacccctgcttgcttttggtgtccatttgcatgaaatgcctttttccactcttttaagtttatgtgagtccttacatgctaggtgagttttctgaaggcagcagatagttggttgattagttcttatccattttgtggttttgtgtcttttaagtggggcatttaagccatttacatttaatgttagtattgaaatgtgagataccattgcattcattgtgctctttgttgcctgcgtcctttgtttttgttttttgcttttgctttttaacatgtctttttgttttataggtcctatgtgattaatgcttaaaagaggttctgttttgatgtgtttctgggattcatttcaagatttagagctctttttagcagttcttatagtggtggcttggtaatggagaattctctcrgcatttgtttgtctgaaaaagactatatctttccttcatatatgatgtttagtttcactggataca

SEQ ID NO: 639835 - DNA, 529 bp, Homo sapiens
aggagcctgaattagtagttcttccagtcctttcaaacactactaccccaccccatcttgtcaaggtttgctctgttccagaaggaagtaaaggaacaggtgttaagaaccagcttccccactctactttgaccctacaggcrcctgcagtttcctaggactgaccttagcattcggaatgagcatagtgtcctgtagagtgcagggtcagtgcatttctgaaataacaaccaaaaaaagtaaaactggttttgagttggaccggggcttatatcatatgctatggttcaaagctttcctcctagtcttaaagccaagccaaactcatttgggtttcgaatatcaccatttagcagtccattggcctgggcctccttctcttgaccgaactctcatccaacctaggcaacatttggattcaatttgatagaaaatgtgggtgagctgcttgccaaattcttatgaatctgtgtcaaactcagtgatttaggctaagatttggggtgtggctgagtccccagaggaattc

SEQ ID NO: 639836 - DNA, 468 bp, Homo sapiens
tctggaagtttctgccaattttttattgcttttatgaaaaagaaaaatttttgaggtacttattccaccatttttgttgattgattcgtaaagctgttttaaaaagtggttataccattttatattcccatgaccagtgtgtgagattagcagttctgcacatcctcaccaatactttgtatggttagtcttttttgtgtgtctgctttatgtgtgtagtggtatctcatcgaggttttaatttgtgttgtcctgataatgctgaacatcttttcatgcatttatttgtcatctgcgtatcttctttggtgacatgtctttcatgtttgtttctctgattgcttgcttgtttgcataaggatgtctgaatattccagaaacatttgttaaaaagtttgtcatttctcygctgaattgcctttgcacctttgtagaaaatcaattgaccataaatgtttagaacaataa

SEQ ID NO: 639837 - DNA, 468 bp, Homo sapiens
tctggaagtttctgccaattttttattgcttttatgaaaaagaaaaatttttgaggtacttattccaccatttttgttgattgattcgtaaagctgttttaaaaagtggttataccattttatattcccatgaccagtgtgtgagattagcagttctgcacatcctcaccaatactttgtatggttagtcttttttgtgtgtctgctttatgtgtgtagtggtatctcatcgaggttttaatttgtgttgtcctgataatgctgaacatcttttcatgcatttatttgtcatctgcgtatcttctttggtgacatgtctttcatgtttgtttctctgattgcttgcttgtttgcataaggatgtctgaatattccagaaacatttgttaaaaagtttgtcatttctctrctgaattgcctttgcacctttgtagaaaatcaattgaccataaatgtttagaacaataa

SEQ ID NO: 639838 - DNA, 582 bp, Homo sapiens
aactccacttggtcactatgcattttgttttctatcagtttttgtttataaatattttgtttgggatttttgaaaaaatatttaaaatgacactggttcattgttttataatacagaatttgtctggagtttgcttaaaaaataatttgaaagttaatgtttaacttcatactctaacttgcaagatgtttttttttttaccattcttcaaaacagctaagtagaattggaaacacatttgtagttaatctgttatattgatttctttcaaatcactaacttttttgtgcatyaatttgtttttctgttttcctgttttctaactcactgtcagcttttatcttttgaaattctattcttctaagtttacttgtggtatttaattactttatttttgttcatgtttcatttttaggttatataatctaccctatattttctgtagtgtctatttaccattgggcttcttaaactttgatttttgtttctgcaatgaaaatttcccctttgctatattgttaagttagctaagctcatgttccaccctgtcctgtttttttacatctcttctctgggttcttg

SEQ ID NO: 639839 - DNA, 580 bp, Homo sapiens
gtcttggttctttgcattttcatattaattttagaatcagcttgctgatttctacaaaagatcctgctaggatttttattgggattgtgttcaatctayagctcaatatggggagatgaacaaatttgaaacttccaatccacaaacttggtacatatctccatttatatagtttgtttttaataaatagacttatgttttcttgtttataacttttgatgttttcctctttttattatagcatcattctatcaatgcttttccaattaccctaatattattcttggattctcctggacctgctctttgcaggcatttcttatagagggagaggggatagagtagtcttctaactgatacaaatataggctgcttccaaaatatatggttgtttgttttattttttatatagtcaagactttcttggtttttgtttgtttgttgattttaatcatattggcttcaaccaccagtgctacccatccaatttgctgaccacattttggcaaagaatgaagtgggtcttaccccttcaagaagtatattgctactatttttgagatctgccactgttgggcat

SEQ ID NO: 639840 - DNA, 492 bp, Homo sapiens
gatgaggcgaggatgggggaaggtgggggaaatagataaaatcagtcctgttcaaggtcaaaggtgtcttatctggtccatattgcaatcacaatttttatatatgtgtcattgcaattggttctcatgatacccctgtaagattgttagggcaggttttccttttatatwtgaggaaattggcccagcggttttacccagggtcatacaaggtgcgcacagggatgtttgaacttgatcttggtcacttctcttgagctaggaaacttcttacaattccacattttctctgggaattaggtattttctttgagccctcacttctgtcctgatactctgtcctctgtcttcagagaatcttgttttcattggtccctctctaatgacttggtaccctagatccattgaatgcctgttctctgtcaataagaccttcctcttgagtcagcaactcccccagggctgccctgaatgatgatgcatcttccggcc

SEQ ID NO: 639841 - DNA, 653 bp, Homo sapiens
ggtattctcgcttaataaaccttaagactctgcaagataaggaatatattattgagtgtggtggctcacgtctgtaatctaagcactttgggaggcaaaggtgagaggaytgcttgagcctaagaattcaagatcagcctgggcaacaaaatgagactctatctctccaaaaaaaaaaaaagaagaaaattagcggggagtggtggtgcacacctgtagtcccagctacctgggaggctgaggtgggaggatccactgagcctgagagttggaggctgcagtgagccctgaccacaccactgcactccagcctgggaaacagaatgaaatgtggtctcaaaaaataaaaataaaaaaggaatatatactacagtccatattgaatttattgtcagaagtgcccctgagagatgtcatcatctgatacagaagaagttgagagtgacttactggggcttttagcatttacaggtgactcttcaacatgggtttgaacttcatgagtccacttataagcagatttccttctgtctctgccacccctgagacagcaagaccaacccctcctcttcctctccctcctcagcctactcaatgtgaagatgacaagaacgaagacttttatgatgacccacttccacttaatgaatagt

SEQ ID NO: 639842 - DNA, 490 bp, Homo sapiens
ttaaggcccatctcaatagcagtgtgcacttggttccttactcacgtcatacgcagcatattgaaattgaaattgcccactgacttccattcrttcattcattagccttttctgaaatctcctgttttttgttcccatcctgatgtgatttgaccctgccctgccatttcttatatctacttgtctcattctgccttactctatagtcacgtggtttctcattctattctattcatctggtttctattttaaactgaaaactctggagggcagagattatatctaaatattattagatttttttcttgcaacacaatatcatgatatatatatatatatatacacacacacacacacacacacacacatacatattatacatatatacatacgagcaacctagtagtcagagctcataaatatttaattgaatttgctttctaagaacaatgagggaaaccaggaaaacattcaaataatgaaaagcttg

SEQ ID NO: 639843 - DNA, 490 bp, Homo sapiens
ttaaggcccatctcaatagcagtgtgcacttggttccttactcacgtcatacgcagcatattgaaattgaaattgcccactgacttccattcattcattcattagccttttctgaaatctcctgttttttgttcccatcctgatgtgatttgaccctgccctgccatttcttatatctacttgtctcattctgccttactctatagtcacgtggtttctcattctattctattcatctggtttctattttaaactgaaaactctggagggcagagattatatctaaatattattagatttttttcttgcaacacaatatcatgatatatatatatatatayacacacacacacacacacacacacacatacatattatacatatatacatacgagcaacctagtagtcagagctcataaatatttaattgaatttgctttctaagaacaatgagggaaaccaggaaaacattcaaataatgaaaagcttg

SEQ ID NO: 639844 - DNA, 615 bp, Homo sapiens
cctatgttcttgcattgacagtgctctactaaatccaggactgattaattattttacatctgaagatggtctggctggttcagttgttggaaatgagcacaacataaacctacacaatgcatgaagaatcctctcaaaaccacatgagagaaggatgcagttgagtttttactattttcctcctcactgcccagagcctttaatctaagagaatggcaagaaataaatgacattcaaatgtcatctattaatttgtctttggcccatatttgggtgaccacacttcagatcaacacttatyccaccccacttttccccatagaatgtcctgtttaagagaattatgagtcttggctctggggaagtgctttgagatgagaaaggctatgctcccatctcaaccaagcactttgttagataaacagtagagaagacacttaggggcagaaaggacacgagcctgggcgtgtccaacatttagtgtgacctacagcgagtcaggcattgaggtatctttgtatgcatgaccctggtttcttccatgcagcaaaaacctgcttcttctccttgagttctctgacaccgactgcctgttctgttatttacttgccgtgt

SEQ ID NO: 639845 - DNA, 615 bp, Homo sapiens
cctatgttcttgcattgacagtgctctactaaatccaggactgattaattattttacatctgaagatggtctggctggttcagttgttggaaatgagcacaacataaacctacacaatgcatgaagaatcctctcaaaaccacatgagagaaggatgcagttgagtttttactattttcctcctcactgcccagagcctttaatctaagagaatggcaagaaataaatgacattcaaatgtcatctattaatttgtctttggcccatatttgggtgaccacacttcagatcaacacttatcccaccccacttttccccatagaatgtcctgtttaagagaattatgagtcttggctctggggaagtgctttgagatgagaaaggctatgctcccatctcaaccaagcactttgttagataaacagtagagaagacacttaggggcagaaaggacacgagcctgggygtgtccaacatttagtgtgacctacagcgagtcaggcattgaggtatctttgtatgcatgaccctggtttcttccatgcagcaaaaacctgcttcttctccttgagttctctgacaccgactgcctgttctgttatttacttgccgtgt

SEQ ID NO: 639846 - DNA, 553 bp, Homo sapiens
tgtcctgtttaagagaattatgagtcttggctctggggaagtgctttgagatgagaaaggctatgctcccatctcaaccaagcactttgttagataaacagtagagaagacacttaggggcagaaaggacacgagcctgggcgtgtccaacatttagtgtgacctacagcgagtcaggcattgaggtatctttgtatgcatgaccctggtttcttccatgcagcaaaaacctgcttcttctccttgagttctctgacaccgactgcctgttctgttatttacttgcygtgtaattttagggaagctcctttatttccatccaagtttttagtttccttatcaataatatgggatattgataaacacctcatcatttttatttattttgataaggattaaatgaaacatattaaataaagcaactagtatggtgactggcacaagatacacacttcatatatgatagctgccagcaatctgctagtggcgacaggagcagcaatagtggtggtggtggtagaagaaacagtactggtggtaacagtagtatgat

SEQ ID NO: 639847 - DNA, 503 bp, Homo sapiens
ccatgcctaccgctgtcatttcacctctcagtctccctgcctctgtctagttgggacactaggctgtttaagatcctgatgcctctgttcaggcagtatctcaagcctgcgtacatgatgaataccaacttatccttcattatgtgtcttgtgccaactagttttgaacatttcctaaacttatctgtccccagtggtgctggccatctcctacttggttccaaatgttgaatatttctatcatagcatctgaaaagtttaacgaaatttttgtcccttcctatgaaattctttgaaatcaaggactatgtcttactgatgtttatattcctgcacaaataattttcataactaatgctttatgaatgaatgaggaatagcagggtaagtgaatagctrgatgaataaatgaatgaatgaatagtaagtaaaatagcaagtaaaaaaagaatcctaaaataccctgaagagaaactggtacagttagtctccacatacactcc

SEQ ID NO: 639848 - DNA, 632 bp, Homo sapiens
gtgctgttgtagtttcccattgactttaatcacagggtatggtaatactaagagacaccctaatggatctcctgtattccacatatactcttctttacttctgttgtrgagtagtagactgatttcatcttcatagtacaggtcaatcaccccagccaacattgtatctcccttcttcttagcctgttgacttaaaggtaggaggagcccagagtgtccaggtggcaatcttaacttccagtttaatggaataattgttgtgtctcctggtggtggcagcattcctccctctggaactaagacctctaggctagcagaacataatgttgcaggcacaggatgcaaaattttgctagtggttcactaggggtgatggtgagtggtgccactttcccttccccgctttgattcctgggcccacgaatcctggctatgggagaaacagtgccatatactggacactgattcggagcatacatggccttctggataactttgccccagccctgcaaagtattgtcacctagttggcattgtaattgtgacttcaaaaggccattccactgttctgtcaatccagatgcttcaggatgatagggaacatggtaagaccagtgaattcagtgagcatg

SEQ ID NO: 639849 - DNA, 632 bp, Homo sapiens
gtgctgttgtagtttcccattgactttaatcacagggtatggtaatactaagagacaccctaatggatctcctgtattccacatatactcttctttacttctgttgtggagtagtagactgatttcatcttcatagtacaggtcaatcaccccagccaacattgtatctcccttcttcttagcctgttgacttaaaggtaggaggagcccagagtgtccaggtggcaatcttaacttccagtttaatggaataattgttgtgtctcctggtggtggcagcattcctccctctggaactaagacctctaggctagcasaacataatgttgcaggcacaggatgcaaaattttgctagtggttcactaggggtgatggtgagtggtgccactttcccttccccgctttgattcctgggcccacgaatcctggctatgggagaaacagtgccatatactggacactgattcggagcatacatggccttctggataactttgccccagccctgcaaagtattgtcacctagttggcattgtaattgtgacttcaaaaggccattccactgttctgtcaatccagatgcttcaggatgatagggaacatggtaagaccagtgaattcagtgagcatg

SEQ ID NO: 639850 - DNA, 606 bp, Homo sapiens
cagagctctacatgagtcagactattctgattgctgctgcctctgctgtccattatggtagtcatgcccaccttgactttgatagttaagtgctgccacttgggatccaattattcccattgtatttaaattttgtagttgagtggctgcatttctcaccattagatgtgacatacagagaagagcaattacagagctcttcaaagatgcaggtactgccctcacaaatctatttcgcaaggcattggtcaagggtatatcttctgaaccctctgggatgagtaggtctaaagtgactaatccactccactatcccaatctccctaagcctttggatcctttcctctgcattaaaccragggagatcaggcatttccagctcactcacagtgggccatcttataatctttgtttcggctaaccaagcaaacaaactattagaaccttttttaactccccaagctgcaacattaaatgcagagtccctacttagtgggcccaagtcaataaattcagcctgatccaactctgtgttctttcccttataccttaatatccattcatttcatttcataccttgaaatgaatatgaataatattcatatc

SEQ ID NO: 639851 - DNA, 484 bp, Homo sapiens
agcagaagctgtgggatcttggcacatccacagtccctgaatggatttttctatcctcatccataatctggkgggggcggaagatactgctcagtgacattcaaagaaaagcaatctgtgctcctaagacagaggttccctggggatcatcaaggcagcaggagtggggttggaactaaatgtccaggttctcaaagaacttccagtgcaatgaggactcccaaataggctaattggttaagaataaactctagactctgtacttgggaactagagaaacaagtggatctgtatcaggcaagaaaaaaaaaacatcaagacaaaaatgtgtaattgtaatgatagtgcccagaagtataacaggcatactgagcttccaaattattaattgtgttgaattaactcagtgataaataagatgattgattaatgatgaatatcattctaaagctccaggcagggaagaagtagcatgattattata

SEQ ID NO: 639852 - DNA, 484 bp, Homo sapiens
agcagaagctgtgggatcttggcacatccacagtccctgaatggatttttctatcctcatccataatctggggggggcggaagatactgctcagtgacattcaaagaaaagcaatctgtgctcctaagacagaggttccctggggatcatcaaggcagcaggagtggggttggaactaaatgtccaggttctcaaagaacttccagtgcaatgaggactcccaaataggctaattggttaagaataaactctagactctgtacttgggaactagagaaacaagtggatctgtatcaggcaagaaaaaaaaaacatcaagacaaaaatgtgtaattgtaatgatagtgcccagaagtataacaggcataytgagcttccaaattattaattgtgttgaattaactcagtgataaataagatgattgattaatgatgaatatcattctaaagctccaggcagggaagaagtagcatgattattata

SEQ ID NO: 639853 - DNA, 483 bp, Homo sapiens
ataacaaacgtatgtaattcatgttttatgtgacacaagtcttcaaaaatgaagacccaaagacccaggagaaactgtatttttatgcttaggtttgatgatgaatgyagaggcatgattggacaaaaagggggtatgacttaaagataacctggagggcacttagtaaggcctgattcttcagattcttcttagtctgtctgtggaacattccttctctctggatgtagggcaggacacctgtcacatgagggtcttcaagagaggtcagaaagacctttctgcttctgtggttttctctgtttccttcagcttaaaatactcagcatgccaaggtgccatacttggggggtagaatttcctgcactctgtcaaaaaaagaaggaaaaaaaggaaggaaggaagagaggaaggaaagaaagaggaaagaaggagggaaagatgggaagaaggaggggaggaggcaaaagagagagaggaagg

SEQ ID NO: 639854 - DNA, 483 bp, Homo sapiens
ataacaaacgtatgtaattcatgttttatgtgacacaagtcttcaaaaatgaagacccaaagacccaggagaaactgtatttttatgcttaggtttgatgatgaatgtagaggcatgattggacaaaaagggggtatgacttaaagataacctggagggcacttagtaaggcctgattcttcagattcttcttagtctstctgtggaacattccttctctctggatgtagggcaggacacctgtcacatgagggtcttcaagagaggtcagaaagacctttctgcttctgtggttttctctgtttccttcagcttaaaatactcagcatgccaaggtgccatacttggggggtagaatttcctgcactctgtcaaaaaaagaaggaaaaaaaggaaggaaggaagagaggaaggaaagaaagaggaaagaaggagggaaagatgggaagaaggaggggaggaggcaaaagagagagaggaagg

SEQ ID NO: 639855 - DNA, 596 bp, Homo sapiens
gaattgagatttattcctttagctatcatttgtatagctctagtgaattgttgaacaagaacccaaaattgtttagatagaaatcctatcaatgaagaagttcacattgcaattagttcaaatataatctgtggaatgccaattatgagttagccagtattctaggtacagaggagtcaaagattaaaaaggcatgtctcctactgtactcatagtccagtaagaaagagacaactgcagacaaaggtccccgtgcaaagtgtgatggtaactttcatgaggtgccctattggagtgtggtggaagaaacaactaatttagtatagagaagtcagcaatgacttccccaaaggagtttatatttgagcatggttttaaaaatggatgcaaagattagaagtttatcagacagacaaattggaagaaaaatattaggtagaatgcaaagaagccaaggcatgcttgaaaacatgaaaaagcatcacgggctcttaaattggtgcatagtctgtatgattggattgtcgagtttataaagtgaagagaagctgcagatgaggctgggaygacaggcgtgattaaagcatccaaactgt

SEQ ID NO: 639856 - DNA, 456 bp, Homo sapiens
ggtgtccatactaatcaaccctttgaataattattcagatctggttgtattggtctaaataatttagccagttgcatttttctttctcagtgctcagttgtttggcaytgcatatgccagccatgcagatgacgggctgaaaggtttggtttacgtgcagatgttttcaatgttgtgtagacaatcacaaacactgaaagaaaaaatattccaagggggtgaaagtccctttaccatgctttccaaatacatcatcattgatggtatcactaatagcaattcagctttgtttaaacacagttattaatatcagatgaccatctgttttccgctacagtatatatatcatacaaacctttccatggagcctatggactgttctctattgcatagacaaataaagctcaataaataaccataaaaataaaaacatattgatgcagttgtacattctct

SEQ ID NO: 639857 - DNA, 528 bp, Homo sapiens
ccttcactaatcctatcctgaattgcctgtcaacttccacttacactcacataaaaaaatgatgtttcattttgctttcgaatgatatacagagtctcctttttccttatttttatttggggtttatttgtccttgaattgtatggctgcacttgatgtcatgatttaaatgtggtctaaggyaagatctttcactcaacagcccataggaattcgaaaataatgagaatggaattttctagtaaacaaatgctgacaaacatgccacttagatgtaataagcacagaaaaatcacattcgttggctacgagggagagagctcgggaaacagaagaaaatttgtccatgttcatttaaaaaataatgtgactccaccatgaatttttcaagatctgagcatgaagaggcctgtacgttcgtttaattaacacatttaaaggatgaagtgacaaatagaaggattttcagaggaaaacaatcaagaaagtggaggtattagaagctatattttatgaggagaagtagaa

SEQ ID NO: 639858 - DNA, 585 bp, Homo sapiens
atacagagtctcctttttccttatttttatttggggtttatttgtccttgaattgtatggctgcacttgatgtcatgatttaaatgtggtctaaggcaagatctttcactcaacagcccataggaattcgaaaataatgagaatggaattttctagtaaacaaatgctgacaaacatgccacttagatgtaataagcacagaaaaatcacattcgttggctacgagggagagagctcgggaaacagaagaaaatttgtccatgttcatttaaaaaataatgtgactccaccatgaatttttcaagatctgagcatgaagaggcctgtacrttcgtttaattaacacatttaaaggatgaagtgacaaatagaaggattttcagaggaaaacaatcaagaaagtggaggtattagaagctatattttatgaggagaagtagaaagatccaggaagctttcacctagagagaatcatcaatcacggaaatctccacagatgggtccccaaactcactaagttatgtgggataaaaggatttcacttactgtgcatatctttaaaaggaagcatggctggaagaaaca

SEQ ID NO: 639859 - DNA, 634 bp, Homo sapiens
tctttggagacctggacaatactgattctcttagcatgcatttattgaagaactaatgtgcgccaagcactcaagctacagcctttcctctaaaggagctcccagtgtggtgggaaagggccacaagggagcaggtaatgttaacacactatgagaaactaagacaggaatatgcacagtgtactctgggaacacaggggaggggactctaaccccaaggaggggtggaagaaggcygggaagcactcctagtggcattgatgctcaggtcaaagatggaaggataagtaagacaggaagagaagaagggtggagatgctgggagtttggagagagtttagtgtgaatgtcacttggggtttcagtttccagttgggaattcggtgggcaagccaaggctggcaaaccaggccggggctggctcatgaaaggccttggatgccaggttaagaacagcagattaggtactggctttagttcacatttggtttctgctgttattgctgtatctgagcttgaatgctgttagcatctggtttagccacatgtcctcaaagagcgtgttttcctttcacctgcgtgtttctcttaaaaataatttatcctacaggaaataggaggaggagagggagta

SEQ ID NO: 639860 - DNA, 690 bp, Homo sapiens
gataagttgcatttctttcattttgatatgacatagcttggacatttgtagcttcatgggtaaaaaaaactgtaatagaatttaaaaatccttagatttatatttgtgtgtgtgtctgtgtgtatgtgtgtgtgtgtgtgtgtgtgtctgtgtgtctgcagccatttttaattacatacacacatcctcagatatcaaagatttatttcaggagaaagaaaagaatatgcaatacatagtatatctatagttgttatatttaatacacttaacagtttttatatttaaaatgtctggatgcaatttctcttcaaaaatgttaaataccaaggacacatctatattttttggtaagatactatctattgaaagtgccatgcaggacagatataaaagtagcttgaccaagtctgaattctcactaatctcaggtgaaggaagccatttgctattgataaagctagttaatctccagagtacaacctgggctttatgtatttttagatgagaatcacaaaaattgatctgcacttgcttctcatacaagcttcamgtgccggctgcaataaaatctatgactgtgattcaaagtatacttccagtctgcatgaagaaagagactccaatgctgctaaaaatgaattatcttctttcttcaattttgaaaatgccttagaaaaattaactaat

SEQ ID NO: 639861 - DNA, 579 bp, Homo sapiens
atatgccttgttccaattccaataaggttgctttcaatattttgaacttgtagtcacggttgagatgacttaatttaaaacacatttggaagcgcaactgagcctaacctatgtaggtagcttcattattttcttggaggggttcactttctgttgttttgtttttgtctaaactcatggcccagcgttatttatgttcttctatatctgagatgtatctctagtaaaaataaaataaaaggaaagccgctattgtcagattggaacgaagtggtaaaaacaaaaacagaaaacaaaaataaagaacaggaggagccaaagtctgagaagaaagaaacataaatcattgttgtactagattaaaatcaattcaacaaacaattatatgcactgaggactggtccaagggataaacttgcaaagtcttctaatcacatccctaataaaactcaaagtctaggatctggcgcctatctacccagctaggctgccwctcctcctggccttatatgttccacagaaacgctaccaaaagcagtatgaagcttcctcaaaaaattacaaatagaattaccatat

SEQ ID NO: 639862 - DNA, 628 bp, Homo sapiens
gccagttttcaatgacagtgaagcagagaggaaagagaccgatatggtttggctgtgtccccacccaaatctcattttgaattgtaattcccataatctccacgtgtcttggtagggacctggtgggaggtaattgaatcgtgggggcagttatccccatgctgctgtgctcatgatagtgagtgagttctcatgaaatctgatggttttataaggggcttttcctcctttggctcggcacttctccttgctgccatgtgaagaaggatgtgtttgcttccactttygtcatgattgtaagtttcctgagtcccccccgcagccctgcagaactgtgagtcaattgaacctctttcctttataaatcagccagtctcaggtatgtctttattagcagtgtgagaatagactaacacagagggagagttctggcagaatttggacctgagttctggttgcccatgacatcccgctgcactttcaaacagctcagtcattccttcctcctttgcactccatgtgctaataggtcctcttttttgctttgattgttgaaggaccctatgttagcttcccatggctattgtaaccaattactacaaactgaatggcttaaaacaacagaaat

SEQ ID NO: 639863 - DNA, 526 bp, Homo sapiens
tgattaagttaaaaaaaaaatccatactttttggtaggtaaccgttttagctgacattataattttccgtcctcaaactgactttatcctttttaatgatgttcatgctcttaatcaggactatataaacaatccatattacaaatttcatacagacatatgtgaacatttaacaggctttgggagacatttgcagtgtagaatatctagctggattttcttccttggagattatcctgtactagtaacaagcagagaaaatatttcccacgcctgtgagtatttaggagttcctttgtgtgcctagatctttytttccccatacaggggaagtggtgtgcactgggggtaggcagaagaaaaatgacaagaagcaaaagctttgctgctgtgggatcaaattccaagcagaattccttcatacacttccatttctgtgaaagtgcggtgtggtgtttgttttcactgtatctgctcgcttaattgtttctgcctgttcatttcgttcctcagtgaaaacgttagc

SEQ ID NO: 639864 - DNA, 581 bp, Homo sapiens
cttacaatgcaggactatgacttctgtgttggcatgtgtgtgctaaagtttgacctctggcagggaaattgtcttcagacagaatagaacttgaacttcagaagtccagtggtcctcattgtagttgcccatttgcactcaacgtagcatggcttaattgcaacaaatatcagttatgctaaatgctggtattctaacagctcaaggtgaagtgttgttaccgtccaccttttctctgatcactgagacaaaagatcaaacagaaatattttaaaaaacactcgcagaggatcatctcaacttaaaatactgcctcttttatgaccacrttctccatcttaacaaggaaatcaaacaattcaaggggagaaaagcaaagaaatccacagagaaaagttgtttaaaattgcccactggatacagccattgtaagagttgaataatgaggtgggaaaatatcagacttaaaaaaaaaagcctagatatttaaacatacaaaagttatcacaccatttatttttggaaataatttgggttaatccaaatagccatgatgaggaatagttgaataacaagtaatt

SEQ ID NO: 639865 - DNA, 567 bp, Homo sapiens
gagatcttctcggtctctactgaacacaaataaaagaaaacagacataaaagagtattttctgagagctgctgtccctttacaccgcaggtttggtagaggcaaagaacactgagctagaagttagaggacaaaagtcctgtgaggggtgcagctttgcaactgcaggccaaagagcaaaccaaacaggcctcggaatcaacatacttgagtttgaatcttagctccatccttttggtaatcatagttttcataataggtaatatgataataggtatctgttacaaatgaaccagagagttcttaaactctctgagtgtcagtagttttcatccttaaaatgggcaaatcttatctacttcatgggaatgagaggattcatgagatcatctgttgaaagtgtctggtatataataggagtcacttaaagattcctccttcctgtaatccaaacacccagttttctaatatgtgtaatagaaatgtctgtactgtgtgtgtgtgtgtgtgtgtgtgtgtgtgtgtgtgtgtgtgwgagagagagagagagagagagagagaacgtata

SEQ ID NO: 639866 - DNA, 620 bp, Homo sapiens
cctgcaaatatgtttttagcrtatttggtataattatctgtgagaacagatggaatgggatcacaggtacttcaaccttcttgataatcagaaagtcatttctatttgactttggaatacaatgtttaccactcctacacaggcccaccttcttcattatgttcaacttaacttaaacctgtatttccatgtccactggaaggcactggacataatcctttatgcagtctgtctcaagttttcatcttttactttcttctagatattttctctagtctcttcatcttcctgctgtccccccatgcttgaatcaggcagaaattcacaccgttaattttccagagactaaatgttactaagggtcagcatttctttacatgtctgtttcccctaatgaggtgagttctttgatgacaaggattatgtatcattcatctttgtattcccaggacatagtatgtcctaaattaatgtttattgaatgaattaactataaaaatatgtaacaactcattaagatattttgccagtcaattctataatttcttaaactgttagtttagcataaagcattacattgctctgggcaagcaggtaagtggctatttacaaggcagatt

SEQ ID NO: 639867 - DNA, 620 bp, Homo sapiens
cctgcaaatatgtttttagcgtatttggtataattatctgtgagaacagatggaatgggatcacaggtacttcaaccttcttgataatcagaaagtcatttctatttgactttggaatacaatgtttaccactcctacacaggcccaccttcttcattatgttcaacttaacttaaacctgtatttccatgtccactggaaggcactggacataatcctttatgcagtctgtctcaagttttcatcttttactttcttctagatattttctctagtctcttcatcttcctgctgtccccccatgcttgaatcaggcagaaattcacaccgttaattttccagagactaaatrttactaagggtcagcatttctttacatgtctgtttcccctaatgaggtgagttctttgatgacaaggattatgtatcattcatctttgtattcccaggacatagtatgtcctaaattaatgtttattgaatgaattaactataaaaatatgtaacaactcattaagatattttgccagtcaattctataatttcttaaactgttagtttagcataaagcattacattgctctgggcaagcaggtaagtggctatttacaaggcagatt

SEQ ID NO: 639868 - DNA, 517 bp, Homo sapiens
attttttaatttttctaaatcattaaaaaatgtgaaaaccattcctagcttgcaggtcatacaataaaacaggcggtwggccagatctggggactatggactgttgtttgttcacctctggtttgaatatttataatctacctacttttaaaaaattaatgtagctcacgtgttcttgagaggaaaggcaatactatttatggataatttgtttaacgcaatttagcatagcatgatggtgaagagcatagcttctgggagcagaatggttgggtttaaattccagccctgctactcacaagctgtgtgaccttaagtaaattacttaaactctctgaacctgtgtttcctcatctgcaaacaagctgactccaacaaaatctacccaacagagttgtatggattaaatgaaatagtatgtgttgagggcttagactgttgcctggtgccttgtaaatgttagatgctatttgctatatgatagcattatcacatttaatcctgccaaacggatatt

SEQ ID NO: 639869 - DNA, 559 bp, Homo sapiens
gccgcttcctctatctccaaaacttcccattgctgaggtccagaatgtctacttttttgtcctctgcaacattcctctagtgtctcctgcagctttgacgataaacaatcgccttttgcaaatgtgtcccacagctccacgtctccaggtgctacacaattagatgcttccagagggcagaacgtgctagatggactgtgacatcgagttgacctggcttcacatctcagcactgcctctcatttaccggaggataytgggaaaattgtgtaacctctctgagtcttggtttagatatcagtaaaattgtgataataataagaacccccagctaaggttgttataaagtgaaacgatggacataatgcaaataggaggcttattcattcattcctttatttatttgctcagcaagcatctatggtgcccctcctatgtccctctaagtgcatactcagtggtaggtgatattgcgaaagccctgagtcttttcacctcaacacatcttctaaatgtgcacttctctatttttgccttttgctcgtcttccagtcttcta

SEQ ID NO: 639870 - DNA, 654 bp, Homo sapiens
attatctcaatagtaaaatggtcagtgctccacacacaaactgatctgataacatttagttgaaatgattaaatttagcaaaatattggagtaaattatttagttctgtgatactatgtggttggatcaaaatgattttcatttctttgcttagttctgtttttctacagtatcaggttacttaactctatcttgtcaaatatcagatttgggaatgtcaggataataaaagcaagttttattatttcaagatggatatttggcrttgtgtagtcatagcttatctgagataatattttaaggattaatattggagcagaactagaagaaagacatagttatttagcatacatgtgacatttatgtcaaacaagcatggattgaaataaaccaatttaatttccaaaagcccattgcatttagcagaaaattttgcataatgcatgtaaacctgtgccattgccccataagtcaaactcttcaaattactactggagatttcaattcaacccaagcaaatgcatagtatatatgtgcttatatatatgtaaaaatctgaagcctctgagacaaaagtcttaagacaatgtagcaggtgtcaattttttaccaagataatgatgagaaccctaaatcagaatgttacatacttaa

SEQ ID NO: 639871 - DNA, 518 bp, Homo sapiens
gcccaatcccaatgcatttggagattattcactagggacattggccttgtcatctctgcgtgattttgttcttctctaacagaagatctttttaaagccccatgacttttcctctctaaatcttataattttccatcttctgtgacccaaagaacttggtttttgtcttactcctcatgttcattttatttcattaaaattattacctctcggaactgggatggatttatggcccaggcctaaatctgatgtttggaactgtcctatgctttccctaccaatttccgagtctattcttgaactcattgccttccaagaagcatttgcctttytgcactaaatatcccctgttctttccatcattcaatcatcatagaaaatggtttcaaatccctttatcatctagttggtatctcactatgtgtttgggttacatagtgagcaacattttggaagaggtgttacccatgaaatgtccaccccttggcatgagagtccatataggaatgactatgagt

SEQ ID NO: 639872 - DNA, 616 bp, Homo sapiens
gctaaatattggtgcaaagccataggaatgctatgaaaggctggaagaattttctaggagatttgatgatggtttcagtctacaggggtattgggggaggcaatcatgttggaaagaggaactagagggtttctcttaaaactctgcataggaattatttttgcctatattatacatgacaaatcagttaaggtagtgaggttttcttttgttattattattattccaatagcttttggaaaataggtggtgttctgttacatggataagttctttagtggtgatttctgagattggtgcacccatcacctgagcagtgtacactgcacccaatgtgtagttctctattcctcatcgcctcccaccctttccccccattcccccagagtccgttacatcattcttatgcctttgcattctcataatttagctcccagttataagtgagaccatakgatgtttggctttccattcctgagttacttcacttggaataatggtctccaactccatccaggttgctgtgaatgccattcttccattcttttttatggctgagtagtattccatggtgtataaatacataccacattttctttatacacttggttgatgg

SEQ ID NO: 639873 - DNA, 616 bp, Homo sapiens
gctaaatattggtgcaaagccataggaatgctatgaaaggctggaagaattttctaggagatttgatgatggtttcagtctacaggggtattgggggaggcaatcatgttggaaagaggaactagagggtttctcttaaaactctgcataggaattatttttgcctatattatacatgacaaatcagttaaggtagtgaggttttcttttgttattattattattccaatagcttttggaaaataggtggtgttctgttacatggataagttctttagtggtgatttctgagattggtgcacccatcacctgagcagtgtacactgcacccaatgtgtagttctctattcctcatcgcctcccaccctttccccccattcccccagagtccgttacatcattcttatgcctttgcattctcataatttagctcccagttataagtgagaccatatgatgtttggctttccattcctgagttacttcacttrgaataatggtctccaactccatccaggttgctgtgaatgccattcttccattcttttttatggctgagtagtattccatggtgtataaatacataccacattttctttatacacttggttgatgg

SEQ ID NO: 639874 - DNA, 539 bp, Homo sapiens
ttacagtaatacctaccctatgtaagatgactaggacattccttttccaaactatgagactttcaagagtgaaaagaggtgccacctggataggatggtgggaaatagataytgggactgtcccaggcaaaccaaaacatatagttattctaagctctttgtaaatttatgacaatgaagtaaaatggcatacttccaagcacctagattaatgccgggcacatatatagaaagtgcagagcaaattttggttaactctgcatctgaaagtccagttgcccagaaagttaatggaagagttgtgagctaggcgtggtttttctaacttctaaggttaagagtcaatagtaccaaaaaacaaacaaacaaaaaaaaaacacaaagtgacaactaatccttaagttttagttttattttaattttttgttttgttttacttctaatatagcaaaaccacctgtcattttattcttccaatttcataggttggccaaattatccagtgactttagtacagaaacacatcaatagacaactgt

SEQ ID NO: 639875 - DNA, 613 bp, Homo sapiens
tttgtgttttagactgaattgaaaatgtatcacttctgctcatagcatattggccagaatttgtcacatggctccacctgggctggaggcatgggtggtcacttggatattccataagcaacaggtgtctctgacacacacacttacaccaatgtcttccatsaccataatgaccttgtgacactgatgctcttgctactaccaataacagagaaaccatttatcatttcccagttctgtattagcaatgaactcctgaaacctcgttttactcatctagaaactgaggctcaaggagagtagtgtgtcacttcaggtcatcctggaatcaggagccacggtacagttagaagtagcagagatttgatagggccaacctctctgaaaaacacaggggagagagcaaagtaagacacagaaagccttcagcccatggtgtaactctggcagtgtgagaggatggaggaaaagaagagccagcctcgggtgatgagcagccctgagagttgcagctagcccaacaggagctcccaaggacagatggacagttggaggagtctcacattgcatagaaatggccaggccctaggacccctgccacgctcaggcactg

SEQ ID NO: 639876 - DNA, 522 bp, Homo sapiens
ggtagtaaccagaggcagggaagggtgttgtggagggagaggatgaagaggggctggttaatgagtgaaaaaacacaggtaaatagaagaaataagatctagtgtttgatagcacaatagggcaactgtagttaacagtaatttactgtatatttttaaatagctacaaaagaagatttggaatgtttccaacacaaatgataaatgtttgagatcatggatatctcaattacccaaatttgatcattacacattgtatgcttgtatcaaaatatcacacgtacctcataaatatgtacaactattatgtatccataaaaattaaaaataaattttaaaaagaaacacctaaagaataatctggctgtttctttggtagagaaataggaagaagagaagcagagggaaggttggatgaactggtgmacaaatgcttatgctctcagattacattccattcatatacatcaaccaaaacattaaataataacaaactaaatgcagaagcagagataagaattc

SEQ ID NO: 639877 - DNA, 522 bp, Homo sapiens
ggtagtaaccagaggcagggaagggtgttgtggagggagaggatgaagaggggctggttaatgagtgaaaaaacacaggtaaatagaagaaataagatctagtgtttgatagcacaatagggcaactgtagttaacagtaatttactgtatatttttaaatagctacaaaagaagatttggaatgtttccaacacaaatgataaatgtttgagatcatggatatctcaattacccaaatttgatcattacacattgtatgcttgtatcaaaatatcacacgtacctcataaatatgtacaactattatgtatccataaaaattaaaaataaattttaaaaagaaacacctaaagaataatctggctgtttctttggtagagaaataggaagaagagaagcagagggaaggttggatgaactggtgcacaaatgcttatgctctcagattacattycattcatatacatcaaccaaaacattaaataataacaaactaaatgcagaagcagagataagaattc

SEQ ID NO: 639878 - DNA, 540 bp, Homo sapiens
acaatgtagccaataagtatatcaaaggcttttcagcctcacttactgttattattttctgtgtaacgaagttgatacttagaagggggaagtaactttccaaaagtcactgtaagagtaggtagaagaactcagcatgaacctggtttctctttcagttgcttgtcttttaaagaatgtataagtgggagctgaacaattagaacacgtgggaggggaggggaacgacccacaccagggcctgttgggggtggcggttggggagggagagcatcaggataaatagctaatgcttgtggggcttaatacctaagtgacgggttgataggtgcagcaaactaccatggcacacgactgcctgtgtaacaaacctgtacgtsctacacatgtatcccaaacttaaaattaattgaattaaattttaaaaatttagttctttgttatttctgcttattttgcttttccaaatgtattttgcattaaactccttttggattttgaaagtaagacaaagcaaaacaaaatttaaattctcagaat

SEQ ID NO: 639879 - DNA, 532 bp, Homo sapiens
gaactgtattatgcccaggtaaagattgatctaatcgattttgaggatggctgtttttgttacactggatgttcagtgcctgccatcctgtaaactaaccatgacatcatgttatggtgaaagcaaatgtgggttctgagacttatcctcgcttttatcaataaacaaggaaggcacttaactgtgtgaatgccaggcctagaaaatcattcagtgagttcatctgattctttctccgagagctggacttactgaagcttctgttgttttcatagcatccatgtgagacctgattagaaaacttcygtacttttaagtttttctgggagtacaaattgttttgcccggtccttcatgcagaacaaataaacacaaaataattaaatacatgatgctgaagaacaggaatagaggtgctgatcccctgtcctggggatctggggtggcacaattaggcaggccaaggcttgaaagagcagagtgattatctggaggatacaagagaaaagagccagtaggtgagtgtaaggaa

SEQ ID NO: 639880 - DNA, 567 bp, Homo sapiens
catgttgcaagcctcagatctccatctggtaaacttgagcaatgtgccttcttacatgtgagaactgttaataaagagcttctgagaaatacaatcaacaataataaatactttatccacatgttggaatcacaaatggaaattatgacccttaattgtggttctgcacgtcatccaggtggcagaacacctggaaatcatggaacaycatgctccttagaacaccataatagttgcaaagttccactgaaaaagacacagttaatcccaatctctgaactagttataatttttatgaacagaaaatatgactagattgctgcatacaaatgcaacagaaaaccagaacaaagtattcaaatctattaaaaaatatatatcatgacctaagcatggtcagctatttctgagtctttccaataacattattcactacttttttattaatttggtcattggcaggtgcacgtaggaggccaaataacagccagtctcaaaggctcaagagaaaactggagaaagaaagttgtaaaatgagaaaattttatcaattaacttattttttct

SEQ ID NO: 639881 - DNA, 567 bp, Homo sapiens
catgttgcaagcctcagatctccatctggtaaacttgagcaatgtgccttcttacatgtgagaactgttaataaagagcttctgagaaatacaatcaacaataataaatactttatccacatgttggaatcacaaatggaaattatgacccttaattgtggttctgcacgtcatccaggtggcagaacacctggaaatcatggaacaccatgctccttagaacaccataatagttgcaaagttccactgaaaaagacacagttaatcccaatctctgaactagttataatttttatgaacagaaaatatgactagattgctgcatacaaatgcaacagaaaaccagaacaaagtattcaaatctattaaaaaatatatatcatgacctaagcatggtcagctatttctgagtctttccaataacattattcactacttttttattaatttggtcattggcaggtgcacrtaggaggccaaataacagccagtctcaaaggctcaagagaaaactggagaaagaaagttgtaaaatgagaaaattttatcaattaacttattttttct

SEQ ID NO: 639882 - DNA, 530 bp, Homo sapiens
catgataaatgctacaaaagagagaaatgtgtggtgctgtgggagtacataatagaacttaacctggtatgagggcctcagatattatataataggaagctgacatttaaggaatgataggtgttggccaaagtgtgtgtgtgtgtgtatgtgtgtgcatatgtgtgcttacaagtgtgtgtgtgcgtgcatgtgcacacacatacacatatgtaagcaaaggcagtattacaggtggagaaaattttgtatcaaaagacccacagatatgagaaacaaaaatagagggagagtaaaaaggaaatagggaagaaaagagggagaataactgtctctaattgccttcaaggaacacaaaaaaagtggtctttgattctatattcatcaatcactatgttagctcccaagttttttgctttttgttttgttttgtttgttttttggtacaagggaaccagacagatgtctcgtgagcaaacrctgccctttagtcactcaaagaaatatttgtgcattttagatgaacacat

SEQ ID NO: 639883 - DNA, 608 bp, Homo sapiens
tcacaagtaggtgcatctggttgtgagagaagaggctggagcaagaagtgtggaaccctgtcatggacagacttattttgctcaggctaagtaattagctttgtcgtgagtataaaggaaagccattaaaaaattctaagtatagatgtgacatcattattataactgtaattctaagttcatgtttgtagtccatcacaaatgttgcctttactggacagatcgttttaaaaagtattcattaaatgtatgtatatttcctaagaaatttgagcttaactttcacaatcacttgagtttaatgactaataaaagctcataatactgaataattaaatataataaaatgtcatctcagagtagagggctctgtttattttaaacatagcacattatctttaagatcacattaggaacttctagtgtaagaggcttctgactggaattacttcactcagtctctctgaatcattcagttttatcagtcaggatgagctaggttttgttgcagtaacaacttccaacttacagtggttttaaaataaasaaaatattaatagtattcattctacaagtccattatgggggatttgtaggaaaatgggcta

SEQ ID NO: 639884 - DNA, 618 bp, Homo sapiens
tttgaatgaatacttcactgtgatggttaattttatctgccawtttgattggggtaaggtatatccaggaagatggtaaaacattatttctgagtgtgtctgtgagagtgttttttgcaagatattagcatttgattgggtagactgaataaaggagatctccctcactgatgggcgtgggcatcatccaatgaactgaaggccccagtggagtagaaaagcagagaaaaggcaaatttgttctctgtgtttgagctggagcatccatcttcatctgcccacaaacatctgtgctcaaggttctccagactctggcctgagacttatactattgtcccctccctactcccaagccctggctctcaggactttagatttagattgaattataccacctgctttcttggttcttgactttgcagacaatagactgtggggctccttggcttccataattgcatgaaccaaatttctgttagaaatctccaaatatgtatgtatgtatccatggagatttacgtgtaatcttctattagttctgcttctctggagaaccctgactaataataataatacactgctttgtcctactcttaggtggcaaatgggacatggtca

SEQ ID NO: 639885 - DNA, 526 bp, Homo sapiens
agaagaactaattagaactgtagttggggttgtacatagctggtacttacccatcagagctcttggtgaattctagtacaatttcctatttcctagtctgtcctccacactggatgccaagctcctagaataggataggatgctgagcttctttcagtgtttggcatagccggcacagaattaagagtgtttgatgagtaaatgagtgacataaaaggagaagactggaacttgcctagaatggttggcaaaagtgactgagggccattaagctagaataggaacaaattaaatctttgrcaagaaaaacgacatttatttaacctctattatagtctaggaacactgaggtatttcattcacattatttcagagtcctgtcaacttggatgcaatattttcagtcccattttacagatagagaacagaggcactgagaattcaagtcacacatgtaacagatcagagccagtaatcagcacatcagaaattcaaatcaaggtctctctaactgcacaccacatca

SEQ ID NO: 639886 - DNA, 391 bp, Homo sapiens
taatcaatttgtaaatcaacaacagacgggtggcatttaaagccmtggaatgaatgggatcacccaggaaatggttctcaagcctggctacacatgggaaacacctgggaatctttgaaactataataatgtttcagtcctaccctcagagattcttatgtaattggtctcaggtgcggcctgaacattggtgttattaaaagcttcttggatgtttctaatatccagccaaggttgtgaaccactgacttagggagaaagcatagagagaagatattcaaggactgaggtctggactactcccaacatctagaatccatcagggaaggaggagccaacaaaggaagactgaaaaaaagccgtctctaaggtgggatgaaaaacaaagaat

SEQ ID NO: 639887 - DNA, 391 bp, Homo sapiens
taatcaatttgtaaatcaacaacagacgggtggcatttaaagccctggaatgaatgggatcacycaggaaatggttctcaagcctggctacacatgggaaacacctgggaatctttgaaactataataatgtttcagtcctaccctcagagattcttatgtaattggtctcaggtgcggcctgaacattggtgttattaaaagcttcttggatgtttctaatatccagccaaggttgtgaaccactgacttagggagaaagcatagagagaagatattcaaggactgaggtctggactactcccaacatctagaatccatcagggaaggaggagccaacaaaggaagactgaaaaaaagccgtctctaaggtgggatgaaaaacaaagaat

SEQ ID NO: 639888 - DNA, 631 bp, Homo sapiens
aagtctctgggggacagtaaagtggaagtttctataggggagtgratgtgaaccatgtttttaactcagttttcttctccctttgatgcctagcacagaactgggcatatatttgggcatatatttgatgatgcatttgttgaattgctcttaatcagcacttggtacatttaaaaactgtttctggaatgggtcaaattttagggtaaaataaatccaccttgatctataggtcgttaattcactgaatgatgaatggatcacttgaaaatgaccgtgttctcattgtcatctagttgctgtagttactatgctagattcagaactgctgtatgaagccatttagattccttgaacttcaagagtcactgtttacagagattacaatgtaaaaggtatctcctggagtcatgtgcatacaacctgcatacctgtgcatgacagtcctgttgctagaaaaggatttagagaagagtgaaagtaagttttatcgtgtcagtggcatgctaccacattcacatacttcagcataacttcacatccttttagagagtagggtttattatttacatcttatatattattattaatgtgaaactctaaggcgtcctagaatacgcaggtggtaaag

SEQ ID NO: 639889 - DNA, 456 bp, Homo sapiens
agaagagtgaaagtaagttttatcgtgtcagtggcatgctaccacattcacatacttcagcataacttcacatccttttagagagtagggtttattatttacatcttatatattattattaatgtgaaactctaaggcgtcctagaatacgcaggtggtaaagccagatcttatgctaggttattaggtaacattgcttagtcgtggcacactatcatacccattgaatgcagcagtgagtatcatggtatggctctaatacagtattatggaagatcatccaaatttagtgaatatttatygagtacctactatataactagcattgttccagaccccttgaatcatatcattacaaaaatacaaaaattcctgcccttggagagctcatagtcttgtgtttattaccattatacctactggctcattctaaatatatattggttttagtgacag

SEQ ID NO: 639890 - DNA, 499 bp, Homo sapiens
tacactaaactcttcattccaaggaaagattgtcaggtaggataaaagagcaagaactaactctatcacgtctataaaagacagacattaaatacaaaggcaaatagactaaaaataaaagaccaaataaaatgtatcmtataaacaataagcataagatagtcagagtttctttagtaatattagacaaaatagaccgcaaattgaagagtcagagtttcattagaggcaagaatgaaaacttcataatgataaaaggtgactataacaggaaatataaaataataaatatattattatttatatattatatatatatacacatacatataataacagaacttcaaaatataatacattaaaacttatataagtaaaggggcatataaacaaatccacaatcgtgtttggagttttaaaatatcctcctctcagtaattagtaggaaaattagacaaaacagaagattaactcctttaaccaaattggcatttattga

SEQ ID NO: 639891 - DNA, 646 bp, Homo sapiens
caggtcaacatctccatttctccaataattgtgcaaacacaatggaaacatcaaatatattaaatacataaataaaattttatgtattaagtacataaacaaatgaatagacatacatttatgtacttaatgatgtttatttgtacaaatgaatatttattcatttgcttatgtacttattcaagatgtttatactgaacacttactttgtgccagacgttatattaagtgctttattttcatggttatctctttcaaatcttacaaaacaataaaaaatcaggccaatgaacttgatactagtatctatattagtttcctaggactgctgtagaaaagcaccataaactgagtggcttaaccaacagaaatctattggctcacagttctgaaggttcaaagtcctggatgaaggtatctgcagggtcgcttccttctgagggttggaagcatctgctccttgcctctcccttagcttctggtggtttgctggcaatctttggtgttccttggcttgtaaaagcatcaccccctcmtctgcctttaccatcacatggtgttctcccttccatgtctttatctaaatctcccccttttacaagaacaccggacatgttggaataggggctcatcctactacattatg

SEQ ID NO: 639892 - DNA, 532 bp, Homo sapiens
actaataagtgattatatatatatatattggcactatgtgtctggcactgtaataagtgttttccacgtgtcattttgtttaaatcttcacgcaaccctataagatatgattatctgccttttccaratgagtaaacaagctcaatggtattaaatgactttcacaagttcacataactaagagtgagttagaccagaatttgaggcaatgcaattggaatctagaacctcattgcttaactcccagctatattatctttccaatataaactgttactccccttcttgcatttccaatttcaattaactatcccctccttatctattttctttgccatctcgggctcatgcacattgcaaagattgccatatatgtcatccattgattgattgactcttgaaatattcattaggccctgctgtgttccagacaggcatgtctggaataaaacaaaataaaacgagcaaacaaacaaatgagcaaccaaacaaacaggaaaactgacgtatttccaatcagggttggagcaaa

SEQ ID NO: 639893 - DNA, 435 bp, Homo sapiens
atattttttaaaagtggaataattgtctagactagccactatgactgtctgctggatacttactcacattagtgtttgttktggggtacaggggtaatggccatggatctcagcctcactgcaagactcacttctctgtagtaagccagagaatatgagaggttatttatgagcatcccagagaatgaagagaccacagggaagccatgcactctagctaaaggagcactggacagagaaggtcaagaccaactttcattcctgctctcaccactaactgactgtctgaccaggtacaagacatacacctgaaattggcctcacttttcctgtcattaacaggaggaggtggattagatttcactgtgacattatgacgctctgaaatatagattcagccaggagttacaggggaaaagaatcaagggaatgatg

SEQ ID NO: 639894 - DNA, 525 bp, Homo sapiens
ttctcatgccaattaacatcctcttgatagcatttatctaaaaactggaaattatttgttattccgtccaaacaggaggaaacaatatttacacagctattattaaatgtgagagctctgtctgactaactctacctgccataaagcctttttcaaaatggaagtaggtaattatcttattcacacttatttaggaagcattttccaacagcattcagaattcagggaagaggaaatacttgctcttccctgaagtgtgatgggagttagcaaatgcttaggctttgtttgagggaycattgctgggtactttactgagaaaaacatctctgggtctcatagacaaatattcaagtggagaaagatggttaacggaggagatgggtgtgagaaagcagttctattgatttttttttttccttttctcaaagctcaagcgccttggtgaatgggaggggtattagtacatgaagaggctacttcaagaaattgagaaggctttctcctgcttacacaaagtgagat

SEQ ID NO: 639895 - DNA, 457 bp, Homo sapiens
gtaaatgcaccaatcagcactctgtaaattggaccaatcagcaggatgtgggcagggccaaataataawagctggccacccgagccagcagcggcaacccgctggggtccccttccaggctgtggaaactttgttctttccctcttcacaataaatcttgctgctgctcattctttgggtccacactacctttatgagctataacactcactgcgagggtctgcagcttcattcctgaagtcagcgagaccacgaacccactgggaggaacaaacaacccggacgcaccacctttaagagttgtaacactcactgtgaaggtctgcggcttcactcctgaagtcagtgagaccacggacccaccagaaggaggaaactccagacacgtcagaacatctgaaggaacaaactccggacacaccatctttaagaactgtaacactcaccgcgagggtcc

SEQ ID NO: 639896 - DNA, 516 bp, Homo sapiens
cagtcacccgggaatagtartagaaaaagtgtgaagaatacagatattggcttgtttatccatcttgttcatctgcttctcttagaaaaattaaacctcccatcccttgtatttttctgctaatttttgtgtaatataccagcaaagtgatggaaacaaaacaattgaaacaaatacctctgcaaaacaccatcccaatgcgttgagtgctttcctttttttttattttttaatcattaacaaaattccatcaaactttatctttctattaatcagttactattgttaaaaatttaatttcttttctaatgcttactactgctcatttcacttcattaactattacttttacataccgtgtttacattttttaaattaaaaaaattcaaggataaactatcttgaaagatgattttaagttaccaagttgttacatatgtagactttgaataaaatacctggatttgaattgcagcagtgtaagtattatctttgtcaccctatgtaatttatttg

SEQ ID NO: 639897 - DNA, 564 bp, Homo sapiens
ttaccaagttgttacatatgtagactttgaataaaatacctggatttgaattgcagcagtgtaagtattatctttgtcaccctatgtaatttatttgaactctgtcccaattttgttttttggattttttcctgctaaatggagattagcagtaactgcttcatgtttattgtcatgaaaattaaatgaaatccatataaagcagtgagcctagtgccaagctaataatgttgcttatcattattagtgtataatacctatcaacttttacgtaaatgtaaatatatgtgtgtatgtgtatatatatatatatatataatttattcttagccaggattttttttctcatccaggaacaaaaatactagtttcattttttactctaggctttttatgtttatctttcaataattgtcttatagaatcacagtgctataaaacgttttcattaatttgtctaatttgctgaatgcccactttgtcctgaactctaggcacctaggargcttatggtctggagggagaaacagacaggtaagcataggatgacaatgcaatgttata

SEQ ID NO: 639898 - DNA, 529 bp, Homo sapiens
acagctttctgtttgtcaaagatgcccagaaatgattctgggtacattgttggctagtgagctctctgtcctggaaaaacttagggagatactgggagaacttttgaaggaaacattgttgaggagatccaaaaggagggggtttggttggactaggctttcacctcctcttcacttctggcctgagttttcataggattccttggggaacttaaagttcaatagactttataaccaaatgaccaagcgctaactctaggccctgtgctagggccatgggattatgaagattgactagacaaaatgctttccctcaagaagatgaatgcagtcaaaaagaaagacatgaagagagactattctaatgtaaaggagtgatgtgggcactggggaagactgccastccagtcatcttcttccctaaccttaacattaattgtgtgtgtgtgtttgattaacatatttgattgatgaggaaattaatcaatggccttcaatgacttgctcattacaacaccggggctaggac

SEQ ID NO: 639899 - DNA, 596 bp, Homo sapiens
atcagaaattgaatgtactggaaatatttcagcacagttgctcctcacatctcagtctgagagtgagagacagtggtctgacctgaaacactgaggtgctgtgaggaaaattgaattgttgcaaagtctttggaagtacaaagtgcctacagcaagttttgaaggtcaaaatttacagtttgtctttcacggtatccagaggatgtaaaaataatggttactccttatttcaggtagtagtctacatctgtacatatagtagctcatttaatcttaacaactccacaaagtgttatttccttgattctacagatgaggacactgagacacagagatgttaagaaacttgttcaacaycacagagctagtaaatgacagagctgacttttcaaggcaagcagtgtgtcaatggcagtacttaacatgcactctgtactgcctgtgtgtggcagaaagccctgtggaatgggaatgtgacatacataggttcaaatccttcctccactgcttactagttttgtggccttggacaaggtttttaatgtttctgagcctctgcttcctcattagaaagatggaaaataacgacgtctact

SEQ ID NO: 639900 - DNA, 596 bp, Homo sapiens
atcagaaattgaatgtactggaaatatttcagcacagttgctcctcacatctcagtctgagagtgagagacagtggtctgacctgaaacactgaggtgctgtgaggaaaattgaattgttgcaaagtctttggaagtacaaagtgcctacagcaagttttgaaggtcaaaatttacagtttgtctttcacggtatccagaggatgtaaaaataatggttactccttatttcaggtagtagtctacatctgtacatatagtagctcatttaatcttaacaactccacaaagtgttatttccttgattctacagatgaggacactgagacacagagatgttaagaaacttgttcaacatcacagagctagtaaatgacagagctgacttttcaaggcaagcagtgtgtcaatggcagtacttaacatgcactctgtactgcctgtgtgtggcagaaagccctgtggaatgggaatgtgacatacataggttcaaatccttcctccactgcttactagttttgtggccttggacaaggtttttaatstttctgagcctctgcttcctcattagaaagatggaaaataacgacgtctact

SEQ ID NO: 639901 - DNA, 543 bp, Homo sapiens
ctgacctgaaacactgaggtgctgtgaggaaaattgaattgttgcaaagtctttggaagtacaaagtgcctacagcaagttttgaaggtcaaaatttacagtttgtctttcacggtatccagaggatgtaaaaataatggttactccttatttcaggtagtagtctacatctgtacatatagtagctcatttaatcttaacaactccacaaagtgttatttccttgattctacagatgaggacactgagacacagagatgttaagaaacttgttcaacatcacagagctagtaaatgacagagctgacttttcaaggcaagcagtgtgtcaatggcagtacttaacatgcactctgtactgcctgtgtgtggcagaaagccctgtggaatgggaatgtgacatacataggttcaaatccttcctccactgcttactagttttgtggccttggacaaggtttttaatgtttctgagcctctgcttcctcattagaaagatggaaaataacracgtctactttgaatggggttgtgacatttaaa

SEQ ID NO: 639902 - DNA, 617 bp, Homo sapiens
tacaagccttgatggcttttaattgagaaatatgcatctgtgacaggtaatcaatacgctcatctggcagccaggttccagatgaaataaagctaaatgatgatgcaattagaatatacaaacaaatcccctgcagaagccaaatagacttgactgccttctccatcctaatcatgttgccatgtttggaatgcatctggaagtcatttttctcggtgaatctggacccaactaaataaacagagcttcttttcttcgtttgctttacctgctttctccttggagctcagtttccctccgcccaaggtgggacagcacgtcagccggactccctaatgtgtgaaggacattgcaaacctcactgacaaacactgtcccttgaaattcactttgtcatttattttctcattgtcagactgaatgacaaaagctggcarttttaatggggaaacagttcaggaggcaggttctcaacaatccctgaacaatcttttaaaaaatatccttctcttcttctttattggagtctgcgaattattaagtgacaaggctgtcttgcggttcactctcacatacactaaccttctccaactttttcttgcagtactcacgactgc

SEQ ID NO: 639903 - DNA, 693 bp, Homo sapiens
ttcttccctaaccttaacattaattgtgtgtgtgtgtttgattaacatatttgattgatgaggaaattaatcaatggccttcaatgacttgctcattacaacaccggggctaggacttaagtctaaaacatctgatagatactaaaaatgagagtctacatcaaaagtatcaatgggctatgtacttgcttgtgtttcattgtcttttcagaaatgattgytctaccttctgcaatttaaaggtttttcatcttaactacaaagaaagaaacagcttcttctgtaaaactatcatgggaaatgtgtcagagcactgatttcaggaccccctgcacggcttttaaacaaaaaaccaataatcagcccatcctattatgttctcctatttctacatttgtgaaatgtaaattacttaaatggattcagttctcatcactgtccaccttcactgctcagagaaagagatctccagtccttcacagctgcactgccttctccattctacacagctgctttagctgtctttcatgtttcttctttcctttctcttgggaagagttagccattgctccagagtgcagtatctttccagtcaaccttattatatttgtctacatcctccactagatgggactatatatgccatattcaccctgtatttctggtggatagccctgtgcctgacatgtagag

SEQ ID NO: 639904 - DNA, 597 bp, Homo sapiens
tcattcttcataatatttaatttagcacattatttttggtaacgctacaatcgtcaaaacaatcagagtctactcttttctttaaaacttggcatagagagagggagaaaggataaaatgaagtaatgagggaaggaaaggaagggagggaggaaaggaaggaaggaaagagggagggaaggaaggaaagaaggaataaaggaagagagggagggagagagaagagaaaaaagaaatgttcaactccaatttaaagcaagagattgaggcttcttccttcagtctaggttttactgatacttgaggtttaatagtaaaaataatatcaatctctagttattgggtccttactgtgaaccaagaataatatttggcattttttaattagtatttaataatattaataaattaataatagtcctcttaagaatcagtttattatgtaatcatcccatttttcagatgaggaatcatttttcggatgaggaaactaagagtaaaaggggttaagtratttggttaagaatatatattgagtaagtggcaattctagaatttgcatgcggtgctcttgctccaaggccatcctacttccgc

SEQ ID NO: 639905 - DNA, 618 bp, Homo sapiens
gttggcaaaataaccagctaacatcatgaagacaggatgaaatccatgcaaccttgcatgtaaatgggctaaatgccccaattaaaagaaacagagtggcaagcaggagaaaaaactagcacccattggtatgctgtcttccagagacctgtttcacatgtaatgacacctataggctcaaaataaagaggyggagaaaaatctacccagaaaatgggagacagaaaaaatgaggggttgaaatcctagtttctgaagcaaaacagactttaaacaacaaagatcaaaatagacaaagaagggctttacgtagtggtaaagggttcaactcaacaagatctacctctcctaaatacatatgcatccaagacaggagcactcagattcaaaaagcacattgtttgggacctgcaaagagacttggattcccacaaaatagtagtgagaggctttaacactccactgatgatataagacatattattgagataaatacttaacaaagatattcagaatctaaactcagcactggatcaaatggacctgatagacatctgtagtactctccaccccgaaacaacggagacaacattcttctcattgccacatggcacatac

SEQ ID NO: 639906 - DNA, 566 bp, Homo sapiens
tatagtcaccctgttgtgcaaaaacaggcctatttccargcctattactaggcctatttcttctaaccgaaactttgtacactctgtccactcccatccccatgctctggtaaccagcagcattctactctctacttctatgatttcaactcttttagattcaaaatgtaagtgagatcatacagtatttgtctttctgtgcctggcttatttcacttagcataacatcctctagataatccatgttgttgaaaatgaccaatcttaaataagatagtgccttgaaaaactgagattcatatatttgactctgtcttaggaggaggatatatccattcttttgagaaccattttcatttggtgatagctaacttaaagcattatcttcatatgttcacactgaaaacattatgttcatactaaaacaaatgaagaacataacggaataaaaatgcagagatgttagcaaaagcacacctatctcttactattagccacacatagtttggatcaatttacacttattaatacattaaacctctttctgcaaccctaggaagtaatta

SEQ ID NO: 639907 - DNA, 524 bp, Homo sapiens
tgtgtgtaatgggctgtatctgcttggctatataaaatttctttctgtctttgcaatctctttgtggattgcctgtgatatgctcacattctagattaattcttattcaataatgaatttttttttgtctctctactacttttataggaaagatttctagattgagagattattttatcaccaatattgctaatgcagatttcctctgctgtaaatagcctttgtattagtttgttttcacactgctataaagaatacctgaaactgggtaatttataaagaaaagaggtttaattgactcacagttccacatggctgggaaggcctcaggaaacttacrataatagcagaaggggaagcaagacagcaggagagagagtgaggcaggggaaactgccagaaacttatcaaacaaccagatcctgtgagaaatcactcaccatcatgagaatggcatggggaaactgtccccacgatccaatcacctcccaccaggacaacccctaccctgcccttgacatgta

SEQ ID NO: 639908 - DNA, 548 bp, Homo sapiens
ttattccatgagtatattctagttttagatgctgacaaagagcatcttgccatgtccgaaaatttactgtacctcattaatctttgcttactgttgtttatcaagtaactgattcaattaactaaattaatggtatcaattgtccccccccatgtgattctatggcaatatatagggcatgagggactctgtatgttaattctacaagtaatttggtatagtcagtagtaggggtcatttggggaaaggatgagaggaaaggctgcagagagaaggacaagttcattaaatgacaataatgttgaacattcattgcacacttactgtttttcagacactttgttatgtgctttatatacattatttaatttaatccccacaccaagtctacaagaagaaaatacttattaaaatgacaaatgagcttagaaactgckatggtttgaacgtttcctccaaagtttgtgtgttggaaacaattcattatgcaactatgttgagagttgagaccttgaataggtgattagttcatgaggtctctgcccttg

SEQ ID NO: 639909 - DNA, 593 bp, Homo sapiens
cttttgtctttgcacacccacaggccccacaccacacggaagctgccaaggcttggggcttgcactctctgaagcaatggcctgagctgtaccttggccccttttagccatggttggagctggagtgcctgggccacagggcatcctgtccccaggctgcacaaaacagcagggccctgggtctggcccagaaaactgtttttccctcctcggcctctgggcctgtgatgggaggggctgctgtgaatatctctgaaatgctttggagatgtttttgcagaaggtgaagaggaagcaaggcatgtcttgcttgatgacagtagagagagtgagcggggaactgccataaacttttaaaccatcagatctcttgagaactcactcactgtcatgagaacagcatggggaaaactgcccccatgacccagtcactctcaccaggaccctcccttgacatttgggaattacaatttgagatgagatttggctgggtacacaaagccaaaccatatcaatgtcacttagtgaaactaagtgactaccragttcactcaggcagctagcatttggtattcaaattcaggactgttgac

SEQ ID NO: 639910 - DNA, 503 bp, Homo sapiens
tctttcagcttaatctctcccactctagattcccatgccacccctaatcctgcttgaagcagccctgagaaacatcgccgattatctctccataccacccccaaaaattttcgccaccccaacactttaccactattttgttttatttttcttattaatataagaagacaggaatgtcaggcctctcagcccaagactgcatgtatacatccagatggcctgaagtaactgaagagtcacagactaagtgaaaatggccggttcctgctttaactgatgatattaccttgtgaaattccttctcytggctcagaagctcccccactgagcaccttgtgacccccacccctgcccgccagagaacaaccacctttgactgtaattttccattacctacacaaatcctataaaatggccccacccctgtctcccttcactgactctcttttcagactcagcctgcctgtacccaggtgattaaaaagctttattgctcacacaaa

SEQ ID NO: 639911 - DNA, 467 bp, Homo sapiens
attccaaaatccatgatctgatactacataaggtcctataatttccatcaatcttgtcagcaaacatgtgtgtgagattttaccatgagaaaatataggtgtaccacagcaagaaacaatcacaatttccttggaaaacccatcaaatcaggatatccttcttgtgtagggaagtcaatgacatstatgaaaaatagtgaagcattttaaataatcaaaactccaacctttgccctcctaataaattcgtgcttaaagcttagctttaccttgaccaaaatagtatttctgtgccctgtcttttgtactttgaagttatactttcagtatgaaaagcttaatctccatcttaaaaagtgagctaaaactcaaactactgaatttgtaatagctgtatatattattgatttgattgtttctaactggcacagtatatgaaaataagtattagactttttaaaaacagg

SEQ ID NO: 639912 - DNA, 566 bp, Homo sapiens
aaagtttacattgtatgaatatgaattatgtaaaatctgtgagaytccatatatccaaatatgatttatttatttatttgtttgtttgtttatttatttatttattggcttcttgcagcaaccaaaagccattcacagtgatatctagtgcaaagtggttgatgtaattggcctaaaatatgttgtcataataaagtaataacattaatataaattagtgtggttataatctgacttacaaggagtttccaaaaatgaaaaaaaaaatactttaaacacgtaacacatgttctgtttaaatcttttcatgaaaaatctgaataaagcctataacacgactggctcctacagtgatatagaaacaaataagagagttatcaactcttttgtggcccagtccttaactaaacctatatttaagattacttgcactgtgataagtcaatatattatgtgactgaggcaaatccacaataatatatggccctgtcttctcatttttaatcctaaaagataaccatatcttctcactgtagaaaacttttccagtagacaacatgggaatt

SEQ ID NO: 639913 - DNA, 566 bp, Homo sapiens
aaagtttacattgtatgaatatgaattatgtaaaatctgtgagactccatatatccaaatatgatttatttatttatttgtttgtttgtttatttatttatttattggcttcttgcagcaaccaaaagccattcacagtgatatctagtgcaargtggttgatgtaattggcctaaaatatgttgtcataataaagtaataacattaatataaattagtgtggttataatctgacttacaaggagtttccaaaaatgaaaaaaaaaatactttaaacacgtaacacatgttctgtttaaatcttttcatgaaaaatctgaataaagcctataacacgactggctcctacagtgatatagaaacaaataagagagttatcaactcttttgtggcccagtccttaactaaacctatatttaagattacttgcactgtgataagtcaatatattatgtgactgaggcaaatccacaataatatatggccctgtcttctcatttttaatcctaaaagataaccatatcttctcactgtagaaaacttttccagtagacaacatgggaatt

SEQ ID NO: 639914 - DNA, 674 bp, Homo sapiens
agtttacattgtatgaatatgaattatgtaaaatctgtgagactccatatatccaaatatgatttatttatttatttgtttgtttgtttatttatttatttattggcttcttgcagcaaccaaaagccattcacagtgatatctagtgcaaagtggttgatgtaattggcctaaaatatgttgtcataataaagtaataacattaatataaattagtgtggttataatctgacttacaaggagtttccaaaaatgaaaaaaaaaatactttaaacacgtaacacatgttctgtttaaatcttttcatgaaaaatctgaataaagcctataacacgactggctcctacagtgatatagaaacaaataagagagttatcaactcttttgtggcccagtccttaactaaacctatatttaagattacttgcactgtgakaagtcaatatattatgtgactgaggcaaatccacaataatatatggccctgtcttctcatttttaatcctaaaagataaccatatcttctcactgtagaaaacttttccagtagacaacatgggaatttatacccaagattcatagaaacatcatgtgatacatgctacaagtcctttattgaatatttactcacaattattgctaattcattaactgctgaagggatcaatggcaga

SEQ ID NO: 639915 - DNA, 461 bp, Homo sapiens
atttaagggtttagaatcacttaaattatttttcaggyttcttgttttcaggagctttcctttacctgaacaaagtaaagttttccaaagagaagagccactctccagatttctcttggagtccacacatacctcacacaatacttgtttacaaaaaggcctacgtcttttaagacgaggacaatttactgaaataataaacatattgaagaaacacacttctcactttgaccatcaatcttctctgtttgcagattacagatgtaattagtaggtgtttatattgctgaatttggctctgagctcaatagaaaatttttatttgaattttttacctgatatgttatcagcttgccttatatattgcatcgtttcctcttaatgaagccaatacattaatcttttttaacacatttattaaagtgttactgatatttaatgtgtacattttaaagagtttg

SEQ ID NO: 639916 - DNA, 581 bp, Homo sapiens
tcattgttttctcactgtctttttgttttagaaaacatctcaaagggaagaaataatacaagtattgatatctacagctctatcgttctcctaaaacatgaattaaaagatatgcttatggcaatttttcagttaaaaagttacagtataatatgtgtagttaagcacatattaatattaaaataaaaacatggctggccgcagtggctcacgcctgtaatcctagcactttgggaggccggggcaggtggatcacaaggtcatgagttcaagaccagcctgaccaagatggtgaaaccstgtctctactaaaaatacaaaaaattagccaggcgtggtggtaggtgcctgtggtcccagatactcgggaggctgaggcaggagaatggtgtgaacccaggaggtggaggttgcagtgagctgagatcacgccactgcactccagcctgggtgacagagcgagactccatctcaaaaaataaaaataaaaaattcaaaaattagctgggcatgatggcaggtgcctgtaatcccagctacttgggaagctgaggcaggagaatcgcttgaattcaggcggc

SEQ ID NO: 639917 - DNA, 581 bp, Homo sapiens
tcattgttttctcactgtctttttgttttagaaaacatctcaaagggaagaaataatacaagtattgatatctacagctctatcgttctcctaaaacatgaattaaaagatatgcttatggcaatttttcagttaaaaagttacagtataatatgtgtagttaagcacatattaatattaaaataaaaacatggctggccgcagtggctcacgcctgtaatcctagcactttgggaggccggggcaggtggatcacaaggtcatgagttcaagaccagcctgaccaagatggtgaaaccgtgtctctactaaaaatacaaaaaattagccaggcrtggtggtaggtgcctgtggtcccagatactcgggaggctgaggcaggagaatggtgtgaacccaggaggtggaggttgcagtgagctgagatcacgccactgcactccagcctgggtgacagagcgagactccatctcaaaaaataaaaataaaaaattcaaaaattagctgggcatgatggcaggtgcctgtaatcccagctacttgggaagctgaggcaggagaatcgcttgaattcaggcggc

SEQ ID NO: 639918 - DNA, 576 bp, Homo sapiens
tgctaccagttctgggaccctcctgtgggaattaattgctctaacctaaactttgcccactgtagttttaaatgagtttgccctcagatgtgagtaatctggccgtcttatctttcactccactgacctccagggttggcctgacaggtcaggtggggggtccttatctccttcctcactttatccatctcactcaggtcttcggttcaggctccacaactgattgatgctgttttcctgttagtatctctttttcatcatgcacgatcctccatagtgatggaatggagacagcttctcagagaaagcacagctttggaaggtaagtgccgtttggatggtgagaccatcagatcaatttaactaggccaagactctgatcaatgttcttaaacctatgtaacccactgccacagagatttcaaartgaggaagggtcctggacgcccattcatccattctcaatgaattattcatttgaccagcactttctgactttctagcttcagccagacaccgtacaagggacaggggagactgagatgaagaacactcggtgcttcttcccaaggcact

SEQ ID NO: 639919 - DNA, 576 bp, Homo sapiens
tgctaccagttctgggaccctcctgtgggaattaattgctctaacctaaactttgcccactgtagttttaaatgagtttgccctcagatgtgagtaatctggccgtcttatctttcactccactgacctccagggttggcctgacaggtcaggtggggggtccttatctccttcctcactttatccatctcactcaggtcttcggttcaggctccacaactgattgatgctgttttcctgttagtatctctttttcatcatgcacgatcctccatagtgatggaatggagacagcttctcagagaaagcacagctttggaaggtaagtgccgtttggatggtgagaccatcagatcaatttaactaggccaagactctgatcaatgttcttaaacctatgtaacccactgccacagagatttcaaagtgaggaagggtcctggacgcccattcatccattctcaatgaattattcatttgaccagcactttctgactttctagcttcagccagacacygtacaagggacaggggagactgagatgaagaacactcggtgcttcttcccaaggcact

SEQ ID NO: 639920 - DNA, 587 bp, Homo sapiens
tatcacaaacttcctgactaccayggagacagggccggcttcccaaaggaatggtgattctgctttctttacttttcctttgtatcaaaagccaggaatgagcttggttttcatcatagcttcaaaggtaagagctggaacagaccctggttagttcacccttctacccctggaaagaccacacaaggctcttgataggccaccatagccaggcagaaatagtttctactgccaaagagaatccgtgattttcttgtcagaagagtctgaaatatcacccttggttaaatttcaataattcaagctgcaatttgggttgttccttcacattcagacctggcagacccatcattgaggagttagaaagacagctcccaaggctagggagggtgttctgggcggggtggttgttacctgctggcatcgttgctgaagagcggagtccgcattctcaagctgcagctcaaagagaaatggctgcgtggtgttcattcagctatctttaccaacgacctcttccctgagaggccttccctgattacatacccacggtgtcctcaatcctactgacctgttttattttcttc

SEQ ID NO: 639921 - DNA, 553 bp, Homo sapiens
atctagccaagatttattaaacgtgggacgcctttgttgtataataaagaatttaactgactcttggtccccgggaataagcttcgaaacccttgcratttcctgagtgatagaagtgtctttgttattcgtgtgggcccttggaacacacctgagtttctgctaaggagatgactcaagatgaggctggtcatgccagaaaggccaactgtgtgtttacagggttggagctttcagccaggtgatatcagcttgacctcctccaggcaggggagctgagattaatttcagtcacatggtcaatgattcaatcaatcatgcctatgtaatgaaaccccagcaaaaactctgggcgccaaaactcagtggagcttcctggttggtgaacacatcagtgtgttggtgatgtgtcctgattccatgaggaaaggacatggaagtttgcatttgccctgtgtgtctcttcctttggctggtcctgatttgcatctttcataaggaaactgtgattttaagtatgctgctttccagagctctgtgactcaacctagtg

SEQ ID NO: 639922 - DNA, 553 bp, Homo sapiens
atctagccaagatttattaaacgtgggacgcctttgttgtataataaagaatttaactgactcttggtccccgggaataagcttcgaaacccttgcgatttcctgagtgatagaagtgtctttgttattygtgtgggcccttggaacacacctgagtttctgctaaggagatgactcaagatgaggctggtcatgccagaaaggccaactgtgtgtttacagggttggagctttcagccaggtgatatcagcttgacctcctccaggcaggggagctgagattaatttcagtcacatggtcaatgattcaatcaatcatgcctatgtaatgaaaccccagcaaaaactctgggcgccaaaactcagtggagcttcctggttggtgaacacatcagtgtgttggtgatgtgtcctgattccatgaggaaaggacatggaagtttgcatttgccctgtgtgtctcttcctttggctggtcctgatttgcatctttcataaggaaactgtgattttaagtatgctgctttccagagctctgtgactcaacctagtg

SEQ ID NO: 639923 - DNA, 553 bp, Homo sapiens
atctagccaagatttattaaacgtgggacgcctttgttgtataataaagaatttaactgactcttggtccccgggaataagcttcgaaacccttgcgatttcctgagtgatagaagtgtctttgttattcgtgtgggcccttggaacacacctgagtttctgctaaggagatgactcaagatgaggctggtcatgccagaaaggccaactgtgtgtttacagggttggagctttcagccaggtgatatcagcttgacctcctccaggcaggggagctgagattaatttcagtcacatggtcaatgattcaatcaatcrtgcctatgtaatgaaaccccagcaaaaactctgggcgccaaaactcagtggagcttcctggttggtgaacacatcagtgtgttggtgatgtgtcctgattccatgaggaaaggacatggaagtttgcatttgccctgtgtgtctcttcctttggctggtcctgatttgcatctttcataaggaaactgtgattttaagtatgctgctttccagagctctgtgactcaacctagtg

SEQ ID NO: 639924 - DNA, 692 bp, Homo sapiens
ctctgcttctctgtaactttcactgactgatcccaggtcccagctctggagctttgcagaggcttccctctgttcctttgccccctctcctttgatagccattttcaaatatgggcccccaaaaggattcccagtgggatatcacctgctttgtttggacattacacttcgagtgtgaacctaagatgccattggccttttgggcagcaacatgacatcatagaccattttaaagaaactgcggggttttatttggtctgtctcccaggcgggagtgcagtggtgcaatcatagctcactgtagcctcagaatcttgggctcaggaggtcctccccgccccagcctcctgaatagctgggactacaggtgcatgccaccacacccaagtaattaaaaaaaawttttttttagagatggggccttgctatgttgcccgggctcagcccatttttaacataaactgctgtaggctactttaatagttaagtaaaaaatacattctcagcctattattccactacttttaggatctttttgaagttgtagtttgtcagcctgtactttagccagcctggcagctttgggacatttgcaaattgggtaagatgcctttctatacctaggagatgattacagccaggctgatatttaagggctaaatttctcatatcacccactagagaccacctaa

SEQ ID NO: 639925 - DNA, 692 bp, Homo sapiens
ctctgcttctctgtaactttcactgactgatcccaggtcccagctctggagctttgcagaggcttccctctgttcctttgccccctctcctttgatagccattttcaaatatgggcccccaaaaggattcccagtgggatatcacctgctttgtttggacattacacttcgagtgtgaacctaagatgccattggccttttgggcagcaacatgacatcatagaccattttaaagaaactgcggggttttatttggtctgtctcccaggcgggagtgcagtggtgcaatcatagctcactgtagcctcagaatcttgggctcaggaggtcctccccgccccagcctcctgaatagctgggactacaggtgcatgccaccacacccaagtaattaaaaaaaaattttttttagagatggggccttgctatgttgcccgggctcagcccatttttaacataaactgctgtaggctactttaatagttaagtaaaaaatacrttctcagcctattattccactacttttaggatctttttgaagttgtagtttgtcagcctgtactttagccagcctggcagctttgggacatttgcaaattgggtaagatgcctttctatacctaggagatgattacagccaggctgatatttaagggctaaatttctcatatcacccactagagaccacctaa

SEQ ID NO: 639926 - DNA, 460 bp, Homo sapiens
cccagaaggtttgaggggaaacttgtagtcatggtaaccatgcaattcagaatttccccatgagagtgggtgatcccagtttgtgagaggcaaaatctgaggttcagagagataaagccgggcaccaaaatgtctagaggaaaaccagcacagcagttcatgctcttggggtgagggtagctccctttgccaagtgccccatgaccctcctatgsggaaggaaggacaagcaggtagcagagctacctagagcctggagcatgccaagaatgggagagccatgagggtagaggcgagagagagaaaacatgctcagagcaaacctaactagtgtttccactgaggtctaggatggggaacaacctcatgacagagaaaacaactttagttaacaatcagacaaatggaagcagggttggggtgtcttggagggcagaacaactttataaagtattttcag

SEQ ID NO: 639927 - DNA, 378 bp, Homo sapiens
agccaaccagcatgtaaggagcataactgccctgagaccgccgtgttgttaggatgcccagctagctatgtggagaagctgcatagactgagggagaagcccagctagtccccagttattcctgccaccctaactgaggcaccagacccatgagcaaagaaaccatcatggatgtcctgtcccatccagcttctgtgactgtaactgtatgaggaccccaatgaaaaccacacagctgagcctagtcaacacacagagctatggaagataatagtaaattgttgctttaagccacttggtgtttattcrtttgtttggagggggtcgggggcagagagattatgcagcagtcgaaaaccagaacacttgcataaatct

SEQ ID NO: 639928 - DNA, 656 bp, Homo sapiens
aaatgagaagtctgtgctgatccctgcatgatttgctttgaaatttattaatcatccaaaagctggtgaagaggggaaaaaagagaatgtaaactcatctggtagccagcgtgcctgagtgcgaagraggaggagagccagaaccctctgggtttccagcttgctatagctctagggcagcatgggacagtgtagactgatcactgacttgctatgtaacctggcaaaattttgacttccctgagcctcagttttctcatctgcaaaatgggagctcatgatgcctatgcacagggctgttggaagattagagttaacaaaggtttagcacctcatattgtgcctgacccatgtgaattactccgtaaatggtaacgattattactaacattactttatgactctcccctctccagatccgtgtccctgtctgtaacacagggctaagcaagttcttcagctattgggcttcatccactcaacattccactggcacttccagagctgccaccacacttcagactcccaaggctaacaatgaccaagaaagacagattctctgacgtcatggaacttactgtctttatgaatttccagggagaagggtgctaagatgctaacatggatactaaccatctgatgcaatattctgctgc

SEQ ID NO: 639929 - DNA, 656 bp, Homo sapiens
aaatgagaagtctgtgctgatccctgcatgatttgctttgaaatttattaatcatccaaaagctggtgaagaggggaaaaaagagaatgtaaactcatctggtagccagcgtgcctgagtgcgaagaaggaggagagccagaaccctctgggtttccagcttgctatagctctagggcagcatgggacagtgtagactgatcactgacttgctatgtaacctggcaaaattttgacttccctgagcctcagttttctcatctgcaaaatgggagctcatgatgcctatgcacagggctgttggaagattagagttaacaaagrtttagcacctcatattgtgcctgacccatgtgaattactccgtaaatggtaacgattattactaacattactttatgactctcccctctccagatccgtgtccctgtctgtaacacagggctaagcaagttcttcagctattgggcttcatccactcaacattccactggcacttccagagctgccaccacacttcagactcccaaggctaacaatgaccaagaaagacagattctctgacgtcatggaacttactgtctttatgaatttccagggagaagggtgctaagatgctaacatggatactaaccatctgatgcaatattctgctgc

SEQ ID NO: 639930 - DNA, 584 bp, Homo sapiens
aactcatctggtagccagcgtgcctgagtgcgaagaaggaggagagccagaaccctctgggtttccagcttgctatagctctagggcagcatgggacagtgtagactgatcactgacttgctatgtaacctggcaaaattttgacttccctgagcctcagttttctcatctgcaaaatgggagctcatgatgcctatgcacagggctgttggaagattagagttaacaaaggtttagcrcctcatattgtgcctgacccatgtgaattactccgtaaatggtaacgattattactaacattactttatgactctcccctctccagatccgtgtccctgtctgtaacacagggctaagcaagttcttcagctattgggcttcatccactcaacattccactggcacttccagagctgccaccacacttcagactcccaaggctaacaatgaccaagaaagacagattctctgacgtcatggaacttactgtctttatgaatttccagggagaagggtgctaagatgctaacatggatactaaccatctgatgcaatattctgctgcacagattgtgacctatgac

SEQ ID NO: 639931 - DNA, 603 bp, Homo sapiens
ggggctagtttgccactagattcctcaaatattccactagaagggcatggctttggcggggcaccaggccccctaagatcttagactacctgcaccccaactgtcagactgtcccctagttagctccagcaccaccccaggcaggggcacrtactccaggtcctgccatcagcataacgacccagtctgacatgcactttacagtcatgaaacacttttacctgtgttgtctcactggacccacacaacaaagtagagtaggatgggtgtctgtcttagtcctttcaggctgctataatgaagcatcacagattgggtggcttcccagcaacagacatttatatttctcaccactctggaggcctggacattcaagttcaaggccccagcaagtttggtgtctggtgaggaactgctttctggctcataaatggtggtttgtctcagtgccctcacatggcagaagggcagaaggataaacaggctcccttcagcccttttacaagggcactaatcccattcaggagggctgcaccctcacgacctaatcacccccaaaggccttacctcctaacaccatcactttgtgggggtaggatttca

SEQ ID NO: 639932 - DNA, 601 bp, Homo sapiens
atagatagatagatgatagatagatagatagatagatgatagatagatgataggtagatgatagatgatagatagattgatgatagatagatgataggtagatgatagatagatagatagacagacagataatagatagaaaaatatatatggctgggggtaaagccccctataactttatattatattattatgataaaaataaaataaaatccctctatactgcaggcttttatatccaactgcctagttgacatttcctcttagatgcatcataggtatctcaaaaacagcatattagtttctgaacacctgacctgccaccatcttcaccagctcactccacctgcagtctcccccagctcagttaagctcttgttaatccttccagttgctgacgccaaaacctttggagccatcttcaactctttctttcatattctctatcctctagagcctgtatatattttatgtgatatgtatgcccatgttctacatcagaaatcctctagcctctaccaytggaatacagtcataaactgaccaccttcactgctactgtttcattccaaacatcatcacctctcccttggattctcat

SEQ ID NO: 639933 - DNA, 610 bp, Homo sapiens
gcagctgggccatctggtttaccagctgtgaatggtccacctggggcttgaaggtcctatcacaaccccatggatcgcaagagttccatatcttgattttcttccgtgggtcagatatcattttagtgtccatctcctaacagaagctcaaaacaatggccagagggctccttactaagcataaataagacatcattcttccacttaaatcccacaggggtttccagtttactcagagtcaaaagcaacgttcttaaaatgttgacaagccccctcacagtctggtatctgtcacctccctgacctcgtcttctactacyatcttctatgttcacttctttccagccacagaggcctccttcctgttctctgaacatgccaagcttgctgtgcctcagggcctttgcacatgctctctatcccctgtctgagttttcttccccagatgtctgcatggcttacttcctcaccatcaccaaatcctcgctcagtgttgccatctcagcaaggcctgccctgaccactttattttatcaatatatgtattagttcttctcatgctactataaagaaatacctgagaccaggtgatttataaggaaaagaagtt

SEQ ID NO: 639934 - DNA, 563 bp, Homo sapiens
gggaaatctttcctgagtcctcatgcagtggggaaggtggccggtaaactggaagaggatcctgggggaaaggtgctrccctggggctgtggttcagctctcgaggtccttttatcccaagttgaggccgcctgcttttaagtcctgcctgcccagaaaaaaacctggggcatctggtcagagactggcttctccttcttaacagctcttgagcagggtatattaacactccgagcctctgttttcttgtctgtgaaatgggaataccaataatatcccatttattcttctctcacagtggtggtgaggatcaaatgacataatgcctgtaaaaagccctgtggggtaacaagtgcttttcaaacaagtttccaaggtgtgtgtgtgtttgtgtgagtgtgtgtgtgtgtgtgtatgagtatatgtgttacataggattgatccattggggcagagagacaactggctctcacataaggaggtcctccatcttcttgccttgcttttccaaaacttctcattgttctggagcttcccaggagagacaggcacaccccacttcc

SEQ ID NO: 639935 - DNA, 565 bp, Homo sapiens
ccaggtcaaaatgacttacctctcaggtgctgaaaacttaccggtaggacaactcctagaggctaggaaaacatccaggagacagacaatctaaagatgttgtaccccattttagaaaataaagtagtagtcattaggagctctgccttaggttctccaagaatgaagcattccaaactcaccttattttcctctttgatggggttactagactggtagataaggagaatgttacggacataatgtgtattgattctgcagtataattgacaaagcctgtcccgtccctatgaacaaggtggagaaatgtggactgggaaacagcmctttgatggattgaaagattgagacacaaatgcaaataatgtagttgagtggtttgggggctattctgaagcagagatggcaatttgtgacatcctcacccccatccctagacagacattcattgctaatccatcacatctctcttttcctctgaattcagatggagctcagaatccttctcagcacagggctccaagcagccactaggcagccaccagccattaggtttctgtggttg

SEQ ID NO: 639936 - DNA, 606 bp, Homo sapiens
cctggaattctagtctggctctcaccactgtcccactgccttgacccttgaccctttccttacctcacctgcctggatgactctcattcatcttttagatgtcacttccacctkgaagtcctcctggactccttctgtctatgttaggcaccacttccctggatccctgctctgagtgctgttgtagaatgcacctctcacactgaatcttgatggcagtttgctggtctacttgccctgcagcctgtaagcccttgagagcggggtctacatcttcctggcgtggtcatctcatacctggggtaacacctggtactcagcaggtgagaaggaaacattcagtgcaggaaccagtgaaggccaggtggcctccgcacacttgctccttagggcaggatcttctctgtccttgaggacttcaaggcaagaataataagcatcaaacaatggtgaatggtacaagatggtgcatgcatgctttacagaattaacaggacagacaatcagcctgcctgctcagagaagggagctatcactgttggcatattgaatattgtttgaaataaatgggccaccgaccaggatgtggaaattgcttttgtcata

SEQ ID NO: 639937 - DNA, 606 bp, Homo sapiens
cctggaattctagtctggctctcaccactgtcccactgccttgacccttgaccctttccttacctcacctgcctggatgactctcattcatcttttagatgtcacttccacctggaagtcctcctggactccttctgtctatgttaggcaccacwtccctggatccctgctctgagtgctgttgtagaatgcacctctcacactgaatcttgatggcagtttgctggtctacttgccctgcagcctgtaagcccttgagagcggggtctacatcttcctggcgtggtcatctcatacctggggtaacacctggtactcagcaggtgagaaggaaacattcagtgcaggaaccagtgaaggccaggtggcctccgcacacttgctccttagggcaggatcttctctgtccttgaggacttcaaggcaagaataataagcatcaaacaatggtgaatggtacaagatggtgcatgcatgctttacagaattaacaggacagacaatcagcctgcctgctcagagaagggagctatcactgttggcatattgaatattgtttgaaataaatgggccaccgaccaggatgtggaaattgcttttgtcata

SEQ ID NO: 639938 - DNA, 525 bp, Homo sapiens
cttaccatacatttgtgaaatgcacagtataaaaaaattccaattgttaggagattggcagctccaatttcctgcagcagktcttcaatttttccttgatcacagtcctccactgtggcctggtgtttctccttcatggctcctctgaagtgggcatgggtctctggccaggaagaacagtgcctcctgggacacaggcatgcccacctgccctggagccatgactctgtcttttctcaggactggaaaggctggtgcacctcaacatagactctggggaaaggtaccattttctgtctggaagctcctcctctgcttgctaggggatagcaccatgtttcaaagccaggccacttctatctctttctcctgtagaagggaacatgacagacatgtttcagcattcttgctggggacttcaggacacccaaaggaaaccacgtcatactccagatgatctgtccctgtgcacccaaccccaaaatgtaccatctctgtttggtgtgatctgccatgtgctgcagc

SEQ ID NO: 639939 - DNA, 552 bp, Homo sapiens
gggcagcaggcagcagtgactaaactgatataacaagtaactgctcctgtgctatctatagatggtccaacacttggtcattaattagaaatgctatcatatactcctgtacacacatgatctgtttcttatctgtttgtctattcttaggctaacgtcttgctgttttaatgactatggtttatgtaattgtaatatattttatgctggttgggtaaatccttcttcatcattcttctttttcaacatctgcctggctattcttgttccctttctcttccagatgaatttaaattacctgcattaagttccataaaattgygctgggattttgacagaggttgctttgaatctggggagaactgacgtctttacaatgttgatatttcccatctaggaatattagatgtctcaccatttatttagatcctcttatgtgatactcagtagagttttatagtttttctataaaagtttcgttcatattttattgggtttattccttgggaccttaaaggcatttgttgttattatttgttctttttttacgtt

SEQ ID NO: 639940 - DNA, 412 bp, Homo sapiens
ttaattgtactcagctgtgggctgatgtctctagagggtggagttaaaggtccgttcatcagtggtctgaagcaacttaccactctacatccttgaggcctgggaaaaccacagacttcttaactttttactttgaaacaattatagatacacaggaagttacaaaaatagtaagaagaggccccacataccctctcccagtggtaacatttcatataactatatttgatatcaaaactaggaagttaacatggatgcaatccacagaccttactaaattccaagactttttgttgacctttaattccttggtttttatttattcattcattcaaaaaacttttatggagtcacyggcataatagttatcaaagtgtgttctgcagagaacctatatcagatttacccaaga

SEQ ID NO: 639941 - DNA, 545 bp, Homo sapiens
tcctcagcacagcctttgagattgatcatttccattttacaggtcagaaaaactgagcctcagtttttccaaagtcacaagacaagggggtagcctagccaggatttgaatggaagtctgtctgatggaaacatttatgctcttagccagcatgttagtcagggttctccagagaaacagaaccgatagggtaatgtgtgtgtctgtgtacgtattagtctgttttcatgctgctaatagaaacatacccgaaactgggaagagaaagaggtttaattggacttacagttccacaaggctgggaaggtctcagaatcatggcargaggcaaagggcacttcttatgtggcggtagcaagagaaaaaataaggaagaagcaaaagcagaaacccctgataaacccatcagatctcgtgagacttattcactatcacgagaatagcacgagaaagaccagcccacatgattcagttacctcctcctgggtgcctcccacaatgcgtgggaattctgggaaatacaattcaagttgagatttgggtgg

SEQ ID NO: 639942 - DNA, 571 bp, Homo sapiens
tctggtacctgagggagtatttcacatctgcgttctcattcaagttttctactgtgtcctgtgaggtgagcaggacaaggattatcaccctgtactttctagataaggaaacccaggacctgggaggccaaggccagggcaagagtcaggcagagagaagaccagagcgcaggctgtgtgggctccttccactatgcagcaatcaaggctccctcccctgtgtgggctctttgggtctaacctgggaaccaggagacttgtgagtgytgagcagctgtgccccagcccgagccacagggaggccttacgttgagaagcccacactgtgttggcctccaaggagcctggaaccgacggtgccccatagagagggccctgtggggaggaggctagccacgcagacagcctgctgctaggtgtgccgtggaaccacggagctaattgcagatctggtcaccaccatgctgagcgccagggaggagggaatggggagacactaagcccacgagacaggaacacagtgcctggtgaaacagagccagccagtgctgatgcaagtattgactgagtt

SEQ ID NO: 639943 - DNA, 571 bp, Homo sapiens
tctggtacctgagggagtatttcacatctgcgttctcattcaagttttctactgtgtcctgtgaggtgagcaggacaaggattatcaccctgtactttctagataaggaaacccaggacctgggaggccaaggccagggcaagagtcaggcagagagaagaccagagcgcaggctgtgtgggctccttccactatgcagcaatcaaggctccctcccctgtgtgggctctttgggtctaacctgggaaccaggagacttgtgagtgctgagcagctgtgccccagcccgagccacagggaggccttacgttgagaagcccacactgtgttggcctccaaggagcctggaaccgayggtgccccatagagagggccctgtggggaggaggctagccacgcagacagcctgctgctaggtgtgccgtggaaccacggagctaattgcagatctggtcaccaccatgctgagcgccagggaggagggaatggggagacactaagcccacgagacaggaacacagtgcctggtgaaacagagccagccagtgctgatgcaagtattgactgagtt

SEQ ID NO: 639944 - DNA, 612 bp, Homo sapiens
cctccgcttgggccacctttttgctgatgaagtggcagcagaccaagctaccttcactccatggaaatacaacgcacacctgttggctctcaggtcctttccagagagatcagctctttggggagctgcatcccagcacgagagcattccaattccttccctccacctctgtgcccgatttccaatttgttggttttttccatttcatttccctcctgctcacctttcctccctgcrggatcatttggggctttgatttccttttgtcagagtgagcatttccttcctattacaccgtccctctctgcccctactcccatgactttgtttaattcagctgctttctgcacctggctctgcctcacagccacggggaaggaaggattacagccagaaagcgcgcttcacctccccgcacatgacactcgtctctgctaataacaggaagaaatgagctttaatgactgacaccgctgtgcctggactggggacttggagaaggcagtccctggtggtctgcccagtatcttggcagcaggatgctgggagagccccagaagccctggctgctggaggtcccagcctctctccctttgcctccaggaaggatag

SEQ ID NO: 639945 - DNA, 576 bp, Homo sapiens
tgctaccagttctgggaccctcctgtgggaattaattgctctaacctaaactttgcccactgtagttttaaatgagtttgccctcagatgtgagtaatctggccgtcttatctttcactccactgacctccagggttggcctgacaggtcaggtggggggtccttatctccttcctcactttatccatctcactcaggtcttcggttcaggctccacaamtgattgatgctgttttcctgttagtatctctttttcatcatgcacgatcctccatagtgatggaatggagacagcttctcagagaaagcacagctttggaaggtaagtgccgtttggatggtgagaccatcagatcaatttaactaggccaagactctgatcaatgttcttaaacctatgtaacccactgccacagagatttcaaagtgaggaagggtcctggacgcccattcatccattctcaatgaattattcatttgaccagcactttctgactttctagcttcagccagacaccgtacaagggacaggggagactgagatgaagaacactcggtgcttcttcccaaggcact

SEQ ID NO: 639946 - DNA, 526 bp, Homo sapiens
ggtgtgtcttttttcctttattttgttaatgtggtagaattacattgatttttcatattctaacccatctttgccttctggggaaaaattcaccttgatcttggtgtataatcgttgtgatatactttaaattargtttgctaacattttgttgagggtttttgcatcaatatttctaaggaatattggtttgtgttttcttgtagtatcgttgtctaattttggtattaacataaactggtctcatagaatgagttaggcagtattccttcctcttcaattttttagaagagtttgagaaggattggtgtagttctttaaatgtttggtagaattaaatgattccatctggtctggggttttgtttgttgggaagtttttgattattaattcaatctcttttctaattataggtctattcaaaattgtaatttcttcatgatttagtcttggtagattgtatgtttctataacagtgtccatttcatctcacttatccactttgttggtatacaactcttcctaa

SEQ ID NO: 639947 - DNA, 526 bp, Homo sapiens
ggtgtgtcttttttcctttattttgttaatgtggtagaattacattgatttttcatattctaacccatctttgccttctggggaaaaattcaccttgatcttggtgtataatcgttgtgatatactttaaattaggtttgctaacattttgttgagggtttttgcatcaatatttctaargaatattggtttgtgttttcttgtagtatcgttgtctaattttggtattaacataaactggtctcatagaatgagttaggcagtattccttcctcttcaattttttagaagagtttgagaaggattggtgtagttctttaaatgtttggtagaattaaatgattccatctggtctggggttttgtttgttgggaagtttttgattattaattcaatctcttttctaattataggtctattcaaaattgtaatttcttcatgatttagtcttggtagattgtatgtttctataacagtgtccatttcatctcacttatccactttgttggtatacaactcttcctaa

SEQ ID NO: 639948 - DNA, 526 bp, Homo sapiens
ggtgtgtcttttttcctttattttgttaatgtggtagaattacattgatttttcatattctaacccatctttgccttctggggaaaaattcaccttgatcttggtgtataatcgttgtgatatactttaaattaggtttgctaacattttgttgagggtttttgcatcaatatttctaaggaatattggtttgtgttttcttgtagtatcgttgtctaattttggtattaacataaactggtctcatagaatgagttargcagtattccttcctcttcaattttttagaagagtttgagaaggattggtgtagttctttaaatgtttggtagaattaaatgattccatctggtctggggttttgtttgttgggaagtttttgattattaattcaatctcttttctaattataggtctattcaaaattgtaatttcttcatgatttagtcttggtagattgtatgtttctataacagtgtccatttcatctcacttatccactttgttggtatacaactcttcctaa

SEQ ID NO: 639949 - DNA, 620 bp, Homo sapiens
gtgtgtgtacatatgtatgtgtatgtgtatatatttgatatatatgtacagcaaatattatagtggggaaaaggaagtgaagaattggttatatggctatggcaggacaagactcaagaatttacagaacctggggccctgtccatacactcccttgcaaatatccccaattctagtcccctcttgttgttctctgtccatcttgcagggcaagacctgaggtaaacctaactgtgccagtaccagagttgctgaacactgtcagggagaatcacacacctgagctgactggctgctctttaacctcatctccaactgtaaacgggtacttggtactgcttgctcatcttactgatttccttcactccttaagatgactttgtgtctcctcactttcccgtgtccctcatcttcctgctgagctcacttcagagcacattaggaaaaataaatgccatcagtgtgatgtacttatcttcttcctccttgccgacctgcacccagcccctttctccttctgttaaaatgaagggcctgtcccttyacctatcaaaggccagttccaccatttgtgtttggagtttttctttccaccgttcgacttcccccttcttttcatg

SEQ ID NO: 639950 - DNA, 627 bp, Homo sapiens
catcgcagtgtcagcatgctctagtatttcccttattgacttcacatgctgtaccctcttctctactgctctatttttatgctcccctctcagcaaaattcctttaaaatagtcactgcacatgttaactctgcttcctctctcaccattcactcttcagtttactccaatctggattctctttctaccactctccactgaaaccatgcttgcgaggcttgccaatggttagttagctgtgttcactttaaattcatagtagcatttgattcacttagcccctcccttctttttggcccttatacatcacttgcttctggttttcctctttcacactgactgctcctttttagttttcctcctgtatcctacttccaaatgttagagttgcttagggttcagttctaaggcttcttctctcttttcttgctccagtttctccttaggtcatgtcatttattgccctaatttaaataacatcttcatgttgataaattctaaataaggagcccagacatctctgggccaccagacttgcatatccagacttgcatatccaactgcctattaaatatttccacttagatagcccatatrcatctcaaatttaacatgccccagcgagaa

SEQ ID NO: 639951 - DNA, 572 bp, Homo sapiens
ataaaggaaagaggtttaattgacttacagttcagcatggctggggatgcctcaggaaacttacaattatggtggaaggggaagcaaacatgtccttcttcacatgatggcaggaaggagaagtgctgagcaaaaggggaaaagccccttataaaaccatcagatctcatgagaactcactatcataagaacagaagcatgggggtaaccgtccccatgattcaattacttcccaacagatccctctcatgacacatggggattatgggaactacaactcaagatgagatttgggcggggacacagccaacccatatcaacaggttagggatcaaacccctccgggccataccttgggaattttctccaactctcttcacccaagagtttgtaatctcaaagagtgaagcaatactttgcagagttcattcaaaggatcatagtatcytaagaggggcagctctgtagtacctggaatgggtagcatgagggccgacagcagtgctggcaaacagtagtactaaagcagcagagaagctttacaagctactgacatgcaggaagaggaggtc

SEQ ID NO: 639952 - DNA, 564 bp, Homo sapiens
gagaggcctcctgttcacttctttccatctttcctggaagcctgatctccctttctgcctcccttctccctccatcctgaactctactgtcagcacagtcttccaaaaactgtggaaccatctagacctctgtggatgcggaactgtttccaaggccaacaactgcaacaattataactttatatttctattccacctccaacttccatttccaccacatggccaaaaacrtagagaattttcagtcatttcatgtttaaattcacttaaatccagtgtcttctccattccctcttcttcccgggatgtatttcaggtttgcggttgtgtcattgtattggggtggggataggtgtctggtcttatgccgtagtccacttagatttccaatatctttgtctggagttaaggaaaactcaggcctttcactgggccctctgccttgggtccctacgtgccgcctcttacgtcccccacttcactaaggcatggcacatatttctggggtttgccaaactccagaaatatgcgtcataccacagtacaagcccattacacagccaa

SEQ ID NO: 639953 - DNA, 564 bp, Homo sapiens
gagaggcctcctgttcacttctttccatctttcctggaagcctgatctccctttctgcctcccttctccctccatcctgaactctactgtcagcacagtcttccaaaaactgtggaaccatctagacctctgtggatgcggaactgtttccaaggccaacaactgcaacaattataactttatatttctattccacctccaacttccatttccaccacatggccaaaaacgtagagaattttcagtcatttcatgtttaaattcacttaaatccagtgtcttctccattccctcttcttcccgggatgtatttcaggtttgcrgttgtgtcattgtattggggtggggataggtgtctggtcttatgccgtagtccacttagatttccaatatctttgtctggagttaaggaaaactcaggcctttcactgggccctctgccttgggtccctacgtgccgcctcttacgtcccccacttcactaaggcatggcacatatttctggggtttgccaaactccagaaatatgcgtcataccacagtacaagcccattacacagccaa

SEQ ID NO: 639954 - DNA, 551 bp, Homo sapiens
aaatgtgaatgatccattctgtatttctccaagacagtgctgatgactgctagcaagtgaattgacacttgcattcaaagttaggtttgattagaggattgttagtgccttcatttgggggactctttagacagttgcttgggccgttcagagcctcagcccctccacaacagaggcactgatttgaattcagcttttgagcacaggtgtcaggtaacagaaatgaaccaaattggtagccaacccctacctgaaacttgaggggaggaaacaagagttaaatgggctggaatgaagaaactggaggaaagatggcaagattagaaaaattaaaagtgatgaaatgggcatgaggtaaaygtggcatccattcctttctctggttctttaaaaaaaaaatccaaatcaattaaccaaagtcaacaactctatcctcaagtttattttcctcacacgctgctttcctcccaaagggcaaactttggattaaaatttggaaatcattttacaagtcgataaaagttggccaactgtgacattatgccaaaaca

SEQ ID NO: 639955 - DNA, 551 bp, Homo sapiens
tctccctcagcacattcacatactcatgtttctccctccttgaagacaaagaaattctccttactctctccaactctgtctaatccaacacttctctctccttccatggccgagctttttgagagtggtctacatcagaattattttaagaccttctaaaagcccttaaaaacacttacatttggaggasccatctcacataaaaggaagtagaacaaaatgcacccagatcttatgttaaatgcatttaaaaatttttgcttctgatattactgagtggcaagaaacagttaacttacaactggctgtgctttctcagcaatcattgcacatacatacaaaagaatgttgcaaagttaaaaatctaatcaaaaaattatttctacatgtaatgaagtttttacaaatattaaatttaaagattaatgaagttgaaacaatgttacattttggagatatttaattaaacatgtcttcatttaattttgcagtttcctttttgcattctgaagccagtactttttattcagacctcaaacataatttggaca

SEQ ID NO: 639956 - DNA, 551 bp, Homo sapiens
tctccctcagcacattcacatactcatgtttctccctccttgaagacaaagaaattctccttactctctccaactctgtctaatccaacacttctctctccttccatggccgagctttttgagagtggtctacatcagaattattttaagaccttctaaaagcccttaaaaacacttacatttggaggagccatctcacataaaaggaagtagaacaaaatgcacccagatcttatgttaaatgcatttaaaaatttttgcttctgatattactgagtggcaagaaacagttaacttacaactgsctgtgctttctcagcaatcattgcacatacatacaaaagaatgttgcaaagttaaaaatctaatcaaaaaattatttctacatgtaatgaagtttttacaaatattaaatttaaagattaatgaagttgaaacaatgttacattttggagatatttaattaaacatgtcttcatttaattttgcagtttcctttttgcattctgaagccagtactttttattcagacctcaaacataatttggaca

SEQ ID NO: 639957 - DNA, 551 bp, Homo sapiens
tctccctcagcacattcacatactcatgtttctccctccttgaagacaaagaaattctccttactctctccaactctgtctaatccaacacttctctctccttccatggccgagctttttgagagtggtctacatcagaattattttaagaccttctaaaagcccttaaaaacacttacatttggaggagccatctcacataaaaggaagtagaacaaaatgcacccagatcttatgttaaatgcatttaaaaatttttgcttctgatattactgagtggcaagaaacagttaacttacaactggctgtgctttctcagcaatcattgcacatacatacaaaagaatgttgcaaagttaaaaatctaatcraaaaattatttctacatgtaatgaagtttttacaaatattaaatttaaagattaatgaagttgaaacaatgttacattttggagatatttaattaaacatgtcttcatttaattttgcagtttcctttttgcattctgaagccagtactttttattcagacctcaaacataatttggaca

SEQ ID NO: 639958 - DNA, 570 bp, Homo sapiens
taggcttacccaatgtgttacaatggttttcactctcagctgttgacaattggcctaattttattctttgtactagcaaacatatacttcttgaacaagaaaaggggcattgagagacagcctggtgtccctaagataatcactcctggggccaaagctcatccttatgtttgcttgggcatgcccatgargatttccccacattgttaccaataaccctccaggaagatgacccagcaccaactgcattctactgacccacaaagggaagttccagtcttcactggagagaggctcagcaggttctgccactgccttggtggtgctctgcctgctggcctggcccggcccatggtgtctgctctggctgacctttgtattgcctcacctcactccttgcaccctgtcctcgagcctccagccctgaggcgtctttgggctgctgtgatgcaagaacactggtgcatccagctgcaggcaaggctgcgggcaaggagagggtcacagctctcacccacttgctagatcagcccacattttatgctttgcacctcgagtgctgttaccagt

SEQ ID NO: 639959 - DNA, 570 bp, Homo sapiens
taggcttacccaatgtgttacaatggttttcactctcagctgttgacaattggcctaattttattctttgtactagcaaacatatacttcttgaacaagaaaaggggcattgagagacagcctggtgtccctaagataatcactcctggggccaaagctcatccttatgtttgcttgggcatgcccatgaggatttccccacattgttaccaataaccctccaggaagatgacccagcaccaactgcattctactgacccacaaagggaagttccagtcttcactggagagaggctcagcaggttctgccactgccttggtggtgctctgcctgctggcctggcccggcccatggtgtctgctctggctgacctttgtattgcctcacctcactccttgcaccctgtcctcgagcctccagccctgargcgtctttgggctgctgtgatgcaagaacactggtgcatccagctgcaggcaaggctgcgggcaaggagagggtcacagctctcacccacttgctagatcagcccacattttatgctttgcacctcgagtgctgttaccagt

SEQ ID NO: 639960 - DNA, 595 bp, Homo sapiens
aggctgcagtgagccaatatcacaccattgcactccagcctgggcaacaaaagcaaaactctgtctcaaaaaaagaaaagcaaagggctccttttcctcctcctcctcctcctcctcctcccccctcccttcttcttcttctcttgatcttcatyatcattataatctctaccatttcttggacccttcttatttaccaagccctgtacatatgtactttacatgtgttacctctgtaatcctcccagcaaaaccgtaagaagttctattttattttttaaaaaactggggatgagaaccattaaatgaattgcccaaagtactaccagctcatacgtgggagaggcagaattgactcagttctgactttccattgtgccaagccacctgtatacgtctacactttaattaggaagatttttccccctgatttcttgtaagcactttctagtttggatgacttcctttcaaatgccacataggactaaaaagcatttgggtaaaaactctgattattgatcctttgattagatttctttagtaaagaaaaacaaaacacttctcaagccttttactgtgttggtagcaacagtgc

SEQ ID NO: 639961 - DNA, 546 bp, Homo sapiens
tggtccattcacttttactactgtgagttgctgcattgtattgattaagtcatagttttcaaaatccatctttttattgatatactttttaaattgcttccaggtgttttggttgtgtctgttttgctgttaccaactattgcagtgaatatttgttgtcaatgtctacttgtgaacgtttgcgagaatttttctagagtatattccaagatatggaattgatgggtygtagaatgttcctcactttacctttactagatattaccaaattgttctccagtttaccacctaccagaggtagatacatgaaagtttcctatatcccacctccttaccagctttggtactatcagatttttgtttatttattttgcttacctgatggatgtgatgtattatttcattgtcgtttgaaggtcttcaggttctggacaaaagctgacttggtagctttgtgagaacataaccttgttctaaaggaagtggatagttcataagaagaatttattcaattaggtcccgatgactatgataaaagaaatcaat

SEQ ID NO: 639962 - DNA, 592 bp, Homo sapiens
atggaaacagagagaacagggctctaatctttgcccttcatcttgaagctttttcactaactgtggcactctgggcatgtcattttcactttcagaaatcttcattttctctcctgaaaataacatttaattcatggggctatcataaggattaaataaataaatgtttttggcaggtaggagatcctggagaaatactggttccttctctcagtgtctctcccttttttttttttttaagccaaacactaacacttagaaaaattgcagcatttttctaaactcgtcaaaactggccagacttcccaatatggtaatcactctaaatgccagagctataatttgttgcccttcaaaccatgatgatgtttcacattttaaaagcaaaccaccaaggggaaatgtgtctgttttcctggcaactaaggaggaaacrtagattgattttgattattttggtaaggaagactgcatctgctctgagcaagcaccaccttgctggacttatatgaaaatggataacccagtaaccaagttttggtaattttattttggagcacagatcactttttgaggataatgaagagagaag

SEQ ID NO: 639963 - DNA, 459 bp, Homo sapiens
ccacagaaaataaagctgcagagagttgggggaagacagtagggggagaagctgtctggagaaatgcaggtttcttcaagccttcactcatactgatcagttcatgccatatgatgttaccaccagaaaccagagattaaacagccaaaagaattagaggaataatgcctattcccatcagccagagtgggaacttaaaattcatgaaacattgggtgtataggtagataactcagaagtgaatkgcttcacaagtgaagtcaaattaactgtaaacaaaaactcctctggtcctgattaaaacaatcttaaaagccagaccaaaaggatcatattattttcacataaattaactgctcaagaatatatgtagaaatacaaaaatatccagcgcccaaaaagataaagttagcagtatctggtatctagtataaattaccagatatgaaaagaaacaat

SEQ ID NO: 639964 - DNA, 519 bp, Homo sapiens
tgagtagacttaagaataatcaagtaaatgtaacatacatttatagactagaatcttctgctttaaaggacattttggrggacaattggtgaatattaaataaattttgagaattagttcccataatctatcagtgttcattatctgattttgatggttatactatgtacaaggatattagaaaattgtctttgcttatagaagtatgccaacgtgttcattggtaatgaagcatcagtttgtctaatttattttaaatgcttcaggctaaaaaaaatatagttttgtactatatgggtaacattttttgagattttttaatttaaaaattaaattaaaaatgtgttaagtatttacacatgtaaatactacaactttcttaaaattattaacaaaatgtaaaagttaaaatataagttagaaaacatttgagataaatattaatacatatcactaagatttcatgtggggaaatataaagctaagatctaattcagatacggtaggatttaataaaaa

SEQ ID NO: 639965 - DNA, 537 bp, Homo sapiens
aaactttgcttgttctcattcagatggtctttgtttacttccataaaatacactaccattaaaactaaggattcttttttaactaacagctttatcaagacacatgaatctgtccagtcaatataaattggatctcctagtgtgccaggcagtgtcaggcagtaaaaatgtaagcatatacactcttgccctcggaaagcctttacactgtgtaggatagaaacaagtaaatatacatcatacactgtcaaatacaaaactgarcccaagttaaaattaacacaggctgattattcataaatgtgcaggaagagaacccatctgtcatcactttcatttcagcagaggtacaaggatgttagaaatgagagtaaattttacctggtaaaaaagaaaaaaatgctgaaagcgtctctaattggtgagcattacattaaagtgggatgtggaagcagagacttattcaggtatatttgagattagttggtgtgctggaactaggtgagccggcattttcagaatatttcaaaacaggaa

SEQ ID NO: 639966 - DNA, 582 bp, Homo sapiens
tttagctttgcaaattggagcaaggtgcccacaaaagttagattattatccttccacagaaactgggagataggagcactgtcttcctttatgttaacatttatattagtctgttctcatgctgttatggagaaatacctgatgctgggtaatttataaaaaaaggaggtttaattggctcacagttctgcattgctgaggaggcctcaggaaagatacaatcatggtggaaggcaaaggagaagcaggcaccttcttcacagggcagcaggatggagtgagtgcaagcaggggaaatgccagatgctataaaaccatcagatctcctgagactcactcrttatcatgagaacagcatggcggaaaaccacccccatgagccaattacctccacctggtcccgcccttgataggtggggattatggtgattacaattcaaggtgaaatttgggtggggacacagagccaaaccatatcagcgtttcaaaaagatggcttccaagctctgaaaggtattcctgagtcataaagttgacaaaagacctatctagttttcaaaataatttctgtacatttcgaag

SEQ ID NO: 639967 - DNA, 631 bp, Homo sapiens
aaattgggtggaaggtacagagatattttacttactccctgaccctacacacacatggcttcccccactttcaatatcctccactttgtggtacatttattgcaacttgaacctacatcgacacatcattatccccagagtctatagtttacagtagggttcacacttggggttgtacattctatgggtttggacaaatatataatgatatgtattcaccattacaatatacagggtaatttcaataacctaaaagttctctgtggtctgcctatttatccctctttactctacatcctcgtcatcattgattgttttactgtcgccatagttttgacwtttcaagagatttatatagttggaattacatagtatatagccttttcagattggtttctttcacatagtaagttatgtttacttaattttcctctatgtcttttcatggctccatagttcatttctttttcacattgaataatgttccattgtcttctcccctgacttttttacttttctcatttcatttacttttctcttttcaatctggatgccttctatttcactttcttgcctaattgtccgggctggaacccctagtacaatgttaaataaaataggcagaaggaca

SEQ ID NO: 639968 - DNA, 631 bp, Homo sapiens
aaattgggtggaaggtacagagatattttacttactccctgaccctacacacacatggcttcccccactttcaatatcctccactttgtggtacatttattgcaacttgaacctacatcgacacatcattatccccagagtctatagtttacagtagggttcacacttggggttgtacattctatgggtttggacaaatatataatgatatgtattcaccattacaatatacagggtaatttcaataacctaaaagttctctgtggtctgcctatttatccctctttactctacatcctcgtcatcattgattgttttactgtcgccatagttttgacttttcaagagatttatatagttggaattayatagtatatagccttttcagattggtttctttcacatagtaagttatgtttacttaattttcctctatgtcttttcatggctccatagttcatttctttttcacattgaataatgttccattgtcttctcccctgacttttttacttttctcatttcatttacttttctcttttcaatctggatgccttctatttcactttcttgcctaattgtccgggctggaacccctagtacaatgttaaataaaataggcagaaggaca

SEQ ID NO: 639969 - DNA, 653 bp, Homo sapiens
aagccactatatgatttgtctatgtatagctttttcctgctgttcttgccstgtactctttgctgtaataaatcttagccatgagtataattttgtgttgagttatatgagtcctttcagaaattcaccaaagtagtaggtgaaactgccaaggcagcaatagttgttttttacacatgtatttttttaacgttccattttaattccatgtgactggacatttttaatattttaagatattaaaaaactaagcatattgaagatctatatctttttaccccaatagttggatgcaattttataataattgctaccattttcatttaaaaaaaatttttactctttttctaaatcagtctctcttagcctataacaacatttatttgtaatgaataaaggtactttgatataaagtaacttttatcaaaggtgctttaagcctactgatacctatgggaaaatgattcattaaaatattaatggactaatgtaatactttgtaatttttcctgaggtgtaataggaacagtatggacttagagtcactttctcaacacagagttaaaccctatctctgtctctttcaagccgtgtcgttttgacaagtgctgtaggaaaaacatcacctacctcataaagttgttttgaagatt

SEQ ID NO: 639970 - DNA, 653 bp, Homo sapiens
aagccactatatgatttgtctatgtatagctttttcctgctgttcttgccgtgtactctttgctgtaataaatcttagccatgagtataattttgtgttgagttatrtgagtcctttcagaaattcaccaaagtagtaggtgaaactgccaaggcagcaatagttgttttttacacatgtatttttttaacgttccattttaattccatgtgactggacatttttaatattttaagatattaaaaaactaagcatattgaagatctatatctttttaccccaatagttggatgcaattttataataattgctaccattttcatttaaaaaaaatttttactctttttctaaatcagtctctcttagcctataacaacatttatttgtaatgaataaaggtactttgatataaagtaacttttatcaaaggtgctttaagcctactgatacctatgggaaaatgattcattaaaatattaatggactaatgtaatactttgtaatttttcctgaggtgtaataggaacagtatggacttagagtcactttctcaacacagagttaaaccctatctctgtctctttcaagccgtgtcgttttgacaagtgctgtaggaaaaacatcacctacctcataaagttgttttgaagatt

SEQ ID NO: 639971 - DNA, 577 bp, Homo sapiens
ctactctcagcaatatcatcagttggatgcttgttataaatgaaaaatgtcaggccctgctcccaacattctagatcagaatctgcattttaacaagatcaccagatgatttgcatgcactttatggattgagaatcactgcttttggacaatggtagtgaatctccagcctgctgcacaatagaatcacctagaagtcttttaaaaaatggtggtccccasgcttttacccaagactgaaccatagtctctgggcatgggaaccccaggcatctgtgtgaatccaagtttgagaacaactgcacattccaaatgtcatgaagcaagaatgaagtcaatcttacataaactcgtaaacttctagacatatacagtccaaaaaaaaaatatgttggaagtatgttttgagtgtctattcagatagtagatactgtgttaggatcctatggacacaaagatgagtaagacatagacctttatatgaagtaatcataatctagtgacagcatctccttcctaatctctatacttcatgcatagaaaaaaaatactgttaacaatataagttattttagtg

SEQ ID NO: 639972 - DNA, 577 bp, Homo sapiens
ctactctcagcaatatcatcagttggatgcttgttataaatgaaaaatgtcaggccctgctcccaacattctagatcagaatctgcattttaacaagatcaccagatgatttgcatgcactttatggattgagaatcactgcttttggacaatggtagtgaatctccagcctgctgcacaatagaatcacctagaagtcttttaaaaaatggtggtccccaggcttttacccaagactgaaccatagtctctgggcatgggamccccaggcatctgtgtgaatccaagtttgagaacaactgcacattccaaatgtcatgaagcaagaatgaagtcaatcttacataaactcgtaaacttctagacatatacagtccaaaaaaaaaatatgttggaagtatgttttgagtgtctattcagatagtagatactgtgttaggatcctatggacacaaagatgagtaagacatagacctttatatgaagtaatcataatctagtgacagcatctccttcctaatctctatacttcatgcatagaaaaaaaatactgttaacaatataagttattttagtg

SEQ ID NO: 639973 - DNA, 577 bp, Homo sapiens
ctactctcagcaatatcatcagttggatgcttgttataaatgaaaaatgtcaggccctgctcccaacattctagatcagaatctgcattttaacaagatcaccagatgatttgcatgcactttatggattgagaatcactgcttttggacaatggtagtgaatctccagcctgctgcacaatagaatcacctagaagtcttttaaaaaatggtggtccccaggcttttacccaagactgaaccatagtctctgggcatgggaaccccaggcatctgtgtgaatccamgtttgagaacaactgcacattccaaatgtcatgaagcaagaatgaagtcaatcttacataaactcgtaaacttctagacatatacagtccaaaaaaaaaatatgttggaagtatgttttgagtgtctattcagatagtagatactgtgttaggatcctatggacacaaagatgagtaagacatagacctttatatgaagtaatcataatctagtgacagcatctccttcctaatctctatacttcatgcatagaaaaaaaatactgttaacaatataagttattttagtg

SEQ ID NO: 639974 - DNA, 491 bp, Homo sapiens
tcttattattgtaattaaaattaacgtaagaaattgaatgactactaagccagtccttatgtgcttctaaaaaaaatctgggyaatttatcaacatatctaaagtaagtattaataagcagagggtgtatgtagaatgactgaagaaaagatcagaatttagggaaacaatgctatttgaatggagactgtatatgtgtgggtgggggagcacttctcagcagaaaactgcattgccccatacaggaaagtcttccaagcattacttaattctagctttttattgactgagctaattttcaactctataagtggtaggtctctagtagacctttgaattatgtcttgcatagtagaggttcaacacacttcctttccagtctgtattaagaccagttttgccaccctttacatatttctttcaacattcctgatctataaatgtgcctgcttatacagtcctctttgaaccagttataacatgtgtctggc

SEQ ID NO: 639975 - DNA, 491 bp, Homo sapiens
tcttattattgtaattaaaattaacgtaagaaattgaatgactactaagccagtccttatgtgcttctaaaaaaaatctgggcaatttatcaacatatctaaaktaagtattaataagcagagggtgtatgtagaatgactgaagaaaagatcagaatttagggaaacaatgctatttgaatggagactgtatatgtgtgggtgggggagcacttctcagcagaaaactgcattgccccatacaggaaagtcttccaagcattacttaattctagctttttattgactgagctaattttcaactctataagtggtaggtctctagtagacctttgaattatgtcttgcatagtagaggttcaacacacttcctttccagtctgtattaagaccagttttgccaccctttacatatttctttcaacattcctgatctataaatgtgcctgcttatacagtcctctttgaaccagttataacatgtgtctggc

SEQ ID NO: 639976 - DNA, 491 bp, Homo sapiens
tcttattattgtaattaaaattaacgtaagaaattgaatgactactaagccagtccttatgtgcttctaaaaaaaatctgggcaatttatcaacatatctaaagtaagtattaataagcagagggtgtatgtagaatgactgaagaaaagatcagaatttagggaaacaatgctatttgaatggagactgtatatgtgtgggtgggggagcacttctcagcagaaaactgcattgccccatacaggaaagtcktccaagcattacttaattctagctttttattgactgagctaattttcaactctataagtggtaggtctctagtagacctttgaattatgtcttgcatagtagaggttcaacacacttcctttccagtctgtattaagaccagttttgccaccctttacatatttctttcaacattcctgatctataaatgtgcctgcttatacagtcctctttgaaccagttataacatgtgtctggc

SEQ ID NO: 639977 - DNA, 609 bp, Homo sapiens
tatttcttgtaggactggtgtagttgtaatacattttcttagtttaygcttgtctgggagagaccatttatctttcattcctcacaaataacttcgcttggtatagtattcttgagtggcaggtttttttctctttcaccatctgaacatatcatcccactgtctcttggcctgtaaggcttctattgagaaatcactgtctaatggagagttcccttataaatgactagatacctttcccttgctgtttgtagaatgtactcttcttctttgatgtgacaatttggctataatgtgccataaaaaacatcttttgaattttatctatttggggatctgcaagcttcctgtatctagatgtctatgcttcttgttagagctgggaaattttcaactattaatttgttaaaaaagatttttatgactttggccttcttttcattttcttgaatatccaaaatttgcctatttgctcactttatggtgtcccatgtgtcatataagctttgttcactgtttttcattttttaaaatgtttcgtctggctgaactatttcaaaagacctgtttttaagttctgagatcctttcttctgcttaatctagtcta

SEQ ID NO: 639978 - DNA, 486 bp, Homo sapiens
ggattacaggcgtaagccctgtgcccagccgatactattcctcttaatttaagtcattatttcacaggtcagaatctgtcctattccttcagccatcaatctttccccagacaagactgaagaatattagcaaatttattttggagatagaatttttctctgttggtaatcagtcttaaataatgaaatagtgtcctgagagaacagtagaggtkctactaatttagaacattttaaattagacataatgacattgctagacatgatcttgttaggattgtaataaggctatgtccccactctttatatgactctgaaatcattcatttggaaggattcctgttctcattgaagacatcatacttttttttgttcaagtggaaggatttattctaaaaaatatattccagttcatctcattaataatgtatattgtaaggaacaatcttgtgccagcaggtgtatagaacagttggcccagtaggt

SEQ ID NO: 639979 - DNA, 576 bp, Homo sapiens
aggtgccctttctgtttgctgatatactattgcatttttaataatattttactgcatttggcattcttttacacttcatattttgaccttggttttaattaaactatgaaaatatttttatatctaaagctactactctggtgacagtgaaaatcagacgcagaaagtcagaacatcagaaaatgctactctgtgatagtaatatattggtcagcatgtttgtattcactttgcagctgtgatgagcaagaactaaagaaacagaaaaacacaacatatggcatgaaaaataaaggtcatgaccatgtgttgattatagtaatamaacaatcagaagtaaaactaatgtaccaacaaattttctggccattaaatgagccagaagagaccacgaagagacaatgaaaggtgaatgtggatctttaggaggttgactccaaggtgttaagaagcaccatggtgaaacacgtctaaaaaaactatggcaaataaggtattttgacaaacttcttaaagtaataatgaaaaatgcagttttgtgcaaatttacaatgttgataaaaagtttggcactgt

SEQ ID NO: 639980 - DNA, 521 bp, Homo sapiens
cagataataccaataaataatgttgactcttcttgggtatggaacaaggataactagagatatgttttcttattgcctcaaaaataatactgaaacagctatgtgaacccactgcagattagtatgactaggaaaaataactttaatatgttattattcatggatgagtattttcccctcartatgacatttgtaacatgatcattacactcatgaagaccaagcataaacacattttaaaatgtaagcatgcagtaattaacagaggttgaagaatccaaatattctaaaagcattcagtttgtaggacatattgtctcaaatgcttggaattattttgataaatcaatattaacaaatacttggcatagccgtcaaactagcaatgatgtttgaaaaaccctgctggtgaagactttaaatgatacttctgcataactataagaattaatatcagacctcatcactcaaactaaatttaatcacccaagagtgtggaaaagttagatttttaaaaagca

SEQ ID NO: 639981 - DNA, 521 bp, Homo sapiens
cagataataccaataaataatgttgactcttcttgggtatggaacaaggataactagagatatgttttcttattgcctcaaaaataatactgaaacagctatgtgaacccactgcagattagtatgactaggaaaaataactttaatatgttattattcatggatgagtattttcccctcaatatgacatttgtaacatgatcattacactcatgaagaccaagcataaacacattttaaaatgtaagcatgcagtaattaacagaggttgaagaatccaaatatyctaaaagcattcagtttgtaggacatattgtctcaaatgcttggaattattttgataaatcaatattaacaaatacttggcatagccgtcaaactagcaatgatgtttgaaaaaccctgctggtgaagactttaaatgatacttctgcataactataagaattaatatcagacctcatcactcaaactaaatttaatcacccaagagtgtggaaaagttagatttttaaaaagca

SEQ ID NO: 639982 - DNA, 575 bp, Homo sapiens
cccacattggggaggagggatcttagcttctagggataacttcagtgggggaacaggactgagaaataggaggacaggagaaggtcagaggaaaacttgttgcatctagaactgctgcagacgacttcattttaggatattgttttctgagtccaacacagytaatggagcaatatgtaaacaaatgtataaattttttgtaagtttaattttttttcagaattaaaagttaaaaatgtgtattgttatttaagtgagattgaaattgttaaaaataacattaaatttactattttattcatagacaaaaaattatatggaaactggattttttaatactgttcttaaattactttctacacaccctaatgaagacaaataagagtatcagaataccgtgtgatatcatttgaatattttacccatccaaatctcatattgaattgtaatctccaatgttgaaggtggggtctggtgggaggtttttgggttatgggggcagatcccttatggcttggtgctgtactggtgttagtgagtgagttttgtaaaagctggttgttgtaaagtgtggc

SEQ ID NO: 639983 - DNA, 599 bp, Homo sapiens
ttatttttttgagacagggtcttgctstgtcactcaggctggctcactgcagcatcagcctcctgggatcaagccatcctcttgcctcaacctcccatgcctcccatgtagctgagaccacaggtgcatgccatggcacatcactatttttttttttattttactttttgtgaagatgggtggggggtggtctcactttgttgctcaggtgggtctcaaactcttgtactgttttttttttaattttactttttgtgaagatggggagggtggtctcactttgttgctcaggtgggtctcaaactcttgggttctagcaatcctctcgcctcagcttcccaaagtgctaggattataggcgtgagccaccacacaaccagccttgcaaacagtattgatttaaactttctacattatcaagacaattttaaggggttaacaaatgataagaagggatataaattttgtttataataatattggtattattgggactagtgctacactcttaaacataaaacagagagatttgttttgatcagatgaaatagttaatgagactttcttgttaatatcaatttatatttcaataagtgaaa

SEQ ID NO: 639984 - DNA, 577 bp, Homo sapiens
gcttatgtgttgcttataaaggaatacatgtataaatacttawtgaatggatatacagcacctgttgggtcatggcatatcaaaggatcatcaaaactctgaaagaaacaaatataagaaaggttaattttagtctattttctgttaaccctttgtgttattgcaaaaaaaatgatgtttttttctcattcaagtgagatggattacaatagactcaacattaaactagcaaaaataaatatatgtgataacaactatgctatcacattgagactgcatttactcattttttatttcaggaagagaacttcaagactttgattccaagtttctccttttacctaagctgcagaatggtaattggctttcccatgttacagagttagtttccataaaatttagacgaaatctctgctgacttctagttccaagcattttataaatattacactaattaactctgcagctcaacttcttttcagtttttctgtttaaactatactaagttcttaccacttagcttattacaatatgtctgtaagatgatttaaccagattggttttcgaaaataagcta

SEQ ID NO: 639985 - DNA, 595 bp, Homo sapiens
cattcaaaccatagcagcttgcctactctgagaggtggagaaatggtcatcttttccaggtacttgttaaaaaaaactcatgaataggtcattataaaaaactaaacaataaacagactttcagaagaaagagaaaagagattatttgaccctgaaaagatgacacagaaggctctcttggtttatcagaaatttttagaaaccaattcagatgcctcatgagttgcaattacccttcttgtctttggttgtatgcagagtcacttaaataatttcatttttgtacaatctaacttgaatggttttctattacacccagttctgccatcataaacacagacattcttaaaatttattgcactatgtaaaatcatgaaataaagacaaatagttgctagcaaatgcaaagttaggaacaaaatcttcacaaattttatcagcgacatatacaaataaaaggtaggaaaataatgaaaatgatagcccagttttatacattttaaatggtgaagaaaaccataaatactacaataaataytatactttgtcttggtggaggggctgccgtttgtttctctaagcaagcctcagatgg

SEQ ID NO: 639986 - DNA, 560 bp, Homo sapiens
gtaattatatatgctaattttcttattatgttctaaggcttgaacataatgttatgcaaaatgaaatacagtctttacggaattaatacttattaactttaatatttactaatatttaacaaagtttttcaacctcaccaatattgacattttgaaatggataattctttgttgtaagaggctattttgtgcaatgtaggatgtttagcagcatcccaggcttctaccaactagatgccaatagtacccctcctcctgcagttgtaacaatcwaaagaattttctagacactgccaagtattttgggaaaaatatcagttgagaattatggatatttactcaaataagacaggtagtattttatgtagtatgttatagatgactgtggtaggcttagcattttataagatggctactagtggtccacatcttcctgtgtttgtggtcttgtgtaatattctcccattcacagttacatacacttaatgatttgctgccaataaattgtctatgaccaaagtggtggaatgccacttcaaagataatattccaaaaagact

SEQ ID NO: 639987 - DNA, 533 bp, Homo sapiens
cactgccaagtattttgggaaaaatatcagttgagaattatggatatttactcaaataagacaggtagtattttatgtagtatgttatagatgactgtggtaggcttagcattttataagatggctactagtggtccacatcttcctgtgtttgtggtcttgtgtaatattctcccattcacagttacatacacttaatgatttgctgccaataaattgtctatgaccaaagtggtggaatgccacttcaaagataatattccaaaaagactcgctttgttgatccttcttctaatttttttaattgacaagtaaaaattatatatattcatggtayatagcatgatgctttgaaatatgtatacattatggagtggctaaatcaaactatttatcatatgtactgcctcacatatttatcactttttctggtgagaaaacaaatgctactatcttaccatttttcaagtatacatttttattcactatagtcaccatgatgaacaataggtctctttaacttatttatcctg

SEQ ID NO: 639988 - DNA, 533 bp, Homo sapiens
cactgccaagtattttgggaaaaatatcagttgagaattatggatatttactcaaataagacaggtagtattttatgtagtatgttatagatgactgtggtaggcttagcattttataagatggctactagtggtccacatcttcctgtgtttgtggtcttgtgtaatattctcccattcacagttacatacacttaatgatttgctgccaataaattgtctatgaccaaagtggtggaatgccacttcaaagataatattccaaaaagactcgctttgttgatccttcttctaatttttttaattgacaagtaaaaattatatatattcatggtatatagcatgatgctttgaaatatgtatacattatggagtggctaaatcaaactatttatcatatgtactgcctcacatatttatcactttttctggtgagaaaacaaatgctactrtcttaccatttttcaagtatacatttttattcactatagtcaccatgatgaacaataggtctctttaacttatttatcctg

SEQ ID NO: 639989 - DNA, 552 bp, Homo sapiens
tatagcatgatgctttgaaatatgtatacattatggagtggctaaatcaaactatttatcatatgtactgcctcacatatttatcactttttctggtgagaaaacaaatgctactatcttaccatttttcaagtatacatttttattcactatagtcaccatgatgaacaataggtctctttaacttatttatcctgtctaactgaaattttgtgtcctttgaccaacatctccccagttgctatacttcctatactctggtaaccaccattttactctctgattctataagatccacatgtaaatgagatcatgtagtatwtgcctttctgtgcctggcttatttcacttaagataatgtcttctaggttctttcatgctgactcaaataacaggatttacttattttttaaggctgaatagtattccattgggtgtacataacacattttctttattcatttatcttttgatagaaacttaggttgattccataacttggcaattgtaaataatgccatagtaaacatggcagtgcagacatttcctcaa

SEQ ID NO: 639990 - DNA, 502 bp, Homo sapiens
gtgaatgaataaaaagttactaaattttgtatgttaatcttgtatcctgcaactttactgaatgaatttctttattagttctaatagggttttttttggtggagtttttaggatgtttccatatataaaattatgtcatctgcaaatggggacaatttaacatttttctttccaaattggatgccttttatttttttgccctgcctgaatgctctagctaggacttccagttctatgttgaacagaagtgttgagagggggtgtccttgcctatctaagatgaaagctttaarcttttcaccattgagtatgatgttagcaatgagtctgtcatatacagtctttattttgttgatgaacatttcttctataactaatttcttaaaggtttttatcaacaagactgtgtcttgacaattgacatattgcaagaagccctatggagaaacccaggtggcaaagaactgagggaaacctccagtcaacagcgtacaataaactg

SEQ ID NO: 639991 - DNA, 516 bp, Homo sapiens
cacataataaatgtaacacataatacatagtaggtgctcaagaattatttgtaaaactaaacaagtagtgttgggttgcaagactgaaaagataagatatcatgactaggaattagcatagatgaagaatcaatataggaagacaacctaactacattggctgttttaatcaggtgatatctaattagattggccaagcataggaaagtcacagataaagcttatttggattttagcagtgtgttaaaatctttcatgatttatttgtttaccagttggacaaatgtaggccagatgtcagaaaaatcaagtattgacagagttggatgagagtagattcaaatgattgaatgatgatttcccaagagtcatcacacaggattctgtcttaagccttgtcctctctaagatttgtatcastgacttggataaagacaaaaatatatgcttataaaatttttagataacaaaaagctgagagaaatagctaatgtgctgcataacaatcaatattag

SEQ ID NO: 639992 - DNA, 538 bp, Homo sapiens
acaatagaagatgttctagcatgttaaaatggtttctctgtgaccaccaccaccctactgtaaagatctgtaaggttcaggaagctgatgggrttctcttcctgttgccttcccacgtgggtttctattggagctgtgctctctgtaatgcacaatgcccttcagtgaatagaggggtcacacacctcgtagctttactcacttgcttgcaagggaatctgcaaggtaagcatgtaagaatataattacctttgctaataaggtcctaggaaggggaccacatgtgaataccatgataagctcctgaagtaggctagaaggaatgctggatgttaatacttcagcaaaagcagaaggtgattattttttatgcaattaaaagcagaatgttaattacggctgtgtttgtcacaagagagtaaatgtgtaaaatatttgggaaaattgatcagggctagctcctgaaaagacaaattagcatgagtgaactggggccatcaagtatcaatcactgtcttagcatgaaatagcaaagata

SEQ ID NO: 639993 - DNA, 538 bp, Homo sapiens
acaatagaagatgttctagcatgttaaaatggtttctctgtgaccaccaccaccctactgtaaagatctgtaaggttcaggaagctgatgggattctcttcctgttgccttcccacgtgggtttctaytggagctgtgctctctgtaatgcacaatgcccttcagtgaatagaggggtcacacacctcgtagctttactcacttgcttgcaagggaatctgcaaggtaagcatgtaagaatataattacctttgctaataaggtcctaggaaggggaccacatgtgaataccatgataagctcctgaagtaggctagaaggaatgctggatgttaatacttcagcaaaagcagaaggtgattattttttatgcaattaaaagcagaatgttaattacggctgtgtttgtcacaagagagtaaatgtgtaaaatatttgggaaaattgatcagggctagctcctgaaaagacaaattagcatgagtgaactggggccatcaagtatcaatcactgtcttagcatgaaatagcaaagata

SEQ ID NO: 639994 - DNA, 298 bp, Homo sapiens
ctgtgcttggaagttgaaaacttgttcacatgactttttttcctaacgtatttcctacattatacactctttgaatttgttaagtttgcaatggcacatttttaggtaagttgtagagatctgctaggctgttttccactgygctcccctactttcgtctttcaatctaccattctcattgctttttcacagttttacagttaagcttcttgaaaagtgtctgaattacctctgttgactgctggcaagtttttattgctggtaaagtcatgggatatttttcatggttccatccata

SEQ ID NO: 639995 - DNA, 615 bp, Homo sapiens
ggggccatttcttattctattcagtgaaaacaagaccacttcaatatttaatttggaaaatggcactaaaaatattaaaataagatatatgcacttaagcagacaagccaagactctttagctactttagtattgtgtactgctgccacagaatatgctaaacctgctaagattttattctctactaaggctcctacaagctaataatctgtsaattcattcaatttccattagagatgtaagaagctgcaggtgatattgggaaagtagcattagcacactgatgtatgcaaatggtgctttggaggtgcctttcattttcatgaaaattttacttaccatctgactttttttttagactctgcttgctttcatgtaacaaatgttttacagtcaatttatcagaattatatgagaaaaaacttctaaattgcccttaaggaaaaatctttccaaaataataagaaagacatattcttaaaaactaataaaatagataacaatgaagttaatttaatgaagtctaattttttaaaaaagttaaatagatagtttacactaagattttaagtctgtgctttgactcccttatatattgggatattaactccttgt

SEQ ID NO: 639996 - DNA, 615 bp, Homo sapiens
ggggccatttcttattctattcagtgaaaacaagaccacttcaatatttaatttggaaaatggcactaaaaatattaaaataagatatatgcacttaagcagacaagccaagactctttagctactttagtattgtgtactgctgccacagaatatgctaaacctgctaagattttattctctactaaggctcctacaagctaataatctgtcaattcattcaatttccattagagatgtaagaagctgcaggtgatattgggaaagtagcattagcacactgatgtatgcaaatggtgctttggaggtgcctttcattttcatgaaaattttacttaccatctgactttttttttagactctgcttgctttcatgtaacaaatgttttacagtcaatttatcagaattatatgagaaaaaacttctaaattgcccttaagraaaaatctttccaaaataataagaaagacatattcttaaaaactaataaaatagataacaatgaagttaatttaatgaagtctaattttttaaaaaagttaaatagatagtttacactaagattttaagtctgtgctttgactcccttatatattgggatattaactccttgt

SEQ ID NO: 639997 - DNA, 531 bp, Homo sapiens
ataggccctggtttagtttgcaggttctatcatgtattaatctttacacttaatttgaagtctaccccttgtcaaaatagagaaaatgactcaaatttaagtaagtatttatggtgtgatcattttaatgcacatgtkttaaatgtttattttataaattttttattttaaaatagaatcaataattagttgatgttactccatgttattttttaaatattagctttcttttacttaaacataatagatatttttagtgttgagaaggagattttcagtgtgatgtaaccagtaactattttttaaacaattctttgttgaggactgatgaagataaattataataataatttttcttaccataaagtaagaaatgtacagttagccttccttatctcttggcccttcatttgcatccatatgttcaaccaaccatgggtaacaaatattcaaaaaataattaaaaacaatacaacaattaaaaaaacaaattaaaccgatatagtatcacaactatttatacattattta

SEQ ID NO: 639998 - DNA, 647 bp, Homo sapiens
aggccctggtttagtttgcaggttctatcatgtattaatctttacacttaatttgaagtctaccccttgtcaaaatagagaaaatgactcaaatttaagtaagtatttatggtgtgatcattttaatgcacatgtgttaaatgtttattttataaattttttattttaaaatagaatcaataattagttgatgttactccatgttattttttaaatattagctttcttttacttaaacataatagatatttttagtgttgagaaggagattttcagtgtgatgtaaccagtaamtattttttaaacaattctttgttgaggactgatgaagataaattataataataatttttcttaccataaagtaagaaatgtacagttagccttccttatctcttggcccttcatttgcatccatatgttcaaccaaccatgggtaacaaatattcaaaaaataattaaaaacaatacaacaattaaaaaaacaaattaaaccgatatagtatcacaactatttatacattatttatattgtattaggtattataagtaatctagagatgatttaaagtatatgagaggatgtatgtaggttatgttcaaatattatgctattttacataacacttaagtatatgcagattttt

SEQ ID NO: 639999 - DNA, 505 bp, Homo sapiens
tatacattatttatattgtattaggtattataagtaatctagagatgatttaaagtatatgagaggatgtatgtaggttatgttcaaatattatgctattttacataacacttaagtatatgcagatttttatatccttattttggggtattcctggaaatacttctcccatgatactactgaagggttactgtataatttttataagctggatgcattttacattgtttctgtaagactgcattatttcaatgtcagaatcagttatatttcaaataactacatcatcctggcaatgaagttatgattaatacaagctttgggagtaattattaatttttcatttaactaaatcaaggatatatagaggcataagaataattcttggagactcttgtatatttgttaaatagggaaattacctatcctaaatagtttgtaaggttaggcttgagtgtgctttatakctaaacaaagagagataatagactgaataatatgttta

SEQ ID NO: 640000 - DNA, 698 bp, Homo sapiens
tatttcagtttcactttatatttttcagacatatccatgctgtaatatatatttctaagtgcttgctttctcatatgtccagaatgtacacaaaccaactactgtctatcttttttctttttctccagtaggacaatcaagttgccttcaaattccaagaactaaaattactgttgtaataaaaatgtttgtacttgttcctttataaacaggagtcagaaattgttgagatacattctctggagcacaatttctagttcataggctctgcatacacactcttattatcctcctgaactgtgccccactttacactgctgccagcttgccactaggattacaatgtcagcacatctctaccctagaactctaattagggaaagcgattactcattgaaattttaattttttttctratcacccccaattttaagcattttttatatgcttgtggctttgtgtgttactgtttctaaaattacctgctcatattttgtgttcatttttttttctaactgggttgcgaagttatgtatttatactagtaacccttttaatatagtgctaatatcatgtcttcttttaatatacacctattatccttaagcattatgaaataaaccttaccaaacgtgttatgccttctagccttctatagtttttgtgtttctttaacaaatatacctaagtcaatatga

SEQ ID NO: 640001 - DNA, 541 bp, Homo sapiens
caccacataaaaggctttaaccataaattaataatagataaattggactatattaaaattttagttcatcataattccaagagtgaaaaatccagccacatgttggtatgtatctgcaatacatattaacaacaaaaggcttgaatctagactatatagagagctaaacaccaatttcagaaaagacagatcctcaccaaaaatataccagaaacttagacaagcagttcagaaaaaacaactttgaaaaaaataatgaatagatgaaaactgttaactcagcctcatgagctgcgatggtgtgaagtggtctctatccacactcatcagaatggtaaacatttaaagcaaacaaacaacagcaactaataaatccacaagtcggtcagaaagttttatcaaggatatggagcacatttatgcattctttytaattttatttatttcaatagcttttggggtacaagtggatttttgttacatggatgaattacatagcggtgaattctgaaattttagtgcatctgtcaaatgagtagtt

SEQ ID NO: 640002 - DNA, 608 bp, Homo sapiens
aaacatatgttgtgtaggccacacatcctacagaaacagaagtcaaacaggtaagccagtgagtgtcaatcatgaaacttaaagctgaatgcaaatgaaactgagagagacacttcagttctttacctagaaaaatatgcatggctcttcctccttcacttcaaatatatgttctcattcatagccactgagttttgaattagattaaaaataacccatctgccaatgtcttataattttccttttgttcctgtgggtctttggtccatgtgactgatgtccttcactctcaaaagagggttcggcctggcaatgagaagatgtcacctgcttccatccaacggtatcatcttaaaatttagacctcacgcttgagcagaacgagctatcaaaaaccatatctgaagacatcattaacccaattacaaaggcttcrgccaatccaaaacctgtaggggacgatacagggataacaatcctgctctgggctactcattatatagttctttgaaaggtaccagatttaattttaattttaattaccttaatattaatgaagctaagcactcttctacatgtttatcatcatttgagcatacatttttaaa

SEQ ID NO: 640003 - DNA, 608 bp, Homo sapiens
agttgagctttgtaaacatttcttttgttttgtatgctgtctggctttggagtatgatgattgaaagtttaaaatcattataccatcctggtatataaaatccttttgcattttgaaatagatatattccaggaatatttttatctttaaacatattagtctgatatatgcatagctatacatacttcagtgaaaaagctgaagtatttagttatttrtatactcaagaggctgtgtcttcaattatcttgcttttgttgtggtcatcttaggtgttgttatagttttgccttaatctttacccttggacatggaacttaataagagaccacaaataattgcctgggttccaaatacagtaccttttactaccattatgtagcagcaactcaatttcctcatggtaatcaagataattttttttctggccagtagattaactctttttttttttcccctgcctgttcattcagtggcacaaggaacccagaatgtccagaacagaatctcattttacaattcaattgagtcattattgtttttcctgtttgaagcaccacccaaattgttttggacaccaagaccccagatcagcaggtttctagcta

SEQ ID NO: 640004 - DNA, 475 bp, Homo sapiens
aactaaatgaaaatgatggtctagcatataaaaacttgtaaaacttgactaagcattgctcagatgtatttttaaagctttcaagttatctcagggraaataattagagaaaaagctcaagaataatgtcctttttattattttattatttttatctatttccttttttttttttttttccaggacagggtctgtctctgccacctaggtggttctcaaactcctaggctgaagcaattttcccacttcatcctctcctgtctgggattacaggcatacagcactgttattatttgtattccaagaagcaacaacaacaagaagaaaacccaccaaattaaactaggaaaacatagcaggaagagaatcgtaaggataagagaaaaagaaattaaatagaaaacacaaaaacaatacaaaaaattaggaaagtcatgtgttagatttcacaaaattgataaaatccaacaaaact

SEQ ID NO: 640005 - DNA, 594 bp, Homo sapiens
cctgttgtgggaccttgtgattgtgtgagttaatactccttaataaactcccttttatttatatgtatatrtatgtgtgtgtgtgtgtgtttgtgtgtgtatatatattctattagttctgtcccttagagaatcctgactaatacacttagcttctccttgtctctttcttttgatcttctgtgaagccctggcttgacttttcctggaaacttttcctgtgacagtgcatgtatcacaagatggccctgtcaaagatacatcatattaattacaatatgtgatattcagtaggaacccaaacagtacaacagataatggcaaaagataaacaacatttctaagtaaaataaagttctgaaatgctttgaattgaggcataaatgccttactgacagtccaaaaatgacctataaaatcccgaagcattcacctatctaaaattctgaaagttatgatttctgtgacaacataatttttatttactttgcattttcctgaaaagaattatcaagttcactaaggcaaaaatgttatgaaagaaattaaatgagcctcaaagctgagtctcagatcaatagcaggaagtgccca

SEQ ID NO: 640006 - DNA, 462 bp, Homo sapiens
gagaaaataaaaatgaaaaaaataaaagtagtagcacccgttacacacacacacacacacacacacgtaaaattggatattccatcaattactcctgtggtcttgttggtgtggtttgtatatttgcttatttatttatttatttggattgagaggaaatggaggaggtaagatattccagggaaagtccttgcagaactgcagaccacagttggagaaaacccaggaaattacarctcttgcatcttcagccattccaagtagtgcaagtgcaaacaagtgtcagcataagaccaagagaggagacttgagtcttatcttcttgtctctaggtaataaatcatctttctcattggatttattaatgaaatctctgtgtgtgagttttctgttgcttttataacaaattcccgcatatagtggcttaaaaatacaaatttctaccttactgttccataggct

SEQ ID NO: 640007 - DNA, 561 bp, Homo sapiens
taatgtttatcttaaagatttcctgtgtgtaggatgtctcttagataatgatatcgttatgcttggtgttagggtcttgagttttatttctggcttacttgttgactgttactttattttaaataagtctgtatcatttgtcattccattttctccagtgagcgtcaccataaattaaatgtctcatttttttcttcctccccaaccacagtccctaacctggtttccattcaaacattctatctctgtcattgactaatgcgttctcayataatccatgcccaggcctcagtgccgcttttgaagcagttctaggtattttacatatctaatcaacaataaattatattggttatttctttaaacttgttcctcttcctatatttatctcttcttccttcttatacccactcatctcatcaccttggatctaaattattgtaattgattaattttttattattttatgcatcgtgttacttatacagcactgtggtaaacacttggctcttctgctttgtaccaactgacattgctcctaaagcctactatcatgtgatt

SEQ ID NO: 640008 - DNA, 391 bp, Homo sapiens
gttagggcctttcagctgctcacactaatacgttgactccagaatttctggttaattcactsgtatgaaacgtcagcctaactcaacattatgtctctcacccattctttccttgagccccattctctgtatgttttagaattaaagtttgccagtgagagttactcatgtgaggtttggaagatagaaatgaacggaactgttattttttcaaacatagacgtatgatgcggttggatttcaggtctatttataagctctgactttgcagttatgacaatggcaaacatctacacaattagagactttcttccccaacttaagcgccacaagataaaatcaaacttgtttttcaacccttcaattatattaattatattttctttttttt

SEQ ID NO: 640009 - DNA, 584 bp, Homo sapiens
tatcccaaagcctgtctccttacgtgaaagcaaaaagcctaggaaaataacagctgccttgggcactgagacagccaaatctgcttagaaagcatcagttttctttgaagtaaactgaaaatgtgagtttcaagcagcctgacttcaaaggtataagcaatatttctccctcaacctgatgctgggagaaaaagtgtgtccttgggaagctgtctttatttagtgacggaaaakaaggtgcttcagaattggtcattgtatattagggggaaatctagctgggaagcagatgcttggcaaacgcaacacactcctatacttctctggttaatttcattctgtttacgagttcttctgaaactctttattcagaaaattttgtagaggtttagatctttgcagaagatgtcattatccctatcaaaatttgttttagaagtagactcagccaaaactctgagtaagaggaattgattagaatgacaatatgcaggaagtatatcctatctaactgtaaaatgcaacaattagcatttacatttagcaaagtggcgggggggggggggtttcaagcgcaagctatt

SEQ ID NO: 640010 - DNA, 490 bp, Homo sapiens
agaaaatgacatcagtcagtccataacagaagttgtattaatctgatttcacactgctgataaagacatacccaagactgggcaatttataaaagaaagaggtttattggacttacagttccacatgggtggggaggcctcacaatcatggtggaaggtgaaaggcacgtctcacatggcggcagagagagagaacttatgcagggaaactcccgtttttaaaaccatcagatctcatgagacccattcactatcacaagaatagcgcaggaaagacccacctccaagattaaatcatctcccaatgggtccctcccacaaacgtgggaatttakgggaactacaagatgagatttgggtggggacaaagagccaaaccatattagaagtccaatgtaaaaatcaaatgtgaacttggaattggagagaccgctgtatgcacagacttcctttagcagcatcaggtgggaaaggcaaaggaggacagaaa

SEQ ID NO: 640011 - DNA, 581 bp, Homo sapiens
ccatcaggcttcctttcattctttattcaaatcctacccactgtgctgtgctttcagacaacttattgrggattcagcgtcactgatgatttacagaacatttttgcaaggtttgacaattaatgtccctgtcagggaatctccttgaaacacactgactccctcaattacagaaactatttttgtcttttcttgccagtgtaatactcaggagaaatgatatgaaaatgtggggttttagatgtaggaatttccaacatatatttggtcttagacaacgttgtcaagcctgcagaactgtcacttaagttcattgctatatcccatctgagggaaaaatctagagaaaatctagccccagggcgactaagtgctttagagcatctgtagattgctgagaagtctctcaaggaaccggaagccatgttccaaccagttctttgttccctgtagcatggaaataatttaatcgaattgaacttattgcaaaagcctgctccattcagccagatgaggcactttcagagcaattagtcacaccttacttggaagccacaggatatatttaccagctgcccagg

SEQ ID NO: 640012 - DNA, 628 bp, Homo sapiens
gcaaattaaatgagatggtgcacatatcagataattgtgctatgtaagatagcctttgtttagcatctgcggaagaccacgttaataaaccagccattttccaaatagctaagctagagttcttttccaaattcccttactgctactatattggtggtggtgatggtggtggtgatggtggtgatggtggtggtgttggtggtggtggtgatggtggtggtggtggtggtggtggtgatggtggtggtggtgatggtggtggtggtggtggtggtggtgttttgagacagagtctcgctccgttgtcagccaggctagagttcagtggcacgatttcggctcactgcaccctccgtcacttgggttcaaacaattcttctgtctcagcctccggagtagctgggactacaggggcccgccaccacacccagctaatatttgtatttttagtagagacggggtttcaccctgttggtcaggctggtctcgaattccygacctcaggtgatccacccacctcggcctcccaaagtggtactgtatttcttcatatttaaccttttggtgcaggccgttcagataatatccagcaatattattattcaaaatagacacaatctacctagat

SEQ ID NO: 640013 - DNA, 593 bp, Homo sapiens
gccttgcaggtttggatgagacgacccaggagactgagctgagcgaagaggctcaagtgtaaatgtctatggagcagccccactgtagggcaggcagaagaaaaggtgacctgaagggaatttgtgaagaaagggccagaggcatgaagataaccagaactataaggtgtctcaggtaagacatagagaagtgataaacaccggaagccaaaaagaagctaaataaaatgctgcttaaaagtgcccgttggatttgccattgaggacaacattggtaggattagtttggatggctgcagtggaatagtgggaagtcagacttcatggacttcaagcaggaaaggaaggtaacaaaatgcgtctgttaattttgaccaatgttttagaaagttcttcagcagaggtgtgggaagagatataattgtagatagaaagcactawatgagtgaagtggatcttgatttttttcttcttcctttaaatatggtagatatgtgtaagaaagagccagattgaactgtctgtcttctgaaataggaaagaatgaatctttcaggagagaacttagaaggtgagatgggacagaaggtgaa

SEQ ID NO: 640014 - DNA, 574 bp, Homo sapiens
caagcttactggttggtcttctgctcttttctttgctcttctaatctgtactccagaatcatcattctgaatcgcaggtcagagcataacatctctctgcttgaaactccctataggacttcctccgaagtccagaatgaagtcccaggccscttccttgctctccaaggtctgaggtcatccatccccattttcctgaaccaatgttttctgacctcgtggctgacaaatcttcttcccagctgtttccatgacagcaaaactgtactcctcgttcttcacacagcttcctctgctgcactgtttcccgggaatgtgtcatgccacgtgtttaaaaggtttccttctgtacttccttcaggttcctactcaaatgtcagtttttcagatgtttctccctattgccctgtatatagttatactctctaactgctctctatcccttatcctgcattcttctcttttagggttgtattaggccattcttgcattgctataaagaaacacctgaggctgggtactttataaagaaaagaggtttcattggctcacagttctgcaggctgtacaggaa

SEQ ID NO: 640015 - DNA, 526 bp, Homo sapiens
ccctcccactgggctccacctccaacattagggattataattcaatawgagatttggcgaggacagatatctaaagtatatcagtagtgtttaccacatgtgacattatcattttatttatttttaaatgtcgtgtccataatgaaatgtaaaatccataaaagaaagtactttgttgtgttaattgctctatctccagaacctacaatagttcctggcacatagtaggcactcaagggtaaccagtaaaacaataaatatacactatatttcttccttttccaagaatgtggagggagggagaaaacactttaaaatgcaattcaaaagatgtcatgaaaagagagagagagagagagagaaaaagcacagaaatagaaaacaaataaaaagtacaaaataaaatgttaaaaataaatccatataggttagtaataacaataaatataaatgacctaaactcaccagttaaaaactagagattttaaaattgtgttttaaaataattcagttatgtgctatatta

SEQ ID NO: 640016 - DNA, 667 bp, Homo sapiens
tatttttattttcactttttagagatggagcggtcttgctatgttgcccaggctggtcttgaattcttggcctcgaggaatcctctcacctcagcatccttagtcactgggattataggcatgagccaccaggcctggctacmatgttttttttgtaacatcacgtgaacattcatttttaaaaccagtcaagtatatttggaaaccaaataggcccggtttagtagatcagtagcagagatgctcctgcattgctaaactaaagttggctgaaagaaaacttgagaaatggtttattttattacccactttcatctagaccactacagcagatgcaattttatctcaatgtatactgcatccaaagaaagcaaaaaaccaatgataaaatcttagagttgaacatgactttactctggtaaagtatccttatgccttaggttaggataacaaaaccctgatgtagcacattttttgctcaaagtcattccactggtttctctttggctgtttgtgaaagatgaggcaaaacactgctttcctgattagagtgatgaatgaacccacatgatttctggcctgtggagctgagagcctagcaggaatgccacacatctagcaagcagccacaagtgcagtgagtacgacaagaaggacaagcctgaga

SEQ ID NO: 640017 - DNA, 512 bp, Homo sapiens
tgtgtttattagcagcatgagaatagactaacattgtgtttgcagaggcaaggaaactattcctaaaaaagaacgtacaggtgtcaagtgtatggaggtggatgagaaaaatcgcaggcagacaggaaggtgagaagagagaccaggacgtggtggatccacagacacacagctcttgaagcagaagattattttgcagtcttgcatgaagactgcatcctaagcaggtctttacgggctggaacactgaaaaccrgcggcagaatggcacagcgtgaggctgcagaggacacaggaccaagggtgggaagggcttgcaggggctaggtgagcactttggacttatctttgtcagttttttttaacaatataaaatatatttgactgtttttaaaaggctcaagcctcagtttttcaataggctgcacacatctgtctcatctgttggacgtctctcaccagatcaacctggcttcagctggcagcacttcattccatccacaagaaaaaga

SEQ ID NO: 640018 - DNA, 512 bp, Homo sapiens
tgtgtttattagcagcatgagaatagactaacattgtgtttgcagaggcaaggaaactattcctaaaaaagaacgtacaggtgtcaagtgtatggaggtggatgagaaaaatcgcaggcagacaggaaggtgagaagagagaccaggacgtggtggatccacagacacacagctcttgaagcagaagattattttgcagtcttgcatgaagactgcatcctaagcaggtctttacgggctggaacactgaaaaccagcggcagaatggcacagcgtgaggctgcagaggrcacaggaccaagggtgggaagggcttgcaggggctaggtgagcactttggacttatctttgtcagttttttttaacaatataaaatatatttgactgtttttaaaaggctcaagcctcagtttttcaataggctgcacacatctgtctcatctgttggacgtctctcaccagatcaacctggcttcagctggcagcacttcattccatccacaagaaaaaga

SEQ ID NO: 640019 - DNA, 512 bp, Homo sapiens
tgtgtttattagcagcatgagaatagactaacattgtgtttgcagaggcaaggaaactattcctaaaaaagaacgtacaggtgtcaagtgtatggaggtggatgagaaaaatcgcaggcagacaggaaggtgagaagagagaccaggacgtggtggatccacagacacacagctcttgaagcagaagattattttgcagtcttgcatgaagactgcatcctaagcaggtctttacgggctggaacactgaaaaccagcggcagaatggcacagcgtgaggctgcagaggacacaggaccaagggwgggaagggcttgcaggggctaggtgagcactttggacttatctttgtcagttttttttaacaatataaaatatatttgactgtttttaaaaggctcaagcctcagtttttcaataggctgcacacatctgtctcatctgttggacgtctctcaccagatcaacctggcttcagctggcagcacttcattccatccacaagaaaaaga

SEQ ID NO: 640020 - DNA, 565 bp, Homo sapiens
cagttcttgttttccctattagaaggtcaagaatgaattgctgacaagttgcggtggttcaagcctgtaatcccagcactttggtaggctgaggcggatggatcacctgaggtcaggagcttgagaccaacatggtgaaattccatctctactaaaaatacaaaaattagtcaggcatggtggcaggcacctgtaatcccagctatttgggaggctgaggtaggagaatcgcttgaacctgggaggtggaggttgtagtgagcctagatcatgccagtacattccagcctgggtgacagcacaagactctgcctggraaaaaaaaaaaaagaataaattgctgtgtattttcacatgtattttcatgaaaagtatttgtaagagaagaatttacaataggcagaagaaaaaatggtaaggaacagatttaaggtgaacatttatttaataaagactcacccccccatattctcactttagattgagttgtggaaatttgcattattgggcaattctcataagtttgaaggtaaacaaattatgtttttttaaaaaggttgaaatt

SEQ ID NO: 640021 - DNA, 535 bp, Homo sapiens
ccagcaccatacttccgtaaagcctgcagaaccatgagccaactaaacctcttttctttataaattwcccagtcttgggtatttctttttagtaatgcaagaacagccaatatgataattaaactgttgaaagacaaagagaaagctattgaaaacatcaagagagaagtgaattgttatgccacaattgtgtgattaatagctaacttctcatcaaaacaatgatacaagtcagtgggatgacatattctgagtactgaaagaaagaaagaaagaaagaaagaaagaaagaaagaaagaaaccaactcttaaccaagaattcttttttttttctttctttgagatggagtcttgctctgtcaccgggctggagtgcagtggcgtgatctcggctcactgcaacgtccgtctcctgggttcaagtgatcctcctgtctaagcctcctgagtagctggcactacaggcgcctgccaccacacccagctaatttttgcatttttagtagagacagggtttcaccatgttggtcagga

SEQ ID NO: 640022 - DNA, 535 bp, Homo sapiens
ccagcaccatacttccgtaaagcctgcagaaccatgagccaactaaacctcttttctttataaatttcccagtcttgggtatttctttttagtaatgcaagaacagccaatatgataattaaactgttgaaagacaaagagaaagctattgaaaacatcaagagagaagtgaattgttaygccacaattgtgtgattaatagctaacttctcatcaaaacaatgatacaagtcagtgggatgacatattctgagtactgaaagaaagaaagaaagaaagaaagaaagaaagaaagaaagaaaccaactcttaaccaagaattcttttttttttctttctttgagatggagtcttgctctgtcaccgggctggagtgcagtggcgtgatctcggctcactgcaacgtccgtctcctgggttcaagtgatcctcctgtctaagcctcctgagtagctggcactacaggcgcctgccaccacacccagctaatttttgcatttttagtagagacagggtttcaccatgttggtcagga

SEQ ID NO: 640023 - DNA, 535 bp, Homo sapiens
ccagcaccatacttccgtaaagcctgcagaaccatgagccaactaaacctcttttctttataaatttcccagtcttgggtatttctttttagtaatgcaagaacagccaatatgataattaaactgttgaaagacaaagagaaagctattgaaaacatcaagagagaagtgaattgttatgccacaattgtgtgattaatagctaacttctcatcaaaacaatgatacaagtcagtgggatgacatattctgagtactgaaagaaagaaagaaagaaagaaagaaagaaagaaagaaagaaaccaactcttaaccaagaattcttttttttttctttctttgagatggagtcttgctctgtcaccgggctggagtgcagtggcgtgatctcggctcactgcaacrtccgtctcctgggttcaagtgatcctcctgtctaagcctcctgagtagctggcactacaggcgcctgccaccacacccagctaatttttgcatttttagtagagacagggtttcaccatgttggtcagga

SEQ ID NO: 640024 - DNA, 425 bp, Homo sapiens
agagtggacagggacagagacagaggagagaacttccacactcaggcagttggcaatgaccttgagtgctcccaacaggccgggaaggatgaaaatgaaattacactactgaagcaggcaattaagtaattgttgattaaataaatgtcaacttcagtggactttttgaataattacatagtatccataaaattactgtcctacttttgtttgcttaatccaagaagaatttctgatatcactgtatattcttgttagctatcatttttaatctattgagtgatatatgttaacatacttagtcgttttcctattgttaaatrtttagatcacttacaatcataaaatattggaagcaaggtcacaacatttattcttatggaaattttttcttgtgatagtttatctccttaggataaatatct

SEQ ID NO: 640025 - DNA, 542 bp, Homo sapiens
gctcattatataaattattataatttatttaatctactctagtctcctggatatttagatcaattccttatccatatgtccatatgatataggacaaatgatagatatttccaagggacacttgtggaaatttttaaataataatgagactaagatgaaggtaatagtcccaccttaataatgttgatgtggaattgacattgtttatgactgtgaagatatgacctaataatatataacccrtataatgcaaagcagtttttaaatgataacaatagtagtgactaatctagcattaagtcagtattaaatttgaccaataataatatgggtggtttttttaaaagtggtaaagtcactggaagtaattcattcctctcacgatactctagaccttagtgaaaggaacagaacaagaacatggggataaggtatctttcgaaggcttcacatacatcacctgtggttttaccagctgcaccctatgacaaacgctacttttccaagtacttgattgagaaatagttcaaagatgttcatat

SEQ ID NO: 640026 - DNA, 410 bp, Homo sapiens
atatgatataggacaaatgatagatatttccaagggacacttgtggaaatttttaaataataatgagactaagatgaaggtaatagtcccaccttaataatgttgatgtggaattgacattgtttatgactgtgaagatatgacctaataatatataacccgtataatgcaaagcagtttttaaatgataacaatagtagtgactaatctarcattaagtcagtattaaatttgaccaataataatatgggtggtttttttaaaagtggtaaagtcactggaagtaattcattcctctcacgatactctagaccttagtgaaaggaacagaacaagaacatggggataaggtatctttcgaaggcttcacatacatcacctgtggttttaccagctgcaccctatgacaa

SEQ ID NO: 640027 - DNA, 612 bp, Homo sapiens
cttggtagaaaagcaagctgggatttttcattgtcaaaatcttcataaactcaaagtatgaaagaaacataaattatggttagaatatgatgcatcccaataaatgccatagggaaaacttaagataaattcagaaccagattaaaagctctgaggacctatgtggatatgccagaaaaaacatattatcacaacagggacagagataaggggcctagagcctcacatgcactggccaagctcgtctcaacttgagtttgagtaaagaaaaaacaagtataatgagattgagaaattggcactccctacactcatcaaacagtctcgaagaagcaatccagtgtaaacgcgtcatcaaagatcatcagccatgtaaagacaacggggtaatatggaagagaaagatgaataaaaactgacaggaaaaaaagacagagataactcagggaacagaaagaaaataatattagttaacattctaagatactcaggaagatattactttcacaaaataaaatcaatatgctctaaaatggaataatcagaggacaaaaagggttttggagtctaaaatatgcttmtaacttttctaaaaaatagagtgagggaggt

SEQ ID NO: 640028 - DNA, 581 bp, Homo sapiens
ctgtttgctcatgctaggtaaggggaggaaagctaaatccagacactgccacccatctgctgtgctggcaacacgccttctaaccaaagcaactaacgcttctgcaatagctttgagaagtactaccaytaaaggggaatattcaatttgtccccttctaaggtgagcatataaataatctgaagatatttctacctctgataaattaagatttgtttcttcagcctttcaccatggtctaaccctaataaactgtggcactggacttatctacaaatccttgcaaagtaatgcctgcccagaagtagctgtaagtaatgctatctcagggacactaaaagccaactccaacgttacagagactgaagattttgttacagacctaatattttattatagattgtccatggtaaatatacataattgattaatacactttgaattggtttttaaaaatgatgtgcaaaccattttcaaagaaactctgtttcattactttcaaatatggctctaaatttattttctcgtttccagttttatcccctttctaattcaattcctcccccaaggtaagagtgatt

SEQ ID NO: 640029 - DNA, 581 bp, Homo sapiens
ctgtttgctcatgctaggtaaggggaggaaagctaaatccagacactgccacccatctgctgtgctggcaacacgccttctaaccaaagcaactaacgcttctgcaatagctttgagaagtactaccactaaaggggaatattcaatttgtccccttctaaggtgagcatatmaataatctgaagatatttctacctctgataaattaagatttgtttcttcagcctttcaccatggtctaaccctaataaactgtggcactggacttatctacaaatccttgcaaagtaatgcctgcccagaagtagctgtaagtaatgctatctcagggacactaaaagccaactccaacgttacagagactgaagattttgttacagacctaatattttattatagattgtccatggtaaatatacataattgattaatacactttgaattggtttttaaaaatgatgtgcaaaccattttcaaagaaactctgtttcattactttcaaatatggctctaaatttattttctcgtttccagttttatcccctttctaattcaattcctcccccaaggtaagagtgatt

SEQ ID NO: 640030 - DNA, 595 bp, Homo sapiens
aggtatatcccttgtatgctgattttactaagggtttcaatcataaaggatgctggattttgtcgaatgcttttcctgcatttgacaccttctgcacaatcatgtgatttttgtttttaattctgtttatgtggtatatcacatttattgacttgtgcatgttaaactaaccctgcatccctggcatgaaacccacttgatcatggtagataatctttttataygttgttggattcagttagctagtattttattacagattttagcatctattttcatcagggatattggtctgtggttttcttttttggttatgtcctttcctcattttggtattagggtgatgctggcttcataaaatgaatttgggagggttccctctttcttcatcttgtggaattgtgtcaaaaggattggtaacaactcttctttgaatgtctagtagaattctgctgtgaatccgtctggtcctggacatttttttgttggtaattttttattgccatttcaatcttacttcttgttattggtctgatcagggtatctaattcttcctgatttaagctaggagagttgtatctttccaggaattcat

SEQ ID NO: 640031 - DNA, 626 bp, Homo sapiens
cttcttgtgttagttcagggaataccttgatagaatctttgacacactgactcctgtcatatgaacctggacttttcaagcttccttgaagttaaccatgtaaagcccaagagaaatctaagctgagttctgtgaagctcccctgtgactcatgggcctctgctggggaaggcatcgttcacttttgtgtgactctggtgttactaagtccctcacatctatggaagcatcccaagtcactacccccctcccccattatcagattgtgggaggaaaaggcagtggagaggagaaaaatagagccatggctgtgagatgggtcgtttttaatttccttctcagctcattcactgctggtgtctgcaggagcttaggaggagcatgcctgggcttacctgtgcctcctcctatgaaactatatacagagcaggctccaaacttgtttcccttgggggtgctggggcccctcttttctacagtggactggttccaggaccttgcaargatcagcagttgttcaaatcccagatacaaaatgccttagcacagccagccttcatatctgcagattagaaactcacagatatggagtgctgactgcaatctcagtttaacatccctcatgg

SEQ ID NO: 640032 - DNA, 484 bp, Homo sapiens
tttgcctcattccacagtggcttttcctttattctgtctttactgattggggtgacttttctcctctggtagagtttccgtgttggcatcccttaggtctccatttctatctgtaggctctgcttacctaaacacattgtgtagaatgaataatcccaattttatatcttggtggcaatttccttcattgagctctgaactcaggtagacaaggtcctgctcagtatcaccatttgagtgtgtagcatgtgtttcaaactaacatggttgaaaccgaactcttggattctctaaatcttgacccaaaccttatgtcttctcctrctaccccattttaacctcttctttttgttggacatgaagtgagttctattcactaaaagaaaatttcaaaatatcatatgcttaatatagaaaacaagatccacaaatctgcaaataaccatcatcaatgtgttggtttagatcctcccaggtgcttttc

SEQ ID NO: 640033 - DNA, 564 bp, Homo sapiens
ctaaaagaaaatttcaaaatatcatatgcttaatatagaaaacaagatccacaaatctgcaaataaccatcatcaatgtgttggtttagatcctcccaggtgcttttctatgtactttcactaaagaagtggtttcttattggctatgattctttcagtttcaaaacacagaaggttaagtcaaactgttctaagyagaaaatgaatttactccctcatacaactgaaaaggccagtgggtgacactgctaattacaggggctcaaacgaggttggctcacaacatgacatggcaatgatggcctctttcaagaagatggactggctttaactgaaaatctcccagcaaaagagaatgctgttttcctgtaagcacgagcagaaacaccaaggaggactctcgttggtccagcaggattacaagctcactcctgagctgatcatggtggcaggaggataccccatttggtaaagtgctttgtcccaaaccccatgccacccacaggactaggaaaagagggagagggagttcccttaatgaaatggtgagcagacaaaaaagtt

SEQ ID NO: 640034 - DNA, 609 bp, Homo sapiens
aagaatactgagtaggagcaaagtggcaaaatgtttgtagctcccaagggtaactgagacctctgggtgaaatgtaaaagaaagtcaattttgaagacatgcagaaagaccattttgacaacagaattggaataagctgactcaagaagcaagtttcctgactggagatgtccacacgcgtgggtagctctgggtagggatagtgcctctgagcacagccagttgccatagcctccatgaaaggtcctttcaaactctaagaatatatgtttacagaatggcccaattattcttgcagtttttcttgtcaatattttagttttccctctctaaacctttatggatgatcttgcttgtaccaatcttctgttttgtttttagttaccttttcgtgtacctgtctggtattctcaattagactggaagtgcactgaggccagggactgtattttattctctgcatcttaagtgcctggtaaaggccccgttcccaccacctggtaactacctactttagcccaacttctggtttycttcaaagttgcttattctaagaacgtccttagataggtagtccttttacatttatggaagaaagtgatgaaatta

SEQ ID NO: 640035 - DNA, 563 bp, Homo sapiens
agtttacaaatctatcacaaaatgcacaacaatttgagaaatgaaagaaaatctaatagttaatacaatgatgagttaagctgaaaatgcttagggtatgaaattatattttttccagtaccatatgcttaataaatccagagttttctggagctatagatgcttgatgcttcagaggaatataaaataacaaactatacatccaaactgcattaatgtgcagtcaacttttgcatatgaactaaatatctaaaaacctggggtgtaattacttataaattaatttgtaggcctgagttgttttatggtccacatcaggaattgtctttgccaacaggggctgataaaaacttatctcatatttctaaaatgaaattcaaaatgtataatttcagttcataattcttcatgcatcctgaattcagcatttgtcattgtagatattctttaagaaaatttaataaaaatttttaaaaagactttcctccatgaaaaaagcttaaaaaaattaaaatgtcttctaactacrttttatataaaaaactggtgttgaatctaatctc

SEQ ID NO: 640036 - DNA, 607 bp, Homo sapiens
aaagcttaaaaaaattaaaatgtcttctaactacattttatataaaaaactggtgttgaatctaatctcatttcagttcttaaaaaaatctggattttgacagctagaccttctaaactagtctcatactagtatattattttagaatatcatatatggcatttggatatgtgattgatagtaagtcccaagaagtttttggacttttcataggcttattggatgaataatatatttctgtaagacagaagacttattgtcatttattttctcataaaaacagcagatttataagtagatacaaagtttgcctgagtcagttayacttaagtcttaaccacattaaccaattaaactaagagaatgaaaatcaacaggctagtattggatggagtaaggcaagaggcaaaataactaaaggaattttttgattatctcattgctttccatatatggcctccacagaaatgtaggccatgggtattttggtacaaaatatttggagagggaagctgtacacagaaaaaactgctagcttagaaatagagaatgtacttttctataaatgtattatgattttagagaacactttgaaatctctgctttc

SEQ ID NO: 640037 - DNA, 557 bp, Homo sapiens
aaaggctagtgaccagggaagtcattgctagtgatgagatctggtgcctggactaagaagctttctgcagtgaagtatcaccatcattttttttcttttttgtcttccagagcctgaacatgtaaagaacagtgtccacatagggtcaggtcctatgtgggtaaggtccccaaattaccctacctaccagactcaatccctctgcattctggaagaatttctgatcatgttctgtttctctcctctaactgcacctctcacccatttggttcttaataatacaataatatattgccttgtgactctggtcacctttttttttcttacatgcttgcactgcttaggtcttattcctccaaccattttgttaactaaaacaacagaggcagtgtgtttatatgctgtttaaatacaccacaggcgctaacaaatatgatacatgaaacattacctttaaaaacatctgtcgaatggaccaatgagaatagatacagtttagtgctcaatatgtgccmaagactgtgataatccttgagtgtaatgtttttcaaaaatgt

SEQ ID NO: 640038 - DNA, 634 bp, Homo sapiens
tttgacttttttagagtgtcatacagctggaattataaatttaataatatatagccttttaagattggcttctttcatttagtaacatgcatgtcagtttttttcatggcctttcatggcttgatagctcatttctttttagtgctgaataatatttcattgtctgactataccacaatttgtttatttattcacttactgaaggacatcttgtttgcttccaagttttgacaattatgaataaagccagtacagtataaaccttcatgtgtaggtttttgtgtggacatagttttcaattcacttatgtaaatatcaaggagagcaactgctgtattgaatagtaggacaaagttcagttttgtaagaaactgctaaactgcattctaaatgcttccaaaatgtcttgcaaatgctgtaccattctgcattgccaccagcaataaatgaaagttcccattgctccatatcttcaccagcatttggtgttgttagtgttttagatttttgtcattattttaatttgcaattccctaatgatatgagatgttgaacatytttctatatgcttatttgccatccctgtatcttctctggtgaggtgtctattcagatcttttgaccatttttttcc

SEQ ID NO: 640039 - DNA, 453 bp, Homo sapiens
tcagaatacagaatagagaaacaaaaaattaagaaaataccagagatgcgaagagacacagaaggctgaataggaaggtctaacacatgtctaattcttaaaggtaaaagagtagtgagattgagaaagaggtgatctttaaagagaaaatggctgaggatttttcagaattgattaaaaatttaaattctcaaattaggggagtaaagttgatctcataaagataaatgaaaagaaacacacrtttagaaatttgaaagtgaaatcgtatgatattaatgagaggtattaaatcagccagggaggaaagatggatgtcctacaaaggacaacaaaactggaaaaacagctgacttctcagcagcaactttggcagctagaagacatcttcaaagtgctgaggcggggggtaatgtatcaaatgaggattttatgtgtttataaataataaaa

SEQ ID NO: 640040 - DNA, 605 bp, Homo sapiens
tgctctctgcaggcagttcatcctattattttctcagctctcagtagagagtacagtgggtagctcctctctgcaggcaggttgtcctgttgtctatccaagtctggctgagaccagggtttttatgggcttcagaggggagaaagtgcactctgattggtctatgggtggccatgggagggtccagaaaaagcaccataagttctcactctggtctgtggaaatggcagcctggcccccaggcctcaggctgtccctggcctgaaggtggggtttcaccagggacctgcactttttacccaggagcctgtctgcctcctgctaccattaaccggccatccacagtgccagtgcgcccaggctgttagtgccaarggtgcctgcaagcctgcaccaagccacccttagcaccccttcagactccctcccgttctccttggcacccaaagtccagagggggccgaggcagcaggggtctggtgtgtcagttctggcctgagcatgcacatacccagctggcttgtgacagctcccaggcttggccacaactttgctccaaaatcagagtgggcaccaggagcagggagaggccaggcagcgggagc

SEQ ID NO: 640041 - DNA, 605 bp, Homo sapiens
tgctctctgcaggcagttcatcctattattttctcagctctcagtagagagtacagtgggtagctcctctctgcaggcaggttgtcctgttgtctatccaagtctggctgagaccagggtttttatgggcttcagaggggagaaagtgcactctgattggtctatgggtggccatgggagggtccagaaaaagcaccataagttctcactctggtctgtggaaatggcagcctggcccccaggcctcaggctgtccctggcctgaaggtggggtttcaccagggacctgcactttttacccaggagcctgtctgcctcctgctaccattaaccggccatccacagtgccagtgcgcccaggctgttagtgccaaaggtgcctgcaagcctgcaccaagccacccttagcaccccttcagactccctcccgttctccttggcacccaaagtccagagggggccgaggcagcaggggtctggtgtgtcagttctggcctgagcatgcacataccyagctggcttgtgacagctcccaggcttggccacaactttgctccaaaatcagagtgggcaccaggagcagggagaggccaggcagcgggagc

SEQ ID NO: 640042 - DNA, 540 bp, Homo sapiens
agggtttggtaaaacaggcttcctgtttaggacctgaaagaattagcaaaactctaaaaggtggtcagtttatttcctattcactataggcttcattacagtaatgacagtgtaaacaatcgttgacacttttggggtcatttgaaattcctgtggcaaagggagactaagagcaaacagaaagatgagacttgaaggtaacccacagtgttgggcggaggccgttccaagtaagacaatgacacatccttctccttagtgactagaggacggcagaaaggaagagggtggagcagcttgctcagccacaaacccccagaaatgtacctgcccagaaggatggagcgagaattcaatgggaggaggcttttgaaggtgccctctaaactgccaggccgtacamatgtgaatcagctgcagcagcagcagcattcctggtggacacagtggcatctttttcattgctcactgtaaacagaatacagtggcctttcagttcgtggatgcttgtccaagccctcctggcccagacagcctttt

SEQ ID NO: 640043 - DNA, 597 bp, Homo sapiens
ccaacaaaaatgaatgtgctgtagctgtttgcctctggggccacagctgccaggtgacctgcagccagtcggggtgggatggtgaccggcttcttaagagtgtagtttcttctccttcccccatggcatcttctgcacatagcagggctcactgaaagtcccaaggctgaacaaggatccatggacagcctgggacaaagagcgatgatgccaggggcagattttctgytcttccctgagcctgaagtctggagatctagtcttctgttgactagaggtgggcacttagggctgcactgagctacatggctgccattaaggtttgaagttattttcctgccaaactctatggatctgctacctaccctgggtttcctggcctttggcctatgttacttgttccagaaggaggttggccctgcctttccttgctaagtaggaatgtcctaggttgtgagtttctctatgtcatgagaagagctgctttggaatcaagcagagaatcccattgtccaggagcaactgagatctttcgtcaaatgggcagacttctatgagttgttttcatttttattatttaagaatatattccacaca

SEQ ID NO: 640044 - DNA, 471 bp, Homo sapiens
ccaggagcaactgagatctttcgtcaaatgggcagacttctatgagttgttttcatttttattatttaagaatatattccacacatagagtatatgaaatgtatatgtgccttttggagataataatagttgttttgctctttcgaaggggcttctaacctctgttgctttgcagagaagtgacttggagtgtgagctgtagagggccaagttgctgggaggctcaaggtcagcctagcctctcccaaagcagtggctgtttatcgcrgccaatttctttgtgcctgagccgctcctgttaactaggagcctccacattcttgtctttcttatttatcactctgttatctctgtgctttctcctcttcgaccctcctatgagggaagaatccaaaggcatgattgttctcctcttctccccatccccccatagcagggcaaacaggccaatgtccccctcctccttcccat

SEQ ID NO: 640045 - DNA, 491 bp, Homo sapiens
ttttctggcctttttgtatgtctgaaatatttcataacaaatttttaaaagcaagaggcacctggggtggagataaaggaggtggctctggaaagatggagggaaagaggcaggaggagaggcaggacacctggagtgtaggtggagggaggggcagactccagaaacggggggaagaagatgtgtggaaaatcgaatgccwtgagtcactgggctccctcaagaacttgtcagagcatgggacagggactgtgctaggcagggccagagccaggggtgatgtcatcacaggaatggacatcagaggagccccgatcaagtttataaagatacaaagaatcccctcctggggcctaccgtcccctggatttacatcctgggctatacctttgcttcccagcattcatgcatgtctgtcagaggagggtttaattgttgttgatgttgatgttttttaaaagaacaattctaaagtaggtgattctccttct

SEQ ID NO: 640046 - DNA, 495 bp, Homo sapiens
tcagccttccaaaagacagtggtttccagcttcgctttctattcctgccagtcaagaatgagaggaataaagtcgtttcaggtaggcatgggctcagatgatgtgcctccaatgcagcctttctcaggaagctgccagaggagcattcatgmcactgaaaccagagtaaaccagaaacaagcatggtgtgtagggtagacaagataatggtctcccaaagatgtccacatcctaatccccagggcctgtgaaagtgttaggttacacggcagaagggattgaagatggtagatggaatgaaggctgtgaatcagctggccctgagatggggagatcgctctgggtgatcagaatgtgctggattggatcataagggtccttatacatgaaagagggaaatggaagagaggtcagagggaggcaatatgggaagggctcgcccgaggttgcaggctttgaagatgaaggaagggaactctgagccatggaatgtgg

SEQ ID NO: 640047 - DNA, 577 bp, Homo sapiens
atcctgctatctcacaaataaaaatgttgctccaggccaggagtggtggctcatgcctgtaatcccagcactttgggaggccaaggtgggagggtcacttgaggtcaggacttcgagaccagcctgaccaacatggtgaaaccttgtctctactaaaaatacaaaaattagctaggcgtggtggcacatgcctataatccccgctactcrggaggctgaggcaggagaatagcttcaacctgggaggcagaggttgcagtgagctgagatcgtgccactgcactccagcctgggtgacaaggctagactttgtatcaaaaacaaacaaacaaaaaacacagctcctgatctgccatagaggctaagagtgccagtgaggtcattcccctggggagggccggtttccaagagttcctgagtggacatgcatcacctggctgtgcctgctgcccctctgctctcacacacacacatgcatctggccaagggaaaaagccctgagggacagatgggaggcatggaagctgggggaggggcaaggaggtggcagaagagcacagtaggggccacagggtca

SEQ ID NO: 640048 - DNA, 569 bp, Homo sapiens
caacagctgctgtttttgccaggctgtcatctatttagttgttactttttcgactttatttttaaacagtattacatggagtacagcaacagtgagcacaggacagatggagaacaaatccaaataacagactttcagagccaccctaatataagtgactggggtagggtgggagaataaaaccagattgctggattgctaaaagcaaacaaatatcaataaatcacaaattaagtcaggaaagggaaagcaaataaggaagtggcacacctcagccatccttctgccacacagagtctgagatgttgggaaggtgagtgagctgaagttgacaggggcttcygagccaggccaaggagcaggatcagtggtggagatgagaagaaaggctgacaaagccctcctggggcaggcaacacatttagtgggtggaaatcttaaggagcctgcaggagttaaacgatatgtaaagcaacacctctcatatctgggtgagactccaggctctgtgccaactaagatattcccccaccccctttgtctcctggggcataagtagaagttagaga

SEQ ID NO: 640049 - DNA, 629 bp, Homo sapiens
gtggagaggaggaggccagctcctcccagcacgtctgctgtctctgtgaggaccctctccaggcacattctatccatctcccaccaccgcaagcagtgtgacctgatggagtggccaaggtataaatcagaggtggaaggaatgcaaaaaggagggaggcactgcagagagaaggggtgagggcctgagggggagcccccatctcccaggtgtgcaagagcagcttcacactgtagctgatgtgtgggccacctggttcaggatcagggactcatgcagaatggtcaaggatggcttaacagctgtcactgaaaaatccccagggaaattatgagtagaggagacaccccctcttcagagcctctcctcctctctaccctgtactgcaaagactatttggtggggtggggggctgcctgcaccttgcacttctcaagcaactcccttgtgccaggctctgggctgggtgctggggatgtaaagatgagggggacacagctcctgcttcaggaatcatttaaagartggcgggacaggtgctgtggtggagctcagggtaaccacaggaacacccaacccagggggtggggcagtgggggcccatggtcccacttctgagggaaggtgac

SEQ ID NO: 640050 - DNA, 529 bp, Homo sapiens
cagggactcatgcagaatggtcaaggatggcttaacagctgtcactgaaaaatccccagggaaattatgagtagaggagacaccccctcttcagagcctctcctcctctctaccctgtactgcaaagactatttggtggggtggggggctgcctgcaccttgcacttctcaagcaactcccttgtgccaggctctgggctgggtgctggggatgtaaagatgagggggacacagctcctgcttcaggaatcatttaaagagtggcgggacaggtgctgtggtggagctcagggtaaccacaggaacacccaacccagggggtggggcagtgggggcccatggtcccacttctgagggaaggtgrcaccaaaagatttagccctgagaaggtcacacagaaatgaagcaacctgaaggcagctccatggggccgctgtccctgttgttgatgtttctggaatatgggtctaggatcagaagcaaaagaggaagtccattcttttgcactgcagaacattcctacagtgga

SEQ ID NO: 640051 - DNA, 455 bp, Homo sapiens
ttggaagtgaccaaggtgtccttcagcgggtgaatggataaataaaccatggtacatagagacatgctaaaaagacatgagctattaagctatgaagagatatggatgaaacataaatgcatattaccaagtaaaagaaaccagtctggccaggcgcagtggctcatgcctgtgatctcagcactttgggaggccaaagcaggaggatcactagagcccaggtgtttgagactagcctgggcaacagagcaagaccccgtctctacaaataattaaaaacatatatatatttttaaaaagtcagtctggaaaaggttacatactatatgatcctaactatatgacactctggaaaagacagaaytaggagacagtaaaaggattagtggtttccaggggttggggggaggaatgaataggtggagcacagaggatgttgaaagcagtgaaactgc

SEQ ID NO: 640052 - DNA, 539 bp, Homo sapiens
actgccagcccatccaaacaagcaggtctcaggtaaaggatctgtttaagagtctgctgtttccttacctaatagccattctccccttgtgatttagaaacctaagtgacttacttaactgaaaaattacatgtcccagamaaccttggagacagaagcggctcacaggatgtatgtggcagttttgggcaggccctttaaaaggccttataaaagttgtgatagctggacctccagcagccatcttggactacaaagatgctgaagatgatggaaaagactgacggaagtcccagatgactgtagatatttcatactggctttgaactgtctacctacaggcttcctgtacataagaaaaaaaagaactttgaaattatttaagtcacagttgtctatggtctctgctactagcagctgaacccaatttctaagtggttcagggcctgcatgcatttataccaataacctatgcatccatactcataggctcagcaccctcagccatcaactccagagaagtccatgaaggtcccaaa

SEQ ID NO: 640053 - DNA, 478 bp, Homo sapiens
acagtttgaagttgggtaatgtgatgcctccagatttgttctttttgcttagtcttgctttggctatgtgagctcttttttagttccatatgaattttggattgttttttctagttctgtgaaaaatgatgatagtattttgatgggagtttcattgaatttgtggattgcttttggcagtcatggtcattttcacagtattgattctacccatccatgagtatgggatgtttttccatttgtttgtgttgtctatgatttctttcagcagtgttttgtagtttttcttgtagaggtctttcrtctccttggttaggtatattcttgagtattttattttattttttgcagctttcgtaaaaggggttgagttcttgatttgattctcaacttggtcactgttgtacagcaatgctattgatttgtatacatcattggttttgtattcttaaactttactgaaatcatttatcagagc

SEQ ID NO: 640054 - DNA, 478 bp, Homo sapiens
acagtttgaagttgggtaatgtgatgcctccagatttgttctttttgcttagtcttgctttggctatgtgagctcttttttagttccatatgaattttggattgttttttctagttctgtgaaaaatgatgatagtattttgatgggagtttcattgaatttgtggattgcttttggcagtcatggtcattttcacagtattgattctacccatccatgagtatgggatgtttttccatttgtttgtgttgtctatgatttctttcagcagtgttttgtagtttttcttgtagaggtctttcatctccttggttaggtatattcttgagtattttattttattttttgcagctttygtaaaaggggttgagttcttgatttgattctcaacttggtcactgttgtacagcaatgctattgatttgtatacatcattggttttgtattcttaaactttactgaaatcatttatcagagc

SEQ ID NO: 640055 - DNA, 562 bp, Homo sapiens
ttacagcagcctgaatagactaagacaaagatcagtataaaaaccaattatattattatacacctgcaaaaaccctaataaaatactttcaaaaatagatatttagaactagaagaatatacatttattgaactcaaaaagtaaaaattgttgactgaacttcagtgaccartcagggaaatgcaaggctatgcacaacgcgaaaccacttcccatcgccagacaggatcgggcattgattggctaaatgggactgctcacacactccttccaggagtgtaaatgagctttttaaatctttggagagtaattggacaatatcaaactaaataataataataatagcatgttttctaagacctagcaaattcacttttaggcatgttattcacatctagtctctcacacttatgctccaggagacaagttcaaagacattaatctcagagttgtaacacaaaagaatcagacacaatctaaatgcccatcagcaagagaatggttggatgatctgtggaatattatgtagcaatgaaaaataatgagacagatctatatgtac

SEQ ID NO: 640056 - DNA, 532 bp, Homo sapiens
cctgagcacttccagctagacgacttatgatcatggtatttactgctgtcagagccttctaagcaatgtataatgctgtttaaaacccacctctggccgggtgcggtggctcacycctgtaattccagcactttgggaagccaaggtgggtggatggcaaggtcaagagatcgagaccatgctggccaacgtggtgaaaccccgtctctaataaaaatacaaaaattagctgggcgtggtggcaggcacctgtaatcccagctacttgggaggccaaggaaggagaattgcttgaacctgggaggcggagattgcagtgagctgagatcacgccacagcactccagcctggcaacagagcgaaactccacctcataaataaataaataaataaataaattgtacttttctgctgccttcctctgtaagaacaggtatctctttatgcaatggctgtcgtggaagccatgcatagactacatttttggtacattttttatgtagcagggactccaacaattaatgcttttaaa

SEQ ID NO: 640057 - DNA, 512 bp, Homo sapiens
ctgaggtctgctggttttacaagtgtttgatagttcctcctgcattcattctctcacctgccrcccccctgcgaagaggtgctgatatgttttggctgtgtcctcacccaaatctcaccttgaattgtaacaatctccatgtgtcaacggcggggccaggtggagataattgaatcatgggggtggttccctcgtactgttcttgtggtagtgaataagtctcacaaaatctaatggttttataaataggagttcccctgcacaagttctcttgcctgccaccatgtaagacgttgactttgctcctcctttaccttctgccatgattctgagacctccccagccatgtggaactgtgtccactaaacctctttcctttataaattacccagtctcaggtatgtctttatttgcagcgtgaggacagactaatacaggtgccttccaccatgattgtaattttcctgaggcctccccagccatgcaaactgtgagtcaattaaacctctctt

SEQ ID NO: 640058 - DNA, 374 bp, Homo sapiens
tacaatatttagaatgtgttaaataaaatttctaagaggccattggtttggactgagctcctgcagtaggcccaacagaccaaaccaaaatggagtgtaactcacactgaagttccacaccaccaagctgaaactaagttgtttatctgaccttccaagaaattaagagagaaagagagatataatagtcaaatctctaaatagggaagttttagccagcatgataagaaagtcctatctkctttaatctttacaagaaaagtaactttgaaatgaccaatctacttttgttatttggttctctttcctgggcccttctgtctataaagccaacctccccagctcagctcattagaacactcattccattttgt

SEQ ID NO: 640059 - DNA, 600 bp, Homo sapiens
acatcatatttaatgatgaacaactgaatgtttttcttctaagatcagaaaaaaagtcaaggctatccactctaactactcctattcaacattgtcctgaatgttctagccagtgcaatcagaaaagaagtaaaaagcacccagattggagcagaagtaagactrcttttattcacagacaccatgattatctatgtacaaaatacaatgaaatccccaaaaagctactagaactagtaagagagttgtaccacgtttgtgatatataagatcaatgtataaatattaattgtattcctacatactagcaacaataggaaattgaaataagaaaagctactgacagtaacaccaaaatatataaaatgctcagtaataaatacaacaatagatgtgcaaaatctgttttaagaactataaatagtgccagaaaattaaagatctaaatacaccatgttcataggttggaagattattgatatgtcaattatcccccaaattgatctgtagattcaatgcaatcccaatcaaaatcccagcatatttttttttctttgagatggagtcccgctctgtcacccaggctagagtgcaatggca

SEQ ID NO: 640060 - DNA, 592 bp, Homo sapiens
ggagtatataactcccaaagctcaacaataagaaatcaaacaactgtccctcaaatgggcaaaatatttgaacagaactttaccaaaaaaaatatgaatggcaagtaagcccatgaaaaatgttctgtgtcattagttataagggacatgaaaatcaaaaccacaatgatatatccctccacaacaattagaatrgtgaaaataagaagactgcaaatacgaaatgtcgaggacaatacagaccaactagaactctcctatatcactgataggaatggaaaatggcacaactattttggtaagtagtttggcagtttcttaacaagttaaagatatactaccacacagtccaatcattcccttcctaggtttgtatccaagagaaatgaaaacatatccacacagactcatacatgaatgttcatagaaactttatttgtaatagcccaaaactggaaacagcccaaatgtctatcaacaggcaaatggataaacaaccatggaatactgctcagcaataaaaatgaatgaactactgatacatgcaacaacttgtattaatctcaaaataactatgctgagtgagagaaac

SEQ ID NO: 640061 - DNA, 592 bp, Homo sapiens
ggagtatataactcccaaagctcaacaataagaaatcaaacaactgtccctcaaatgggcaaaatatttgaacagaactttaccaaaaaaaatatgaatggcaagtaagcccatgaaaaatgttctgtgtcattagttataagggacatgaaaatcaaaaccacaatgatatatccctccacaacaattagaatagtgaaaataagaagactgcaaatacgaaatgtcgaggacaatacagaccaactagaactctcctatatcactgataggaatggaaaatggcacaactattttggtaagtagtttggcagtttcttaacaagttaaagatatactaccacacagtccaatcattcccttcctaggtttgtrtccaagagaaatgaaaacatatccacacagactcatacatgaatgttcatagaaactttatttgtaatagcccaaaactggaaacagcccaaatgtctatcaacaggcaaatggataaacaaccatggaatactgctcagcaataaaaatgaatgaactactgatacatgcaacaacttgtattaatctcaaaataactatgctgagtgagagaaac

SEQ ID NO: 640062 - DNA, 517 bp, Homo sapiens
cttgaggtcaggagttcgagaccagcctggccaacatggtgaaactctgtctctactaaaaatacaaaaattagctgggtgtggtggcaggtacctgtagtctcagctacttgggaggttgaggcaggagaattacttgaacctgggaggcrgaggttgcagtgagccgagaccacgccactgcgctctagccgtgcaacagagtgaaactccatctaaaaaacaaacaaacaaacaaacaaaaaaacccagtagtgggattgctggatacactttttaagaaactgccatactgttcttcatagtggctgtaccaaccagatgagagagataacttctagtgctttagcacactgtaagatgactgtagttaacaataatatgtattttcaaatagctagaagagaggatagtgaacttcccaatacatagaaatgacaaacatttgaggtgatggatatgctaattcatctgacctgatcactacacatgacatgtatcaaaatatcatgatgga

SEQ ID NO: 640063 - DNA, 590 bp, Homo sapiens
ctggattgtggactgcatgttagcgctttcctctccccatccccgggcggtcaggagacctgagaatgcattgagaacccacctgcccagccagtgaggggttcatggtggctggcttcttagccattctgctgttactcttgttactgttccctggtttgaatgagactakcctcacagattgcatcaccaagtaatctcttctgaaccagccaactgacttcctgtgttgaccaagaggagggctccaaaaattgctcttatctttgaataaagcaatatgtttctacatgaagtaacaaaatgtacccattttctaatagcatcccaaaattatgctactgctgtaaaagttttcacagcaccctaaatctccttttgaattagctcttggcctccatgagcatggaattggggtctatgcagttcgtgagactgtgttataacaatgttattctcatctgtctgctaattaattagattgttgatgctctcaaattatattaaaacttggtataatggcatgaaaaaactctggtctaaaaagtatggcaaaagggtgaacataggactctctgtaaggtacaaag

SEQ ID NO: 640064 - DNA, 597 bp, Homo sapiens
ataaccatccatcctatgagataagtagataaatgtttacatttccacattttagggaagaaaactaagacttattgaacaaccagctgttaggcaagcattacatctcttgtcttgcaagtccagagctctttagaaacaaatcaataagacaaataagctggccaagttagtcagagtagctcattaatattttctcctttcattccgttatatatagctcaaatgagccttgttctaatatctgagctttttcctttgtttcacagacaagctccctttttaaaaagtttgttttattttagaaattattattatttcaattgacaaatattgcatatatttatggtatacagcatgaagttttgatacatacctacaatttgaaatggcaacatcaagcaaattaacatacacattacctgatatacrtgtctttttttttgtggtgagaacatgtaaactcaaccatcttagcaattttcaagtatacgatacattgttattaactacagtcaccacagagtaaggtggatctcctgagcttattcctcctgtctaactgaaattttgtattctttgatagcatcttcccaa

SEQ ID NO: 640065 - DNA, 649 bp, Homo sapiens
ctcttataattgatatgattcacaattattaacatctcacattttcacttttcagtgtaataacttgtctttcaatataaccatccatcctatgagataagtagataaatgtttacatttccacattttagggaagaaaactaagacttattgaacaaccagctgttaggcaagcattacatctcttgtcttgcaagtccagagctctttagaaacaaatcaataagacaaataagctggccaagttagtcagagtagctcattaatattttctcctttcattccgttatatatagctcaaatgagccttgttctaatatctgagctttttcctttgtttcacagacaagctccctttttaaaaagtttgttttattttagaaattattattatttcaattgacaaatattgcatatatttatggtatacagcatgaagttttgatacatacctacaatttgaaatggcaacatcaagcaaattaacatacacattacctgatatacgtgtctttttttttgtggtgagaacatgtaaactcaaccatcttagcaattttcaagtatacratacattgttattaactacagtcaccacagagtaaggtggatctcctgagcttattcctcctgtctaactgaaattttg

SEQ ID NO: 640066 - DNA, 411 bp, Homo sapiens
  misc_feature 8: n = A,T,C or G
caccaggnccttttggggggtggggggytgggggagggatagcattaggagaaatacctaatgtaaatgatgagttgatgggtgcaggaaaacaacatgccacatatatacctatctaacaaatctgcatgttgtgcacatgtaccctagaacttaaagtataataatgttaaaaaaaagacaaaatacggtggattaaacctacttcttcagggtgatttacaggacaaaggagtgtaaggcctgagtcagtgcagtcagcgtacacttgtaaactaaatttcttctcctctcatttactccttagcctgcatgggacttgggtgaagccagtgaggcacctcaggtgccagatttaaggctgctctcactctcaggtgctgaccccatgtttgcacaactttgagagtg

SEQ ID NO: 640067 - DNA, 532 bp, Homo sapiens
ctctttctattctcaggaagtaatctgataaattaattcaccctgaggtcaaaatcttctatatcatagcaatcaggcaaccactaaacagtactttctgcttgggtttcttacccttaaattttcttcccacagcatgaggttacttagttgcctgaattaaaaaatatgtagtaacttacaatttaatattcaatcatcaatccattarcttttactggaatcttggcacaattaattggctatattatctttcttagcaaatgcctgagggaataactgtctgaccaggaggaaggggtatggaggcagaatctgggaccgggaaacagacactgccaataaagtctggtcagcaggaggctcatggataattttggaatggaagacttagctgtcagttttgggtagaggtaaggggtgatgaaaagggggaggagggagctgaaagaagagagaatgtgtttggtgattcattcaacacttttattgaattttatgatgggccaggcaccagggattataaaaaata

SEQ ID NO: 640068 - DNA, 532 bp, Homo sapiens
ctctttctattctcaggaagtaatctgataaattaattcaccctgaggtcaaaatcttctatatcatagcaatcaggcaaccactaaacagtactttctgcttgggtttcttacccttaaattttcttcccacagcatgaggttacttagttgcctgaattaaaaaatatgtagtaacttacaatttaatattcaatcatcaatccattaacttttactggaatcttggcacaattaattggctatattatctttcttagcaaatgcctgagggaataactgtmtgaccaggaggaaggggtatggaggcagaatctgggaccgggaaacagacactgccaataaagtctggtcagcaggaggctcatggataattttggaatggaagacttagctgtcagttttgggtagaggtaaggggtgatgaaaagggggaggagggagctgaaagaagagagaatgtgtttggtgattcattcaacacttttattgaattttatgatgggccaggcaccagggattataaaaaata

SEQ ID NO: 640069 - DNA, 575 bp, Homo sapiens
gtatgtatttattggacacctactatgcattacatgcttttctagttgtttgtaatatatcaatgaacaaacagacaaaagtccacacttagggagttcacattctagttagggagacagaaaataaataagattgatgattaaaatatacagaatgttacatgtaggtggtaatgagaaagaatcaagcaggcatgagagatatgaaatgccgggaggggaactaatattttcagtagaatgacctggaaagcctccctgagaaggtgatttcagaataaasctatgaagaaagtaagggaactaatcatatggccaacagggataaggatgctttgagcagaggaaacagcaagtgcagaggcctgagccaggtgcagatgtggggtctttgggagacagcaaggaggtcaggatgagagaaatggaaagactgaggagtggggactaggaggaagtgagataagaaaggtaaagagaggggagaacctgggaccttgtaggacacagtaaggactttggcttttccgtagagcagattgaagagccattacagggtactgagcagaggagaa

SEQ ID NO: 640070 - DNA, 627 bp, Homo sapiens
acctataaatggtcctccatagttttcttccttctaaatattgtactatccgtaagtatctagaaaaaattattccaaattgatcattttttcccttaagccatacaacatttggcttgagtccagaactcttcactattttcagaatttgctaagcattcagcatttcaattctaaaatatatttttaagtcaagggggatatgtctacatgcagaggaggaaatattttctttcaaggagccattccattttataacacatgctggtgggttgatgtccgatgagaactcatgatttatttctttttcaaataataattgtagtctgtctgtgaaggcgtggatagaattacctttgggttccagaagaaaacaccctaaattagaagcctcagatcttcctgtagatgaacatctagtgtggcatgctgcaaatacatctctcccttttcattctcattgccttgatttagggracttgggcagagctaccctgcctttcttttgtgaaaagacattctgaaatgtctttagaaagcaaacttctcgaagaaatgcggagcgggccatggtttgaatgcaagtctgaatttaattgcggccaccctggtagtacactgtttaat

SEQ ID NO: 640071 - DNA, 471 bp, Homo sapiens
ataataattgtagtctgtctgtgaaggcgtggatagaattacctttgggttccagaagaaaacaccctaaattagaagcctcagatcttcctgtagatgaacatctagtgtggcatgctgcaaatacatctctcccttttcattctcattgccttgatttaggggacttgggcagagctaccctgcctttcttttgtgaaaagacattctgaaatgtctttagaaagcaaacttctcgaagaaatgcggagcgggccatggtttgaatgcaagtctgaatttaattgyggccaccctggtagtacactgtttaatttccagcatgtgtctggatgatccttacagcaactccaggccaggaactgtgagcaaagaaaatttatctgtgataaagttacatattttgttgccaaagaacagtcacttggggctgattcaaaagtcaaatttaaacaaatgattccaaagctt

SEQ ID NO: 640072 - DNA, 528 bp, Homo sapiens
gtaatcccacctacttgcttgggaggctgaggygggagaattgcttgaacctgggaggtggaggttacagtgagccgagatagcaccactgtactctgcctgggcgacagagcaagactccataacaacaacaacaacaacaacaacaacaacaacaaagaccgttttggcttacctaagattaagaaacatgtggtgctggagcatgtactgaggctaagacctgtgctccctggtccagatccctgtgctagcgtgcattacttttcaaggttgtatttgagattttataggaattcagttgctgctctcggctggttagtaggacctgagacctggactgccctttaagaaactcacaaccaaataagaaagttatttcaatatgatgccctttgctggtttcaggcacctatttcttggtagataaagtcaacctttttgcacatttgagacattttaaatacttgtgaatttttatttctgttatgtaaaactttgacaaaagtcgaacatagggatattaga

SEQ ID NO: 640073 - DNA, 528 bp, Homo sapiens
gtaatcccacctacttgcttgggaggctgaggcgggagaattgcttgaacctgggaggtggaggttacagtgagccgagatagcaccactgtactctgcctgggcgacagagcaagactccataacaacaacaacaacaacaacaacaacaacaacaaagaccgttttggcttacctaagattaagaaacatgtggtgctggagcatgtactgaggctaagacctgtgctccctggtccagatccctgtgctagcgtgcattacttttcaaggttgtatttgagattttataggaattcagttgctgctctcggctggttagtaggacctgagacctggactgccctttaagaaactcacaaccaaatragaaagttatttcaatatgatgccctttgctggtttcaggcacctatttcttggtagataaagtcaacctttttgcacatttgagacattttaaatacttgtgaatttttatttctgttatgtaaaactttgacaaaagtcgaacatagggatattaga

SEQ ID NO: 640074 - DNA, 628 bp, Homo sapiens
aagcttgaacttaagagtgatgacctagaatatctggtgagcagcaaagcattcaagatgtgacctggctgcttttaacagcctatgatcatatacagaagcacataaacgacttaaatttggaactttaaatacaaaaatttggaaaatttgcagcttagctatgtgataaagaaggaaaaaagcattttcaggagagaaatacaaatggtctgtggaacaatcacttgcaagagagacttgcatgactaaaatggagccaggtgctaatatccaagacaatggggaaaaggccttgaaggcgtttcagagatcttcaaggcagccccttccatcacaggcccagaggcctataaggaaagaatggtttcatgggccaggcccagggtgctactgctctacgccaccctgggaatttgctccttgcatcctaatcactctggctccagcctcagctcagagggccacaggtatagttcaggtcaaagctccagcaggtgcaagcctctgtaagccttggcagctccagcaggtgccaaacctctgcaagccttggcagcttccaygtggtgttaggcctgcaggtgcacagaatgcaacagtgaaggagactaggcagcttccatct

SEQ ID NO: 640075 - DNA, 471 bp, Homo sapiens
acggaaaaattaaaatccttactggaatgtaaaatggtgccactgctatggaaactagtgtagtggtacttcmaaaaattgaaaacatagttaccatttgatctctcaattccaattctgagtttgtacccaaaggaatcgaaagcagggactcaaagagagatctgtagcagtattattcttaatagccaaaagatggaagcaaaccaagtgtccatggatggatgaatggataaataaaatgtggcatatacatacaatggaatattattaaaccttaaacaagaaggaagttcggacacatgctataacatggatgaacctaaaggacatatgctaggtgatataagccaatcacaaaacaacaaatattgtatgaaaccacttatatgaagtatctagagttcaaattcatagagatagaaaatagaatggtggtttccaggagctgaggtgagggagtaatggata

SEQ ID NO: 640076 - DNA, 550 bp, Homo sapiens
tacacattaggacagacaaacattagtttttgccattgaccattgagaggctgtgcttcatggtatgtggcaggggcatgggtactgtttgccaggcttgggggatctttgttgttatttggtacattttagaaacaaacgttaaactcgctggtaaggacttaccagttgtacttcctcgaggagatactctagatcttagttcctcttagcagtgaaggtttcctggaatgtcatagtcttggaaggaggtgaacgattggatgtgtaacaccgggatcttcactgagagtgaatacaagaaaaatcaattatckaagatgcaggtaaaataatttcccatgaccccaacattcatagatgtcatccaatctatcagtgcctttaaaaagccacaactttactcagagcatttaacaagctctccttttatgtcttctctttgctggatactgtgagaggttaggggtatgcataaacaagatacaatccctgtatttgataatcttacatcctagagtatgacaaagcataaagaaggaatgacaat

SEQ ID NO: 640077 - DNA, 572 bp, Homo sapiens
tcggccagcagagggtactacaatactggtgcaataatccaaatcacagcaaatttacagctgaaaaagatttagacaaattaaaatgggctttggttttatgatgtgcttggagctcctagccagaaataagagagtggtgggatggaagagatggaaccaaaactggtaracagggactgctcatcagaggaagaggcaaggcagcagtgtaggttcagtatcactaatccgggggtgaggcaaacctagattcaaaagtgagaaggaatcaaaactaaggggtcaaccgcttctaggtattcaccctagaaaaactttttaaatacctgtatgtgaatatttataacagttctatttataatcaccccaaactaggaacaatccagatgtcttttaatcagtgaatgaagaaaccaagtgtggtatatccatacaatggaatactactcaggggtaaaaaagaagaaattatgaatacatacagtaacagggatgaatctcaaaggcattatgttgagtggtggaagccattcttaaaaagaaagttagataaatatgagtccatttag

SEQ ID NO: 640078 - DNA, 589 bp, Homo sapiens
  misc_feature 553, 554, 555, 556, 557, 558, 559, 560, 561, 562, 563, 564,565, 566, 567, 568, 569, 570, 571, 572, 573, 574, 575, 576,577, 578, 579, 580, 581, 582, 583, 584, 585, 586, 587, 588,589: n = A,T,C or G
tcatcactcctctcctccattcattttagatttttcttcccatcagccaacactttagctgctgagttttctccctggtggggtaatctacagttctactcctgaggggtttgcagcctaaattgccttgcctttttgagttatggttgctacattgctcatttggtcttcttcttytttttttttttttttgagagagagtttcattcttgtcacccaagctggagtgcaatgatggcatgatctcagctcactgcaacatctgactcccaggttcaagcgattctcctgcctcagcctgccgggtagctgggatcacaggcatgtgccaccactcctggctaatttttgtatttttagtagagacagggtttcatcatgttggccaggctagtctctaactcctgacctcaggtgatctgcctgcctcggcctcccaaagtgctgggattacaggcatgagccattgcatccagctgctcatttgctcttataattgggcatggaagcacagagagaagtctcagtggatctctggattctgggattcctnnnnnnnnnnnnnnnnnnnnnnnnnnnnnnnnnnnnn

SEQ ID NO: 640079 - DNA, 658 bp, Homo sapiens
acattaaaatctagacacgcacatgataatctcaggccagcctttctttgcctcatccttcccacagaaagctcatcccgtgtgttccgggttctctgtctctggtgataaatatggagtatccagacatcgtattgcattgttatgtctgtcactgtttgcatagactcaaaccaatgcaataatttggaatggggctgtgctcaattagcattcccacgattctttccctgcttcaccctttctaaacccaattccttggggcagaacatcacagaaaaccaagatcagaaatgtggtagttcagggtggcctaggaagtgaagaacaatgcctttcctttcagatactctaacctgcacttcaaagatgtttgttccaaaattctaaaaaatggccaatttgactagacctcttgtggtgtgagtgtattgcagagaatcttgtgaaaaaagaataagctcactctwgacaaggcaatctgatctttagatcttaataaccctggttggaagatagaaactctagtgttcatttttgggtcagggagtcattgctcaatacgctaagagaattcattttccttgagtgtttttcctttcaggtcacgttttactgctggagttactcagcgaattaataggtatagaaatgcaaa

SEQ ID NO: 640080 - DNA, 548 bp, Homo sapiens
ggtaaaacgccacaggaggaacataatcttcatcaaaataccaccatcattcttcacagaattagaaaaaaaaaattgtaaaattcatatggaaccaataaagagcccacatagccaaagcaagactaaacacaaagaacaaatccggaggcatcacactacctgacttcaaactatgttataaagccatagtcaccaaaacagcatggtactggtataaaaataggcacatagaatggaacagaatagataacctggaaataaacccaaatacttacagccaactgatctttgacaaagcaaacaaaaacataaagtggggaaaggacacccttttcaacaaatagtgctgggataattgggtagccacatgtaggagaatgaaactgtattctcatatctcaccttatgcaaaaatcaactcaagatggattatggacttaaatctaagacttggaactataaaaawtctagaagataacattggaaaaccccttctagacactggcttaggcaaggatttcatgaccaagaacccaaaagcaaat

SEQ ID NO: 640081 - DNA, 495 bp, Homo sapiens
tatttagtcaattttggtacttcaaatggtacaaattaggaggcaacagtatcttggtatatttcggtttctcttctgtaaaaaatgacctccatatttaacagaaaaagctgctttaaacaactatgaaagggtgattttttttcatctttaaaagctcattcaaaccatcatattaatgatttataaacaaatgaaggaataacataagggattgcawttcttttgaaccgaacaaagttgtaaaaagcttagaaaaaaaggacttggttcaagataaatatttgttgaactgacttattgaacctttctaaatgctctcagatgaaaaatattcagatctaaacaattttttttttttcgtgttgctaagctttctggaagatggctttgaaatgtgaatgagcacaggtttaagtataatttctagcgcttgttaattctagttgagagtgtggatgctacatcttcagtgcaagaaagaatgacaatcag

SEQ ID NO: 640082 - DNA, 615 bp, Homo sapiens
catatacaccatggaatactatgcagccataaaaagaataagttcttgtcttttgtgggaacacagatggagctggaggctattagcaaactcacacaggaacagaaaaccaaagactgcatgttctcacttataagtgggagctaaatgataagaacttaagaacataaggaaataacaggtcaggcaaggtggctcatgcctgtaatgccagcactttgggaggcmgaggcggtggatcacctgaggtcaggagttcaagaccagcctgaccaacacggagaaaccccgtctctactatacaaaaattagctgggagtggtggtgtgcacctataatcccagctactagggaggctgaggcacaagaatctcttgaacccagggggtggaggctacagtatgctgagatggtgccactgcacttcagtctgggtgacagagtgagtgagactctatctcaaaaacaaacaaacaaaaacaacaacaaaaaaggaaagaacagacactggggtttacttgagcagggaggttgggaggcaggagaggagcagaaaagataactatcgggtactgggcttaatacctgggtgataaaataatatgtacaacaaac

SEQ ID NO: 640083 - DNA, 572 bp, Homo sapiens
taggttaatcttgctccaaaggagagtggattggcagtcactctgtcaatcaccactcctcactgacacacccatggcaaatggtgttagtcaatggccatggcccccttttcctctgaggccaggtctggctgcagatagtcaaggcaatattttaggaaattccaagaaactttagatgattgaagtgggcagacacgttaaaasgtgtttgtcttccgtggttagcagattttgcaatgttccttaaggagtggatgattcttcctcctaaatatcactcttagtcactgcttcttctgcagccctaccttctcatttgctcttgtctggatgattgataaatttcccctaataagctccctgcctccagtcttgatctcctgttatccattcttcactctcctgttggaattatctttctgagacatttctctgagcatgccattgccctgctaaagatcctaaaatggcctcacttcctttcccaaaacaagtcccaacattttggtgtgaacaatatggcctcttctcactatcctatttggcttcttctcatttcttcaaatcca

SEQ ID NO: 640084 - DNA, 520 bp, Homo sapiens
ctgcatttagcacaccaatactttgcctttgtgtcctgaatagttcgaagcatgatgccttgcccataacaagagctcaggaaatatcaagtgaatgaatgtcgaatcatctccacaggaaggagagtgggttagcaaatttgttcttgtaggactgtgtttgtttacaaacgagacaaggtatcctttagaaatgtgagatcataggggttctctgataccctccctttaaacttttcctcccaccagcctccccaacatactgattctcacacttacctattccccgtttgtccctgttttcatcatgttttaggaagtaaagagaaccacgaacttctgccattcatttaatttcagcactcatgcttargtaagccactgacccttcggccaagtcaaaaacctagaatatattatgaatctgagtacagttatcttggttataatataattacaggggccagtaaactattccacagtattatgggaggagagtaagagctggagtgagaaattg

SEQ ID NO: 640085 - DNA, 604 bp, Homo sapiens
ctttgtgctagtcattctccaataagcaccccttttatgagacatacatattaggtgctgaaggaggaataagcccacagaaaaggattcatgactacacactttgccttccttcctcgtggtgggcaggactaaactggtatttgcctcacctttgcctcctttaatgaagaactggcaagctcagatacccagggatctctggtcgtctagygtggtgctcaccagtggccgtgtaacttccggtgggcagtattggtaatttcttcaacctggtggcagctttctccaagccaatgttcatgaagattttatactcaaagctggtggcgctccttatatctcatgcttcatatttgtttatttatttatttgagacagagtatcgctctgttgcccaggctggagtgcaatggtgagatgtgggctcactgcaacctccacttcctgggttcaagcgaatctcatacctcagcctcccaagcacctgggactacaggtgcttgccaccacgcctggctaatttttgtatttttagtagagacagggtttcgcttgttggccaggctggtcttgaactcctggcctcaaatgatcctcctgc

SEQ ID NO: 640086 - DNA, 553 bp, Homo sapiens
tcctttaatgaagaactggcaagctcagatacccagggatctctggtcgtctagtgtggtgctcaccagtggccgtgtaacttccggtgggcagtattggtaatttcttcaacctggtggcagctttctccaagccaatgttcatgaagattttatactcaaagctggtggcgctccttatatctcatgcttcatatttgtttatttatttatttgagacagagtatygctctgttgcccaggctggagtgcaatggtgagatgtgggctcactgcaacctccacttcctgggttcaagcgaatctcatacctcagcctcccaagcacctgggactacaggtgcttgccaccacgcctggctaatttttgtatttttagtagagacagggtttcgcttgttggccaggctggtcttgaactcctggcctcaaatgatcctcctgccttggccccccaacatgctggaattacaggcatgagtcaccacacttggcttcatgcttcatataagcttaaatgccccttctttggggaattcttcccctacagata

SEQ ID NO: 640087 - DNA, 627 bp, Homo sapiens
aaagcatcccctccccagacactttccaaagccccagattagaaggaatgattgtggttagcatgaaaccaaatgaaaatactactgataactgttcctgtctgggacatctggatccagccagttttcatctcctgaacctgctctcttaacagttatctcatatggaaaaatactactctgagttttcagctctagtttttctaatacagcacttgttccctgtcttgtgattgcttgtgggtttttgtttgttagtttttctaacagcccacttactccctatattgtgattacttgtgggtttttgttcgtttgtttttgagacagggtctttctctgtcacccagcctggagtgcagtggcaggatcatagctcattgcagcctcaaaatcctgggcttaagtcctcctcccacctcagcctcctgaatagctaggaccacaggtgcaccctaccatgcccagctaagttttgtagagacagggtctcgctatgtgcccaggctggtctggaactcccaggctcaagcaatcctcctgcctcgtctycagaatgctggtattataggcgtgagtcaccgcacctggcccattgcttcttttagtggcagtctcatatactag

SEQ ID NO: 640088 - DNA, 459 bp, Homo sapiens
gtatagtagagtcatgctcagtaatatttgttgagtgaatgaatgcactcaaggaatgaataaatttacactgctatattttgcttctgaccataagttatacttgaccaagtgggttatctctctttttttcttagagtttacccacagtaaacttagcttatcrgccatttggtcccacttttactgaaaatcagattaaagaggttctaaggaggaaaaaatgatgagagtggtcaagggcatgggctcaggcatcaaattgcctgggtgtgaaattgactgtattatgtgctagctctgtgatcttgggcaggtcacttgccgtctttgtgctttagtttcttcatctgtaaagctgtgatgataacagtagtacacacctcttagggatattttgaagattaagtgggttgttagacataaagcacttagcacgttgtctggcattgtataagt

SEQ ID NO: 640089 - DNA, 527 bp, Homo sapiens
cctgccatttaaaagtggatgttctattcatctgcatacttgtagaaaataagaagactgaaagtgtaattactacttttaggcatttgatcttttttactctcccgggaaaagttgaccagaggtttatttgttagtccctaatctgtatgcacattagcccaagataagatggaattataccttttcttttcttttttaagctaaaatttgataggcatttatgatgaactaggcaactgggctaagccttttatctatttttaatcctcaaaacaaattcatgtataagcccaattattgttcccattttacagacgagaaatggaatcactgagaggttgagtaatctgcctaacatcacagctcacaagtggtcaagccaggaggcccaaggtgactgcaagcccaagacatggctgtgtcacaggcatttgaggtggtctcctcagaggagatgacctactattctgccacacatgaaaagagagctgagattrgggctagatttttagcatgaagggttt

SEQ ID NO: 640090 - DNA, 656 bp, Homo sapiens
cagaaccgcaaacctccccgcagggacaggtgctttcctacaccctctttggaaaacggctaaatgtccatctcaggtgcccaatgactcatctggagttgtcagggscctgtattaaattcctttagtttctctacatatcctgcttgaattcttctcatgacctttgcaaaccctgggccatctccctggaacaatctttctctctcacttcagtggctcatctacttgagaggaaggatagcataccagttaaaggtgtggtctctggaagccagcctgcctgggtttgaattttatttctaccatatactagtaaccgtgggtaaattattctgtattagcccgagttttcttatcagtaaaatagggagatataatagcatctgctttgtagagttattgagaggattaaatgaggcgatacatataaagttctaagaagagaggacacattcagtaattcattgttattatcattatacaatccttaaaatttcagcctaaatacctgactcattaaataaccttctcatggttctatagactggggtggctgtggctactttgtgcctctgtcttaatctgcacttcccttagcctgacaggattgcttgttttctgtcttccccgataaactgaacaggttactggag

SEQ ID NO: 640091 - DNA, 603 bp, Homo sapiens
cttttcacattgataaaattgtgtaatacattttaatggttataaaattggtttataatttaaacagaaaaagagagcggggggtaggccagagaataattctatgaaaaactgaagttataagtagtaagaatgatttttctgtacataaagtatagcaaagaaactgtattgtcatatcagaaggtaatctctacattggctgagccgtacacacacagttgaatgaattcaaatgaaagcattaatagaggccatgtctgttkattaattgattataacattgaaaatattgtcaacaaacaaaacgtattccaggctacttagcttattttacccaagattctttttccataggtgtagtcagagaatcctttgtcaacagctcatattcatttgtgaaatttaaaaaatatgttcatactagacaataaactttgatagagtctctcaaaacagtttaaaatgtgtttaattccattgcaaaaatccttctgaaaagtcacggtgttgagctagtatgttggttttctgttgttgcactgggaaacttatttaggggaaagagtaatttttagagcaaaagtatttactatgtccaag

SEQ ID NO: 640092 - DNA, 572 bp, Homo sapiens
ttggttttctgttgttgcactgggaaacttatttaggggaaagagtaatttttagagcaaaagtatttactatgtccaagcaagaagttactgttaaaattaacttcatttaaattagggagttggatacttgttctattctaaagcaatctcccaccaccatgaaaagttccaacatctatgtatgaataactatgtcagtgctatctagtcctaaattaaaatgaaattcttacttrtgtcttactgaaatcctttttgtgtgttatagtttaaattgatgttttcttgatatggacaagggctgcaggcatcccttgtttttctgtatgagaatgttaatcaactctacctttaaaacatatctctaatccttatatttttgtctatctccactgctaccaccctagtccaagtcatcactgtttctcacctgaactaccatgtgagcactaggtaagccctggtctattaggttttctcccaacttgttacctcacatcttctcttaccactttaagatctattcttcacgtcgtagccagagttgcatttttaaaaggtaccttata

SEQ ID NO: 640093 - DNA, 595 bp, Homo sapiens
tgtatgaataactatgtcagtgctatctagtcctaaattaaaatgaaattcttacttatgtcttactgaaatcctttttgtgtgttatagtttaaattgatgttttcttgatatggacaagggctgcaggcatcccttgtttttctgtatgagaatgttaatcaactctacctttaaaacatatctctaatccttatatttttgtctatctccactgctaccaccctagtccaagtcatcactgtttctcacctgaactaccatgtgagcactaggtaagccctggtctattaggttttctcccaacttgttacctcacatcttctcttaccactttaagatctattcttcacgtcgtagccagagttgcatttttaaaaggtaccttatattatgccactcttctgcataaaactctttacttatacttagaatcaaatacaaattttttactttggtctacaaggctttacaggcattcatatgtttgattttgtatgatactagcatcttggatctgcaatgatcagcttaaaattggacagcttgcttagaatctcagtgrtcagctggccaggagagcttagaccagagc

SEQ ID NO: 640094 - DNA, 541 bp, Homo sapiens
ccataatctaatctctttcctcccttgacacgtggtgattataatttgagatgaggtttgggtggggacacagagccaaaccatatcacttatcctatatcaaataacattaataccataacaaactaaactgagggcagacatgtgtctcatttgtgcccacggggttttaatttatggagattaccaagtggtgacatggggaagytcatgccatggaaagaacatttttctcccttgcattcccagagaagggccatgtcatgctacacaagtgcacatggggagcacgagtattggtcacaaggcagaaagtggagagaggagaatctaagccaaagcctctctttatggggtttccaaaggaaaggcaaggcagggcagagtaagcagttttggactggctagtttgaataaaattctagagggcttcgggctataggggtagtccttagatgcctagtatctggctgtctttgtcattttaatgttgctataacagaataccggaggctgggtcatttataatttataaagaaaa

SEQ ID NO: 640095 - DNA, 630 bp, Homo sapiens
caaatttcaacatgagttttggcaggaacaaaccacacccaaatcatagcactggtcctgggatgatttagggcagaagaaatattggctttgtatgtgagagttagataaagggggtggtcggcttgcatatgagagacatgcactcaagtaacttgtttactatctttaggaattagctaaccctggaagggacagtctctttttgggtatgtaagaccctcaaatgccgtaacatcaagaatatagaaaatttaaaaacgtagcaaatataattggccctgtgctgaatggatgccaaatagacaaatacagaatctaggaaaatgcagaataacacaatattctctaatcatgtttattatatgcaaataccttaagaaatggcaaaagcaaggttatttggcataaagcaattaaatgtgaatgttgtatgacataacctgcaatctacatccaccatctaataaagcatttttctaaaataaatttggtagctyagatttgattacttaataccacaatccagttctatgctgcctgggtcttatctcatctctttgaattcttttccaagtggtaaactaaaatttttgcatagaatggagaattgagaccactggtttacca

SEQ ID NO: 640096 - DNA, 536 bp, Homo sapiens
acataatttaatataacatgaccaagattttaaattctaaaaataaatttgaaattatgacacagatacccatcctaattcatttctccagtgcccacatggcacccaggatgcctatgaagagcaaggtctgtctggccccatcctcccaggtccagctatgcctcctggccaggatggggccaaattgagcttggcttttccttgcagctaattgtcaaggcactctggacactcatgtccccagtcgccgccatggccacctgttcagactacagaattcagaggctcaaaataaaaaacataagcttatagcaagatgtgtgcaaggattcaggaaagcctagcagtcagactttacagctttagcttacagataaaccaggcatrtatatgaagtattacagaagtagtttcatgaacttaaaacatgtatcagagacagcataaacctatctgaccagtagatccaggcaaaaatgtctgaattatatttaataccaacaattctgaaaacatttctattttattttacc

SEQ ID NO: 640097 - DNA, 609 bp, Homo sapiens
acaaggaatgtggacattttttgcctctcttctgctgcaaccagagaagaccccttgcaatggtttggatgtttgttttctcgaaaacttatgttgaaatttgatccccagtgttggagattgggtctaatagaaggtgttkgggtcatgggggtggatccctcaagcataggttaatgtcttcccttgggggtgagtgagcttgttgctcttagttctcctgagaactggttgttaagacgagcctggcacttccccactctctcttgctttccctcttgccatgtgatttctgcacaggctggctcccctttgtcctatgccatgaatgaaagcagcctaaggtcttcgctagacgcctatcttaaactttccagccatcagaattgtaagccaaatgaaccccttctctttataaattacccaacttccagcatttctgtatagcaacacaaaatggactaagacacgtcttctaccttttcatatacttatttgttatttgtataaaaggcatttagctactttttttaaagttcaaaaatgactagaatatgagataggtgtggaacttactgcctgtagccccaaggctgtgagacacagaac

SEQ ID NO: 640098 - DNA, 632 bp, Homo sapiens
cagccacatggtggggggaagaatacagaatgaaagtgaagccattctttttcttaaggctatacagacacacacagaacacatgtcaaggactgtccagcaggtggttctttgctgggctcctacttcaagccctgactgcaacctgcagcccatcctggagtcaggagctctccttccgttgggacgacaatacaacatacaaacaaaagaggtccatgrtcccaacaataaaatccgatattgactttacaatcacaggtacaaattgctcaaatcgataatttcatttctccttaagaccttgtcatctaaaactaattagaggccaggttcccgaggaattgtcagtattccaaaaaacaaaaacaaaagtactggaggtttcaaaggaaatcattcttctactgcaacagtctgacggaggttggaaacaaggtgtccaattccagtaagttcagggtgttttaaagggcggagtcctgggtccagtttgccattcccccaccatctagggggctctgtgtttatagaggaaacaccaagaagcccgagaatgtggagtatttccagccccccatgaggttgcctctctcaagtttgagatgcactttgtcttccctttccatgag

SEQ ID NO: 640099 - DNA, 595 bp, Homo sapiens
aaagcttggaaacctctataatgyttttaattatttttctgaaaaacaacagaaaccaggcgagcaggacacaaaaagaaggtcatagcctttaacctgagcaccaataacccagagaaaggtttagaaaggcctgatcatatctctgaaccttctgcattgaaccaaatggcataagttaagtggcttaaggtgacgtaagtcactgctcttttaaaaaatttgtaccaacacactgttcatgtatacattatatatattgcatttgcttatggtatatatttcatttacgatatattttacttacacaatcacaatattttgttttgtatttaaatatccatccctgtttttcctcactttttttttttttaagataaacatcccttccccaatccattcctcaaaataagcaataggaatgtattttccaaatgctgtcagagacttgggaagactcctttcgtgagcgtggagagttttaaatgcactcaatccttcaggtggccacctgggtgactgaagaccatcaaccacaccgccgtgaaaagtaaaacgtgcaatgcttccttttgggaaacatatttcaaatctt

SEQ ID NO: 640100 - DNA, 601 bp, Homo sapiens
aacttatctatcacttcatatatttttttttgttgtgagaatattgaaaatctactccttagcaataaaatatgcactttttaaaaaagaaattattttaagttccaggatacatgygcagatcatgcatgtttgttacataggtaaacatgtgtcatggtggtttgctggacctatcaactcatcacttaggtagtaagtcccacatgcattagctatttgtcctgatgctcactttccctcccctcaaccccctgacagctcccagtgtgtgttgtttccctccctgtgtccatgtgttctcattgtgcagctggaaaccattatcctcagcaaaatatgccttttaattaatcaaatactaccttcagatacttttgtgctattttgcatgtagtttaataatcttgtaacagttactttcaattcctctctgccatttttttgccactcctgtcatatatttttcttttacatataatgtaaacttaaaatatgttgcaactgtatttgttttggatattatcttctagagtactataaaaatgttaaaatttccttcatttatcccatttcctgcacacttcatttgtttgtgtca

SEQ ID NO: 640101 - DNA, 560 bp, Homo sapiens
tgaatctgccggcaccttgatcttgaactttttaacctctataactttgagcaataaattgctgttttcttataaattattcagtctaaggcatttttcttgttattgtagctgaaacaaatatgttattgtaacgttattatagcgacttgcaaaataaagtaccagaacaaggtaacaaaaattaggagatcagtttgaatggagtttatctttcagatttagaagacattattttacccttaatctctcagcaagattattgtgaaaatccacaacctttgataacacatgaatacaaactctccccccttctatatttattttcctggtcttagtaaagtccatagacactgcattcctggaacttcatttgaataagaaattgatacaaggtgaaaaaaaaagtaaattaaagcccactaaaaccttcatcttcaacttgttaaaacaggcatagtctactctgaactagactgggaaaaggcaaactttattggccattattgtgcctccctgtgtaatgatgtrttcatcacctttaggtctgatggagtttt

SEQ ID NO: 640102 - DNA, 493 bp, Homo sapiens
ctgcaggtgcacagtcttcaagaactgaagtttgggaacttctgcctagatttcagaggacgtatgaaaactcctggatatccagggagaaatttgctgcatgggtggggcccacaggagaacctctgctggggcagtgcagcagggaaatgtggggtcagacyccccacacagagtccctactggggcactggctagtggagctgtgagaagagggccactgtcctccagaactcagaataatagatccaccaacagcttgcctcatgcacctggataagctgcagacactctacaccagcctgtgaaagcagctgggatggggtctgtacccagcaaagccacaggggcagagctgctcaagacagtggaagcctacctcttgcatcagcatgacctggatgtcagacagggagtcaaaggagattatttcaaaactttaagatttaattactgtcctactggattttggtcttgcatgggcctgtagccc

SEQ ID NO: 640103 - DNA, 562 bp, Homo sapiens
gcaagctggagatccaggtgagccaatgtgtttcagttccagtcataaagtagaaaataactgatgtaccagctttttgtcagtcaggtaagagaaattcccttttatttggcagagggacagacttttgttctatctggacttttaactgattggatgtggcccaccgacattggagaggatagcctgctttactccatctactcgtttaaatgtaaatatcatccatgagcacatgcctgtaatcccagctcctcgggaggctgaggcagragaatcacttgaacccaggaggcggaggttgcagtgagccaagattgcaccactgcacagcagcatgggtgacaaagtgagattctgtctcaaaaaaatacaatacaatacaacacaatacaatggaatccaatgcaacacaaaacaaaatttaaaaataccatccatgaacacccacatggtcacatgcaaaataatgtttattgcatatctgggattcctatgacccatcaagttgacacataaaagtggaaagcgtactgactgtccatgaggtggaaggagagga

SEQ ID NO: 640104 - DNA, 597 bp, Homo sapiens
agtgcattagatattgagcatcatttgtaattgaccaagcttagactaaggcttggtgacagtaggacagctccatctcagagagatagtgacacagattgtgacacagagagcgacatggatagcgacacagtgtcactgtttagaagaattgaaaggtgaagggtgctttcaggaggaaaaaggaaagttatttccatcatgaatattgattttactttatgccgtgcaactgaawatagtttagaaaagcatgtttttcttaaaccttcatcattattgcatttttctaggcaggtaacacactaaggagtgtctacaggagacaagaatgaaaaatcaatggattgagagttctttccacattactgcatagtaaatagcctggtaataagacttcaatagcttggtaataaggatttacacaaataaaaaacaaaatggtttaatttaaatgtgaaacattgtaagccttttaaaaaaacaaaacttcataagcatacttagtagaaaaaggaggggacaagagtataccagacatagaaatgatgatcttcaccagcggttttgactttggcttagaaagttattctcatc

SEQ ID NO: 640105 - DNA, 597 bp, Homo sapiens
agtgcattagatattgagcatcatttgtaattgaccaagcttagactaaggcttggtgacagtaggacagctccatctcagagagatagtgacacagattgtgacacagagagcgacatggatagcgacacagtgtcactgtttagaagaattgaaaggtgaagggtgctttcaggaggaaaaaggaaagttatttccatcatgaatattgattttactttatgccgtgcaactgaatatagtttagaaaagcatgtttttcttaaaccttcatcattattgcatttttctaggcaggtarcacactaaggagtgtctacaggagacaagaatgaaaaatcaatggattgagagttctttccacattactgcatagtaaatagcctggtaataagacttcaatagcttggtaataaggatttacacaaataaaaaacaaaatggtttaatttaaatgtgaaacattgtaagccttttaaaaaaacaaaacttcataagcatacttagtagaaaaaggaggggacaagagtataccagacatagaaatgatgatcttcaccagcggttttgactttggcttagaaagttattctcatc

SEQ ID NO: 640106 - DNA, 597 bp, Homo sapiens
agtgcattagatattgagcatcatttgtaattgaccaagcttagactaaggcttggtgacagtaggacagctccatctcagagagatagtgacacagattgtgacacagagagcgacatggatagcgacacagtgtcactgtttagaagaattgaaaggtgaagggtgctttcaggaggaaaaaggaaagttatttccatcatgaatattgattttactttatgccgtgcaactgaatatagtttagaaaagcatgtttttcttaaaccttcatcattattgcatttttctaggcaggtaacacactaaggagtgtctacaggagacragaatgaaaaatcaatggattgagagttctttccacattactgcatagtaaatagcctggtaataagacttcaatagcttggtaataaggatttacacaaataaaaaacaaaatggtttaatttaaatgtgaaacattgtaagccttttaaaaaaacaaaacttcataagcatacttagtagaaaaaggaggggacaagagtataccagacatagaaatgatgatcttcaccagcggttttgactttggcttagaaagttattctcatc

SEQ ID NO: 640107 - DNA, 597 bp, Homo sapiens
agtgcattagatattgagcatcatttgtaattgaccaagcttagactaaggcttggtgacagtaggacagctccatctcagagagatagtgacacagattgtgacacagagagcgacatggatagcgacacagtgtcactgtttagaagaattgaaaggtgaagggtgctttcaggaggaaaaaggaaagttatttccatcatgaatattgattttactttatgccgtgcaactgaatatagtttagaaaagcatgtttttcttaaaccttcatcattattgcatttttctaggcaggtaacacactaaggagtgtctacaggagacaagaatgaaaaatcaatggattgagagttctttccacattactgcrtagtaaatagcctggtaataagacttcaatagcttggtaataaggatttacacaaataaaaaacaaaatggtttaatttaaatgtgaaacattgtaagccttttaaaaaaacaaaacttcataagcatacttagtagaaaaaggaggggacaagagtataccagacatagaaatgatgatcttcaccagcggttttgactttggcttagaaagttattctcatc

SEQ ID NO: 640108 - DNA, 569 bp, Homo sapiens
ataatattctgtgttttctgtgtactcactattaccagtgaattttttaccttcagatgatttcttgcccaggaatgtcctcttctttcagattgaagaatttcttttagcatttcttgtaggatgagtctgttgttgatgaaagcccttagcttttgtttgtctgagaaggtctttatttcttcttgtgtttgaaggatatttttactggatgtactattgtagaataaaagttgttttctttcaacattttaagtatgtcatgacactctctcctggcctgtatgrtttccactgagaaatctgctgccagatgtattgcagctccattgaatattatttgtttcttttctcttgctgtctttaagatcctttcttttccttgacttttggaatatgaatagcaaatgccttggtagtcttctttggtttaaagctgcttggtgttctataaccctcttgtacttgaatgttgatatctttctctaggtttgggaagttctctgttattatccctttgaataaattttctacccctatctctctctctatctctactttaataccaa

SEQ ID NO: 640109 - DNA, 588 bp, Homo sapiens
tagggtcttggcttatctcaaagcaaacttgggtcagagcagttgttcggtcttttaaatcggtgctgtgtgtcatcctgggtcaaagtcaytgtaaaagtcttttaaatgggtgctgagtgtcatcttttgttaatgttttgctctaaaaccagactgtcagatgttaaaatagcaggcaccaagcaaggtaggaaaagacatttgtatttctaggattgcggagcagccttgaactaaaagaagcataacccacatttgtcgactttctctctattccaagtcacatgcccagtagggagcccaaaataagggcagcccaggggagggaatgacaggcaggcctggaaatgaatgtgttcatccgttcagttcgagctgtttcagacaaagctgatttctgctgtgatattaatcccacccagacaacaagaaatcgaactgtcacttttctcagaatggggtgaaatgtttctgacctaggtttggttttataacaatttcttctgtgtgtattgttttccctgggatctcaaagggctagctgggggtggatcttagaggaaaacacagatttcacttacaggg

SEQ ID NO: 640110 - DNA, 572 bp, Homo sapiens
ggctcccagcccaaagctctttgaacccccggcaagcccaaggattttaaggcatacttacatcttgtattggtaattgcaaagggggcccaggacactggcctctgccccctgcggatcactggtacttggttgccactggcccttcccactacagggcacaacagttcttgttttgagagacaagagtggtttccccagaatttccaaaccccctcctagcacaaacacaggtatataatctccactctctctgcctcatgaacaagacccctctagcggctctagggtttgccattacagtatttgttataatgagtgtcagctcatttgtgtggactccacccttccccaggcttccttgttcctttctttctgacacaagagatgagagctagacctgttggaaacttttacaaatctctctatcccgcctccacccaatagaaatccctttctgaaagatgatcatgcatcctccatttgagcaaacaacaggaagctcaatacttgcaaagccctttccactctcargcagctccttccatgagaaaggactttctcctctgaac

SEQ ID NO: 640111 - DNA, 547 bp, Homo sapiens
cttaggctggggtaattgcggaggagagcaatgatggaaccagcccttgggggatgaacagaatgtcattagaagagatgagctggggagagccatgagtgggggcattcctggacaaagacwtggagttaggaatagctttggcatattgaggggccttgaatgaaatgaaatgcttgaaataaaaattgttgttgaagcaaaatgccctggggggcaaaactgtgacaagttccaaatgtgaggaaaaggattctagaactcgttctgcagtgttcttccaggctctttgaaacaaatttaagaaaaatcaccttgatgagagccttattttaggaagtggaaattggcagcttctgcccagaggtgactacaacagttggccagggtggagaacttttgcgaccctttcatatctgtcaagctacctttgtctcaatattttgtagagtgatatacatatgcagattcaagacacttcccttgtccttcccaatttctggggagccaaagagtaccaccctaaacctctcctttacaggaattc

SEQ ID NO: 640112 - DNA, 499 bp, Homo sapiens
ctcactctgtcacccaggctggagtgcagtggcacgattttggcacactgcaacctccgcctcctgggttcaagcaattctcctgtctcagcctccaaagtagctggtactacaggtgcacgccaccacacctggataattttttttttatttttagtaaagacggggtttaccatattggttaggctggtcttgaactcctgacttcagtaatccaccggccttggcctcccaaaatactgggattacaggtgtgagccaccatgcccggcccactaggactattttctaactgatctgaatgaaccaacttggataacctcatgtttaaaaaacattcatttatatacccaccaggattgtatatatatatatctatatatakagagagagagagagtaacaaatgttagcaaggctgtggaaaatctaggacctttgtgtacctttggtggaaatgtagaatgtgtaggcactgtgaaaaacagtagtacagggat

SEQ ID NO: 640113 - DNA, 582 bp, Homo sapiens
agagaggcaaggaagtttactcaagctcacagagaaagtttctttttttttttaatctctttttttttgagacagagtttcactcttgttgtccaggctggagtgcaatggcgcratctcagctcactgcaacctccgcctcccgcgttcaagcaattctcctgcctcagcctcctgagtagctgggattacaggcatgtgccaccacgcccagctaattttgtatttttagtagagacagggtttctccatgttggacaggctggtctcgaactcccaacctcaggtgatccacccaccttggcctcccaaagtgctgggattacaggtgtgagccactgcacccggcctagagaaagtttcttttggatagtagccaacactgtgtcatgcagcaataggtcctcggtaatgatgacttcaaaggcaatcatgatgcttctccattgaatcttctttcgtatggctccttcttcccatatctggaagattgtttttgattgcaacataggccgtcaagctcctagacatctttaatctgttgtgggcttctcacactgtgttccatagaagagctatgca

SEQ ID NO: 640114 - DNA, 582 bp, Homo sapiens
agagaggcaaggaagtttactcaagctcacagagaaagtttctttttttttttaatctctttttttttgagacagagtttcactcttgttgtccaggctggagtgcaatggcgcgatctcagctcactgcaacctccgcctcccgcgttcaagcaattctcctgcctcagcctcctgagtagctgggattacaggcatgtgccaccacgcccagctaattttgtatttttagtagagacagggtttctccatgttggacaggctggtctcgaactcccaacctcaggtgatccacccaccttggcctcccaaagtgctgggattacaggtgtgagccactgcacccggcctagagaaagtttcttttggatagtagccaacactgtgtcatgcagcaataggtcctcggtaatgatgacttcaaaggcaatcatgatgcttctccattgaatcttcyttcgtatggctccttcttcccatatctggaagattgtttttgattgcaacataggccgtcaagctcctagacatctttaatctgttgtgggcttctcacactgtgttccatagaagagctatgca

SEQ ID NO: 640115 - DNA, 310 bp, Homo sapiens
ggcggcggtgaggagtctggctcccggccagggcaattaaccctggagagctgcgattcaacttgtggatcccctggaggggcgagggtggggcccagacggagaggccctgggatgactgagaaggagcccagcctcaggcacagtagccgtcctggaggcagcatcctttgtttcctcttatcgtgaatattttatatttcatttagtctcagctctcaggtaggcgagacgacagragggcccccgcgggaagattacacttccgtgccaggctccggcgggaacacaggattacaccgctaatgaa

SEQ ID NO: 640116 - DNA, 289 bp, Homo sapiens
aagagtttctaggacagagtgaaagattatttacaaaattcagaatcaaaccagtgtcagccttatatacagattagaatactaggaaacaaagtagggcaaagtcttcaaagtcctaaatgaaaatgctttgttgttgttgagacagggtgtcactctgtcacctaggctggggtgcagtggcaatatcacractcactgtagtctctacctcctgggctcaagtgatcctcccacctcatcccccacctagtggctgggactacaggcactcaccacactcagctat

SEQ ID NO: 640117 - DNA, 601 bp, Homo sapiens
tggagaaaatcaaaccctaaaatataatctgaacattggcaaatgatcaatgctgcatctcttccttctttggttccactctgtccttccccactcttcatgctgctgctagagactgatttgtttggacaccatcggcagggctataacctttggtttcctgtcagttcagacagtaggaactctgcctgccaagacactaacaagcccaagaagagtgaggtctggatatttactctcctggctcctttcctgtaaggttacctcaggctaacttttccctcaatggaaggtcattactcctctcaagtgagtgttgaccaatgtgtattacacagaaaacagccatcacaaacaagacagaaaacaaaagtgtcatggtcccatttgcattmcatgattccctccccactgtttcagaaaccattgttctgtgttttgatatgatagattagtagtttgcattctctagaattttatatctacaaaacaaaatagtatgttctcttttctgtatgaattttttcaatcagcattttgagattcatccaatatgttgtttgcatcagtaggttcctttggtttttgtttgcttgttttg

SEQ ID NO: 640118 - DNA, 596 bp, Homo sapiens
tagataaattatgttcacatattacatcaaattagtatgtcccatattaatagatttatagtattaagtcatccacttattcctaaaataaatcatagttgtggtataaaattatatcgatactatcaggttgagttaatagatattcctttataatttttttttttttttttttgagacagagtctggctttgtcacccaggctggagtgcagtggcacaatctyggctcattgcaacctctgggtcctgagttcaagtgattctcctgcctcagcctctcaagtagctgggattacaggcacccactaccacacctggctaatttttgtatttttaatagagatggggtttcaccatattggccagcctggtcttgaacttctgacctcaggtgatctgactgcctgggcctcccagagtgctgggattacaggtgtgagccactgcgctcagccaattttgtatttactcataagtgaagctgatttgtggtttattttggtattgtccttgaaggttgaggttgaggcaacatttgtaaaatgtataacatagtgaaaccctttgtctattaaaaatacaaaaattagccag

SEQ ID NO: 640119 - DNA, 591 bp, Homo sapiens
gattgtagtgtgcaggaaaataattccatatagctaatggcaaaaaagtaaaaactcaatgtgatacagcagttaatctagaaacaggcaatgctgataaccaagactgaacatcttctgaacatcttgaggtgattctcagcatgattaatgaagaattagatctgctaaggatggtctcttgtgataatcaatttcctccctaatccagagcttctttatgttatctatctgcttcaggaccttttttgtttttttaattttaactttcattttagatgcagggggtacatgtgcaggtttgctacatgggtatattgaacccaagtagtaagcatagcacccaataggttttcaaccagtggccccctccttccctcagccctctagttgtcctcaggatttattgttgccatctttatgttcatgagtacccaatgtttggctcccacttataagtgacatgtgktgttgggttttctgttcctgtattaatttgcttaggattatgacctccagctccatccatgttgctgcaaaagacatgatttcattcttttttatggctgtgtagtattccatggtgtatat

SEQ ID NO: 640120 - DNA, 558 bp, Homo sapiens
catcagtgttggtttgttcatgtttctcttgctctgcccaagtggaaatttacatacaagtagcaggagtaccagcagggaagtggagctggggaacggaaagcttgtaagaggtaaaggcttcatggacaggccctctgcctcacatcactgactccacactgggggttaatttcaaacaagcacaaggtctagactcaatctcatggtacactgatcacatgggaccccattacacacactgatactgagatgccatcagkgtaaactaaaaaaattaacattgggaaatctttaagaatgaaagaatgcccggaggtccatttgaagtttgtgaaacgtggatgtgcaacaaagagtcctacacaccttgccttggtgatggtagaagttttatgaactggcttgtataaacagaatgttttctacagtggcacctggtggagggtacattggagagagcgctgggctagaggcgaatacctgggcttgtgtgatcctaggcaagtttcttaaattctctgagactcaatatctgactccacaaaatgaaataat

SEQ ID NO: 640121 - DNA, 415 bp, Homo sapiens
gagcaagtgacccagggagacaaacacttggagatacttggggctgagtttgagcaagactccctaacctgtgtctggacaagtctgatgtcctgtgtggcccaagaagaactgaccccgtgtctggagctcccaccgttattgcatccctgctgtggctcacctgctgctgtctccaggagcccctgagaagatttgcttcctctcccctgctaagctccaggtcctgagattraattaggggctggagctcactgcactccagcagtcatgggacccaggataggtaagtccgaacaaattaaggaagggccatggagagcaagcctgggggacatgttcccagagaaaagggtgaggccgtagagccagagtgggtgggatgggtgctcacagctgttggcacagagccagg

SEQ ID NO: 640122 - DNA, 622 bp, Homo sapiens
acagtgtctttttgtccatatgcaccacattgcgttacttaggatccattatataatttcaaataaaacaagaaccctactctgtaaaataagtgtaagagagtccagccaaattctggtatttcctgtgatggactaattgaaaggtgctttgaaatatcaaaggtcaaattatcttaagaagtatttttgatgcccctgatttgctggttacccatgcatgtgcctggccaagtcatcctctccacttggttgtttcatgcctcttttgctgtggatgctctgagaattgagatttctccaaagttctaacacttctgtgattaagccctttgcttagtcttcarctcgtctgccctctgcagaggatgctgtcaaggagagcctctgactctcacactttgcactggggattaatacatctgagtctgttgttttctctctacccttcaatacatcattgtccttttagcaacatcctccaatcccacagttcttaaggtttttacttctgccacacctctaaaacactagagatgatgcacaagcttttgcagctgctttatctaggtcccagccagcttgcagcaggtaaaagtcttagcaatcacattcctgtagc

SEQ ID NO: 640123 - DNA, 545 bp, Homo sapiens
agtaaacaacttttgtatacttgccaaataccacagagaaaactgtggctcaacttccacctccaccagcaaaagccaaatggggagcctaaacttccaccagttccaggctgatattaggtacttcaagctcccctacagccccttcaccattgtgtcagagaattatctgatgaagattttaaggcagtcattataaaaatgcctcaatgagcaataacaaaggcactggaaacaaattaaaaaatmgaatttttttttttgaggcagagtctcactctgtcacccagactggagtgcagtggtgcaatcttgactcatggcaacctctgcctttcgagtccaagtgattctcctgcctcagcctgccaagtagctgggactacaggcatgtgccatcacacccagctaatttttgttttagtaaagatggggtttcaccatgttggccaggctggccttgaactcctgacctcaagtgatctgcccacctcagcctcccaaagtcctggtattacaggcatgagccaccatgtccagccaaa

SEQ ID NO: 640124 - DNA, 545 bp, Homo sapiens
agtaaacaacttttgtatacttgccaaataccacagagaaaactgtggctcaacttccacctccaccagcaaaagccaaatggggagcctaaacttccaccagttccaggctgatattaggtacttcaagctcccctacagccccttcaccattgtgtcagagaattatctgatgaagattttaaggcagtcattataaaaatgcctcaatgagcaataacaaaggcactggaaacaaattaaaaaatcgaatttttttttttgaggcagagtctcactctgtcacccagactggagtgcagtggtgcaatcttgactcatggcaacctctgcctttcgagtccaagtgattctcctgcctcagcctgccaagtagctgggactacaggcatgtgccatcacacccagctaatttttgttttagtaaagatggggtttcaccatgttggccaggctggccttgaactcctgacctcaagtgatctgcccacmtcagcctcccaaagtcctggtattacaggcatgagccaccatgtccagccaaa

SEQ ID NO: 640125 - DNA, 598 bp, Homo sapiens
aaagatgtccacaccctaatcgcccaaacctgggaccttaatgacaaaagtgactttgcagatccaattaaggccttgagatggggaccgtatcctggatgattttggtgggcctagtataatcacaagagtccttagaagtggaagcagggggcagaaatgtctgagccacagtgatgggatgtacaaaagactcaacggccactgctggctttgacaatggaggaaggcactgtgagccaaggaaagcaatgctggaaaaggtggacgctccccgagggcctccagaggagccagccctgccacgcctccatggtagcccactgagacctgttttgggacttctgacctccagagctgtaagctcatacatctgtgttgttttaattgctgccgagtttgtggcaatctgtttcagcagccatagggagctaacatgtctacgtrgaaaaggtgactccatgaccctctccactctctcagcctccaagaaagggagagaccacactgaatctcagaatcagagagcctaagaaacttgagattttgaaatccagcatcttaaagtctctgatttgaaaggtggtggggcagacag

SEQ ID NO: 640126 - DNA, 412 bp, Homo sapiens
gacagcacgtaagccagctgaagccaagatggacaaggacctgcccaaggccaccagtgggtctgcttgctgtggtaggggttagtattctcaccattcacagagctccaactctgtgccagggcctcatttcactcaagacggctgcgttgcagggtgatgaggctacaggcctgcctgaccctaagcctgtgcccttaactcctttatgatgcaccttctctgtgccaagcacaggccttgccctggaggagctcccatcctggggggcaagttctcaratgaatgattcccaccaaggcaggggtgtgaaataggtgccctcagagaggcctggcaaagctccctgagggagcagggcttgggccctctcctccagggatccctgcaatgtggggtcaggcccaccagg

SEQ ID NO: 640127 - DNA, 529 bp, Homo sapiens
ctccctgcttggcccagagccagcacggaaaggggaggttcttagagagggctgctgatggaaagagtaagggagggaagggagagagtacaaagatttccatgtgatgaagaaagctcctgaaggcagcttatgtgtggtacatttgaattcctaaggctcttgggcctctacccaatgaatcctgattccagcagcctgaaacasttccaactcattttccctttctgatctcacattctcccatgtttaccacggatggcactgcccaagatagaaatcctgagtgccatccaggacacttcccttgatctctcttccccagcatccagcagtcctggtcagttcaccccctaaacacctctcaatccatgtcttgcccctatcctcagggttccagtttatcctctcatctgtctgcatttcttcccaaggccctggattaccataagacgtatccttgggaggtcaggtagttgtcaggggcaggcccccagaggtcagctcccctctgagcagcaagactgct

SEQ ID NO: 640128 - DNA, 602 bp, Homo sapiens
tctgggcaaatcaatatggttggtcactgtatgatatgacaaagagaaaggatacaaagacaggtcccagggcacccaggctagaaagaaacagacagagcaagcccctgtacaggcacacagaagaggaagctatttctggggtaagcagacagcattttgaagtgcttcttgaaggaagcagctgaagagaaagatatcacagaaaaggaattctcatgtgaatggaaatggagagactgaaacaaagggcactgattcagacataacattccgacccagatagagtgagatgagaatagagcggggcgtagaagaggaatggaatccagagcatgacagaagccattgttccggctatccccaaagaagttttcccagcagttccctagagctcatgagctaggagtctttatcrgtggcccctgacaatcctccaggctgagaggaacacaccatcaagggaaccttagaatgaacgacatagttttcactctagagtttagctttactcactgccaaccagtgattctgctgtcttcacaaggtcccaagataaagaacgccattcaggaatcgtgcaggcatagctggactggatg

SEQ ID NO: 640129 - DNA, 635 bp, Homo sapiens
aggaatacaggcaagtctaagatcaaagactttcttagagccacggattcttggtagtttttagtcagaggaaattgcaattttcattattattattattattagagacagrgtctcactctatcacacaggcttgagtacaggggtgtgattatagctcattgtaacctcaaactcctgggctcaactgaccttcccttctcagcctcccacatagctggaaccacaggcatgcaccaccatgactggctaattttttgatttttatttttgtagacatggggtctcactatgttgcccaggctggtcttgaactcatggcctcaagccatccttccaccttggcctcccaaagtgctaggattccaggcacctggctgtaaattgcaattagtatttcctttaggttttgtggtatggttttatgtttatgtcaatagtataataaactacatataattctcggttcagagtatgggttcaattattcccaagctaaacttcaaattagctttttaatatacccgttaaggaattaaccccggtatcataaacagatttctgcattaagtggaaacatctgactgtcactcttaatagtttgatgcccatggtaggacagaccaaataaccag

SEQ ID NO: 640130 - DNA, 635 bp, Homo sapiens
aggaatacaggcaagtctaagatcaaagactttcttagagccacggattcttggtagtttttagtcagaggaaattgcaattttcattattattattattattagagacagggtctcactctatcacacaggcttgagtacaggggtgtgattatagctcattgtaacctcaaactcctgggctcaackgaccttcccttctcagcctcccacatagctggaaccacaggcatgcaccaccatgactggctaattttttgatttttatttttgtagacatggggtctcactatgttgcccaggctggtcttgaactcatggcctcaagccatccttccaccttggcctcccaaagtgctaggattccaggcacctggctgtaaattgcaattagtatttcctttaggttttgtggtatggttttatgtttatgtcaatagtataataaactacatataattctcggttcagagtatgggttcaattattcccaagctaaacttcaaattagctttttaatatacccgttaaggaattaaccccggtatcataaacagatttctgcattaagtggaaacatctgactgtcactcttaatagtttgatgcccatggtaggacagaccaaataaccag

SEQ ID NO: 640131 - DNA, 635 bp, Homo sapiens
aggaatacaggcaagtctaagatcaaagactttcttagagccacggattcttggtagtttttagtcagaggaaattgcaattttcattattattattattattagagacagggtctcactctatcacacaggcttgagtacaggggtgtgattatagctcattgtaacctcaaactcctgggctcaactgaccttcccwtctcagcctcccacatagctggaaccacaggcatgcaccaccatgactggctaattttttgatttttatttttgtagacatggggtctcactatgttgcccaggctggtcttgaactcatggcctcaagccatccttccaccttggcctcccaaagtgctaggattccaggcacctggctgtaaattgcaattagtatttcctttaggttttgtggtatggttttatgtttatgtcaatagtataataaactacatataattctcggttcagagtatgggttcaattattcccaagctaaacttcaaattagctttttaatatacccgttaaggaattaaccccggtatcataaacagatttctgcattaagtggaaacatctgactgtcactcttaatagtttgatgcccatggtaggacagaccaaataaccag

SEQ ID NO: 640132 - DNA, 635 bp, Homo sapiens
aggaatacaggcaagtctaagatcaaagactttcttagagccacggattcttggtagtttttagtcagaggaaattgcaattttcattattattattattattagagacagggtctcactctatcacacaggcttgagtacaggggtgtgattatagctcattgtaacctcaaactcctgggctcaactgaccttcccttctcagcctcccacatagctggaaccacaggcatgcaccaccatgactggctaattttttgatttttatttttgtagacatggggtctcactatgttgcccaggctggtcttgaactcatggcctcaagccatccttccaccttggcctcccaaagtgctaggattccaggcacctggctgtaaattgcaattagtatttcctttaggttttgtggtatggttttatgtttatgtcaatagtataataaactacatataattctcrgttcagagtatgggttcaattattcccaagctaaacttcaaattagctttttaatatacccgttaaggaattaaccccggtatcataaacagatttctgcattaagtggaaacatctgactgtcactcttaatagtttgatgcccatggtaggacagaccaaataaccag

SEQ ID NO: 640133 - DNA, 616 bp, Homo sapiens
gtcctgctcttctctgtggggactgctattgccccctgccccccaggcagagaatcccataatcatggccatgggagaaatctgagctgtcatttgtcatyccctgtctctctgcatctggccttccttcaccttctcagacctcctcggggcaggggctgtggaatgcacccctcttttcccctgtgaaaatgctcacatatttctccagagacagtgagtcatttagaggagatggccttgaacctgtcagagccgacagaccttgtctgatctgctgcccattagacagatagagacactgaggccagaaaccttctcgggggcacataattcttgtattacaaactgccaatctcccggatacctttaaaaacagcatttacttctaagagggtatttaggggacccctgagccctgagcctgggaggggacgcctggtgagatttcagagttagctctgcccttcactttctcctcttgcccattctctcgccctgcagaagatacacatcccatgtctgggggcctggactttctggcagccaattcagcctcattgggcctttgctcctggtttattcaactcctcattggtggccctcctgggccagg

SEQ ID NO: 640134 - DNA, 643 bp, Homo sapiens
attggcccctgagcgccctcctctgtcttgagcaggagatgactgtgcaatgcacctgattccctcacacgcgaacctcagacgcccccgcctgaagtgttacttctgacatctatgcaaggagaggcagggttttcccgtatctgcagagatactcaaaaatrtaaccactcctaacctggagagtcgaagggacctcagaggttgtccagtcatgccccgttttttacagatgagggaactgagtctcagagaggtacagtccttttcctagagtcacacagtaagctagttggtaggtgtgggactgggactttcatctactgcccctgcccctttctcactgcagagccccatcctgtagagttcctgatttgtggataccagacagagcctgcacctgggattgagtgaccaaaaggggctgccgtgttataaatgggcaaaataaatatagcagtttacccagcttagagcagctttcttcaggaggagctgagcacatttaatagggcacttgtaaacaggagcaatttgaatagtttctccagcacgctgttagcatttatatgtgccccatttcatctgtaatctgcttttacaaggcgctggtgagcctttgatggcagcaatgaatgaccca

SEQ ID NO: 640135 - DNA, 543 bp, Homo sapiens
tgggagaatctaaggtattcatctctgtaaaaaatccaaacccattgattgaaattgctcttctccgtcctgatacattagcctttccttcttttcttcttttcttccccctttctttcttttgcattttgccattaccatgttctggttattgcctacatctggagcatggcagctgtcctgtaatatgcaagctgtggcatgtaatttggagaacttgaatacayatatctgttaattaaaaaaaatacagaagcatgtttgtcagcttgtaattatgtaaagaagaacaccaactcccaaactaatttgaaaagcaaaatgaaaataactttaccaacagctttacaaaatccaacaactctacatttagctattaacttttttctgagtatcccaaagtcctttgcaaatgtctatgaagtttctttgggggaagcaagttggcctagtaagataggcaggaaaatagggcttggctggtagtcaggtggctggattctgttgtttgtcctcttactataaatctgacaagatttctca

SEQ ID NO: 640136 - DNA, 598 bp, Homo sapiens
tgtgcatgagcacacacgcaaacacacacacacacatacacacacagtttagactaaaattcacacatattaagattactggtatattcaatttcacatagttggaagaaaacagaagagagatagtgtctcagtaaccaaggaggggaggatgattgatagtgtcaagcatagatagaagagcaatacatgaagagaaacagctagttttgtgcatgaagatggtatgtttacatgggcacaagcacgtgcacgcctgtgagtgtatatctgagtgttttgagggggaaggtattatataagtagggactagaaaagaaatgggatgaagttgtcaatcaggagacagcaataagaagaatcatcatatatcagaacaaatggatatccaacaaaatgttttcttgatggttattttgattccttaaagcctgagcttggtttctgaaccttgatttgattctgtgtggtgtattcagcaaattttgcttcattttaggcctcgagtctttcaataggtgtggaattactaggtgacttgctttgctccrgttcttcctcatgtcagtgagggcctttcagtaattagcctcttgaa

SEQ ID NO: 640137 - DNA, 510 bp, Homo sapiens
cattggctgcatcctgtccctctaggactatagctcctgacaggtggcccttccccaatggccacagtmtcaacaggctccaataacactcgttcctccctcactactccagggcttactattgttcctcgtccctgagtgcctcaacacccactctaaccccgcccacacctctataaagagtcaccttatgaaatgttattcagaatctcatctgagcacaccttattttatgccaggaatcagactgacatggccaccgaggcttttgctccagacttgcgttaaacccttccacatgatgagaatcattccaaatttttaaactggctccataagcacataccctatgctggtttccagagaagccctgagtagtgattttcttgtgttctcccaggactgagtgaatcatcaccaaagacttgattgttcctacaactgcatcaaaaagtcttgtacatttaggaatctccttctccgatacaaaaataacagctctcctgcata

SEQ ID NO: 640138 - DNA, 510 bp, Homo sapiens
cattggctgcatcctgtccctctaggactatagctcctgacaggtggcccttccccaatggccacagtctcaacaggctccaataacactcgttcctccctcactactccagggcttactattgttcctcgtccctgagtgcctcaacacccactctaaccccgcccacacctctataaagagtcaccttatgraatgttattcagaatctcatctgagcacaccttattttatgccaggaatcagactgacatggccaccgaggcttttgctccagacttgcgttaaacccttccacatgatgagaatcattccaaatttttaaactggctccataagcacataccctatgctggtttccagagaagccctgagtagtgattttcttgtgttctcccaggactgagtgaatcatcaccaaagacttgattgttcctacaactgcatcaaaaagtcttgtacatttaggaatctccttctccgatacaaaaataacagctctcctgcata

SEQ ID NO: 640139 - DNA, 510 bp, Homo sapiens
cattggctgcatcctgtccctctaggactatagctcctgacaggtggcccttccccaatggccacagtctcaacaggctccaataacactcgttcctccctcactactccagggcttactattgttcctcgtccctgagtgcctcaacacccactctaaccccgcccacacctctataaagagtcaccttatgaaatgttattcagaatctcatctgagcacaccttattttatgccaggaatcagactgacatggccaccgaggcttttgctccagacttgcgttaaacccttccacatgatgagaatcattccaaatttttaaactggctccataagcacataccctatgctggtttccagagaagccctgagtagtgattttcttgtgttctcccaggactgagtgaatcatcaccaaagacttgattgttcctacaactgcatcaaaaagycttgtacatttaggaatctccttctccgatacaaaaataacagctctcctgcata

SEQ ID NO: 640140 - DNA, 609 bp, Homo sapiens
ttgcttccaatttttttgtgattactaagaagactgcaatgaatatctttgatcatatctgtytgtgtacacaaacagatttttctctagaatatacatctagaagtcaactcctggaatgtagggtgtacccatctacagctttactagatatggacaaactattctccaaacaggctgaattaatttatgacacttcctcctcaatgcttgatattacaagattttaaatttttttcctaattagataattgtaaaaatgacccctctttctttttgactaagaagtttgcacatttaaaaacaattattagcatttgaacttcctcatctgtagatttcttgttcatgttttttgtcaattacacacttgcatttaaatatgcatttgtacacaaataattttgatattctggaaaagaccccttattaactgtgtgatattgatttccatgttcctgaacttttgattattctattgagcggattcaaatgtgtgagcagccatggattcactctcatgttcagcattgcccaggtacagtctgtatcgggcaaccacgggagatctgtaaaacaattttgcagagtggttacagcacaggagta

SEQ ID NO: 640141 - DNA, 609 bp, Homo sapiens
ttgcttccaatttttttgtgattactaagaagactgcaatgaatatctttgatcatatctgtttgtgtacacaaacagatttttctctagaatatacatctagaagtcaactcctggaatgtagggtgtrcccatctacagctttactagatatggacaaactattctccaaacaggctgaattaatttatgacacttcctcctcaatgcttgatattacaagattttaaatttttttcctaattagataattgtaaaaatgacccctctttctttttgactaagaagtttgcacatttaaaaacaattattagcatttgaacttcctcatctgtagatttcttgttcatgttttttgtcaattacacacttgcatttaaatatgcatttgtacacaaataattttgatattctggaaaagaccccttattaactgtgtgatattgatttccatgttcctgaacttttgattattctattgagcggattcaaatgtgtgagcagccatggattcactctcatgttcagcattgcccaggtacagtctgtatcgggcaaccacgggagatctgtaaaacaattttgcagagtggttacagcacaggagta

SEQ ID NO: 640142 - DNA, 593 bp, Homo sapiens
ttttgtgattactaagaagactgcaatgaatatctttgatcatatctgtttgtgtacacaaacagatttttctctagaatatacatctagaagtcaactcctggaatgtagggtgtacccatctacagctttactagatatggacaaactattctccaaacaggctgaattaatttatgacacttcctcctcaatgcttgatattacaagattttaaatttttttcctaattagataattgtaaaaatgacccctctttctttttgactaagaagtttgcacatttaaaaacaattattagcatttgaacttcctcatctrtagatttcttgttcatgttttttgtcaattacacacttgcatttaaatatgcatttgtacacaaataattttgatattctggaaaagaccccttattaactgtgtgatattgatttccatgttcctgaacttttgattattctattgagcggattcaaatgtgtgagcagccatggattcactctcatgttcagcattgcccaggtacagtctgtatcgggcaaccacgggagatctgtaaaacaattttgcagagtggttacagcacagga

SEQ ID NO: 640143 - DNA, 609 bp, Homo sapiens
ttgcttccaatttttttgtgattactaagaagactgcaatgaatatctttgatcatatctgtttgtgtacacaaacagatttttctctagaatatacatctagaagtcaactcctggaatgtagggtgtacccatctacagctttactagatatggacaaactattctccaaacaggctgaattaatttatgacacttcctcctcaatgcttgatattacaagattttaaatttttttcctaattagataattgtaaaaatgacccctctttctttttgactaagaagtttgcacatttaaaaacaattattagcatttgaacttcctcatctgtagatttcttgttcatgttttttgtcaattacacacttgcatttaaatatgcatttgtacacaaataattttgatattctggaaaagaccccttattaactgtgtgatattgatttccatgttcctgaacttttgattattctattgagyggattcaaatgtgtgagcagccatggattcactctcatgttcagcattgcccaggtacagtctgtatcgggcaaccacgggagatctgtaaaacaattttgcagagtggttacagcacaggagta

SEQ ID NO: 640144 - DNA, 545 bp, Homo sapiens
taaacgcagtccattctctttagtggatcaataattctgacggtcacctggaaagatccactggggtggccctccataccctcaacattaggaaataaacctcagattagcttttcctctgaaaccagttcctccacttattcaatgatgcccttattttagtaggtgaagtccaacaactagaagtcattttgggttcatttctctcttgtgtcctttttattcactaaatgtttaaacactgaaatgtctatcrcatttgccctttccttttattctcattaacatcattctaagggatgacccaattacctcctaccaagatcattgcaatgacctccaaacaattctcctgcttccctctgaattcaattgcattctgccagtgccctggaaacatccttcccatgttcaaatgttctggtgttcagtagctccttcctaaagccacgtttgtgatccctaaccccacgctagtaataatgcacatttactgagtgttgtgtactgaaaggcttaacgggaattttcttatttaatcttca

SEQ ID NO: 640145 - DNA, 545 bp, Homo sapiens
taaacgcagtccattctctttagtggatcaataattctgacggtcacctggaaagatccactggggtggccctccataccctcaacattaggaaataaacctcagattagcttttcctctgaaaccagttcctccacttattcaatgatgcccttattttagtaggtgaagtccaacaactagaagtcattttgggttcatttctctcttgtgtcctttttattcactaaatgtttaaacactgaaatgtctatcacatttgccctttccttttattctcattaacatcattctaagrgatgacccaattacctcctaccaagatcattgcaatgacctccaaacaattctcctgcttccctctgaattcaattgcattctgccagtgccctggaaacatccttcccatgttcaaatgttctggtgttcagtagctccttcctaaagccacgtttgtgatccctaaccccacgctagtaataatgcacatttactgagtgttgtgtactgaaaggcttaacgggaattttcttatttaatcttca

SEQ ID NO: 640146 - DNA, 545 bp, Homo sapiens
taaacgcagtccattctctttagtggatcaataattctgacggtcacctggaaagatccactggggtggccctccataccctcaacattaggaaataaacctcagattagcttttcctctgaaaccagttcctccacttattcaatgatgcccttattttagtaggtgaagtccaacaactagaagtcattttgggttcatttctctcttgtgtcctttttattcactaaatgtttaaacactgaaatgtctatcacatttgccctttccttttattctcattaacatcattctaagggatgacccaattacctcctaccaagatcattgcaatgacctccaaacaattctcctgcttccctctgaattcaattgcattctgccagtgccctggaaacatccttcccatgttcaaatgttctggtgttcagtagctccttcctaaagccacgtttgtgatccctaaccccaygctagtaataatgcacatttactgagtgttgtgtactgaaaggcttaacgggaattttcttatttaatcttca

SEQ ID NO: 640147 - DNA, 513 bp, Homo sapiens
aagctgtctatgagaatagacttgtttccaagaagcatcattgattttacacaggctataaacaggtgattcttcactggatggtaaaactgtggagagttctgcctgcaagtggcatcccaagcagaggggccaaaaaaccttrtgcttcattccttctttgatatcatcaaatggctttgtcaacagcatctcaaagactgatgacccgctaggcacagtggcgcacacctgtaatcccagcactttgggtgggtggggtgggaggatctcttgaagtcaggagtttgaagccagccttggcaacaaagtaagaccctgtctcttgaaaaaaagaaaaaaaaaatgaggaccttggagaaactaaggcagaacacaatgtgctcaacaaagcacaaaaatctgaaggccttttccatgtaagctagcctcacaaggatcacctggcaatgttaggaataatagagtccagcccagtactacctttcaaagtgcccacgaccaccttacaag

SEQ ID NO: 640148 - DNA, 550 bp, Homo sapiens
ttaaatgaaaaaggagaaaaatgaatgaattcatacctaatgagagacccttgggtattaagcacacacacattatcacactttatctcacaacggtcctcctgtttctatatttgtattccatctcacagatgaagaattgaggttcagagaggtaaagtgacttgttcaaagatcttagctagtaagtataggatgcagatttgaatttccactgtcttctctgtaccatgatgtgaacatgcagggagtgggtggtcaccacatggaaatggctatttggaactcttggaggcacactaagagcagcgtttatagccccccaaaatgatttgtcagtaggaggaaaggggtatctgagctgcgccaagaaattaacatattatttcatattcttgtgctacttgtcaggagctcttgatgatggtaagggtggcctgaaacctcccatccccaaacactttgaaatttttgtaagccttgctaccaggagagaaaaraaaaaatcaaaagaaaaaccggattgtgtcaagaaatgttagcagctatg

SEQ ID NO: 640149 - DNA, 568 bp, Homo sapiens
cttgaaaccaatgcagacaatttttaaataaatcaaataatatagaaaggtataaaatgaaaagaaaaatcttctttctccacctcctactccccagaggtaaggactgtgtcacaggtataaaacatggacacaaattcttgacacttctgcctctgaaatgcagagtttatttccctccccttgaatctaagtaggcttacactgcttcaacccatggagtagtgtagaagtgatgytgtgtcttccaaatctaagtcataaaagaccatgaagcatataccttgttcacccaacagtctctctgggagcgttgagctgccataaaaaactcagccttgttggagaggctgcattctggcacgctgggcctagcctttcaaccccagtacttgtatagctacttctcttagttaacatattccattacacaaatacaccacaatctttctaaacactctgctaatgataaatactatagcagcttccagttttgtgccattatcaatatcaataattcagcaatgaacattcttctccatacattgttgtgcattatataagtact

SEQ ID NO: 640150 - DNA, 595 bp, Homo sapiens
tcagatctacctgtatgttccacactttggcctgttctcttcaggaactggtggaggctggcaggacaagctcaatgatgaagcaaaaccccgattgttcagcaagaaatagacagtgttatttccatgactgcggatatgtaagtctcaagtctaaggctggcccactgaacagtctctcattgctgagagtgttctgactcacggtggaattcaggccatcaggaatgtaggagtcaattcctgagaaatgggttagagagtagactagatgacgtccaaaacctctccaactgtaagattctctgaatattatctcttagcaacaatctatttattttggatgacacattcctagggagtaggtgatgcattctatttgctctttgccagcaaattttcttgtaggtgcctggcaaattcttttggttgttgagggtgttgttagtcgtggcagtaattatgttcttatgatgatgayggtgatgataactagcatttgtgtaaagcttcataagttgcagagtggctttcacaagcactacctcatttcatcagcagaagtaatgagaagtgggcattattgctgtcatac

SEQ ID NO: 640151 - DNA, 565 bp, Homo sapiens
tcttgctctgtatttttaaaaaaatattcaaggtcaatacaaccacaagtattgatattcacttcattgtgaactgggatctgctagctgcttattgtcattttatttttcaattcataaaaaaaaatgttctcatcactaggcatctgggcctcttttttcaacccaamtcaccaatgggaaaccaaatgcatgagctgatgaacccagcaaccaagaggggcttggggggagccagccacagatttaaaggccccctcatcccacagtggatgccgtgtacaccctgtgtgcatccccaggtggctgagtactgtagtgatggtagaggaagggggaaaggcacaggtggtggattgtacaggccagagaggagagacagagaaacagaaagactaagtgagctggcgtgtttgtgagatactcattttaggcttcaggagatcactaggctatatagtgtccagaaacaacagctttaactctctcccatccagtaggggggtcatgaaggcacatgccttatactcaaggttttgaagtttcctttcatcattgaactatg

SEQ ID NO: 640152 - DNA, 488 bp, Homo sapiens
ctcctacctttccgtgcccagcatttcacttgcaaacccatgaaagtgtttcatcagagaacgtgctctatttatcattattattgccttgtacaactcgagtacctatgagcaccgagtcctccttggggaaaaggtgataataatttaatccttccttgcatgtgtatagtatttcatagttccagaacactttcacattaattatggtcttcctccctgaatcaactcttatcctgcctttaaaaagtaaggaaaataaggccaggttattttaagtggcctctctaaagtcatacaggtagtgggtgggaaagttaaaatgaaaacccaggagttcaaatccaagcccagggttcttccatttccctcctccaggtctcctccctgggttcctgcccccgaagagtatgtgcttagagggttcttggcagaggaagctcctgggggcacttcctgcgkgctcacatggagcttggtggagtgaa

SEQ ID NO: 640153 - DNA, 565 bp, Homo sapiens
ttgcctggtgcatggccttggtatggaagagggaaggagcctttttctcctccttgactcatgaagttgttgtgaatctccagagagaatacctttttgtgagggctttgaaactctatgaagggcactattcagaggtgaggtacttgccttcctctgggtcagtgtctccagatgtgctgagctgctgcccaaggtcagaatagatctggttagcatcctcagtctcttttcaagacaaggtgccatgtggctttctgggcgtgcaagttttctcagtggggctcatggggagaattaacctytaataccataaaaggcatccattacatgcaatgaattaaattatttcctatgcatctaaaatgatactagatatgtactacttttgggagaagtaaaaatagttaatcatattattctcggggttctctggttcagaggaggaatctcagttgagaaaggctatgtatggagtgtatttgtttcccagtgctgctgttaacatgttaccacagacgtagtggcttaaaacaacacaaatgtactatcttagcttctggag

SEQ ID NO: 640154 - DNA, 635 bp, Homo sapiens
gaaatatctcatcccctttaggagactaaaagcccttgaaagcaaaacctgtatctgtatgtgacacacaacacttgaacacattagtgcttaatacgtactgaatgagcacatattaatgcatgcatggattcatatacttgtatgaataccatgctttgctcactaaacatacggtcattcatggagacaaaaacataaataaatcaccgtataaatcaatcacttaaccatgcatttacaatgtgctcatggtaagagctgtgcatttgtaattgcatgcccatgtgtactcgtgcttgaaaaaaaagaaaaatgaaccctttgaacaaatgggcaatgactttctctctctgagtacttcaagtcatcctaacataggcacctgtatgaaagaaaatgaaaaccctggtgttgctctgaaaatgccaggtcagatgaaagagctgctgggactggaagaaatccatatgcattggctacatgtaaggactggggccaagacaggctgccactgayggggtaaagtaacccaagctaaggatgtgcttagagggaagagaagtaactacagacgattccagaatggctctaaatggcacacatcctcccaaatatacagcaaacaacattga

SEQ ID NO: 640155 - DNA, 510 bp, Homo sapiens
catagagagctcatttccatcaacacacaaggaaaacatgaagaacctcaacatactccaccaccatcttcatcccccacccagggtgaaagaacaggcacgttatcaccatccagtctttcctgggaatgacagaatgccaaaggcggatcttactcggcatcccagagcaaggtaaagattgatccgaatgccctgatttgtgaccctacacaatagcattaagaatacagagaaggtccactccagaccctgtttgcctgggtgccaccagcaggggctgcagaacagcaaagctttgctgcctgattcttcctctggaagcttcatcccagaggggcaccactagatgccagccagagctctcctgtatgaggtgtctgtcaaccgctgctgggaggtgtcccccagtcaggaggcacggggatcaggggcctagttgaggrgtcagtctgtcccttagcagagctcgagtgctgtgctaggagatccgctcaaaaccacaaaaag

SEQ ID NO: 640156 - DNA, 587 bp, Homo sapiens
ctgagggtccctgtgtatagacataaaaagttccatttgttcttacacagtgaaaatgacagaacaaatattatggggattatgcctggggaaaaaaaatctgtctctggatattcctgacactatggagagaaaatcagcaaaatttagaatcttggatctcttccactcacactaggatgttgtttctagaaatctccctgaagtatggtactgactcttggtggtaaaagtggagaggcttagaactgaaatctggtcagtagaagactgagggttaaaagtggacggtcaacccattgaatkaaggcctagcaggaaatagagagacaaaaatacaggcattaagggaataatagctgaatagtaataataatacattatgtcaacagcggtgacaaaggaaacactcaatgtatttatagagctaaataaacggcagatctaggtcctacgttttgactctgaacaaccttctcggttggattttgcttctgcctaaggattattttggaaagagctattattatccgtgatttatcacgctgcactggggggaactcatactttccacggagacaattact

SEQ ID NO: 640157 - DNA, 587 bp, Homo sapiens
ctgagggtccctgtgtatagacataaaaagttccatttgttcttacacagtgaaaatgacagaacaaatattatggggattatgcctggggaaaaaaaatctgtctctggatattcctgacactatggagagaaaatcagcaaaatttagaatcttggatctcttccactcacactaggatgttgtttctagaaatctccctgaagtatggtactgactcttggtggtaaaagtggagaggcttagaactgaaatctggtcagtagaagactgagggttaaaagtggacggtcaacccattgaatgaaggcctagcaggaaatagagagacaaaaatacaggcattaagggaataatagctgaatagtaataataatacattatgtcaacagcggtgacaaaggaaacactcaatgtatttatagagctaaataaacggcagatctaggtcctacrttttgactctgaacaaccttctcggttggattttgcttctgcctaaggattattttggaaagagctattattatccgtgatttatcacgctgcactggggggaactcatactttccacggagacaattact

SEQ ID NO: 640158 - DNA, 572 bp, Homo sapiens
gggtcttatgccatcgtccaggctgcagttcagtgcagtggcatcatccttgctcacagtaagtttgaactccttgggcttaagcaatccttctgcctcaggctcccaaagtgctgggattacgggcatgacccagtgtgcctggatggtggtgtttttttttttktttgtttgtttgttttttgagacagtctccctctgtcacccaggctggagtgcagtggcgtgatctgggctcactgcaagctccacctcccaggttcacaccattctcctgcatcagcctcccgagtagctgggactacaggcacctgccactacgcccggctaatttttttgtattcttagtaaagatggggtttcaccgtgttagccaggatggtctcgatctcctgacctcgtgatcctcccgccttggcctcccaaagtgctgggattacaagcatgagccaccgcatccgtcctggtggtggtttttaataggcctcaaatcaaaatttataaaagaagtgacttttgccactcactggcaagcatcatcacacctccattagccaagagctaatattcac

SEQ ID NO: 640159 - DNA, 557 bp, Homo sapiens
aggctgcagttcagtgcagtggcatcatccttgctcacagtaagtttgaactccttgggcttaagcaatccttctgcctcaggctcccaaagtgctgggattacgggcatgacccagtgtgcctggatggtggtgtttttttttttgtttgtttgtttgttttttgagacagtctccctctgtcacccaggctggagtgcagtggcgtgatctgggctcactgcaagctccacctcccaggttcacaccattctcctgcatcagcctcccgagtagctgggaytacaggcacctgccactacgcccggctaatttttttgtattcttagtaaagatggggtttcaccgtgttagccaggatggtctcgatctcctgacctcgtgatcctcccgccttggcctcccaaagtgctgggattacaagcatgagccaccgcatccgtcctggtggtggtttttaataggcctcaaatcaaaatttataaaagaagtgacttttgccactcactggcaagcatcatcacacctccattagccaagagctaatattcacatag

SEQ ID NO: 640160 - DNA, 571 bp, Homo sapiens
atgccatcgtccaggctgcagttcagtgcagtggcatcatccttgctcacagtaagtttgaactccttgggcttaagcaatccttctgcctcaggctcccaaagtgctgggattacgggcatgacccagtgtgcctggatggtggtgtttttttttttgtttgtttgtttgttttttgagacagtctccctctgtcacccaggctggagtgcagtggcgtgatctgggctcactgcaagctccacctcccaggttcacaccattctcctgcatcagcctcccgagtagctgggactacaggcacctgccactacgcccggctaatttttttgtattcttagtaaagatggggtttcaccgtgttagccaggatggtctcgatctcctgacctcgtgatcctcccgccttggcctcccaaagtgctgggattacaagcrtgagccaccgcatccgtcctggtggtggtttttaataggcctcaaatcaaaatttataaaagaagtgacttttgccactcactggcaagcatcatcacacctccattagccaagagctaatattcacatagta

SEQ ID NO: 640161 - DNA, 557 bp, Homo sapiens
aggctgcagttcagtgcagtggcatcatccttgctcacagtaagtttgaactccttgggcttaagcaatccttctgcctcaggctcccaaagtgctgggattacgggcatgacccagtgtgcctggatggtggtgtttttttttttgtttgtttgtttgttttttgagacagtctccctctgtcacccaggctggagtgcagtggcgtgatctgggctcactgcaagctccacctcccaggttcacaccattctcctgcatcagcctcccgagtagctgggactacaggcacctgccactacgcccggctaatttttttgtattcttagtaaagatggggtttcaccgtgttagccaggatggtctcgatctcctgacctcgtgatcctcccgccttggcctcccaaagtgctgggattacaagcatgagccaccgcatccgtcctggtggtggtttttaataggcctcaaaycaaaatttataaaagaagtgacttttgccactcactggcaagcatcatcacacctccattagccaagagctaatattcacatag

SEQ ID NO: 640162 - DNA, 585 bp, Homo sapiens
ttaattaaacctatctgaacgtaagatttcccatttcattcatgtatagaaatcaataattcctcaaacattactgagtcaaatgctttggttttgaaacactgatccatatttcactcatggaatatttctttaaggagttttaaactttaaaatataattcaagaattaagtttataggcccggtgcagtggctcacgcctgtaatcccaacactttgggatgccaagatgggcggatcacctgaggtcaggaattcgagaccagcctggtcaacatggtgaaatcctgtccctactaaaaatacaaaaattagccaggggtggtggcgggcatctataatccaagctacttgggaggctgaggcaggagaattgcttgaactcaggaggcagacattgcagcgagccaagatcacaccactgtgctccagcctgggggacaggtgacagagcgagactctgtcttaaaaaaaaaaaaaaaaattaagttatacwttgatggaaattctgagagaatctttacttcaggatacggggatctaagaaaaataaatttgattgagacaaaacatgcagagatgcc

SEQ ID NO: 640163 - DNA, 585 bp, Homo sapiens
ttaattaaacctatctgaacgtaagatttcccatttcattcatgtatagaaatcaataattcctcaaacattactgagtcaaatgctttggttttgaaacactgatccatatttcactcatggaatatttctttaaggagttttaaactttaaaatataattcaagaattaagtttataggcccggtgcagtggctcacgcctgtaatcccaacactttgggatgccaagatgggcggatcacctgaggtcaggaattcgagaccagcctggtcaacatggtgaaatcctgtccctactaaaaatacaaaaattagccaggggtggtggcgggcatctataatccaagctacttgggaggctgaggcaggagaattgcttgaactcaggaggcagacattgcagcgagccaagatcacaccactgtgctccagcctgggggacaggtgacagagcgagactctgtcttaaaaaaaaaaaaaaaaattaagttatactttgatggaaattctgagagaatctttacwtcaggatacggggatctaagaaaaataaatttgattgagacaaaacatgcagagatgcc

SEQ ID NO: 640164 - DNA, 564 bp, Homo sapiens
gacaccattttttactgggcctaacattcatgcttttattctctgacctcaccagtatgaaattaatctattttaaaagaaaataggggacagggtgctgatggaaactaatcaatcaagttggggaggtgattaatagaaggcagtcttgaatgtgctgcaggcatatctacaatgcaggttgagaagtggtcattttatagttcattacatatctgtgtgatgttatttattgtttacttaagcaatagcaattgaggcacaggccaattcctgggaattaatgacccgctgggagagaccattacctttggacgttaaccccagtcagttcacagcttttccaggaaaatccctctgaaaaactrtttgttctccatcccttgtcaccgcatttaaaaacaatactttaagtattcttgtgatgaaaggtcatcgaactatactaacagttctacactttggaaagcaacagtttctttaagatggtaggggagaaaaatctacaaagaccacctcttgatggcctttctcagttcatcctgctgtggacagcaacccaca

SEQ ID NO: 640165 - DNA, 226 bp, Homo sapiens
taacaataaaaataatacaaggagaaaagaccaatacagtataaaactacttacatagcatttacattgtactgggtattataagtaatctagagatgatttaaaatatatgggaggatatgcgtaggttatatgaaaataccatgccattttatataaggaacctgagaatttgtaaattttggtrcccaaggggacgcttggaaccaatcccctatggatatca

SEQ ID NO: 640166 - DNA, 443 bp, Homo sapiens
tttctcattgtttcctctcacttcccaggaattccttaaactggagacaatgaacttcttatattgatcttataattctgttttctgtttatgttctcttttttcctacttattagaaggtttcatccattatttatgtcccaattctttttttktgttttttttttcttccattgcttaccgtatttttaattttcaagcactgccttggtctctgtttcttttttagagattcctgttttcatgggcatattcctcaaatatttgtatatattagatatttttttcttacgttttcttctgctccctgaaaaatcctgtttcctctaggtgtcaatctgaggctttcttaaaatgctgcgtgattcttgattttttattcttaacatttacaactgaggtttttcactatttatccctggatctcacttcagccttcaact

SEQ ID NO: 640167 - DNA, 381 bp, Homo sapiens
tttctcattgtttcctctcacttcccaggaattccttaaactggagacaatgaacttcttatattgatcttataattctgttttctgtttatgttctcttttttcctacttattagaaggtttcatccattatttatgtcccaattctttttttgtkttttttttttcttccattgcttaccgtatttttaattttcaagcactgccttggtctctgtttcttttttagagattcctgttttcatgggcatattcctcaaatatttgtatatattagatatttttttcttacgttttcttctgctccctgaaaaatcctgtttcctctaggtgtcaatctgaggctttcttaaaatgctgcgtgattcttgattttttatt

SEQ ID NO: 640168 - DNA, 590 bp, Homo sapiens
tactattatttgtctaaatagtttataaaaaaactgctcagctacaaactccctgaacacagcaaatagcttatattttactgtacccatcacatcacctaaaacttcactattttacatgaactattaaataaatattttgactgatatgggagtagagtgaaagtactaaaccggaaataaggagacctaagctctacttcgggttctgctactatttcaggcaaggcatttaatatcactgaggctcaggkatatcatgtattaaatttgttgagtcacacaatgatctctaaagttccactacttttacgagtttatagatttgtaagttttttaaatttactttttactagcagcaattaattaaggaaatcatattaaagaagacatgacaacataaaagagtacagtaattggttttgggccaggcacggtggctcatgcctgtaatcccagcactttgggaggctgaggcaggtggatcacctgaggtcaggggttcgagaccagcctggccaacatggtgacaccccgtctctactaaaaatacaaaaattagctggatgtggtggcacacacctttaatc

SEQ ID NO: 640169 - DNA, 567 bp, Homo sapiens
aagaaatttaatgcataaaatgcacagtacatcattgtcattattatcattatataatttttttagagataaggtcttgctctgtcactcaggctggagtgcagaatgcagtggcatggtcatagctcactgcagtctcgacatcctgagcttaagcaatcctcccaccacggccactggaatagctaggactacatacacatgccaccttgactggctaattttttttttttttttggtacagacaggggcctcactttgttgctcaggctggtctcgaactcctggactcaagcaatccttccaccttggcctcccaaagtgctgggattacaggcatgagccactgtgcctggyccatagttgcattattattaggcaaacaaagtgaccgaaatgagcctgagtggcaggtgactgggaattctggggttctggcttaatgttccaactgtgtcttgttctctacagtggttggtaccatctggtagtagttgtctgctctgccttaaatattgatggcaggaatctcttgattagatggcatccattggcacccattttctt

SEQ ID NO: 640170 - DNA, 639 bp, Homo sapiens
aattctgctttctggaaagtcatagagtttctagtgaaagcctccctcgctttcagatatttgaagacacacaatttctcattttaaattttatcttctgtaagcaaaatattcctccagtggtcctgatagcattaaaactaaaattcttgatatggttattataacctctatgttgtatcagcgtcttcatttatttcctttatctcaaaagccctattttatgtcgtcaatccaaaatcttgcccatctttagagcaaattttaagactgatttcacttagtcattcagcaataaataaacatttayaccgtataatgcagtagtaactaaatacttattgagcatccactaggagtaaaataaaatgtatccttattctccctgaagcctccaaaactttttatattttcttctgaatgccacctatacttgtgatctgcatcacagcattagtacaaaactgtgcactgttatttcagttaggctaattttgttcctccaacccagtagtacactccctgtacattctctatagtgtctactataggagtaataagtgagtaggtacaactactgattagttcatttattcaaatctgttgagtaaatactagatttttttaaaaggacacttg

SEQ ID NO: 640171 - DNA, 604 bp, Homo sapiens
tctactcactggtggtggtggagaattaaccctaagttagctcctgcttgatattaatttagcttcctgctacagttcacaggctcacattctggaatttgagtttcaaaggagcccaaagcatgggaggtgttatcaccctaatcgttcacagggctttcccttcccttccttgagaagccatcttttcttagagttcctgtgtcaggcacccaagtgacaatccaattactgagacttagaggaaagaggccatgagagaaatgtatggcaccagggcatctatatatttccttggcttggcagatttgacctgtcagagagcactgcttcaaactttaccattctttagaaggaaactgaaggagacatcagaatctgtacaatctaacaaagcttgaattaaactttggaatataggtttgttttctgccttactgattcttgaccagtaaaccggaagtgagtcacctcttctaatgtagaaaagatgacaaatcgaatgttttaagggcctatgaaaaataaatgtaaaagttgtgtatggcacttatgctttaaaatattcctaacaaattagttaarttggctgtaatttaagtca

SEQ ID NO: 640172 - DNA, 598 bp, Homo sapiens
aatttatagattaggaacagtaagaaattaacagcactcattataaaaatggaacaattggctgggcgcagtggctcacgcctgtaatcccagcactttgggaggctgaggcaggcggatcacttggggtcaggagtttgagaccagcctggccaacatggcgaaaccccatctctactaaaaatacaaaaattagcctggcacaatgggcgcctgtaatcccagctacttgggaggctgaggtaggagaatcccttgaatctgggaggcagagatttcagtgagccaagatcacgccactgcactgcagactgggaaacagggagagactctgtctcaaaaaaaaaaaaaaaaagaacaattataaccataggtcagcatcactactcttgcactttggggcccattaagtaaaagaagggtggtttgaacacaagcacagcgatactgccacagctgatctgagctcaccgagtckgctactcggtgactaaatgggcatagcacaaacaggactgaggcgctggacaaaggaaggattcctggattcctatcttgggcagtacagggtgggatggcatgagatttgaatgttata

SEQ ID NO: 640173 - DNA, 596 bp, Homo sapiens
acagtggttaccagagactagggtggaacaggggtgatggggaaagggaagatgttggtcgataggtacaaagtttcagacgggaggaataagttctattgcacagcagggtgactatacttaataataatgtgttgtatatttcaaatagctaaaagagaagctttcaaatgttctcaccacaaataaatgataaatatttgaggtgatagatatgctgagtaccctgatttgattattccgcattgtatacacgtatcaagacatcacattgtaccccgtaaatatacaattattaagtatcaattaaaaataaaattttaaaaatatgtttttccaataggcttttcaacaatgatcttggagcaattgacattcatcctaaaaaaaaattgaaccttgccataaacctcataccttatacaaaattaattcaaaatggatgacagacttaaatgtaaaacataaaactatraagtatttggaaaaagaaaaaactattcagaacctaggcctaggtgaagagttctcagaattgatcccaagatcatagtctatacaaggaaaattgataaactggtctcatcaaaattaaa

SEQ ID NO: 640174 - DNA, 557 bp, Homo sapiens
atcatcaacatgcccacatctcctagattgttcttctgaagtccaaagttagacatcccaaatgcaagctaccccaaackgaactcctgataatcttccccaaacctgctcctctggaaatggcatcctttgtccttgcagttttaggacaaaaaccttggggtatcttgatttctcttatttggctcaaccttcaaaaatatccagaatccaagtacttacagcttatcttactggaccaagcctcttctgtttgttgttgaggttattgtaggcacccccatactgttctccccacttttatccttgtccctctttagtctgtgtttagtccctcaacacatcagtcaaagtgatcccattaatgtaagtcagggaatttcatatctttgctcaaaatcttctgatgtcttccaatttcaacaagagtgaaagccaaaggcatgcccccaaggctctttcccgaaatcatcatctttctctccctctctttcactctgctgtagccctacccatttccttttctttttttccttttctttttttttttttttttg

SEQ ID NO: 640175 - DNA, 610 bp, Homo sapiens
gctaccccaaactgaactcctgataatcttccccaaacctgctcctctggaaatggcatcctttgtccttgcagttttaggacaaaaaccttggggtatcttgatttctcttatttggctcaaccttcaaaaatatccagaatccaagtacttacagcttatcttactggaccaagcctcttctgtttgttgttgaggttattgtaggcacccccatactgttctccccacttttatccttgtccctctttagtctgtgtttagtccctsaacacatcagtcaaagtgatcccattaatgtaagtcagggaatttcatatctttgctcaaaatcttctgatgtcttccaatttcaacaagagtgaaagccaaaggcatgcccccaaggctctttcccgaaatcatcatctttctctccctctctttcactctgctgtagccctacccatttccttttctttttttccttttctttttttttttttttttgagacagagtcacccaggctggagtacaatggcatgatcttggctcactgcaacatccacctcccgggttcaagcaattcttctgcctcagcctcccgagtagctgggattacaggcacac

SEQ ID NO: 640176 - DNA, 609 bp, Homo sapiens
attatatgttgaatgtggtcaattagtttgttatttaatcattgactactctgggacaaaaaggtagtatcattttaagtttattgctgtctgatgcttttaggcacccaacatacatgactcccgccattagctgaagtaaccaacagaggataattgttgttttcaccttgggactctggtgggtcttcagcagaccaatctggggraaaaaaaaaaaagccagatgcctaagtctctagtggcctgttgttgaaaatcatctaggaagaaatgactttctctactgaggttctaaagatacaccaggaaaccatgtttactctccacattcattggctaataacttactgagtgcctcccttgtgctgaaccctgaaaaaaacgaagaataggcaatacaattgctcctaggaacctacaaatttagtgggaaaacactaccagacaattagcttcaatgccatgtggtaagggctatgacccaggtacattcaaaacattatacaggcaactagaaagggcacccttcttagagcatatagggatataagaaagactccttggaggaggaaacgttgctgctcctggctttgaggaatgcatagg

SEQ ID NO: 640177 - DNA, 635 bp, Homo sapiens
attatactaatgtatttttttccaaattacctatagggatagtatatagggataggtcatatttcagaagtgttcctttgcgatgtttgaagtgatccttgtggaaacaaacattgtcacaaaaattctcacccaataggccaggcgtggtggctcaggcctgtaatcccagcactttgggaggccaaggtgggtggatcatctggggtcaggagttcaagaccagcctggccaacatggcaaaaccccgtttctactaaaaatacaaaaattagccagacatggtggcggttgcctgtaatcccagctactcaggaggctgaggcaggagaatcgcttgaacctgggaggcggaggttgyagtgagccaagattgcaccactgcactgtagcctgggagacagtgtgagactctgtctcaaaaaacaaacaaacaaagaaacaaaaaccaaccaaacaaaaaaaaaactcacccaataaaatagagtagttctagaataagaaaaattaatagataattaaaaatagaagagagaaatattcaggccaataatgctaaaatgaaatgtgtggttgcggaggctgagggatgctgaaagcacaactctgtctggaactaatggaaaaggggctac

SEQ ID NO: 640178 - DNA, 498 bp, Homo sapiens
atgatacccctttctaggccactactgttgctccattttagcgttttcagagaatgttttttcttccttctgattagcctgtttttctgctcctgctgccgctgctgctgctatcctgatgtaagtgcctgtgagtaagcagtgagctccagtgtacagggtttattttttttctccatgattctcaacagcttttctattagaatgattttawgcctggatggtttgactatctttttttccaaaaaaaaaaaatataaaacaaagtgcaggaaacccaaaataccttcccaacaattagaattttgcttgttgtcagtttgccctccatcctcctaactgagtcactagaagcatctgggtcagcctggggattggtggcaggcacgtctggggtccttttgattgacaagcacaatgaacccaagtgatcaggaccatgagtgatgattcaccacatgtgtgtttagttatcatcatcaaggcacctagcaattt

SEQ ID NO: 640179 - DNA, 540 bp, Homo sapiens
ttttatgagtacaagatgatgattgatttagcaactgagataattgatactattcatctcaaagtgtagcaaaccttagtgagaaagagaaaactggttattgaaggacttagctcagatttctgctcacctatgtacttaaaaatgatttactaattgaaatgatatgagaggcattaaagacattatgggtgagattgtcatctcctactgggtttttttttttccactttcmagtcagaacgtgggtggaagacagcattctttgagcacatggaattaaggtaagaatggggctaaacatgaatggggattatgtttattttgtgagaactgatctcaatcttctttggctttatactaatgatggaagtactagctagtagttattgagtgttctggggacacattgtgctaaacccttgtatggatcagctaatttgatctgcgttcattttagagatgaggaaacaggcacagagatataatttactcagttaatgagtggtaattattccagagcctgaactactaaagcag

SEQ ID NO: 640180 - DNA, 540 bp, Homo sapiens
ttttatgagtacaagatgatgattgatttagcaactgagataattgatactattcatctcaaagtgtagcaaaccttagtgagaaagagaaaactggttattgaaggacttagctcagatttctgctcacctatgtacttaaaaatgatttactaattgaaatgatatgagaggcattaaagacattatgggtgagattgtcatctcctactgggtttttttttttccactttccagtcagaacgtgggtggaagacagcattctttgagcacatggaattaaggtaagaatkgggctaaacatgaatggggattatgtttattttgtgagaactgatctcaatcttctttggctttatactaatgatggaagtactagctagtagttattgagtgttctggggacacattgtgctaaacccttgtatggatcagctaatttgatctgcgttcattttagagatgaggaaacaggcacagagatataatttactcagttaatgagtggtaattattccagagcctgaactactaaagcag

SEQ ID NO: 640181 - DNA, 625 bp, Homo sapiens
ttttttttcatgtccctggttctgtgaatttctttatcaattgttttgctatcagcaaagcttatcaatgtgacctgcaagattcctcaaaagaatatataatgagaagagagcaaaacaacaggatttgtattggtatttgtattctagcatttttgatcaccaacttgagtcttctatactagctcaacttctggctgataaatgggatggtttggatgatggagaggttttcattagaaagataacagattcttagacgtgattaggaaaagaagaaagcataattttatctgaagctttcccaaagtatacaagaatgagtgtattccgtttaggaatttctgttaaattgctttcattaaacaaaaatgagagaagtagtggctaaagtaataagctacatcaaataatttcttggaaatatctctctctatatatagggtatatatttatagcattaggrtgtattttccattccacccctccccatcaccggtgatagattttcataacttgtagtagctggaaacaggactgggaaaagctatggcaaatctcctgtaggtcaccgccctgttgtgcctgtggaaagaaaccagctttgtcgagagggaggagagtt

SEQ ID NO: 640182 - DNA, 540 bp, Homo sapiens
gttttcaatttctttagtatattagattgtaattcatttatctcaagttgcttaaaggaactagaagttctcttgtcccctgtctatttgggtccttaccaagagcctgtgactggattacagaaacttcatcaacattagggaaaacaaacaagcaaacctaccagcaatatctgttggaccacaaatataatattttcattcatgaggaactatatgttttcataggctgaaaatatttaccaggcctttcattcagtagtcgataagtattttgaacaaatcctgggcargggaatacaacagcctttattattaaccctttcacacacaaagatgtggaacaataattgactggcaggaaacatctgttcaaagaagaagtaaaacatccatggactgtaaatagtatttttaaaactctaataaagtttcatttttgccactggcttccttttttttgagacaaatttatccaggtatacggcgagcaatgctttaggctgtcatccagatacagagaaattttcactgcagatt

SEQ ID NO: 640183 - DNA, 540 bp, Homo sapiens
gttttcaatttctttagtatattagattgtaattcatttatctcaagttgcttaaaggaactagaagttctcttgtcccctgtctatttgggtccttaccaagagcctgtgactggattacagaaacttcatcaacattagggaaaacaaacaagcaaacctaccagcaatatctgttggaccacaaatataatattttcattcatgaggaactatatgttttcataggctgaaaatatttaccaggcctttcattcagtagtcgataagtattttgaacaaatcctgggcaggggaatacaacagcctttattattaaccctttcacacacaaagatgtggaacaataattgactggcaggaaacatctgttcaaagaagaagtaaaacatccatggactgtaaatagtatttttaaaactctaataaagtttcatttttgccactggcttccttttttttgagacaaatttatcyaggtatacggcgagcaatgctttaggctgtcatccagatacagagaaattttcactgcagatt

SEQ ID NO: 640184 - DNA, 572 bp, Homo sapiens
gggacaccgtgggctggaggtgagaagcgtaagcttgaagtgacacrttttagttctgattcttaaaaagcaaaaggcagacctacatatcaaacatagaggctggaaaggatgttaaggggatgaaacgtcatcagaaatgtcagcacataggctttgaactctggtctcctgcctagatcagtgggtgctatggtagtgcatttgcataagtgcagtttacataagaaaatgccaagttgcactgcaatactatttactttccatgtaaataattacttcagtcaactttgctttaaaataaatcccatagcaataatgcttgataacaaagatatgctcctattcactttctatacatatttaattctcctcaaactgatggaagaataaaatagaaacagaagtgttttcattatctccctcattgatccttgagttggggaccaaaaaaaaaaaaactggcactgacaaactttattgtaacacacactgaaataggaattaaaatataattaatgtacacatataattaatatacatatatagcaaactgagcatacaaatgttta

SEQ ID NO: 640185 - DNA, 541 bp, Homo sapiens
aacaacaactcaatgtgtaacaaaggtaaaattgaaaattctacaagaaatattactataacaaatccttgatttacatttaaacatttattgaaacatcaaataggtggattttttaaaaaggtcattgaagcaaggattaagaacagggtacaggaatagtattttctggagaaaatacctcaattgagtgctaaactcagctgagtttgcagaaatgaatgcacccaacactttccaaggtaaccatcaatcatgcaataaagatatagccactttaaacaacaatgtatcaatacagaatggaacactgctatattaagatgcactcctctgggaagttcttgattgacaaaaatagtactgtgttaagtagcagcagtattttcatggccagaaagtaataaaactaaagatgagctttatgaagagaaaagattttacatgaaaatccatggagcaattcttaggacttgcttccttcaggatcaggttaaggggcaaaaygtgaaatgtgaaagtggaaactgataatttgcta

SEQ ID NO: 640186 - DNA, 563 bp, Homo sapiens
gagccaggggtatgcaaggaatttactctttgagacctacttcattacagagagttggtagagagtcagagttaggttggtgacattaacttttcagttttattgcagtgtcattttaagtcagggattttactgccactttttggcatagcagtttgggctagtgtatttctctctctcttaatgtgatccttcatgttgatatacytaccttgaaaatggtggtgaattgactcttccgctcttcttctgatcacttctccaaacactgtggcatgacccactttatctgttctctgtggcatgacccacttgacctgctctccgacagcaagtgtgatattcttgatcatccccaacatagctggttttggatgagcatgataaattatagtaacagtggtttggggggaaaggggaagagtaatgggtttttttgtttttgtttttgtttttgttgttttttttttttgaaagcaggcaaattgtaaaagcaagagcgcctataatagtgaaccgaagctttattctgaaaaccttttcatcgtgctttgatttcattg

SEQ ID NO: 640187 - DNA, 563 bp, Homo sapiens
gagccaggggtatgcaaggaatttactctttgagacctacttcattacagagagttggtagagagtcagagttaggttggtgacattaacttttcagttttattgcagtgtcattttaagtcagggattttactgccactttttggcatagcagtttgggctagtgtatttctctctctcttaatgtgatccttcatgttgatatacttaccttgaaaatggtggtgaattgactcttccgctcttcttctgatcacttctccaaacactgtggcatgacccactttatstgttctctgtggcatgacccacttgacctgctctccgacagcaagtgtgatattcttgatcatccccaacatagctggttttggatgagcatgataaattatagtaacagtggtttggggggaaaggggaagagtaatgggtttttttgtttttgtttttgtttttgttgttttttttttttgaaagcaggcaaattgtaaaagcaagagcgcctataatagtgaaccgaagctttattctgaaaaccttttcatcgtgctttgatttcattg

SEQ ID NO: 640188 - DNA, 600 bp, Homo sapiens
gggaatgggagcagtgttttgcagggaaaccactttaaaactggagttttataggcttaggttttgtgagtttcatatttgtgtttaattgtgcattttagcctattacgtgattattaattaatattattacttacattcagcaaatattaattgagcaccaagaatgtgcaaagcactgttggggtgatgcggggaattcaaaggtgacaatactatgaatgtgccctaatggaaattayagtctggagaaagataaacacacacacatccacagatccatccattcatagatatatatgtaagtaaacataacatttcagcatcatatgaatgccaaaatgaaatacaaacctgtgggagcaccaaggagagaactattcattttgactgaggtattggagtatctttcagccgtaactgaatgtgaaggataggtaggattttactaggcagagccacagtgtggactgtatactggaagctaagggaactggactgtgaactccacagggatactgtccatttataagctttttgtatattcagcagcttgctataaatatttattgaatgaatgcatgcatgaaacagcattag

SEQ ID NO: 640189 - DNA, 540 bp, Homo sapiens
aggccacgtgccccagcttgcaaatggccaccttcttactgtgtcctcacgtggtcacccctctgtctgtatcttgcctgtgtcctaatctcctcttcttataaggacaccagtcatattggattagggccccacccataggacctcacttagcgttaatyacctccttaaaggtcccatttccaaatacagtcacattctgagggtcaggacttcaacatattaactttagggggatgcagttcaccccataagactgacctgaggagttaatccaggctgtaccacctgacttagaaagttatgttgtcagtggttaagttaatcccagtcacatgtggtaggaattggagcttgaatctaacagctgatgaaactaggtggttgcctagtgaaagtggtctcctctaaatagttcagtttctaccacatgcaggagcagtcactattgcaataactttaagtaggcttggaaaagatgaacataaatccactgcacatttgcatggcatttattagagaataaccccctaaacaagg

SEQ ID NO: 640190 - DNA, 540 bp, Homo sapiens
aggccacgtgccccagcttgcaaatggccaccttcttactgtgtcctcacgtggtcacccctctgtctgtatcttgcctgtgtcctaatctcctcttcttataaggacaccagtcatattggattagggccccacccataggacctcacttagcgttaattacctcyttaaaggtcccatttccaaatacagtcacattctgagggtcaggacttcaacatattaactttagggggatgcagttcaccccataagactgacctgaggagttaatccaggctgtaccacctgacttagaaagttatgttgtcagtggttaagttaatcccagtcacatgtggtaggaattggagcttgaatctaacagctgatgaaactaggtggttgcctagtgaaagtggtctcctctaaatagttcagtttctaccacatgcaggagcagtcactattgcaataactttaagtaggcttggaaaagatgaacataaatccactgcacatttgcatggcatttattagagaataaccccctaaacaagg

SEQ ID NO: 640191 - DNA, 602 bp, Homo sapiens
tgttgcccaggatggagtgttattgtttccttaaatcaaattcttttcattcaatcaataaacatttactgaactcctatgagcaggtactgtagccttttttatccttcctragagaaatcaaaggggacttattcagtgggtttcaggcaatgataaggaaatgtcaatttatgtctgagttttctagtcagctttaaggtaatctcttctgcataagaagaaataagacaactgagagtaaagaagggaagggagagaggcagtcagcacctgctacatgcctagcactgagccaaggactgtatgtgggtgtaagccatagaactcttaagcctcttaagagctatagaggtatttatttttcccattttacagacaagggaaaagaagctttaatgagtttcataactgttcaagatgattccccaagctacactatagcttacatccttaacagattcaccgcaggaaaatactactagaataattttagaatttaaactcagatctgagtaactccaaagtgaaagctcaatgcttgttgttgtcattgtttattgcataacaccaagatgctataaatatctctgaactgagaa

SEQ ID NO: 640192 - DNA, 528 bp, Homo sapiens
ggttggtagacagtggataaagacacagaagggaatgagatcattaaggagccagcccttgaaaagggaggaggttggggtctagagaacaggtggtgagagacacattgacctaggcagagagagggatgactttcagtttaagatggaaaggatgggctggacacggtggcttacacctgtaatcccagcactttgggaggccaaggtgggtggatcatctgaggtcagaagttcgagaccaggctgaccaacatggtgaaaccccgtctctactaaaartacaaaaattagctgggcatggtggtgcgcacctgtaatcccagctacttggctacctgggaggctgaggcgggagaatcacttgaacccaggaggtgcgaggttgcaatgagctgagatccgcacccccccaccaaaaaaaaaaagggaaaggatggttgtggctgcaaataatttaataggctcaggaaatggtgtttgaaaaaggtcctgtctctgtgccggttttgccaaaacttattttga

SEQ ID NO: 640193 - DNA, 528 bp, Homo sapiens
ggttggtagacagtggataaagacacagaagggaatgagatcattaaggagccagcccttgaaaagggaggaggttggggtctagagaacaggtggtgagagacacattgacctaggcagagagagggatgactttcagtttaagatggaaaggatgggctggacacggtggcttacacctgtaatcccagcactttgggaggccaaggtgggtggatcatctgaggtcagaagttcgagaccaggctgaccaacatggtgaaaccccgtctctactaaaaatacaaaaattagctgggcatggtggtgcgcacctgtaatcccagctacttggctacctgggaggctgaggcgggagaatcacttgaacccaggaggtgcgaggttgcaatgagctgagatccgcacccccccaccaaaaaaaaaaagggaaaggatggktgtggctgcaaataatttaataggctcaggaaatggtgtttgaaaaaggtcctgtctctgtgccggttttgccaaaacttattttga

SEQ ID NO: 640194 - DNA, 553 bp, Homo sapiens
agcctggccaacatggtgaaaccccgtctgtactaaaaatacaaaaattagcctggcttggtgtgcaggtgcctgtaatcccagmtactcaggaggctgaggcaggagaatcgcttgaacctgggagatggaggttgcactgagctgagatcgcgccactgcactccagcctgggtgacagagtgagacttggtctcaaaacaaaacaaaaaaagcaacgggagcaaaagaataaagtgcaacaataagcacttccatttcctagtctgaagtagaccatttgtgaattgtcaatagctgagcactttgatccctttttccctctcctgtgctcatctctcgctcatttgcttgctaagatgcgatcagagttaggtaagagcagaacgtggagaatgaaatagtctctattcctttttgttaacagctgttgtaaaaggttttgggagcagagaagattgaaggtaaaatgagactataactaagttcacggataatgtcattgattttaattatgccaagttctgagtagcagacataattgagaccgagt

SEQ ID NO: 640195 - DNA, 553 bp, Homo sapiens
agcctggccaacatggtgaaaccccgtctgtactaaaaatacaaaaattagcctggcttggtgtgcaggtgcctgtaatcccagatactcaggaggctgaggcaggagaatcgcttgaacctgggagatggaggttgcactgagctgagatcgcgccactgcactccagcctgggtgacagagtgagacttggtctcaaaacaaaacaaaaaaagcaacgggagcaaaagaataaagtgcaacaatragcacttccatttcctagtctgaagtagaccatttgtgaattgtcaatagctgagcactttgatccctttttccctctcctgtgctcatctctcgctcatttgcttgctaagatgcgatcagagttaggtaagagcagaacgtggagaatgaaatagtctctattcctttttgttaacagctgttgtaaaaggttttgggagcagagaagattgaaggtaaaatgagactataactaagttcacggataatgtcattgattttaattatgccaagttctgagtagcagacataattgagaccgagt

SEQ ID NO: 640196 - DNA, 553 bp, Homo sapiens
agcctggccaacatggtgaaaccccgtctgtactaaaaatacaaaaattagcctggcttggtgtgcaggtgcctgtaatcccagatactcaggaggctgaggcaggagaatcgcttgaacctgggagatggaggttgcactgagctgagatcgcgccactgcactccagcctgggtgacagagtgagacttggtctcaaaacaaaacaaaaaaagcaacgggagcaaaagaataaagtgcaacaataagcacttccatttcctagtctgaagtagaccatttgtgaattgtcaatagctgagcactttgatccctttttccctctcctktgctcatctctcgctcatttgcttgctaagatgcgatcagagttaggtaagagcagaacgtggagaatgaaatagtctctattcctttttgttaacagctgttgtaaaaggttttgggagcagagaagattgaaggtaaaatgagactataactaagttcacggataatgtcattgattttaattatgccaagttctgagtagcagacataattgagaccgagt

SEQ ID NO: 640197 - DNA, 553 bp, Homo sapiens
agcctggccaacatggtgaaaccccgtctgtactaaaaatacaaaaattagcctggcttggtgtgcaggtgcctgtaatcccagatactcaggaggctgaggcaggagaatcgcttgaacctgggagatggaggttgcactgagctgagatcgcgccactgcactccagcctgggtgacagagtgagacttggtctcaaaacaaaacaaaaaaagcaacgggagcaaaagaataaagtgcaacaataagcacttccatttcctagtctgaagtagaccatttgtgaattgtcaatagctgagcactttgatccctttttccctctcctgtgctcatctctcgctcatttgcttgctaagatgcgatcagagttaggtaagagcagaacgtggagaatgmaatagtctctattcctttttgttaacagctgttgtaaaaggttttgggagcagagaagattgaaggtaaaatgagactataactaagttcacggataatgtcattgattttaattatgccaagttctgagtagcagacataattgagaccgagt

SEQ ID NO: 640198 - DNA, 462 bp, Homo sapiens
ggtggggatgaatacatttcaaaatgtcataattttagctaccatttattcaactctatcacaaattcaataaccttgaaccagagttaatagaaattcatgataagtaataaaaatccaactagcctcaaattcccatggctttaaatatgcctaaaagccaccaactcccaaaatctctctccctgacctagatctgtcttctgcgttccaaccaaaattgcacaggtaggtatctccgcctgsatgccctactggagcctgaaactgaacacatggaaaccgcatcaccctcttccctttcacccaaaccatctcctccctgaaagttctgtttctgtgaatgtttccaccatccagactggtgcctgaatttgactccacaactgtctcctgtcccttgcacgttgatgcaacctccttaatcacatcagatacacctcaatcttttccacgagtaac

SEQ ID NO: 640199 - DNA, 462 bp, Homo sapiens
ggtggggatgaatacatttcaaaatgtcataattttagctaccatttattcaactctatcacaaattcaataaccttgaaccagagttaatagaaattcatgataagtaataaaaatccaactagcctcaaattcccatggctttaaatatgcctaaaagccaccaactcccaaaatctctctccctgacctagatctgtcttctgcgttccaaccaaaattgcacaggtaggtatctccgcctgcatgccctactggagcctgaaactgaacacatggaaaccgcatcaccctcttccctttcacccaaaccatctcctccctgaaagttctgtttctgtgaatgtttccaccatccagactggtgcctgaatttgactccacaactstctcctgtcccttgcacgttgatgcaacctccttaatcacatcagatacacctcaatcttttccacgagtaac

SEQ ID NO: 640200 - DNA, 258 bp, Homo sapiens
gtacaaaaacctatctgtgagcatcctgacctctgattctatgcakatcaaaccacaaccagtatgcttcaacaacaaactcaaaattcagcgtccctagtgaactctaattctgacactgatcctaatttattgtttgaccctgggctaatccaagggtttccatgaatcccatgtctcttgtgatgatttggagaattactaggttaaaatgtgtaatacacatatactgcaagttgtcacggcagaatactgggg

SEQ ID NO: 640201 - DNA, 560 bp, Homo sapiens
ccggggattctggcattccacatcttaagaagcgggcatcctgcatgctctctgatgtttggttttgtagtgtcttttcagagagtacaaaaacctatctgtgagcatcctgacctctgattctatgcatatcaaaccacaaccagtatgcttcaacaacaaactcaaaattcagcgtccctagtgaactctaattctgacactgatcctaatttattgtttgaccctgggctaatccaagggtttccatgaatcccatgtctcttgtgatgatttggagaattactaggttaaaatgtgtaatacacatatactgcaagttgtcacggcagaatactggggaaagttttccatcattcaatcactataatccaattgaaggaaaagcttaagaagaaaagtgacctyggaaaatcaatgttttcaatcaatggaaatatttgataatatttctccaaaaaattaagaaactttttttatcaagttctaagactctctaattataagttttgaagacatactgatgcattatctagaaaaaactttttccttaatagtct

SEQ ID NO: 640202 - DNA, 566 bp, Homo sapiens
cagagatgacgaactcgcagtttgartgtaaaggtcacatctcaagaatgtggaacatgagcagggtaattcagccactgaaatgacttgttcatcttgctcactggtatcattaaagtggcacctaacttagagctttgtgagacctctgggatcatctcatacaactctctcattttacagatgaggaaactgaggctgagagaggcagcacatctaccaatgggaacattattcgagatctttttcacagccccttgtcatatagaattaaatgcactaagacaataggtagaatgaaaagaacaaaaagataaaaacttttatccaatttttaaagtaagaaagaggaaatggacttcttaaaacagagaaataatcacaaatgccacaaacattcttacagtgtggttgcagtctagctcattattttcttacaaagaaaaagaaaaaagttttgtaatgtgtgtataacaaccctgttgttcactttccattaaacaaaagagaaagttttaacaaaaggtataattcattacttctggatctgtatgaattaaagcaga

SEQ ID NO: 640203 - DNA, 566 bp, Homo sapiens
cagagatgacgaactcgcagtttgaatgtaaaggtcacatctcaagaatgtggaacatgagcagggtaattcagccactgaaatgacttgttcatcttgctcactggtatcattaaagtggcacctaacttagagctttgtgagacctctgggatcatctcrtacaactctctcattttacagatgaggaaactgaggctgagagaggcagcacatctaccaatgggaacattattcgagatctttttcacagccccttgtcatatagaattaaatgcactaagacaataggtagaatgaaaagaacaaaaagataaaaacttttatccaatttttaaagtaagaaagaggaaatggacttcttaaaacagagaaataatcacaaatgccacaaacattcttacagtgtggttgcagtctagctcattattttcttacaaagaaaaagaaaaaagttttgtaatgtgtgtataacaaccctgttgttcactttccattaaacaaaagagaaagttttaacaaaaggtataattcattacttctggatctgtatgaattaaagcaga

SEQ ID NO: 640204 - DNA, 566 bp, Homo sapiens
cagagatgacgaactcgcagtttgaatgtaaaggtcacatctcaagaatgtggaacatgagcagggtaattcagccactgaaatgacttgttcatcttgctcactggtatcattaaagtggcacctaacttagagctttgtgagacctctgggatcatctcatacaastctctcattttacagatgaggaaactgaggctgagagaggcagcacatctaccaatgggaacattattcgagatctttttcacagccccttgtcatatagaattaaatgcactaagacaataggtagaatgaaaagaacaaaaagataaaaacttttatccaatttttaaagtaagaaagaggaaatggacttcttaaaacagagaaataatcacaaatgccacaaacattcttacagtgtggttgcagtctagctcattattttcttacaaagaaaaagaaaaaagttttgtaatgtgtgtataacaaccctgttgttcactttccattaaacaaaagagaaagttttaacaaaaggtataattcattacttctggatctgtatgaattaaagcaga

SEQ ID NO: 640205 - DNA, 566 bp, Homo sapiens
cagagatgacgaactcgcagtttgaatgtaaaggtcacatctcaagaatgtggaacatgagcagggtaattcagccactgaaatgacttgttcatcttgctcactggtatcattaaagtggcacctaacttagagctttgtgagacctctgggatcatctcatacaactctctcattttacagatgaggaaactgaggctgagagaggcagcacatctaccaatgggaacattattcgagatctttttcacagccccttgtcatatagaattaaatgcactaagacaataggtagaatgaaaagaacaaaaarataaaaacttttatccaatttttaaagtaagaaagaggaaatggacttcttaaaacagagaaataatcacaaatgccacaaacattcttacagtgtggttgcagtctagctcattattttcttacaaagaaaaagaaaaaagttttgtaatgtgtgtataacaaccctgttgttcactttccattaaacaaaagagaaagttttaacaaaaggtataattcattacttctggatctgtatgaattaaagcaga

SEQ ID NO: 640206 - DNA, 667 bp, Homo sapiens
gttacttttgggggccatgtgctttaagtttcagataaatgtcatttgaggacttttctcttgtgccttaagtccttatggttctgggttatggtgggaatgtggggagcggacacccagctgaggaatcacctggattcattatagcatgggatgccatggtctagttagccagcgaatattttagaaggatatttatcatacagacggatcttcagaaaaatcaccattttctcaactgtaaggttgatgatttttaggattaattagtagggttattaatccaaacaattaaattctctcctaagagtacagctgtctgattaattaatctattaattaatcagtggcttctccagatgtctgttgagatactgtcccttgagcactgctgagatgtgttttcagaccatgaattaatccctttcacttattcaactctacagtaaaaggagactatttattaaaagagcccagttgtgggtttgctgcgagcaaaaatctatttgtaattacttsaggttatccttctcactcacgtatgtgacatacttctctgtcgtgaattgataacatttgataaaatcttaatagctttttagatgtatttcctcttaccctactggaaagcgtacttacaaaattaaacatggcagttgaaaagaga

SEQ ID NO: 640207 - DNA, 592 bp, Homo sapiens
tgccaggtattcttttttcttttcttttttttttttcttttaccaattatttgattttgttttatttttgaggcaaggtctggctctgttgyccgagctggatttcaatggtgtgatcatggctcactgcaacctctgcctcctgggttcaagcaatcttcccaccagagccccccaagtagctgggactacatgtgtacaccaccacacctggctaatttttgtattttttgtagagacagggttgcaccatgtttcccagctggtctccaacttctgagctcaagtgacatgcccgcttcaccctctcaaaatgttgggattacaggcatgagccaccgtggctagcatattctttttaaaatgaaaaagcatggttctctttcccctgcttttttggcagcaatatagtacagcagaaaacaatatagatttttgaatcagaaagccctgggttcgaggcattcatctaccctgtgtctacataggttaaaaagtggataatcatgatgatgctgacttcacaggtagccatgagaaattgcactgggaagaccgaatagaatccagacatctcgttctcctctttctg

SEQ ID NO: 640208 - DNA, 512 bp, Homo sapiens
tattttttgtagagacagggttgcaccatgtttcccagctggtctccaacttctgagctcaagtgacatgcccgcttcaccctctcaaaatgttgggattacaggcatgagccaccgyggctagcatattctttttaaaatgaaaaagcatggttctctttcccctgcttttttggcagcaatatagtacagcagaaaacaatatagatttttgaatcagaaagccctgggttcgaggcattcatctaccctgtgtctacataggttaaaaagtggataatcatgatgatgctgacttcacaggtagccatgagaaattgcactgggaagaccgaatagaatccagacatctcgttctcctctttctggaatccagcccttgaatcccctgcagagttaagaacatcctcttctgtacatctgacatgtgcgtgcattcattcattcatcaatctgcacctactgtgtatctattattaatatttagcactgtgttgatttgtgtcctgaag

SEQ ID NO: 640209 - DNA, 578 bp, Homo sapiens
taatacttctctgaatgcatgcttattatacagttctgacttttgagacattgttaatatttcacatattcatgaaatytaaaaattgattgtacataccatagaagaagaaataaactgtacttactgcaaatgacaaatataaacacagtgaagcatgggaggatatctaatcctagtaacgttggacacagtatacaatattagaaatattgaccttcaagtaaagacaaaagttctataagcagtaatgatccctacttagtaagtttatttttcatagaggtataggatggcacttctgaaactactttctcttattctgtaattaaataaattaagtaaatattttgtggatatgaggagttagttatttcaaacttggggaagagaattacaaaaatgaaaaagggaaaacattgaatcaacattgtctgggtgtattgtaatataaagtatctgagtaaatgcttggtgatagatagaaagatagatagatacatacatatatacatacatagacaattaaataaacagatggtatatagacatgcccatgtaccatatctatatcctaa

SEQ ID NO: 640210 - DNA, 574 bp, Homo sapiens
tggctagttgaacacttgtgcctgaggagagggacacattctcaacaacatcatttagggtaactattacatatactctgctttatggatcccttattctacaaaagaacttccatccatagataatccagtctagcttctctaaaggggtttccgtgaggtcccctctggtcacataggtttctactactatctgtttccaatcatgtttgagttccctaccttccttgaggaggaaggtggctggatttagggagggacgaattcttaatggtactgcagatccctctaatagcaaagcttgatatctgaggaggcggttgtctgctaacaagagattctcccttagaagacagtagtcctgccacattatatggggtgtaaacagttaagctattcctcatggttaacttagtagattctggtactagcaacgctatcactgtgactgcctggaggcaggctggtcatcgactggctaccaaatcaagctctctacttargtagcccacaggctgctaggctggaccctgggcctgggttagaactcccagggtcatttccttcctttctg

SEQ ID NO: 640211 - DNA, 491 bp, Homo sapiens
tcggggctgtctcagaatccctgacataacattgtccaggttagctgggtagtctggttggagggatcctcaaatgaaaacaaatactgggagttgaggtataatggtatgcaaaggaaggcatcctttaggtccaggactgtgaaccatttagtcccctcaggtatttgagctagtagagcatatggagtgggaaccactgggtgaactggaaccacagcctcattaatgaagtggaggtcctggaccagtctccattccttcttgggcttttatactcccaatatctgggtattacaagggctatagcagggtttgaggaggcccttcaaccttaaatatcgatgatggcttccattcctttcctaagttctggtttcaggagatactgtttctggttaggaaaggaggtgggatccttatgatggatccagaccactatggcagttgtgtgtrgctcggccaattttccctcgaattgcccaaatttc

SEQ ID NO: 640212 - DNA, 391 bp, Homo sapiens
ggaggtgggatccttatgatggatccagaccactatggcagttgtgtgtagctcggccaattttccctcgaattgcccaaatttctgggttaatattggtctttactayggggagacaaagagtttttcctggggccatcaggatggtggtccccatgtgagccagaatatccctgcccaacagaggagttaggctttcaggcaaaattagaaaggcatgggtgaacaagtggtctccccaactacaactaagggactgggaaaaacatcaagttaaaggccttcctgagacactcctcactgttgtgctaagagaggaagggggcctggattggtgaggagaaccaaaagacccactccagaatttccagaattttgatttccagaatta

SEQ ID NO: 640213 - DNA, 608 bp, Homo sapiens
atatcacatactgcattaatgctactgaatgtgccctctttctttttgctgattcagtagctcagaaaactacttctctacctataacttgttcagagaaactaagccctctttaaaagcattgattatagataagaaattcaccatcatatgcaagaatagtaagagttctaaataggcttaatctatttaggttaaatagtttagaggttgaaacataatattctccaaaaaagaaaaataaaattagaattgattgtctacaatatgccttggcttgtgctatgtgtattaattgyattattttcatctttgtagtattttaattactttttatcaatagggtagccatctaaattggatgatgctcatagtataatggtcgttaaataacttgactgttaactcagtacataaaagcccttgaagataaatatctaatattcttctgatgttatttgagaagcaaaatttaaaaatatatcctagtcatagagagagaagtcaataattgaaggaatcattagacttcctggtcagttcaaaaaagttcatgtacctcaaacggtggctgaaatgctttcctactttgataaacatttattaag

SEQ ID NO: 640214 - DNA, 580 bp, Homo sapiens
ttcccttttttccacttgctcaccagcatttgttattgcctgtcttttggatataagccattttaactggggtgagataatatctcattgtagttttatttgtgtttctctgatgataaatgatgttgattacrttttcatatgcctgttttccatttgtctgttattttgataaatgcctactcaaatcatttgcccactttttatcagattattagattttttatagagttgttggagctccttatatattgtagttattaatgccttgtcaggtgggtagtttgcaaatatattcttccattccttgggttgcctctgcactttgttgtttatcctttgctatacagaaacattttaacttaatatgatcctgtttgtccatgtttgctttggttgcctgtgctgtggggtattgttcaagaaattttttcccagaccaatgtcctggggattttcaccaatgttttcacatagcagattcatggtttgaggtcttagccttaagtctttaattcattttaatttgatgtttgtatacagcaagatataagggtctagtttcattcttctgcacgtg

SEQ ID NO: 640215 - DNA, 699 bp, Homo sapiens
tcgatcttggtagtttgtttgtatttaggaatcggtcaatttcttctagattttcaaatttattggcatatagttgttcatagtagccactagtaatctgaatttttttcattatcagttgtaatgwctccttttacatttcttattttatttggatattctatctttttttttcttagtctggctaaaggtttgtcaattttgtttaactttcagaaaacaactttttgtttcattgatttttgtattgttttaaataccaatttcatttatttctactctgatctttattatttcttttttctactaatttagggtttggtttgctcttgcttttctagttccttaagctgcatcattatattgtttatttgaagtttttcccctttctgatgtaggcatgtacagctataaacttccctcttagtactacttttgctgtatcccgtatgtcctggtatgttgtgtttttattgcccattgtttcaagaaatttttcagttttcttcttaatttcttcattgacccactggtcattcaggagcacattgtttaatttccattatctgtatagtttccaaaatttctcgttattaatttctagttttattccattgtgatcagataagttgcttgatattatttctatttttttgaatgttttcagtcttgttttgtggcctagcatatggtctattt

SEQ ID NO: 640216 - DNA, 483 bp, Homo sapiens
agtgggtggcaaagccagcgaggcctgtgttcttgccctcagagcagcaagattgctcaggctccagtgggtccagaggtgctttcgaggagtcataaactagagtaaaaaaccttagaagtctacccggtgttttcttgtattgtagctgagctggcactcaaagcataatacatagtccttcccactcttccttcctctttccaaaggcagaggagcctcaccctggagccactgccaccccagtgcatgaggagtactgtcagagtaccaaygaatttttccttgtggcccaagggcttttatgtcagcttgtggtgaatgctgcctggcctgggcctcagccttcaggacagtgggctgtcttctggctaacagcaggtccagaaatgctggacaagagtctagtcctggaattggggaccccaagagctgacttggtgctctgctctgatgtggcccagatgatatctgaagccagca

SEQ ID NO: 640217 - DNA, 572 bp, Homo sapiens
gagtactcccttggttgtcccagcttatgtctcagtatgtcacatgtccccctcatactccctagtctactgtctttgggcctggctcagctctaggactgtattagtctgttcttacactgctaataaagacatacccgagactgggtaatttataaaggaaagaggtttaattgacccacagttcagcatggctgaggaggcctcaggaaacatacaattacggcagaaggggaagcaaacatattctttacatggtggtatggaggagaagaatgagagaagtgcagagcaaaggggaaaagcccctcacaaaaccatgatatctcatgagatctcactcattatcatgagaacagcatggaggaaataaaaccatgcttcaatgacctcccacaacgtccctcccycaacaggtggggattacagttcagattacaattcaagatgagatttgggtgaggctgcaaagtcagaccatatcatttcacccctgttgactcccaaatctcatctcctcacatttcaaaacacagtcatgccttcctaactgattcccaaagtcttaactc

SEQ ID NO: 640218 - DNA, 457 bp, Homo sapiens
agttgagcagtgagagtctacgtgattgtaggtccatagggtccaaacaactaggagaaagcaagtcagagagcaagctgacctaataacctaattgaatgtggacaagcttggtttattttcgtttctcccctcccttcattcttgatttattttataaaatttgtagggtcagtttcaatcttagctagatcttctggataacttgctgcagcatctacatgagcacttatttcttcaccttgcaattttatgttttggagatggcgtcttcacttaaaccccakgagcgaacctctgacagtttcaaacttttcttttgcaatgtcctcacctttctcagccttcatagaattgaagagagtcagaattttggtctccattggctttggcataaggaaatgttgtggaagatttgttctttaatccagaccactaaaactttatccatatcaat

SEQ ID NO: 640219 - DNA, 457 bp, Homo sapiens
agttgagcagtgagagtctacgtgattgtaggtccatagggtccaaacaactaggagaaagcaagtcagagagcaagctgacctaataacctaattgaatgtggacaagcttggtttattttcgtttctcccctcccttcattcttgatttattttataaaatttgtagggtcagtttcaatcttagctagatcttctggataacttgctgcagcatctacatgagcacttatttcttcaccttgcaattttatgttttggagatggcgtcttcacttaaaccccaggagcgaacctctgayagtttcaaacttttcttttgcaatgtcctcacctttctcagccttcatagaattgaagagagtcagaattttggtctccattggctttggcataaggaaatgttgtggaagatttgttctttaatccagaccactaaaactttatccatatcaat

SEQ ID NO: 640220 - DNA, 419 bp, Homo sapiens
tgtgttttgaggattgaatactatatgcaaagttagaataggacctaacaagtataagcactaaaatatttggctaatattattattaccaaactattgagatgattcattcatagtagactctcacagtagatcataatcgcctcaaggacagagacattatctttttaacatttgttaatgagagcatctagctttgggaaagtgcacagtgagcatttaataaatatgtcttgaacaaatatgaataagcacatgctacttaytttgtagcatttaactattgtgctatagttaagtatttaaacagcactgtttgtgttcaatttatcttatataacatatgctatgtatacaccaggtgctcaattaatgtttagttaaagttgagttctagtttccctacttccaactaagtt

SEQ ID NO: 640221 - DNA, 515 bp, Homo sapiens
atctgaacagccattatgaggctaaacctcctcttcctaagttgttctgccttgtacagccttctaccttgtgctggtgtttccaagagcaataaaacagaggacacactttaatcaaatgtagtacttatagctgagattggagcagaactttggtccagtctttcatttcgttcctgcttaytgaacagcatcaacctattggtaaagaagtaaatattcttttctttattctgtaaaactgagaggttgggggtcttaatgtattacataaatactaaagattgagtttgcgctgaacatttgttgaaaactgggtgtgcattgataaaagacagattcttctcttagagatcttattgttcctgtgagatttagtaggtagtatttatactgattgtaaggacaaagtcagtaagaacttaaatgagggagcctcaaatatatcagggacatcatgaagtgtttacaaaaaaggtgaaactgaaggttgtatcagagtttagagacaaaaa

SEQ ID NO: 640222 - DNA, 578 bp, Homo sapiens
tctaaaatctagatataaaatcaatctagcaacttattaatgaagaaaaaccatgataataatgacaatgaggataataatgatgatggagattatggcagatctttactgataactttttcctacaacaatcactacttaccttactaatgtaacattctcacccatccaggaaagaatcagcaactgagatattaaacttaaaaattgtatcaaagagtccatgctatagctttttaaacttttttctcrattaattgtaatgttttccaatgcatagtggattgaagtagtgctttgatgtaaatgctttggattgaaataattattctaataacaacagaaaataaaagatgacagtgtttccggaagaaaaaatatatagttgcaaaaatttgaaaatcactacaatgtgtagagcaagtatctccatttaattcaatcatgaatgcagtcatcacaataaactaatgaacatgcatgctgttcatgctgagtttgaaaaatagtgaaaaatctattttgaacactttatttttaaaccaagaattcatgtaaaacaatcagaaattatttta

SEQ ID NO: 640223 - DNA, 600 bp, Homo sapiens
ataggcataaattatgaactattaccacttacaacattttaaaatgtttattgcactacacaattgtctataacatacttttcaaacctagatgcttgtactaacatatagcttttcatttcaaagttraaaatagacgttcagttttattacaacttgacaaatggagagttattatgactttacacagatgtcaggaaaagaaaatataagacctgttagtgattatagagtacatttattataatttggtcattttgcttcagcctgataaaccatattatttatctattgtgttaggttgcaaatattctggattgtttcagcattgttaataacttagaaaataaagtatttgaataaacaaagttattctaaggtccatatcatttgttctgaaatttcccatttattaaggcagttttctctctgacagtttgatacttctgaggtttctctagcaaccatatatatatatatatatgtctatatatatgtctatatatatgtctatatataatgtctacatatatatatctctctatatatatatttatatatatagttctatagggcttaaggaccacacatacaggaaaa

SEQ ID NO: 640224 - DNA, 607 bp, Homo sapiens
acatatagcttttcatttcaaagttaaaaatagacgttcagttttattacaacttgacaaatggagagttattatgactttacacasatgtcaggaaaagaaaatataagacctgttagtgattatagagtacatttattataatttggtcattttgcttcagcctgataaaccatattatttatctattgtgttaggttgcaaatattctggattgtttcagcattgttaataacttagaaaataaagtatttgaataaacaaagttattctaaggtccatatcatttgttctgaaatttcccatttattaaggcagttttctctctgacagtttgatacttctgaggtttctctagcaaccatatatatatatatatatgtctatatatatgtctatatatatgtctatatataatgtctacatatatatatctctctatatatatatttatatatatagttctatagggcttaaggaccacacatacaggaaaacatctattgcttaatataaagtcgggaatctgtctcttgttagagataggcgatcagagatggaacacacaatcaagtatcattttactctcttaaaaacagggtgtaat

SEQ ID NO: 640225 - DNA, 607 bp, Homo sapiens
acatatagcttttcatttcaaagttaaaaatagacgttcagttttattacaacttgacaaatggagagttattatgactttacacagatgtcaggaaaagaaaatataagacctgttagtgattatagagtacayttattataatttggtcattttgcttcagcctgataaaccatattatttatctattgtgttaggttgcaaatattctggattgtttcagcattgttaataacttagaaaataaagtatttgaataaacaaagttattctaaggtccatatcatttgttctgaaatttcccatttattaaggcagttttctctctgacagtttgatacttctgaggtttctctagcaaccatatatatatatatatatgtctatatatatgtctatatatatgtctatatataatgtctacatatatatatctctctatatatatatttatatatatagttctatagggcttaaggaccacacatacaggaaaacatctattgcttaatataaagtcgggaatctgtctcttgttagagataggcgatcagagatggaacacacaatcaagtatcattttactctcttaaaaacagggtgtaat

SEQ ID NO: 640226 - DNA, 616 bp, Homo sapiens
atggaacacacaatcaagtatcattttactctcttaaaaacagggtgtaattaaccattatttaggttcagtaaaaataacttattttaaaatttcaacaattagtttggcatcttgtctttattgtgatatttttattgaaagtttcatcaaccctagtaatataattgactcatcactgattataasaagtagcctagagcagaaagcagagtaaggagtcctaggtctccaatctggttctactttttctttgttgttttataatatgtgaaaagcctacatctctgaaactcagtttaattctctgaaaatagagataatggtatctacttcgggggaagtggttaggagtaggattaattcaggtagtatctatcatatctgtagataaactaagtacataataatttgtcaatatttttatttttgtggttttataaatttagccatcatggaataattgaaattgaaagaacgtaaatttatatatgatgccaatatgagaaagataatatttcagctgtagagtaacagtcaaatcatctctttatacagccttatgatgtcaggtcatagatattaagataaattttccacaccatacattacaaca

SEQ ID NO: 640227 - DNA, 616 bp, Homo sapiens
atggaacacacaatcaagtatcattttactctcttaaaaacagggtgtaattaaccattatttaggttcagtaaaaataacttattttaaaatttcaacaattagtttggcatcttgtctttattgtgatatttttattgaaagtttcatcaaccctagtaatataattgactcatcactgattataagaagtagcctrgagcagaaagcagagtaaggagtcctaggtctccaatctggttctactttttctttgttgttttataatatgtgaaaagcctacatctctgaaactcagtttaattctctgaaaatagagataatggtatctacttcgggggaagtggttaggagtaggattaattcaggtagtatctatcatatctgtagataaactaagtacataataatttgtcaatatttttatttttgtggttttataaatttagccatcatggaataattgaaattgaaagaacgtaaatttatatatgatgccaatatgagaaagataatatttcagctgtagagtaacagtcaaatcatctctttatacagccttatgatgtcaggtcatagatattaagataaattttccacaccatacattacaaca

SEQ ID NO: 640228 - DNA, 456 bp, Homo sapiens
aggagactctgggtattatacgatctaaaatgtgatactgtaaaatgtgaactttagaaaagtgttaatccatattacagagtttctctcatgtcatagccacaacattgttcaattatcactcattcctaaatyctcatattggaagttgtcagctgtatgtaccaacacttaaaagagattgagaagtggccaggatctagaagatgcagtgatgataagtaaaattaacatgtatagactaattgtgagaagaatgaaagccgtttaaggcttaccctttggtgactatgcccatctcaagctggagttgctgtctgttccagtttacagtcacgatggagcaaggagtaacaagagacacacacatgagtgaccagatcccatatgcatatccctgcctgtgatggctcatacggagtgtcaacttgattggattgaaatatgcaaagcatt

SEQ ID NO: 640229 - DNA, 533 bp, Homo sapiens
gactccaagtttttcagcttttggactcttggatttacaccagtgatttgccaggggctctcaggcctttggccacagactgaaggctgcactgtcagcttccctacttttgaggttttgggactgggactggcttccttgctcttcagcttgcagacggcctattgtggaacttcaccttgtgatcgatctggtgaatcaatattccttaataaactccccttcatatatatatatatatatatctcccattagttctgtccctctgcagaaccctcatacactgccttgattgtgtaataacaacactccccctgataaacgagctcagaaactgaccaataagatgacttcttgtattgtttatctattactgcatagcaaattaccayaaaaccttgtggcttaaaataacaaacactatttcacacaggttctgagcttcagaaacccagaagcaacctatttggtggttctggctaatgttacctgtgaggttgtggcaagatacagaccaggtctgcaggaatttg

SEQ ID NO: 640230 - DNA, 567 bp, Homo sapiens
aattctggcaattttgcttatttccaagaaaagttttacttagtaattaaagaggacttggcaaggccacagagagagaaaacagcctgtctacaacttttcctttttcttttttctttcctcaaatttctttacatttgtttcttattctcttcctctccacttgatcttaggaactacagaaataaaatatctataatggaagatggattctcctttccctaaaawctttggcatcaatgtactcccaggaactggtgagagaagagagacagaccctcttatattgttttatattgttttatactcatagaagaaaagaaaagtgaaacaaaaggcaggtagcccggtgcctaggaaccagaccggaaaccaaggaaccagacccgaaatcaggcctgggcctgcctgacctaagcctggtagttaaagatcaacccctgacctaatcggttatgttatctatagattacagacattgtatagaaaagcactgtaaaaatccctatcctgttttgtttcgatgtaattactggtgcatgcagcccccagtcacgtatcccctgc

SEQ ID NO: 640231 - DNA, 599 bp, Homo sapiens
ttaagggccctggcagcaacggccctgttagcacaagaagcagataagctaattcttaggcaaaacctaaattccccccatgctgtggtgactttaataaataccaaaggacatcattagctaatgaatgctagactaactggatacgaaagcttgctctgtgaaaatccccacataaccattgaagtttgcaacaccctaaaccccgccaccttgctcctggtatcagagagcccagttaaacataactgtgtagaagtattagactcagyttattctagtaggcccaacctccgagaccatccttaaacatcagtagactgggagctgtacatggaaggaagcagcttcgccaacccctgcaaagtgactctgaaaaagacaagccttgctccagtcacacccggaagctgactggtccatacatggccaaagcatgagaaaactcatcgcgggactcattttccttaaaatttgggcttgtacagtaagaacttcaactgaccttcctcagactgagggctgttcccagtgtatacatcaagtcactgaggtaggacaaaacgttgctacggtcctattattttacagttattata

SEQ ID NO: 640232 - DNA, 599 bp, Homo sapiens
ttaagggccctggcagcaacggccctgttagcacaagaagcagataagctaattcttaggcaaaacctaaattccccccatgctgtggtgactttaataaataccaaaggacatcattagctaatgaatgctagactaactggatacgaaagcttgctctgtgaaaatccccacataaccattgaagtttgcaacaccctaaaccccgccaccttgctcctggtatcagagagcccagttaaacataactgtgtagaagtattagactcagtttattctagtaggcccaacctccgagaccatccttaaacatcagtagactgggagctgtacatggaaggaagcagcttcgccaacccctgcaaagtgactctgaaaaagacaagccttgctccagtcacacccggaagctgactggtccatacayggccaaagcatgagaaaactcatcgcgggactcattttccttaaaatttgggcttgtacagtaagaacttcaactgaccttcctcagactgagggctgttcccagtgtatacatcaagtcactgaggtaggacaaaacgttgctacggtcctattattttacagttattata

SEQ ID NO: 640233 - DNA, 599 bp, Homo sapiens
ttaagggccctggcagcaacggccctgttagcacaagaagcagataagctaattcttaggcaaaacctaaattccccccatgctgtggtgactttaataaataccaaaggacatcattagctaatgaatgctagactaactggatacgaaagcttgctctgtgaaaatccccacataaccattgaagtttgcaacaccctaaaccccgccaccttgctcctggtatcagagagcccagttaaacataactgtgtagaagtattagactcagtttattctagtaggcccaacctccgagaccatccttaaacatcagtagactgggagctgtacatggaaggaagcagcttcgccaacccctgcaaagtgactctgaaaaagacaagccttgctccagtcacacccggaagctgactggtccatacatggccaaagcatgagaaaactcatcgcgggactcattttccttaaaatttgggcttgtacagtaagaacttcaactgaccttcctcagactgagggctrttcccagtgtatacatcaagtcactgaggtaggacaaaacgttgctacggtcctattattttacagttattata

SEQ ID NO: 640234 - DNA, 599 bp, Homo sapiens
ttgtgccagtatcaatagcaatcagcatagaataagatgtggttctttaaattgaaaaagaaaaaatgaaaaaatcctttccaccttcagcaagggaaaagtagcccttcctataccagtggtgagtgtaaccccttagaactagtaataaccaacccccttaatcctcgctagaaaaaagagaatgtataaccctaaaaattgatggagctggactggatcttcaagtaaatatygtggtttgagaaaaagtttataaacgctctcctgagccagtatttcaaaccttctatgaggaactgaatgtgccagtaccagaaattccaggaaaaacaagaaattcgtttttgcaattagccgagcatataccccagtctctcaatgtcactttatgttatgtatcagcacaactgtactatatgaatcattatcaatctattgcacagaaagacataaggagcaaaaataagagtgagaactcccactaataaaaagtgagagtctcaaaggggggaaacgagagaagaaagacagaccctctcatattgttttatattgttttatactcagaaaagaaaagaaaagcaaaacaaaaggca

SEQ ID NO: 640235 - DNA, 515 bp, Homo sapiens
catgtaactatattactatataaatataatttcaatatcaaattttgtttctctatatttaggtttactgttccttcccagacaaaatagattttcctcaggaaatgactcatttcacctagatttaataagttatttacatgaaattatatagtgtattttctaaaaaaaatttcttcttacatattattaagcttttcatatttaatttacatatctcctttaaaaatgttgttatatttttaaaaataaataatttaatgcatttaaacatttacttacaaatacacacaatttgacacaaatgcaaaatgtgatcctatacatamaattttccattccctttttgtacttgtgtgtttctttctcctattctgttacctactttgaccaatgtctcacaaagaaaatgaaaacaattcatctactttttaaaattatcagaatattatgtgtgtgtgagaaatacatatacacatgtacagagttatatatcatgtagctcaaattaatta

SEQ ID NO: 640236 - DNA, 641 bp, Homo sapiens
actggctcccattttgccttccactatgattgtaaacttcctgaagtctttaccaggaacacatgtgggttccattcttgtatagcttacagaactgaggrccaataaacctcttttctttataaattacccaatgttagtattcctctatagcaacaaaacagactattaaaatagtatctaatattatattgtaaatatcaaactcttatctagtgttattattagaatattaattgaatgtggtattttatgcttgtattcatgtttaccaattgattgtatgacactttctactatttaaagagacaagtgtttctgatggggttaatggtagatgataagagaaaagctaaggagaaagaaattcatttttttgtgaaaatcatctattgtttcagtaactgctgtatttgaaaaccctgacagccagttccttcattcaagaacatttattcccatatgttttgtggtcccacatcataaaaattacctattggaagagttattgcttcaggcaataatgagaccataaatctgttagcctcccttaacgtccctggaaacacacaagagctgttggggctatttcttccctgaaaagtgtaaaatcatcatttttgttgatattcatttaaatc

SEQ ID NO: 640237 - DNA, 575 bp, Homo sapiens
attattagaatattaattgaatgtggtattttatgcttgtattcatgtttaccaattgattgtatgacactttctactatttaaagagacaagtgtttctgatggggttaatggtagatgataagagaaaagctaaggagaaagaaattcatttttttgtgaaaatcatctattgtttcagtaactgctgtatttgaaaaccctgacagccagttccttcattcaagaacatttattcccatatgttttgtggtcccacatcataaaaattacctattggaagagttattgcttcaggcaataatgagaccataaatctgttagcctcccttaacgtccctggaaacacasaagagctgttggggctatttcttccctgaaaagtgtaaaatcatcatttttgttgatattcatttaaatcagacaagtttctccacttggggcagaatttctttgatagaaactaaatcatgaggcctccagcccacagcacttggagacactttgattgaacaaagcaattatgttcctgaaaataagattgcttgacaaagaacatccaaagtgcatattat

SEQ ID NO: 640238 - DNA, 573 bp, Homo sapiens
tctctgggaggcacagggtgtgtagcataaggaatttagggggttttcatttcaaattttgctttgtctttctaggtcactgagtagcaaagaataaaagctcataattttctagtctctctttggttaggaagtaaatgataatcacattgagttagataaaaatacaaataaaactttacttgaaagaatgatgtaaggaaaatccttatgttcaagagataaatttaatttatttaactatagtactaaattataattcctcatcccaactacctcatgatttagacagttgagtggtccaaaaggagcttcacgtggtatgaagaccacttaggcattgatttatcagggttagtttcatgcgcgtctgtgtgaagagaccaccaarcaggctttgtgtgagcaacacggctgtttatttcacctgggtgcaggcgggctgagtctgaatagagagtcagcgaagggagataaaggtgggggatttgggttttataggatttgggtaggtaaaggaaaattatagtcaaaaggggttgttctctggcgggcaggggtgggggtcacaag

SEQ ID NO: 640239 - DNA, 570 bp, Homo sapiens
ttttcaacatttatcaaattttattgcattacaagatgcctcagtactatcttctgtatctcctgccccagtcctagaagcagccatttctataagcagccataactccttctattgaacaattatattagaaactatgttgtagttgtcctcattgcttcttggctttctggactgccagrgcaaagaaatgtgtgtgtgtgtgtgtgtgtgtgtgtgtgtgtgtgtgtgtgtgtgtgcgcgcgcgcgcgcgcattaaccaatgaatatgcatatatctataaatttatatatatatataaccatctctatctgcatgaagccaaacatacgtttatactgatgtctttaactctaaagcattagtatgttttattcactagtactttttttttcctttttcttcttctttttttaagttctgggatacatgtgtagaacgtgcaggtttgttacataggtatacatgtgccatgctggacacagggaggggaacatcacacactggggcctgtctgcgagtcggggacaaggggagggagaggattaggacaaatacctaatgcattc

SEQ ID NO: 640240 - DNA, 570 bp, Homo sapiens
ttttcaacatttatcaaattttattgcattacaagatgcctcagtactatcttctgtatctcctgccccagtcctagaagcagccatttctataagcagccataactccttctattgaacaattatattagaaactatgttgtagttgtcctcattgcttcttggctttctggactgccagagcaaagaaatgtgtgtgtgtgtgtgtgtgtgtgtgtgtgtgtgtgtgtgtgtgtgtgcgcgcgcgcgcgcgcattaaccaatgaatatgcatatatctataaatttwtatatatatataaccatctctatctgcatgaagccaaacatacgtttatactgatgtctttaactctaaagcattagtatgttttattcactagtactttttttttcctttttcttcttctttttttaagttctgggatacatgtgtagaacgtgcaggtttgttacataggtatacatgtgccatgctggacacagggaggggaacatcacacactggggcctgtctgcgagtcggggacaaggggagggagaggattaggacaaatacctaatgcattc

SEQ ID NO: 640241 - DNA, 558 bp, Homo sapiens
gctaatctgtgaccaagaaaatacataggcctgagtttaacatgatttttagcttgtttattcaataattaaataattattcattttgcattgacctacttgaataaataaggcatgaggcatttctttaattagttcacaatataagaagaatggtgtattcattaatgaatattaaatgatgggttggataatagaaatatgtatataccaagttggatagaggcacagaggagaagtagttacaatcagttaaatgagtcagagaagattcaaagagaagtgtatatttaaattgtagcatgtaagaaagaagttagctagtatggaaaaagtaaggaatttcagggatggaaacaaaatatggcatggttgagtatatacaagttatgaaatatgtgtggacagttctgtctatgtaggggataagagagttgaagctggagaagacagtaataagagtttgaaggcctagcaaagtatactgatgatcaacagttaaagyaaaaatcacccaaacttcaaaactctctaatgatgtagactgtagagccaaga

SEQ ID NO: 640242 - DNA, 390 bp, Homo sapiens
taaatatgtttgtaatacaggcagattcttttgtcacagtctgcattccatgccagtaatccctracctcccaaatatttataaaattgcatatctaaggtttaaacattttacttcagagttctatggattgtggtaaatatatagtgtcgtatatctgccattagaatatcatatataatagtttcactgccctaaaaaaaatacctatgaatcatctattcaacttttcctccaaagacaggagaataagaaagcttaagatgtgtgcaagtgagtgactaaaatgactataaatggaatctgaacccatctagtttctcacttatatttttaatgttatttatttaattttaaacattttagatgtagttattttatattctatgt

SEQ ID NO: 640243 - DNA, 390 bp, Homo sapiens
taaatatgtttgtaatacaggcagattcttttgtcacagtctgcattccatgccagtaatccctaacctcccaaatatttataaaattgcatatctaargtttaaacattttacttcagagttctatggattgtggtaaatatatagtgtcgtatatctgccattagaatatcatatataatagtttcactgccctaaaaaaaatacctatgaatcatctattcaacttttcctccaaagacaggagaataagaaagcttaagatgtgtgcaagtgagtgactaaaatgactataaatggaatctgaacccatctagtttctcacttatatttttaatgttatttatttaattttaaacattttagatgtagttattttatattctatgt

SEQ ID NO: 640244 - DNA, 435 bp, Homo sapiens
tgatcattgaaattagaaaaaaaaamagcttgattacatactctatgcttaatcagtatcttttgaatgagtaagtttaatggcatgaaacatttcttctcctggattgtttatagtgtgcacactatgccttcctaaaaagccagcaactattatgctgtgatattttaatcatccatcaaatgccacactctatatgggaatgggtgataccatactatataggttaaacaacatcctttttaatgtgtgtcttcttaaaaagacaatgccttatcatagggatgacaagtatatgttagagcctgaactgagttatttttctcacacccacagacaatatcactatagtcatgtattgcatagtaacatttcagttaatgatgaaatgcatatatgactgtagccccataagataataataccatattttta

SEQ ID NO: 640245 - DNA, 464 bp, Homo sapiens
ttcctctgtatctctgtttcttcatttaagggttttaaataatcgatttttaagagccctttatttgtagtctctgtgagtacaggatcaatatttatctgttcatgaccatgtcctgaatagcttatacaatgcttggtatatastatttgtgcattgttttcatgaattgaatttgatgaaaatgtcatgtctgtatgattaggctgttagctaactagtaattcagaactctcctttacacctcttatagtaactattgtaacattttccaaattaaaaacactaaatatttgtttaatgctggtgcttctaattcataatttttccagttctcatatgtatttgaaaaatttgaagttatagtttctatcatgtcagctgtcataagcatctaaatttcgcaaatgtatgtatgtgaacgtgtatttcagatcttgagtctaacagcctttttaacctaa

SEQ ID NO: 640246 - DNA, 544 bp, Homo sapiens
cagtcagctcccccagcaccagtcctgttttcagtaagcaagtccaagcctgaggccttccttcccttccctaaattgttgtaaggaagcagtcagtatcagactgacatctgtgctacaaaaaaacctgctactactatgccaacacaccgggagggttaggtcctcaaagggtgattaggggtgggtataataaataactaagtgtatgtttcttgcctttcacaatgtactacacagtttgatatgaagctatatgggatgttcacaaattttggtgaccagtgcagattatattcatgactagcatttctcaytagagaaaaaaaattagaggaagcaagaaggcttgcctaactgaacagcatctgtgttgtattatttccaccaaacttcctattctgttcatttccgtattccttaaggacatgttttaagaaatgtaagaatatgtcttaattgggtgaattactggttagctacagaagctagactgaatcacaatgttacagtttaattactccaaagtagtaatcctactatg

SEQ ID NO: 640247 - DNA, 596 bp, Homo sapiens
gtttgtccttattggtaaaatgctgataataagactcatctcatagggtgcctgtgaagagcagatgagataaaccacagagaaaaagctttgtaaatggaaaggtgctatacaaaggtgagggattacagttattatttagaacaatatcttatgcctttggcatgtgcatttatggacgtatattgtagtatttaatgtttcaatggattattaaggcacaaaaatgtctgcagtaattgagcaaagacttaggcccatcatgtactgatttagaaagtgaattaatgccctcgggaaaacatgcccaccactccaaagagcacccttgctcttaccaggaagatcccttcttgacctggcttcctccctacctctggsctttggtccatcttgttctttggcctggcttggatgagggggcaggagggtatcatcttactttctattgtaatcccgtccattctgcaaggctcacttttcttttgtccttctgtaaagactttttttgagctctccaggtgaaattttctttccacaattattccgcaaaacgttattgcttttgttagtctgacatttgcttctgtatttct

SEQ ID NO: 640248 - DNA, 631 bp, Homo sapiens
ggattcaatgggtggtcttctatccaccattggtgagatctgtatttgttctgtgcatccagtcaagaggaacagaataaaggcactacaagatgggattattgaagatgaaaggtcctaaaaagcaaagaaaaacagaatacagagcacaactagaggggcatatttaataggaatcttagttgcaagtgacagaatacctcatctacaaacttaggccaaaatgggaatacattggcttacataaccagttaaagtaggaatgtagctggcaatggctgtacccagagactcgatgcctccagaatcatgggctcatttttgctgctctctaggtaccttctgtatgctcttctgtcatataaagactagcataggctagactcattctaaatattgcctctgrtacatatcttttcaacttttccatcagaaaagaaagggtttctccccaactccagttaaatgctataaggactctgattggcccagtctgtttagtgttctgccctatggttggggtaaaagggagaaggtgaagcattgtgattggtagtttccattagaaacatatggatggatggaggagcacttcctcagtcccacacagaaggaatggtactttcaccaa

SEQ ID NO: 640249 - DNA, 500 bp, Homo sapiens
aaaaaaaaaaagaaagaaagaaaaaagataatgtagccctgcagaaaaaaagaaaacacatgtaaggctgggcatcccagtaattccacctgtaatctcagtgctttgggaagcagaggcagtatcacttgagcccaggagttgaagagcagcctgggcaacatagggagaccttgtctttacacgaaatttaaaaattagcctggaatggttgtgcacatctgtggtcccagctacttggcaggctgagttgggaggatcacttgagcttgggaggtcaaggctgcagtgagctgtsatcacgacactgcacttcagcctggaaagtagagcaagatgctgtctcaagaaagacagagagagagggaaggagggaaggaaggaaggaaggaaggaaggaaggaaggaaggaaggaaggaaggaaggaaggaaggaaggaaggcaggcaggcaggcaggcaggcaggcaggcaggcaagcaagcaggctagcaaggcaca

SEQ ID NO: 640250 - DNA, 500 bp, Homo sapiens
aaaaaaaaaaagaaagaaagaaaaaagataatgtagccctgcagaaaaaaagaaaacacatgtaaggctgggcatcccagtaattccacctgtaatctcagtgctttgggaagcagaggcagtatcacttgagcccaggagttgaagagcagcctgggcaacatagggagaccttgtctttacacgaaatttaaaaattagcctggaatggttgtgcacatctgtggtcccagctacttggcaggctgagttgggaggatcacttgagcttgggaggtcaaggctgcagtgagctgtcatcacgacactgcacttcagcctggaaagtagagcaagatgctgtctcaagaaagacagagagagagggaaggarggaaggaaggaaggaaggaaggaaggaaggaaggaaggaaggaaggaaggaaggaaggaaggaaggaaggcaggcaggcaggcaggcaggcaggcaggcaggcaagcaagcaggctagcaaggcaca

SEQ ID NO: 640251 - DNA, 500 bp, Homo sapiens
aaaaaaaaaaagaaagaaagaaaaaagataatgtagccctgcagaaaaaaagaaaacacatgtaaggctgggcatcccagtaattccacctgtaatctcagtgctttgggaagcagaggcagtatcacttgagcccaggagttgaagagcagcctgggcaacatagggagaccttgtctttacacgaaatttaaaaattagcctggaatggttgtgcacatctgtggtcccagctacttggcaggctgagttgggaggatcacttgagcttgggaggtcaaggctgcagtgagctgtcatcacgacactgcacttcagcctggaaagtagagcaagatgctgtctcaagaaagacagagagagagggaaggagggaaggaaggaaggaaggaaggaaggaaggaaggaaggaaggaaggaaggaaggaaggaaggaaggmaggcaggcaggcaggcaggcaggcaggcaggcaggcaagcaagcaggctagcaaggcaca

SEQ ID NO: 640252 - DNA, 551 bp, Homo sapiens
agaagaaaacttatgtcaaatgtcataacaaaggccatagagtagagcgtggtcctttcactatgttagtgcccttgtgggagcagcaaagctgaacaaggcatcrgcactaagggtagtcttcagtgagtccacagaaaagaaattctcaattctaaaatggagaggtagcataactttcaagtggcaacaaactctctgacacacttcttatcaagaggtggagtctattgctccttcccttgaatttgggctgccttatgattgttttgctctctagagtatgtgaggggagacactacactctctccagacctactgaaccttcaagagaatgtggtccccgggagccctgggctgtcaagtaagtccaactaccatgctggagagatcacacagagaagctctgagactacttggaagtagagaactcatccagccatccttatcaaggtgccagcaaagggttgaggactagctaccagctaaaaccaccaagtgacccagctgatgtcaatcagccaatccttgcctgaatacctgacaaaatt

SEQ ID NO: 640253 - DNA, 595 bp, Homo sapiens
acaaatatcctggttaatcactcttcagttctgctttctgcaaagtcccagaacatggacgtaattcagccaagttctttgccgctttgtagcaaagatgacctttcttccagtttccaatgccttttcttcatttttaagaccttattagaatgggctttactgcgcatagttctaccagcattctgatcatgaccacttgagtaacctctgagaagaatgaggcttaccttacagctaccctcctcttctgagccttcaccagaatcatcctaatgttctgttcatggcaatactccatgtttacttcaagactcttccagcctctacccattacccagttataaagctgtttccacagttttaggtatttgtaatagyaacatcctacttctctggtaccaatttctgtcttcatccttttgtgctgctataacaaaatatcacaaactggggagtttgtaaaacacacaaatttatttcttacagtactgcaggctggaaagtccaagatcaaggtgctggcaggttcagttgtctgctgagggctgctctctgcttccaagagggtaccatgaatgctgtgtcctctgaa

SEQ ID NO: 640254 - DNA, 532 bp, Homo sapiens
taacatgaacaaaagagtgttcttttttcttccaagggatgactctgtcctcctgcttgaaatacccttcacgtgtcctccgagaagccactcttttttggggactcttcgaactctgaccattcctctgttggtttcttcccatcccctaacctctaaatgctgaagttcctcaggatactcacctcttctctttatctaaagaaatgcctggaaatctcatctccctcctggggttgaagtaccacctactcacagatggctccctaatttatctctgtagctcaggcctctgcctgaatttctaactcacatacccaattgcttcttcaatatctccacttgcttttcaatacgaatctcaaacttcacatttctaaagggaaacttggttctgctgcattcccaattcctccccatcttaataagtggtaactctcccattctcccaatttgtcakgcccaaagccttgaagtcttctttaactcatatttttctcacatatctgagacctaacccatcagcaaagtt

SEQ ID NO: 640255 - DNA, 594 bp, Homo sapiens
acttccgtagttttattatgtttattttcaactgagggtaattgtctgtagctttctctgcgactagtctatgcmcctcccctgtctttgccccttgaaaaactgaatgttggttacacgtgtagagagagcagataagacaatgaagatctggtacacaaatgctcctggacattgtataaacattcaaaatatcgcacacaaacattgcacttccaagggcataaccacactattttttattctttttaattgaggtataatttacatataataaaatacataaatcagtctgggcgcagtggctcatgcctgtaatcctagcacttgagcccaggagtttgagaccagcctgtgcagcatggtgaaactccatctctacaaaacaaaaaaaaaattagccaggtgtggtggtgcatgcctgttgtcccagctactcaagaggctgaggcaggaggattacttgagcccaggaggttgaagctgtggtaagccatgatcaagccattgccctccaacctgggcgacagagtgaaaccccatctcaataaaaacaaaaacgtggatcttaagtgcaagctcaatgaattttga

SEQ ID NO: 640256 - DNA, 594 bp, Homo sapiens
acttccgtagttttattatgtttattttcaactgagggtaattgtctgtagctttctctgcgactagtctatgcacctcccctgtctttgccccttgaaaaactgaatgttggttacacgtgtagagagagcagataagacaatgaagatctggtacacaaatgctcctggacattgtataaacattcaaaatatcgcacacaaacattgcacttccaagggcataaccacactattttttattctttttaattgaggtataatttacatataataaaatacataaatcagtctgggygcagtggctcatgcctgtaatcctagcacttgagcccaggagtttgagaccagcctgtgcagcatggtgaaactccatctctacaaaacaaaaaaaaaattagccaggtgtggtggtgcatgcctgttgtcccagctactcaagaggctgaggcaggaggattacttgagcccaggaggttgaagctgtggtaagccatgatcaagccattgccctccaacctgggcgacagagtgaaaccccatctcaataaaaacaaaaacgtggatcttaagtgcaagctcaatgaattttga

SEQ ID NO: 640257 - DNA, 557 bp, Homo sapiens
ttaataccgaaaaaataaacagcccataattccagcaccaccaacawaaaaaagccctcaagattaaaacaattaataaaagtaatgcaagaatagcatgaggtatttcaaacattatagaaaagcatttggaaaagctctgatctccacccttcatcaaaagttgttcattactaagtaaaccctgctgggtattccccattggctccttcagatcttccctccactttgccatcctaccctgagtccctggaggctgaactccatgggcaacatcaatggctcccttgctgtctagtgcccactgtgttctgccaaagggaggtgctaccagcagaagggaaggcaagtggtgggttgggtaggggtatctactcccctggctcactctctccgttacattgtctgagatagctggatctgaggcagccttctcctagagctagctacccttcccaagagcaggaactgctcctttcccttgctacttcaggcctagatgttcacagttcccagctttggcttgcccctgcttgcttcagcacttctgtttggtt

SEQ ID NO: 640258 - DNA, 624 bp, Homo sapiens
tatagacaagaagagctttgctaaagctccacgtggagaaaaaacaagctggaaaaagtggatccactgcttgaagacaaaggtataaagttgacataagacagagaaggtcaaggggactttgacatttataagagtctgctatgtgcmaggcattgtgttaaacacttaaccgacattaattctcacattagccacatgaagttatgtgcttggcataattcgcagatgaggaaactgacaggtctgagatttaaatccactatctctttgagttccaaatcccaaaacccagctctcagtctagaagtctggtcttcagacatgagtgggtagaatcaacatggctatggtgaagctgaagcccaaagaagacaagaaaataggcagcaaacaactattttaagtgttcaaatccctaaatccagacaaaccacatggtggagtgtgaagaaactcagatgtgttgccagagccaccattttatttaaagaactgtagaaagaaccagagatgtttaccgccaagaggcaaaggcctgagaggaagagacaggcgagaactctagggagaaaaccatctctggagctccagaagatggatgctgagccaggggatggagct

SEQ ID NO: 640259 - DNA, 624 bp, Homo sapiens
tatagacaagaagagctttgctaaagctccacgtggagaaaaaacaagctggaaaaagtggatccactgcttgaagacaaaggtataaagttgacataagacagagaaggtcaaggggactttgacatttataagagtctgctatgtgccaggcattgtgttaaacacttaaccgacattaattctcacattagccacatgaagttatgtgcttggcataattcgcagatgaggaaactgacaggtctgagatttaaatccactatctctttgagttccaaatcccaaaacccagctctcagtctagaagtctggtcttcagacatgagtgggtagaatcaacatggctatggtgaagctgaagcccaaagaagacaagaaaataggcagcaaacaactattttaagtgttcaaatccctaaatccagacaaaccacatggtgragtgtgaagaaactcagatgtgttgccagagccaccattttatttaaagaactgtagaaagaaccagagatgtttaccgccaagaggcaaaggcctgagaggaagagacaggcgagaactctagggagaaaaccatctctggagctccagaagatggatgctgagccaggggatggagct

SEQ ID NO: 640260 - DNA, 624 bp, Homo sapiens
tatagacaagaagagctttgctaaagctccacgtggagaaaaaacaagctggaaaaagtggatccactgcttgaagacaaaggtataaagttgacataagacagagaaggtcaaggggactttgacatttataagagtctgctatgtgccaggcattgtgttaaacacttaaccgacattaattctcacattagccacatgaagttatgtgcttggcataattcgcagatgaggaaactgacaggtctgagatttaaatccactatctctttgagttccaaatcccaaaacccagctctcagtctagaagtctggtcttcagacatgagtgggtagaatcaacatggctatggtgaagctgaagcccaaagaagacaagaaaataggcagcaaacaactattttaagtgttcaaatccctaaatccagacaaaccacatggtggagtgtgaagaaactcagatgtgttgccagagccaccattttatttaaagaactgtagaaagaaccagagatgtttaccrccaagaggcaaaggcctgagaggaagagacaggcgagaactctagggagaaaaccatctctggagctccagaagatggatgctgagccaggggatggagct

SEQ ID NO: 640261 - DNA, 528 bp, Homo sapiens
aaaggttaggggatggggaagaacaacgtagaaaagactgaggaggaactgtcagtgaggtaggagaaccaagagtgagtggttccccaaggactagtgaagaaactacctcaaggtgaagaygtgatccactgtggctaaaaatcaatcataaaagaccttctggcaatgtgaaggtctttttcaacctccactggggctgcggactagtggaatagtgagaacaaagactgagtggattcaagaaagaacaagaagagagaaaacaaacaacacatagacaactctgtcagtgaactttgctggaaagaagagggcagaagtggggtagtaacttcagaggcatgtagggtaagggaagatgaattttttttgcttggttgatgatggcttggttggtttgttggttggttggttgaaagatggaggctatgccatcatgttctcaggctggcagggatgatccagtagagcagtgttacatgtaatataatagacagagacagcattgctgaaggcatgcccttg

SEQ ID NO: 640262 - DNA, 555 bp, Homo sapiens
cttcattaggggaatgtgatggtaaatattgagtgtcaacttgattggattgaaggatgcaaaggattgttcctaggtgtgtctgtgagggggttgccaaaggagattaacatttgagtcagtgggctgagagaagcagacccaccttcaatctgggtggacatcatctaatcagctgccagtgtggctaggataaagcaggactagacttgctgagtcttctgccttccatctttctcctgtgctggttgcttcttgccctcgaacatcagactccaagttcttcagcttttgcactcttggacttacaccagtgatttgccaggggctctcggaccttccgccacagactgaaggctgcactgttggcttccctacttttgagattttgggactcggactggcttctttgctcctcagcttgcagactgcctattatgggacttygccttgtgattgtgtgcgtcagtactgcttaataaactccccttcaaatatacatctatcctattggttcggttcctctagagaacccggactaacacagagaaatat

SEQ ID NO: 640263 - DNA, 555 bp, Homo sapiens
cttcattaggggaatgtgatggtaaatattgagtgtcaacttgattggattgaaggatgcaaaggattgttcctaggtgtgtctgtgagggggttgccaaaggagattaacatttgagtcagtgggctgagagaagcagacccaccttcaatctgggtggacatcatctaatcagctgccagtgtggctaggataaagcaggactagacttgctgagtcttctgccttccatctttctcctgtgctggttgcttcttgccctcgaacatcagactccaagttcttcagcttttgcactcttggacttacaccagtgatttgccaggggctctcggaccttccgccacagactgaaggctgcactgttggcttccctacttttgagattttgggactcggactggcttctttgctcctcagcttgcagactgcctattatgggacttcgccttgtgattgtgtgcgtcartactgcttaataaactccccttcaaatatacatctatcctattggttcggttcctctagagaacccggactaacacagagaaatat

SEQ ID NO: 640264 - DNA, 513 bp, Homo sapiens
cacatttgtcaatcaaaaacccagaagtttggactagatgtcagcacacatgtagatatttggaaatacccagctttctggtgattatagccaaatgcycaacagcatttgtatataggagtgcatgcatgtgccttgtaaataatgcaaacatgtaccatgtaataattatttttatgagctattcttcttccatgagaacacaaattatcaaaattctttgctatttttatacattagtttattacttctcctcaattaatgtggtgaaatttatatctttgcacatgtccaaggtaataacccctgcggctcaaggcaactagataaggccttaaagaaatcagactgtgaacaaggcagaagtttaataaaatttgaaacttacagctattaagctatatgaaacctcatgctcacaaatatcaggcaaatatcactacagaattattccatgtaagaagcgctggtaaaaactttatatcccatttttgtgacaggtttaaagactat

SEQ ID NO: 640265 - DNA, 623 bp, Homo sapiens
gtagtctgagggtgggggctagagaaacaggagacttgtcctggccaagctaaaggtaaaacaaagaaagcatgagcctgaacacctggagagtagttttcatgctactttgtagtccattgaacaagtcactttcacatcctcttgccgcagtcggtctgtctctttctgtcttctacagccctcgtaatcacctcaaatggatcatgtgtccagttgcataattacttattagttacttgtttctgaccctctcamtccctagactatgagtacctaaagtgaggggaccatgtcttcctagcatggtgcctagcatgtcatgagtgcccacaagggtgttgagtgcttttcaatgaattcaacaattctgtgtcagtttcttcccctgtaaagtggaagtttgtccatttatccactcacatacttactcactattcactgtacagcctgcaaggttaagtgttgtatgaggcacagagatgcataatctgcaacttacgtaaaacaatattccctgcctacctctcagaatcataaagaataacaaaaagatcatgtgtatgaatgagcttcagaaactataagtgctaccagaggtaagggacgatgttacttttaca

SEQ ID NO: 640266 - DNA, 623 bp, Homo sapiens
gtagtctgagggtgggggctagagaaacaggagacttgtcctggccaagctaaaggtaaaacaaagaaagcatgagcctgaacacctggagagtagttttcatgctactttgtagtccattgaacaagtcactttcacatcctcttgccgcagtcggtctgtctctttctgtcttctacagccctcgtaatcacctcaaatggatcatgtgtccagttgcataattacttattagttacttgtttctgaccctctcactccctagactatgagtacctaaagtgaggggaccatgtcttcctagcatggtgcctagcatgtcatgagtgcccacaagggtgttgagtgcttttcaatgaattcaacaattctgtgtcagtttcttcccctgtaaagtggaagtttgtccatttatccactcacatacttactcactattcactgtacagcctgcaaggttaagtgttgtatgaggcacagagatgcataatctgcaacttacgtaaaacaatattccctgcctacctctcagaatcataaagaakaacaaaaagatcatgtgtatgaatgagcttcagaaactataagtgctaccagaggtaagggacgatgttacttttaca

SEQ ID NO: 640267 - DNA, 671 bp, Homo sapiens
cttggagtatttgagaagttgaagaagaccagtgtgactagaacctagtgagcaaagtagcgagataaagagccttatagaccaagatgaggaagaaaagagtgggtgtcttacagacccaggtaaaaactcaattttattctaaatgtagtaggaagccactgaacagcttaaggggggatattagtgatctcgtttgtgttttgagttatttaaaggaatgttctggcttctttaagaatgatgtaaggsgtgtaagagatgaagcagttaccaggaaggattctgggaaagaggacggtggcttctgaatggtggtcatggggaggtcattgccatgacttgctgatgaagtggatgcaggtgaagaggcagaagtagtaatcccacataactgctgggttctagtttgaataattgggtatatggtgataccattccctgagaaacttagatttgagaatgatgtggggatgcggaagggtttagagatcacttctaatgtggtgagtttaaggtaatcatgagatatccaagtcagtctatcaagtaggtggttgactgcataaatctagtgctcagaggagaagactaggtaggctgtaaaaatttagaaattgctggccactagatatttaagtctatgaagagaatatacaaggaagagcaag

SEQ ID NO: 640268 - DNA, 465 bp, Homo sapiens
gtgttactctggctattgaaagaagagtgggtggttcattgcccaaatgattctgatatttgccttaccataccctcctggccctgctgggtagacctggttgttaatagcctgggatccattaccagctgaattttcatgctttcccaatttgaacatggagcmtggtgtagtgcaatgcatatgcatgaggtttgggaccaaataaccaagggttcaaatcctggctcttctcctgagtaattttgttgccttggacaagtcatttaacttttttaagctccatcgtcctcatgtgtaaatcaaggagatctcatacatattaaatatatatgttttatatactgtatgctctataatcaataactattatcatttataccaaaccccattatacccctcattcaagtctaaattccaactaaatctctcaaaggctatcttgctgaaatactcttttgggag

SEQ ID NO: 640269 - DNA, 465 bp, Homo sapiens
gtgttactctggctattgaaagaagagtgggtggttcattgcccaaatgattctgatatttgccttaccataccctcctggccctgctgggtagacctggttgttaatagcctgggatccattaccagctgaattttcatgctttcccaatttgaacatggagcctggtgtagtgcaatgcatatgcatgaggtttgggaccaaataaccaagggttcaaatcctggctcttctcctgagtaattttgttgccttggacaagtcatttaacttttttaagctccatmgtcctcatgtgtaaatcaaggagatctcatacatattaaatatatatgttttatatactgtatgctctataatcaataactattatcatttataccaaaccccattatacccctcattcaagtctaaattccaactaaatctctcaaaggctatcttgctgaaatactcttttgggag

SEQ ID NO: 640270 - DNA, 608 bp, Homo sapiens
ttccattctctgctacaaccttaagaacctgagactgttctgcaagaggaacaagaagacataatgttttttcttccttaaataacagacaacaccaagctcagagaaggctaagctgtacaggtggagattgtctacgaccatttgaggttttagacactgagagattaaaagtcaacaccatgcttctttttctgtcagtcctgactattgggcttcagagtaactatttatttcttcaatgagaggcccttatggagaagccacatttgcagaaagaatttatgacatttctgtaccattgggttaaatcagagagatgttctctagttaactgaccgaagcctgccatctcatgtcattttcacttttagatttcctggaacctctttctttcattaaaaaaagaacaaattcctatagtttattgtttatatacattatggaaaaatcagaaagtaacagggaaaaaaygggggaaaaaagtaaaacttctgtcatatattcccttaacagatatttattgagggcccactacatgtcagggtgatgctgcagttgtctattgctgtgtaacaaactacctacaagcaaagtggctgaaacaa

SEQ ID NO: 640271 - DNA, 608 bp, Homo sapiens
ttccattctctgctacaaccttaagaacctgagactgttctgcaagaggaacaagaagacataatgttttttcttccttaaataacagacaacaccaagctcagagaaggctaagctgtacaggtggagattgtctacgaccatttgaggttttagacactgagagattaaaagtcaacaccatgcttctttttctgtcagtcctgactattgggcttcagagtaactatttatttcttcaatgagaggcccttatggagaagccacatttgcagaaagaatttatgacatttctgtaccattgggttaaatcagagagatgttctctagttaactgaccgaagcctgccatctcatgtcattttcacttttagatttcctggaacctctttctttcattaaaaaaagaacaaattcctatagtttattgtttatatacattatggaaaaatcagaaagtaacagggaaaaaacgggggaaaaaagtaaaacttctrtcatatattcccttaacagatatttattgagggcccactacatgtcagggtgatgctgcagttgtctattgctgtgtaacaaactacctacaagcaaagtggctgaaacaa

SEQ ID NO: 640272 - DNA, 608 bp, Homo sapiens
ttccattctctgctacaaccttaagaacctgagactgttctgcaagaggaacaagaagacataatgttttttcttccttaaataacagacaacaccaagctcagagaaggctaagctgtacaggtggagattgtctacgaccatttgaggttttagacactgagagattaaaagtcaacaccatgcttctttttctgtcagtcctgactattgggcttcagagtaactatttatttcttcaatgagaggcccttatggagaagccacatttgcagaaagaatttatgacatttctgtaccattgggttaaatcagagagatgttctctagttaactgaccgaagcctgccatctcatgtcattttcacttttagatttcctggaacctctttctttcattaaaaaaagaacaaattcctatagtttattgtttatatacattatggaaaaatcagaaagtaacagggaaaaaacgggggaaaaaagtaaaacttctgtcatatattcccttaacagatatttattgagggcccactacatgtcagggtgatgctgcagttgwctattgctgtgtaacaaactacctacaagcaaagtggctgaaacaa

SEQ ID NO: 640273 - DNA, 616 bp, Homo sapiens
cttaacagcgagtttggactrtaattttttccatactattgcctgtttcaactttctctctttcattaaacaaacaaacaaaaaaaaacaacaacaaaaagagggaagagagagagagacagtctctctatgttgcctaggctggtctcaaacttctgggctcaaatgatccttctgcctcagcctctcaagtagctaagactacaggtatgagccatcatgccagactcaactttcaatatagtgatgtaagttttgttggttattgaatgtgttatcctcttcaagatctctattaggatgcaattggtgaaaatgaggcataggcagaagacagtaaaaaggaaaagtggaaggaactgagtgaatattcagatttaggaagcaaaaacttgaagatgagtgctatcacaaactaagtggggaaagtgaggatcaagagctgtttaagtaaatatggctggtaaagaaaaagttaagttctatttagatatgtgtttgagttgctgagatagctagtggaagtgtccagtagacagttaggattttgatttagaaattaagtagttgtggccagaaatacttccacgggaaccatctgctcacaatcaaaact

SEQ ID NO: 640274 - DNA, 508 bp, Homo sapiens
cctttgaattttcactagcagctggaatgcctccattttgaacactccactgctcaggtagctgctgatttcctggctactaataccactgtttcacacataatggcgaacagactgaagagatcaaattaaatccatttccactttaggatgggaaatctgtttggaacaatcaagcaggtttggggcagcaagcatgggttttcaattgccatcaaatgggaaattgcttcatgtcaattggcattaagtggaccgatttgtrcccaattaatataccgtggttggaaagaaagaaaacaatttcatttagctagattgctcttctctgggttcttcctgcgtggatctccaagcagtctgcagacattccctcttattcaaccaatcccctcccccattgtgagccacatcctcccttgttgagaatgacaagttgggagcagctcactttagcttttttcatgcctcagaatcccatttagtgaatggctactgcagggtccca

SEQ ID NO: 640275 - DNA, 557 bp, Homo sapiens
tgttgagaatgacaagttgggagcagctcactttagcttttttcatgcctcagaatcccatttagtgaatggctactgcagggtcccaaatgaaacacattagtggcgtacaagagttaatacagctttcagtagcattttatccccaactagagctcagctctggccttggataaagctagcttactcctagccattagactgaaatattgggccaagacactcccagaattttcctggaagatgcctgctggagaatccaagggatcaaaatagtgctgggatgacaagtcagatgtgtgaagacctcagtgactctgtaaaatctggaagcccccctgacaatgacaaacaaccacygaggaaacacaggtcacccaatcactgccagctgaagcgctggcacagaaacccagctaaatccatgctccagagactccccaaatgaaagaacactgtgtgagcccatgctggccaatgggagctggatgaggaaagatagtagcctcgttttcacatccatagattttatgctccctttggttggtaatttacat

SEQ ID NO: 640276 - DNA, 571 bp, Homo sapiens
tcccctcttgctacattgttgtcctttcttcagacacaccaagcattctcctatcacagagcctttgcatatgcttttccttttgcctggaaagctttttcctcatatatattttcatgggtcacttaccttttttcaagtcaagtagttatttgcaagcaaaagcattccctgaccatcctatctaaaatgcttatgtaaccatcactaccctgatctctttatatcgcttgacaatataatctccatgagtttaagaatcttgtccttttccactggggtacccctaaaactttaacagrccctcagcccatagttggtgctcaataatatttgttgaataaatggatgaatctattcctccagatgcaaagattcaacatgacaaagcagctactgtcaacaaactccttaaagattacaggatagtgatacttctttattaaagtaaaccatccaagcttcaaaatgagattgcacatgctgttatttctgtttccgatgtaaaatatgatttttttttttctgttgaagatgagggatttaagtttggtgaacatttccaacctag

SEQ ID NO: 640277 - DNA, 552 bp, Homo sapiens
tcttcagtcaactcatgggtgagcccgatcctttatagcagaggaaggagagggggctcagagggatttgtgttccctacctagacagaaagattcctgcccttatcatggctgaaatgacaaagagagtgattgctctattgttctattgtccagtgtcaagatgaagwtcctgtatctggatgatttgatccaaacctccttcagcttttctctccaaatatttggcaattctgggaagggcaaggtttatttatttactatttttatgtttatttcttgagggcgcatggctatacttagatgggtggtgcttaacagggagtagcacttcctacatctttgatcaacctgatattttccatttgaaagactttcaacctccacatttcatttacagatgacaaaaatgaagttccaaaattcaaacagacttttctccattgacactagtgtcagaaacagacattgccagacctagcttacctgtcattcagctctggtacatttttcactgttccctgttagcctccagtcttcataatcaaatgt

SEQ ID NO: 640278 - DNA, 552 bp, Homo sapiens
tcttcagtcaactcatgggtgagcccgatcctttatagcagaggaaggagagggggctcagagggatttgtgttccctacctagacagaaagattcctgcccttatcatggctgaaatgacaaagagagtgattgctctattgttctattgtccagtgtcaagatgaagatcctgtatctggatgatttgatccaaacctccttcagcttttctctccaaatatttggcaattctgggaagggcaagktttatttatttactatttttatgtttatttcttgagggcgcatggctatacttagatgggtggtgcttaacagggagtagcacttcctacatctttgatcaacctgatattttccatttgaaagactttcaacctccacatttcatttacagatgacaaaaatgaagttccaaaattcaaacagacttttctccattgacactagtgtcagaaacagacattgccagacctagcttacctgtcattcagctctggtacatttttcactgttccctgttagcctccagtcttcataatcaaatgt

SEQ ID NO: 640279 - DNA, 528 bp, Homo sapiens
gcagaataatggctcattattcaccaaacccagtaaaggcgggagaagatattttcatttctgccaaaggccatatgtgagtgcctgtggggaaagcatatccttagctttgtgactgaaccaataattcatatctgattcagaagctgactttgttggatttcagctctacagctgttctcagtctaagtccagcctctcccaatgggactgattgtagcaacacgtctcatttatagaactcatatgcaggggcctggagaccccaaactgtaaattaaaaccttgtgtatatgactttggtgaattcaattcaaaggcattttggcttctccaaatagtccattttcactagaaaggggaggggaaaacacaatggaaaggaaatagatcttttatattcatccttcctatttctggtaggaggtcttgagacaaaggtagtaatgaaataaaytctaataaaatgtcaaggctttggtgggccttggtgggggcatgtgcagaggggaggagaggagagggaga

SEQ ID NO: 640280 - DNA, 668 bp, Homo sapiens
cctcccgctatcctccctccttccctctcagatatagtagaagatctaacaataactcaacagcattttctgagtgcctgccctaggttaggccatgcggaagaagctgaagatactcagatgaatgagaccatccttgttttcaaggcattcagagcctgatggggaaacacacactaatgaccatttgtcttagaataaggtgattgaaccacaagataaatggactaggacagtgggaaggaggaggaaggggcctctaagccctcttgggataaagagttcgggacatgtgacataaagaaaaataatttttattggtggggtgacagaactagtaaatgtcttttctcaaacgtctgtgatgttgtagaaaggtactagaatttcatttggtktgtttactgcttattcatttatttattcattcaacacatttcctgagtgcctaccacatatctgtttctgtgctaggaacttaagtttcactctctcactttatatgatgatagatcaatctgtctgtcctttccagtcaatgagatggtatttgtatttttcagcccctagttggggccattgaatatttgttgaaagtgagcaaacaaaggaacacatgtttgatgcagtctaaaaaccttagaattgacttctaaatgtctttgaaa

SEQ ID NO: 640281 - DNA, 668 bp, Homo sapiens
cctcccgctatcctccctccttccctctcagatatagtagaagatctaacaataactcaacagcattttctgagtgcctgccctaggttaggccatgcggaagaagctgaagatactcagatgaatgagaccatccttgttttcaaggcattcagagcctgatggggaaacacacactaatgaccatttgtcttagaataaggtgattgaaccacaagataaatggactaggacagtgggaaggaggaggaaggggcctctaagccctcttgggataaagagttcgggacatgtgacataaagaaaaataatttttattggtggggtgacagaactagtaaatgtcttttctcaaacgtctgtgatgttgtagaaaggtactagaatttcatttggtttgtttactgcttattcatttatttattcattcaacacatttcctgagtgcctaccacatatctgtttctgtgctaggaacttaagtttcactctctcactttatatgatgatagatcaatctgtctgtcmtttccagtcaatgagatggtatttgtatttttcagcccctagttggggccattgaatatttgttgaaagtgagcaaacaaaggaacacatgtttgatgcagtctaaaaaccttagaattgacttctaaatgtctttgaaa

SEQ ID NO: 640282 - DNA, 567 bp, Homo sapiens
atacagacacatgaacaagccaattaggatacactatatctacagcaatagagacatgagggagctgctgagaaaatccagcagctataactaactcgctcagcaggaatcatggaaggctccccagagaaagtgccaacagagcctggaagaataaatctgagattgccagaacaggtaatgtggagagttgtaccaggaggtgttaagagcaatctcaaggtcatggaggcaagaaagaaatattctggggagtgggagaagttgaaagtgtggctagaatgcaagtttgtggcatttgcaacatattttgcaggatggttggtttctaatttgctgagttttcaagagctcaccttagatggcatcagccttgaagacatatgaatgcattttaatatcaaacaagattaggttaaatatactggctctatgctctcatatgcgtatctactgtatgtccccagttgaaatgcccattatacatcattcattcttctgttcattcatttwaaaaaacaaatgtttattgagaaactactctgggccaacaaaggcacagagagg

SEQ ID NO: 640283 - DNA, 582 bp, Homo sapiens
cgccgtggccctggcctcctcactggcctccagacatacctgtcctatttcagtccttgttccacactactcctaggaatcacttccactctgaaccctaagcaggattcactctccttcctgcacaaacccttcactggcccctcttggcttcggcataaaaccaagccactttgctaggcctcatacaagcttttcctctctcagtggggcaccataagtgcacacatgcaccgtaagtctgcagttccctggacatacartgcttttcctcactgcagaacctatgcacacaaggccccctcagctcagaatgccttcttcaagttcctcctctgtactcttcacccatgctaatgcccagacacccgtcaagactcagctttgtgtcaactcttccagcaatctttctgtaaccccaacccttaagacagactgggagcccctgtactgagccttcattcttagcacaaagctacctcttctagtgaagggcctcatgttataattgaggaaactgaggcctagacaagaatcacaagaccagcaactggcacttattgacagctgtgtgccaagtgc

SEQ ID NO: 640284 - DNA, 461 bp, Homo sapiens
gattgcactgccataacaaaatagtayagactgggtggcttaaacaacagagatttagtttttcacagtcccagagcctggaactctgaggtcaaggttccagcatggccaggttctggcgtgagccctttatctggtttgcagacaggtggctaccttttccctgagtgtttatatggctgagtgagagggcaaacaaactctctgatgtctttacctaaaagggcacaaatcccatgatgagggccttgtcctcatgacctcatctcatactaattacctcttaaagtctccatctccatatgctgtcacattggggtttagggcttcaacgcatgcaggaggtacacaaacattcagtccacaatgatctccttctatctgaatgtaagccccagctgggcaggcatttgtctgtgtagttcacttgctaactgctaaatccttagtgcctagaacac

SEQ ID NO: 640285 - DNA, 461 bp, Homo sapiens
gattgcactgccataacaaaatagtatagactgggtggcttaaacaacagagatttagtttttcacagtcccagagcctggaactctgaggtcaaggttccagcatggccaggttctggcgtgagccctttatctggtttgcagacaggtggctaccttytccctgagtgtttatatggctgagtgagagggcaaacaaactctctgatgtctttacctaaaagggcacaaatcccatgatgagggccttgtcctcatgacctcatctcatactaattacctcttaaagtctccatctccatatgctgtcacattggggtttagggcttcaacgcatgcaggaggtacacaaacattcagtccacaatgatctccttctatctgaatgtaagccccagctgggcaggcatttgtctgtgtagttcacttgctaactgctaaatccttagtgcctagaacac

SEQ ID NO: 640286 - DNA, 461 bp, Homo sapiens
gattgcactgccataacaaaatagtatagactgggtggcttaaacaacagagatttagtttttcacagtcccagagcctggaactctgaggtcaaggttccagcatggccaggttctggcgtgagccctttatctggtttgcagacaggtggctaccttttccctgagtgtttatatggctgagtgagagggcaaacaaactctctgatgtctttacctaaaagggcacaaatcccatgatgagggccttgtcctcatgacctcatctcatactaattacctcytaaagtctccatctccatatgctgtcacattggggtttagggcttcaacgcatgcaggaggtacacaaacattcagtccacaatgatctccttctatctgaatgtaagccccagctgggcaggcatttgtctgtgtagttcacttgctaactgctaaatccttagtgcctagaacac

SEQ ID NO: 640287 - DNA, 597 bp, Homo sapiens
tttccttcctggagcagagatgggggaagaaatatcaatttatttcatattaaatttacctgctacacacactgacccaatttactgttcgcaacaactccatggggtggggaatggcaccactactttgtcaataaggccactgaggtcagaacagttaaaggatttggcttgcaaaacatcagataagtgaacggtctttagttaacaatcagttctgcccatctccaaagtagagctaagcagcaaagcctatagtacttggaagccagctgacttctgttcaaattctggctctgacccctaccagctctgcggccttggatgagttatttaacttgttttagtttctccacttgtgaaatgggaataataataggacctacttaatggggaggtaaaatttgaagaattgaaaatataaaggatgttgaacaatgtctggcacatgacagttatacaatacattttagctagggtttcaacttcgccatgttggcaattcataattkctcacatttgagtaggttttacaacacactctactttaagacaatattggcaacaacccccacccccactcttaatacacacaca

SEQ ID NO: 640288 - DNA, 535 bp, Homo sapiens
aaaacaatgtggtgaaagagagatccaataaaaagaggggctgatgagcagatcagagtatagagatctgagcaccctgtacactctcccaagtgggcaactgaggttcttttgggccctgctggcatctccccattggctttctgttatccttcattgcaggacctttgtgtatgggcagcaagactgatggcttcctgaacagtgtgattggaaaaattctgcctttatctttaacacagttatgtccaaaataatttcctcaatcagactctcaattccaccattcaagacacagtcaggataaacactgcccctcaattatcctgcccatggggcaagaaaaagttttcagactcacttttgaaaggtggcctgcctattggtggctttccttcactgcatgtgccaagtaatcctacaaagtgaaagggaaagagactcatgttttactttgggcaattyctatgttccagggacaggtagagcattttgtgtatattgctgtatatcatttaatcctatgtcgacactg

SEQ ID NO: 640289 - DNA, 536 bp, Homo sapiens
cttaaagaatttgccaggggttacatagctcatattaatgggtctaaaattcaaacccaggcatgcccagctctggagtctgtgctgcttccatgacaacaaaaatgacagatcatgagcttagcagtttggctttctgtgtgactatgcaggtatacatgcagccttttcttccttattgggccactcaagatggtacagttggaaacctctgtttagaccttgagtctgtttacttggaggctgggcattatacttagtttctaaacatctgctctcctgacacctagaatgcagaagsgctcaagctggaagtcctgacttgttttgactccatgtgacagtttgtttctactaaaactcatgtcatgtgtgtatcactgttaatgattttgaactattcagccctaaggtggggccccaggagcaattttctgggtcctcccttttgagtgtaaaatgatctacagaaaaatgtgtctgtggtcctcctagcatcccagaggctactgggggctctgctatggctggaccat

SEQ ID NO: 640290 - DNA, 574 bp, Homo sapiens
caggtgtgcactcttgacttttgtgccctatctctactctcaacagcaagccgtagacatctgcagccatacgtaaagttctgagcagtcttctcgtctccctcatgctatccaacgtaaagcctcacaatgtaaatcctgtaaatctgatctctctggaagtcaaatgaagtgtcctgaacatcagtcatatgtcaggcacctgctttcccttaggctatcttaattgtgcctcagtacaacccagagaggtaggaatttttgtacccattacatagattagaaaactgagactcagagaggttgaataatatggcctcactcaaactcctgagggtcagagttagggctgtgatgtttctttgtctaatttgaaggtcaggtctttctatgacaaagtactggctagcattgaagaccttcatactrtcctgtcttgttctgctttctggaagagccaagtattacaatatgctattctttgccgtgttgtgaccaggttaaaaattaaagcaaggtatgtcaactttatgcctcagcagtcactctataaagcagcatgaaaccacacata

SEQ ID NO: 640291 - DNA, 546 bp, Homo sapiens
ctatatactatataaaggggtaaaatggaaaagagggtcttcagaaaaagcatggcagagggcctgctaaggggaaataagaygtatcaaaaaaacaaaacacctgttgagcagtcttctgtggatgtactgtgtacattctctttactctctcctttgtggacttttcagtaaattctgttttgttcctgatatttatgtacagtgtatttatttggtagtggttgtagagcaggtgttcagggctagcaggagaaggaagagacagtggacagttggattatatgttgatttaaaacagcatatgattattggccatatgtatgtcttcttacatgtgggcaacaataatgaaaaacatatcaatatcactgatgattagagaaatgcaaatcaaaactatgatgagataccatctcacaccagtcagaatggctattatttgaaagtcaaaaggtaacagatgttggtgaggttgtggagaaataggaacacttacacactgttggtgggagtataaattagttcagccattgcggaagacag

SEQ ID NO: 640292 - DNA, 601 bp, Homo sapiens
ccctcaactaggaagctgttaagccaggattggaagcgagctctatattgacttcgatgattgcgtttcttccactcttctgcattgttagaatcttgcctttaatatctaagatctaggaatgaaagacagaagctagctaggctatatactatataaaggggtaaaatggaaaagagggtcttcagaaaaagcatggcagagggcctgctaaggggaaataagatgtatcaaaaaaacaaaacacctgttgagcagtcttctgtggatgtactgtgtacattctctttactctctcctttgtggacttttcagtaaattctgtyttgttcctgatatttatgtacagtgtatttatttggtagtggttgtagagcaggtgttcagggctagcaggagaaggaagagacagtggacagttggattatatgttgatttaaaacagcatatgattattggccatatgtatgtcttcttacatgtgggcaacaataatgaaaaacatatcaatatcactgatgattagagaaatgcaaatcaaaactatgatgagataccatctcacaccagtcagaatggctattatttgaaagtcaaaagg

SEQ ID NO: 640293 - DNA, 595 bp, Homo sapiens
gacggttttggttttcagaaggatcctttttgcacggaagatactgaacttatctgcttgcattcaaaaggctatataggcctttcatagtaacttctgaccagctttcattcccaagtggtagctttataagttctgccttttacctttcccccatgctgtttaagcygtaaaaaaaaaatgtagaaaaaaaaaaaaggaaatccagccattttgagtccattgcctcttagcctcttagcctcttagctgccctagggggtgccacctctaagctgaaaccttctgtaattgtttggggctcactgggcctcccaatgacaccttcatttaatgccattacagtgtggctccaggttcttaaaacttggtacctgtgctctttacttctgctgccagaaggaattgcttttaaaagctatcctttatgctactaaattagttctcactattgctttgtgtatccaggtaagatggaacagtcaaatccttcattctctgggttgtggaggcagtttgaagcatgtctcagagtgtttcccaaagcatgtcctgtagaacactgagcccatgataccagcttccaaatgtaagt

SEQ ID NO: 640294 - DNA, 595 bp, Homo sapiens
gacggttttggttttcagaaggatcctttttgcacggaagatactgaacttatctgcttgcattcaaaaggctatataggcctttcatagtaacttctgaccagctttcattcccaagtggtagctttataagttctgccttttacctttcccccatgctgtttaagctgtaaaaaaaaaatgtagaaaaaaaaaaaaggaaatccagccattttgagtccattgcctcttagcctcttagcctcttagctgccctagggggtgccacctctaagctgaaaccttctgtaattgtttggggctcactgggcctcccamtgacaccttcatttaatgccattacagtgtggctccaggttcttaaaacttggtacctgtgctctttacttctgctgccagaaggaattgcttttaaaagctatcctttatgctactaaattagttctcactattgctttgtgtatccaggtaagatggaacagtcaaatccttcattctctgggttgtggaggcagtttgaagcatgtctcagagtgtttcccaaagcatgtcctgtagaacactgagcccatgataccagcttccaaatgtaagt

SEQ ID NO: 640295 - DNA, 553 bp, Homo sapiens
tcatttccctaccttcctcgagcaatgcagcaaacatcggcaccacagatgtgctcagacttgagcctgactcacggaagagagtctggggctgccaggtctcagacaccagattataatcagcttcttcccaggtgctgcacacatgaggcccatgccatgggcaaacagtgcccaggggtggttcaggccctgcagagaccatggacagttcacctgacaggaaagaagatcgggaggaactcacttcacagatccctcaacagagstaacagtgttctttgggcccctgttactatttaggtgagagttgcaaaggcagcctctcctagattacaaagtgtgggtggaagtcatcaatacttcaatagtaccagctgtcaggacctaccctcaggcctctcctacaccctccctgccaggctcctagccttcccacaagggagagttggccagtgcttttgccttggggctggaggttggaaatactgtcagcagtgctgtcaaggtgaagctaaaatacggcatctccaggggacacccaggctgtggg

SEQ ID NO: 640296 - DNA, 553 bp, Homo sapiens
tcatttccctaccttcctcgagcaatgcagcaaacatcggcaccacagatgtgctcagacttgagcctgactcacggaagagagtctggggctgccaggtctcagacaccagattataatcagcttcttcccaggtgctgcacacatgaggcccatgccatgggcaaacagtgcccaggggtggttcaggccctgcagagaccatggacagttcacctgacaggaaagaagatcgggaggaactcacttcacagatccctcaacagaggtaacagtgttctttgggcccctgttactatttaggtgagagttgcaaaggcagcctctcctagattacaaagtgtgggtggaagtcatcaatacttcaatagtaccagctgtcaggacctaccctcaggcctctcctacaccctccctgccaggctcctagccttcccacaagggagagttggcsagtgcttttgccttggggctggaggttggaaatactgtcagcagtgctgtcaaggtgaagctaaaatacggcatctccaggggacacccaggctgtggg

SEQ ID NO: 640297 - DNA, 497 bp, Homo sapiens
tttctgccttcatatagttaggtcattattttctccattttgtagagaagactgaggcccaraaaaacaactcagagctaggagagggcaaaatggagactaaaatccaggaatctggcttgccagctttgctccattcatggactgcttgatgttctcccgggacatccaggtctccctcacccaggtcagcattgagtgtactcagcagcttgtcctgttcccgtgggggctgggacttaccccaccctgcagtcctcatcttctccctcatttgttcaggcagcccctttggggagggcggacatctggctcacagctggcctgagtgaggctcatgcaactctataccgaagaatgtgggcttcatgtgtgtttttcttttctctgttgtaacaaaattggataatgagcctggtgaatgaggccccagctctgccatgctgtgccattgggttaccctctctgggtcctggtatccccatttttaacaatgt

SEQ ID NO: 640298 - DNA, 496 bp, Homo sapiens
tctgccttcatatagttaggtcattattttctccattttgtagagaagactgaggcccagaaaaacaactcagagctaggagagggcaaaatggagactaaaatccaggaatctggcttgccagctttgctccattcatggactgcttgatgttctcccgggacatccaggtctccctcacccaggtcagcaytgagtgtactcagcagcttgtcctgttcccgtgggggctgggacttaccccaccctgcagtcctcatcttctccctcatttgttcaggcagcccctttggggagggcggacatctggctcacagctggcctgagtgaggctcatgcaactctataccgaagaatgtgggcttcatgtgtgtttttcttttctctgttgtaacaaaattggataatgagcctggtgaatgaggccccagctctgccatgctgtgccattgggttaccctctctgggtcctggtatccccatttttaacaatgtg

SEQ ID NO: 640299 - DNA, 506 bp, Homo sapiens
gacttcctgcctccggggctgaaggccggggttgcctctttcaaccactcatagggtagcctgtgggaagctcagctctcagaagacattacccttttccacagtcttcatctctattttttcagcaggggacattatattttttctggcaataaaattaatatatattaattgcagaatatttcaaaactatacagaggtgttaataaacagaaacattcatttatgatgttacctctctgaaatgatcactatggacacattggcctattttctttaagttactttgccatttttttaaaccataattgaattctgatttttaatacaattttgatatttactttttgtgctttaatcttttaagcattttccttgccatcaaaaatccccaaccatcatcttcctttccctttgctgagcttgaatctacttgattcrcgctttctctgggcaacaagctatttatgagccaaacaggatggaaggagcccttgggatggcat

SEQ ID NO: 640300 - DNA, 615 bp, Homo sapiens
ctaaaaattggaaatcaaattcctgacacccaaggctattataaggatcaaatgagatctaataaagtacctggtatatagcatatataattaaaaacaacaagaagaaaaacaagaatacaaactgtaagaaacagtaatcatttaatgggatatacaaattaacataaatatatagtttaaatatatgtatatgtagyatgtagccaggtacttttgttgtttgaattagaaataaaatcaagaaaaaaaaaggactgaataagcctgtgtgaatatgtttcttcaacactaagacaagacttgcactttgcattagaatgttctccagcccagagtgtgattgtgtctcagccaagctacagaacaattctggaggcacaacctctacaaagtcatggaggtgggccctgtagcccaaggaacatcaatacagacttcaattacggctcctgggtactggtgacagccacagctttgaatggctcttcacagctcttccaccttattgagctctcgattgctttatttccttggaaagctgttgtatcttctctacttgctcccattgtggactgaacctgcacccactctccaggtgcctgcctttttaaa

SEQ ID NO: 640301 - DNA, 615 bp, Homo sapiens
ctaaaaattggaaatcaaattcctgacacccaaggctattataaggatcaaatgagatctaataaagtacctggtatatagcatatataattaaaaacaacaagaagaaaaacaagaatacaaactgtaagaaacagtaatcatttaatgggatatacaaattaacataaatatatagtttaaatatatgtatatgtagcatgtagccaggtacttttgttgtttgaattagaaataaaatcaagaaaaaaaaaggactgaataagcctgtgtgaatatgtttcttcaacactaagacaagactygcactttgcattagaatgttctccagcccagagtgtgattgtgtctcagccaagctacagaacaattctggaggcacaacctctacaaagtcatggaggtgggccctgtagcccaaggaacatcaatacagacttcaattacggctcctgggtactggtgacagccacagctttgaatggctcttcacagctcttccaccttattgagctctcgattgctttatttccttggaaagctgttgtatcttctctacttgctcccattgtggactgaacctgcacccactctccaggtgcctgcctttttaaa

SEQ ID NO: 640302 - DNA, 615 bp, Homo sapiens
ctaaaaattggaaatcaaattcctgacacccaaggctattataaggatcaaatgagatctaataaagtacctggtatatagcatatataattaaaaacaacaagaagaaaaacaagaatacaaactgtaagaaacagtaatcatttaatgggatatacaaattaacataaatatatagtttaaatatatgtatatgtagcatgtagccaggtacttttgttgtttgaattagaaataaaatcaagaaaaaaaaaggactgaataagcctgtgtgaatatgtttcttcaacactaagacaagacttgcactttgcattagaatgttctccagcccagagtgtgattgtgtctcagccaagctacagaacaattctggaggcacaacctctacaaagkcatggaggtgggccctgtagcccaaggaacatcaatacagacttcaattacggctcctgggtactggtgacagccacagctttgaatggctcttcacagctcttccaccttattgagctctcgattgctttatttccttggaaagctgttgtatcttctctacttgctcccattgtggactgaacctgcacccactctccaggtgcctgcctttttaaa

SEQ ID NO: 640303 - DNA, 486 bp, Homo sapiens
tcgtggaatacgactgctttttttttttttttccaacttgctttttctgcctggatacctgatggtcattctctgtccttcttcaagtactggagaaggactgtccaagcacagcctgatgcacatacttcactccactacaggcagttatgtgtgatggccaaagcagaggctcaggagaaagacagaactgagttaagcctcttcctagctacatgaactaggatacttcgtggaagaaaattttyccatggggtgaggagcagggggatagttttgggatgaaacttccacttcagatcatcaggcattagttagattcttataaggagcatgcaacagagatccctcacatgcacagttcacaatagggtccatgctcctatgagaatctaatgccaccactgatctaacaggagacagagctcaggtggtaattctcgctcacctcctgctgtgcagcctggtttgtaacaggccagagac

SEQ ID NO: 640304 - DNA, 486 bp, Homo sapiens
tcgtggaatacgactgctttttttttttttttccaacttgctttttctgcctggatacctgatggtcattctctgtccttcttcaagtactggagaaggactgtccaagcacagcctgatgcacatacttcactccactacaggcagttatgtgtgatggccaaagcagaggctcaggagaaagacagaactgagttaagcctcttcctagctacatgaactaggatacttcgtggaagaaaattttcccatggggtgrggagcagggggatagttttgggatgaaacttccacttcagatcatcaggcattagttagattcttataaggagcatgcaacagagatccctcacatgcacagttcacaatagggtccatgctcctatgagaatctaatgccaccactgatctaacaggagacagagctcaggtggtaattctcgctcacctcctgctgtgcagcctggtttgtaacaggccagagac

SEQ ID NO: 640305 - DNA, 577 bp, Homo sapiens
ctgtagcaatttaaaatgatgttaaggaaggcatttttatggcatggttaaatgcttatgatgtaatgttaagcaaaatcaggcagaacaatttttagaaagaaattatcaataatattatatgcagataaaaaagtgcttaagtatcctggaaagaaatataccaacatgttaacagtggttgaattatcagatgggataaaatttkcttgaattttccaaatttttataatgatcatgtaatttttttataattaaaaaggaagataaaattaaagagaactaaagagctattttctcccttgaaatcacgaatgttttggaccaacctctattgcaatggctgttaagtctataagcttagccttaagccagtaggctatttgttctatcaacaaccaaatcaaaaaaccctgtttaaaggctaaagattacgtctggcgtgggtgatattctgaaacctgaagaatcatcttctctaaggagcctttcctggctcatgtcaggcacctctccatgttcccaggtccctcatatagaccatctgtgctttaccatttaaaggattttgtggtgt

SEQ ID NO: 640306 - DNA, 427 bp, Homo sapiens
tcactcactatcatgagaacagcctggagaaacccaccccccgatgatccaatcaccccccaccaggtccctcccttgacatgggtattacaattcaagatgagatttgggtggggacacagatccaaaccatatcagcaagtcatcaaatagtgtgaataatacaaaacaattttaaatktataaatatggaaatagagctatatacaagcatatacaataccgcatgtagattaacattaacatattttctttggaaatgaaaattaaaggaaggggaatccaaattctacaatggataagtatgattttaataaatagaaaaatatagaaataaatattactgaaaaattttaaagcattgctctttcattcattagttctaggaactgaaaattcccattcaattgctactgagttcctcaaa

SEQ ID NO: 640307 - DNA, 642 bp, Homo sapiens
attataaatacagtcatccctttgtacttgtaggggattggatccaggaaatgctaccaaccccctttcccccacagataccaaaatccatggatgttcaagcactttatgtaaaatggcatagtatttgcatataacmctatgtacttcctcgtgtatactttaaatcgcctctagattacttacaatacataatacaatatgaattgaagtttgcagaataaaggtaattgccagtggaagaaatgtttttctttgcccccagcacttctgagctgcttctgacctgacccttcctccaaggtaaaatcccagccatatgtcagcccgtgaggagtcaagtctcctagggaaacagatcccacgctcaaatggagaaatcgaggagaattgcatcaagagagtaataaggagttttaggcagagtaaggagagtcaacaaaagatggaaaagcaacccagagcaaccctgaaggagcagtttgggaagggtgaacctgtggggtgttcctgagactctactaggtgtccccaaggccaaaactatttcataataatactaagacatcatttgccttcttcgctctcatcctctcatgagtacatagtgaagtttttcggacactacctgacttgtgatga

SEQ ID NO: 640308 - DNA, 431 bp, Homo sapiens
agaaggtaagggaagggagaaatgaatggagatctaatgattaggtaggcattagtgatcatcaacttctactccattcagcagctattaggctatgggtataaaatataaaccagcttctcagattattttatcaatccttaccacaaatgaagtgaaagaaaggamactaacatttgttaagtatctactgtcaggaacaacaaaatcctagtatttagtctacctttatcccctgctggatctgccagcgtattgtttagcagttgctgaaggtgcctcagcttgctggggtagtctggcctctccaccttcactccttcgtggatgttggttaataaatggactgctctaacttactgtcttttgttcctttacatcccccctcccatcttctgatctgaagctggtatgttctctttttgttttta

SEQ ID NO: 640309 - DNA, 419 bp, Homo sapiens
tattttacagatattaactcagttattcttcataaaatctctatttttaccattatccctatctgaaagacaaagaaacagtaaattgttccatagagagagcccaaactgtttgtcattagagtttaagttattaaccctaatggtacacatagtrgattcatagtacacattcactgaatgagtagaccaaatacttaacaaaataataataattaatattttttgtaagactgtgtgtgtcttattcagaaataatatatctaaaggaacttagtttctgctagtagaagtaagctatgaataccaataacacactacatagccatttgcgaatatgattattgtaagtatttataacagaaattaaaagaggaaagattgattctacatggagagattaagatagttcataggtg

SEQ ID NO: 640310 - DNA, 647 bp, Homo sapiens
agaaacattcacaatctattctctctgaagcctgctacctggargtttcatctgaataataaaaccttggtctccacaattccttatcgtaatgcagacattcctttctatttgatcctaggtctttagataataactctttccaccaaatgccaatgagaaaaatctttaaatctacctatgacttggaagcccctgcttcaagttgtcccaccttaccagaccaaaccagtgtacatctttcatgtattgattgatgtctcatgtctccctgaagtgtataaaaccagctgtacccccaccactttgggcacatctcatcaggacctcctaaggttgtgtcacagccatgtccttaaccttggcaaaataaactttctaaattaattgagacctgtctcagatactttaggtttaccatcatctcatcattaattggttctttctctaatctccagatggagaacagaacctcctttcacttgattttcccttaaatcattgctcacaaggcatttgtgagtatagcaaactttgcaggttggaagtgatgaaagggtttattccttcaggtggctttgctcccttcagctctcctctcctctcctctccccctctcccaccttgaaagactcacctttcccagt

SEQ ID NO: 640311 - DNA, 647 bp, Homo sapiens
agaaacattcacaatctattctctctgaagcctgctacctggaggtttcatctgaataataaaaccttggtctccacaattccttatcgtaatgcagacattcctttctatttgatcctaggtctttagataataactctttccaccaaatgccaatgagaaaaatctttaaatctacctatgacttggaagcccctgcttcaagttgtcccaccttwccagaccaaaccagtgtacatctttcatgtattgattgatgtctcatgtctccctgaagtgtataaaaccagctgtacccccaccactttgggcacatctcatcaggacctcctaaggttgtgtcacagccatgtccttaaccttggcaaaataaactttctaaattaattgagacctgtctcagatactttaggtttaccatcatctcatcattaattggttctttctctaatctccagatggagaacagaacctcctttcacttgattttcccttaaatcattgctcacaaggcatttgtgagtatagcaaactttgcaggttggaagtgatgaaagggtttattccttcaggtggctttgctcccttcagctctcctctcctctcctctccccctctcccaccttgaaagactcacctttcccagt

SEQ ID NO: 640312 - DNA, 602 bp, Homo sapiens
aaggtttatccatattgtaccatgtatcagtagtttgtgtggtggaatactcttccattgtattgacataccacwttttgcttatccattcactcgtaggtggacaattggattccttccactttttggcttttatgaataatgctgctctgaaaatttgtgtgcacgtttttgcttgaacacctgttttcaattctcttgggtctatagctaggaagggaattacttgcttacataataattcaataatatgtttttgagaaaattccaaattatttttcacagcagcagaaccattttccatttccatcagcaaagtatgaggtttcaatttcaccacatcctttgcaacatttttctttaaaaaagttgataaccatcctagtgggtgtgtagtggtatctcattgtggttttgatttgcatttccctaatgactagtaatatcgaacatctttttatgtgatttggggtcatctgtatgtcttctttggagaaatgtctatccacaatctttgcccattatataaattgggttgtttgtcattctgttgttgagtcataagagttcttcatgtaatctggatactaaatgcttatcaa

SEQ ID NO: 640313 - DNA, 514 bp, Homo sapiens
aaacttcttgttacctgcttcagggaccagtccttttagtgaatggttttccttagactgagtcccagacagacactgcctggcttactcttctttctgagtttgcctgggctataatccttttccttgatgtgagaacatgttccacaaatgcagaactataatgagcatttttgccaagattttatcctctatatgctcacttttttgggatatgttccaaaacaatttttttttaayaggataatttctggggagaaagcttactgtgtttaaaacctgatatttcaagggcagatgaaagatttttttcaagaattaagaaaacacttcatcatttatttctttggcagagtatctgcatgtgtttcttttgaaatcctcagaaattaaggccatactgtattcattttcaaattatagaaaatacactaaagaagaaatgaacagaagagaagaaagacacgctttgctaaaagccatgttttcttaaattgcttggtcacatgaattc

SEQ ID NO: 640314 - DNA, 514 bp, Homo sapiens
aaacttcttgttacctgcttcagggaccagtccttttagtgaatggttttccttagactgagtcccagacagacactgcctggcttactcttctttctgagtttgcctgggctataatccttttccttgatgtgagaacatgttccacaaatgcagaactataatgagcatttttgccaagattttatcctctatatgctcacttttttgggatatgttccaaaacaatttttttttaataggataatttctggggagaaagcttactstgtttaaaacctgatatttcaagggcagatgaaagatttttttcaagaattaagaaaacacttcatcatttatttctttggcagagtatctgcatgtgtttcttttgaaatcctcagaaattaaggccatactgtattcattttcaaattatagaaaatacactaaagaagaaatgaacagaagagaagaaagacacgctttgctaaaagccatgttttcttaaattgcttggtcacatgaattc

SEQ ID NO: 640315 - DNA, 627 bp, Homo sapiens
gccatccagtagccccagcaccaattgttgaaaagattattatttctcccattgagtgatcttgctacccttgctaaaaatcagttgaccatagactcatgatttattcctggattcttgattccattccaatgayctaaatgtctacccttgtgatagtaccacactgtcatgattaccattgctttgtagtaagttttgaaatgggaagttgtgaattcttctacttttcttttttaaacatcactttggcgattctggatctcttgcaattccatataaattttaggatcagcttgtcaatttctgcaaaacagtgagctggaattctgttagagaatgtgtaaattcagacatcaatttaagaagtattgtcatcctaacaaaattaagtcttctgtccatgaacatgatcccatttatttagatcttttaaaatatctttcagcgatgttttgtagttctcagagtatacttcttttgttaaatttctcctatatattttattccttttgattctattttaatgaaattgtttttaacttaatttttggatttttcatggcaagttgtatggaaatgcaattgatttttgtacactgatcttgtcaggattgtggttgctct

SEQ ID NO: 640316 - DNA, 623 bp, Homo sapiens
gactcctggctatgggttacattttcctgtttgtttacgtgtcctataagttttattaggtgctggatattatgcatgttatgcattgagttcaatattggcaagcaattaatttatgtataaattagcttgatcctttgagtctgaaaaattttgttgtggcagatcaagagtagcatttactctctaaggatagtctggctctctaaggtgtgatctttttagagtctctactgaatatttactaagtgttcaatgaccttcagactctgggagatgttcagctgatagcttttcccatagttattttctttttgttcattgttctttgccttgccttgtggaatctcattctacatttgtgtcrcttagtattaagccaaaaattcaaggggatccctatgttgagtttttggtgttttctttgcatagcttctttttctctggtacagcgctctgaaaatttcagctgccttagcctccctaaacttcatttttacaaagatgttgtactctgcttgggttccccatctctgttgcagggaggaagatttcaggcataaatctgggaaaatcattagtctcactttctttgtttcccttatttcaaggattatagtcat

SEQ ID NO: 640317 - DNA, 551 bp, Homo sapiens
ttacacatgaagaaactgaagcagagagggggaccaactgagttacttaaaaccacccacttatttttgcagtggaacccagattgtctgattgcaaaacccaactcctaaatagtgaactatgtggccttccataaggagatcatggtatcaaaccaatggggttgctaagattaaacagtaggacattttcaaaaatgcctataggtaggcattcaataaatggcatatgctgtgattatttacaagcttcaccttccaagaaaaacatgctaaatgcctgttagcaccctatgtctctctctaacacatctctgattctaccgtagaaccataggttagaaatgaaaataaatttcaccatttatcaagccagtgtcaggtcttggaggcagaaaatccccagggttcttccttgataaaatcacactctagcaaaaaggactgacatctagtatattcraaaactccaggttataaaacaaaggtatgcctaagatgccacaggatcattcgctccagaaacacttggcccatattgttctaggcct

SEQ ID NO: 640318 - DNA, 565 bp, Homo sapiens
atcctaattttaaaaaaattgtttccattctgtgcatgaattattttgccaacaggtatctcagcatgaaactgccttcacctcagaaatacccagcctcaaaagcatattcaagcagttcttcatgactcccgtaaatcaagctctcatcattgagccatgggagcaaatgaatattctcttttaaagagtgaacaagcaaatgcttggaataaaaagaaagaattacattgaatcttttaaaagactcagttttccaacctgggctggctaagcaggtaagcctgacccagagtcctgggccaatgtttccatcttctgygaaatttgttggccactgagatgggatattttggtagctgtgccttttgttttaccatagaggacttctgggaagagtaaatagcataacatcccccaaacatctagcacaatgcctgcccatacattatatgccagttcccttgccctttctgttcttcttctagcttgttctgaccttaatttattgatttattaattagctcttcctgtgggtacctccactctagacagtggacacttt

SEQ ID NO: 640319 - DNA, 582 bp, Homo sapiens
ccttacataaatgatattgtgcaatttacataataaaatatattgcaaaacagaatatgtttctctctgactctgatttctatttctaggaagactaattttctcaaacttacacacagcccagactcttgacagaaatctggcatccaggaaccatggggtggtttggtggtttgggkgtttttttttttttttttttccttcagtttctcatgccctctaagccagaattttaaagaaaacacttaaaatctttaagacagcatgagctccactccaggaactgtggaagtgggcagcagcagaccttccatttcaccaaagaatagacatttgttctgctggaattgttcttagactacttgttgtttcctcctttgcttctctctctttttgagtagcaaattatgtgacttatttatatcatgatccttgtgtcatcttaagcatggctttttccatggaagaaggaatttggttttattcagaatatgaaaactgctagtaatttccagttccatatatgagcattgctcaaattagctgatatgttagagactcagggaggtgagccctaatagc

SEQ ID NO: 640320 - DNA, 618 bp, Homo sapiens
ttgctctacagttaaattccagtgcactgcagcctctggagttctcctcagcactggaaggcagtttggctcatttgaacaaattgcttaagatgttaaattagacttaattgtatttaggaagaagaattaaaaaaaaaggaaggatatcaattgtcctcatatctacaatcttcccaaatggccttattttattactgacagttcccaaggcatgttttgcattgtgactgtgacttgtcctgagtaggaggttttaagtaatttttactgtcatcagccaaatcactgagaatgtactagatgtttggcactgtgctcacagcacartagaactattcctgacctcaagatatgtacaccgtggttggggtagtccattaatagactgttaacaccattactttgtctactcatgcttttccctttcacctacccggatccactgtgctcctaatgaaatcctatttattctctaaaacccagctcagacatcctctcttcccagaaatgtctctattatttcacaaaaaattaatgactccttcaattggattaaatctgtattgtgaacatacttctatttttatactcaacagtctgtgttattttgttaaa

SEQ ID NO: 640321 - DNA, 365 bp, Homo sapiens
gactgtgacttgtcctgagtaggaggttttaagtaatttttactgtcatcagccaaatcactgagaatgtactagatgtttggcactgtgctcacagcacaatagaactattcctgacctcaagatatgtacaccgtggttggggtagtccattaatwgactgttaacaccattactttgtctactcatgcttttccctttcacctacccggatccactgtgctcctaatgaaatcctatttattctctaaaacccagctcagacatcctctcttcccagaaatgtctctattatttcacaaaaaattaatgactccttcaattggattaaatctgtattgtgaacatacttctatttttatact

SEQ ID NO: 640322 - DNA, 509 bp, Homo sapiens
gcaaccataacgaatgggctttgtgggcttggtcggtgggggtcaggtggccctgggaggttctgagcactctgtgcaggccaacacgcagagagacacaccccggccaaacatacacatgcatggatgctcctcttctgtaaaatgatggcgttggcaagtggcaagtgctgaagcagcatcatgcagtggaaaaatcaaaaatggaaaataaggaggtgcaggcctaagtcccaccacaacctgattatgtgggctgaaccatgcgtgactttcaaatgctcctcaggcacctgttgcttaaggtctgcaatagaggaagggatagaagcccattcattttgaaaccactttcctctaacctgtgccacctttgggtcacttccgaccttacaaaggcatatagactttttggtaggggaaagtgtttgggtaagatggcccaatccttttcctccragacctgcttcagagccacttaatcctctaagccttctgcatttcccttc

SEQ ID NO: 640323 - DNA, 561 bp, Homo sapiens
atagatttaatctcttgttccaagtttggttgatttatggtggctgcttggagccacaagttgggaaggattctgaggtcacatttggtcccagcaggaaagagagccatgatctattaataatgtctgccatgagcaagagaggtgaaggtgatgcacacaagttgtttatctgacattcatgaactgatttcttatcctgacttcctgactctttcttgtctgttatatccttaatcagttaagtgtggccaaccccattcttattgtaagatgtgacctgagttttgccaggatctccatccagttcctacatggatggccttgatatgaatatggtgtagaatggggagataagaagatggggataaawgcattctttgggtagtatattttgtcttggcattctttcataattcaaacagaacgtagaagttttcattaatagcttggagaatcagtaaagatctttctcctcagttattggagacatggctatgagattcttccctatagcactgttctgtatcctatcctgccaggagtcatagcaaaaacaac

SEQ ID NO: 640324 - DNA, 410 bp, Homo sapiens
ttcttaagttaagctcactgcttggagtgactttattaaattagatgtagagatttcattcaataagggcaggtaaataaatggatactcagcaaagcatatgaagtcaacagagcgcctacccttttcaggagagcagactttaaggacagacaaactgaacttaraattcttcttctcccctttctaatgtgtgacaatgggtgaacatttcaactactatacagctttgtctcatcaacaaaaatataggattaataataccttcctgtgagatttacatgtaatagcatttgtgaagctctaagtacatttcctggtatatactgcccccacaccccaatccctatttgggaaaaaagtaagttaacaagaaataaagtgttatttttatatcaaaacaaagacat

SEQ ID NO: 640325 - DNA, 410 bp, Homo sapiens
ttcttaagttaagctcactgcttggagtgactttattaaattagatgtagagatttcattcaataagggcaggtaaataaatggatactcagcaaagcatatgaagtcaacagagcgcctacccttttcaggagagcagactttaaggacagacaaactgaacttagaattcttcttctcccctttctaatgtgtgacaatgggtgaacatttcaactactatacagctttgtctcatcaacaaaaatataggattaataataccttcctgtgagatttacatgtaatarcatttgtgaagctctaagtacatttcctggtatatactgcccccacaccccaatccctatttgggaaaaaagtaagttaacaagaaataaagtgttatttttatatcaaaacaaagacat

SEQ ID NO: 640326 - DNA, 609 bp, Homo sapiens
ctgctaactagagagggggtaagacagagggaaggttaggcttggctagacctgagagtgtttgtggaaggggcacccatgtgagcagataatctattaaatgaggtctatgagggcctgggttgggttacagtgcaagggaggggtgctcgggtctgccttgtggggagagcccttgctccctaaaacagtagggtgggaaaatgtcaagatcaaggactttggatggtttagtctttggagataagcagatcttcagtttggaactcaagttactagctccgtggttttacctgtccaagccttagttgtactcttgttaagtggaaatacttaatttctcaggcttgttgtattagggaaaaatacttaatttctcaagcttggtgtattatggaaaaaacgcacacattgtgtctggcccacagttgtyactgattaaatgacaactgtggctattgcttaagaggcagcagagcatagaggagaggaggtacgctttggaattagacagactggggttgactggaatccaggactccacacttaatatttgatgaccatagatatcctacttaaggctgtattcttcatctatcaattggagct

SEQ ID NO: 640327 - DNA, 304 bp, Homo sapiens
aaacatgaaattcatttatgtttcatatatgccttaaatacatagcctgaarataattgtatacagtatttttaataattttgtgcaggaaacaatgtttgactgcacgttgactgctgctgtcacgtgaggtcaggtgtggaattttccacttatggtgttgtgtcagcactcaaaaagtcttagattttggagcattttgaatttcggatttcaaatttaaggatgctcaacctgtatagagtatgtgacgtgttgtgtgcatgtatgtgtaccagagtgctcgaggggtatgatgccaacc

SEQ ID NO: 640328 - DNA, 593 bp, Homo sapiens
gactagttaagtggaatgaaaaatgctaaaatgggatacaaaacactgtggacatagcgtacagccagaaccaagaaaagtggtaagtgtttcagggtagtggatatacaggttgactatcccttatcccaaatgcttaggacctaaaatgttttggattttggatttttctggatttggaatatttatgtatacataattagatatcttggggatgggactcaaatctaaacatgaaattcatttatgtttcatatatgccttaaatacatagcctgaagataattgtatacagtatttttaataattttgtgcaggaaacaatgtttgactgcacgttgactgctgctgtcacgtgaggtcaggtgtggaattttccacttatggtgttgtgtcagcactcaaaaagtcttagattttggagcattttgaatttcggatttcaaatttaaggatgctcaacctgtatagagtatgtgacgtgttgtgtgcatgtatgtgtaccagagtgctcgaggggtatgatgccaaccctcaagctggcygctattagtcattgattgctgaatgtgttctaacccactttgcaaagc

SEQ ID NO: 640329 - DNA, 587 bp, Homo sapiens
atttcctgttatctcttcttttgtcacaatacctctgaaggagaggatggagaaaagagtgctttgtaaaggtgtgttaggtctcacaggacttgctagctcacactctctctctctctctctccctccctctctctctctttctctttcttggtccccctccctaatagccagtttggcgcatacctgtggttgctctgtctaccttcctgttgtatcccagtagatccccaaaataagcatcagcagccacattgggaccctaccctccacaatgaggaagagattgagaggttkggagacaggacagggaggcaggcagggtcaaaccaaaggttcccttggagaatcatgagtgggttttagaggggtcaatgaacccttgaaattgtacacgtatcccttatatgtattgcgtgtgtgtgcagtggtggtggtaggagagctcatgactgtccctgagtttgcaaagtgtttgtgactcataaaaggttgagagtgacagctatccattacttcaaagggggtaaatagttatcttcagagaagaactttcatgagggcccacacattcccttaatttctta

SEQ ID NO: 640330 - DNA, 561 bp, Homo sapiens
tcatgagggcccacacattcccttaatttcttacccaagagtcttatttgattttcgacataaccatgtagagtagttattagtttcacttaatgatttgagaaactgagatcctgctaggtaaaataacttggcccaagccccatagttaccaagtggcagaggcacagcccacacccagatcattccactagaagaaacaaaaagttctcattcgctctcaggaaaaattagggaattaaccagttttaattggtaatgagaattcaatactcactttttgagtatctactatatgctagtcaaacacatatacacacrcgtgtgcacgcacacgcacacacacacacacacacacatatatatatatatttcacaagagccctgaaaatccaggcaaactttttgttctacaaatgaggaagattaatcccagagaggctagattaaattgttcaaacttccaccactggcaagtgaggatttaaaccctggtctactgaagtcgtcagttttgtctcttttgatatctttctcacctccctgggtaatttgcagaac

SEQ ID NO: 640331 - DNA, 646 bp, Homo sapiens
actggactttccctttgcctggaggacctctccttggttgtcagagcctggcgaaagcctctaaaactctgcttaagcatcactgcctctgggaatcagctgacaatttttctctcaagcagagaaaaccactcccttctgtgctctaccatttatacccttttggcttattttcacacaatatttcattatttgtttgcagtcagcccttctacccatttgagctccttgagaacataacagaacattcacctgggtatcctcacacagcaygggcccagtgctgggcataaatgctccacaaatgttcttggaaagaataggtgctatgtggttcaggcaggtggatgtgaactgtattcataacaacacgaagacactcagaggtgctccatcttcagaggcttcccaaacggtgctaaaatctctactggcccagcctgcaggagctgactcaaagggaaggccaggtcaccgtcaggaaatgtggtttttgtgtggaaacgtcaccatctggtggtttctagtgaaacagcttctcagctgcaatagtggagagagagggcttcctccctttgcttgcttcccagggccactaagttcagagaaaggtgctccctgcagcagcaccatgggctctggcaag

SEQ ID NO: 640332 - DNA, 547 bp, Homo sapiens
taagaatataaagaaagtttgggccagattttgaaggatcttgaaggacaatgaaaagccttttttcggatcagacgctctcaaagcttcactctcaggaggtcaattcagtaacactatccatttgctccttcaatatctactaaaaacccagcatgtaaacccaggcacagtttaagctgctgggcatacaagctgaaatctccgacctcatacttttactctaggggaagakaaaacaataaacaaaaaaatcaataaacaagataatttcagacagtgatgtatcataaaggaaaaactatcaagcaagatagagtgatggaaattaggggagaatggttttaagttgaagggtcagagcaggcttctctgagcaagccatattagagcgaagacctgtactctagaggaggcaagccatgcagagacctgggggagccttccaggcaagggcataggaagggatcctgacatggacatggcgtggcaggtgagaaaaggcaaggcttcagtgcggtagagtggtgtgagcaagaggaccatg

SEQ ID NO: 640333 - DNA, 547 bp, Homo sapiens
taagaatataaagaaagtttgggccagattttgaaggatcttgaaggacaatgaaaagccttttttcggatcagacgctctcaaagcttcactctcaggaggtcaattcagtaacactatccatttgctccttcaatatctactaaaaacccagcatgtaaacccaggcacagtttaagctgctgggcatacaagctgaaatctccgacctcatacttttactctaggggaagataaaacaataaacaaaaaaatcaataaacaagataatttcagacagtgatgtatcataaaggaaaaactatcaagcragatagagtgatggaaattaggggagaatggttttaagttgaagggtcagagcaggcttctctgagcaagccatattagagcgaagacctgtactctagaggaggcaagccatgcagagacctgggggagccttccaggcaagggcataggaagggatcctgacatggacatggcgtggcaggtgagaaaaggcaaggcttcagtgcggtagagtggtgtgagcaagaggaccatg

SEQ ID NO: 640334 - DNA, 613 bp, Homo sapiens
taatcacaggaaaagatactcagcatcattaatcattagagagagacaaatcaaaaccacagtgagataccacttcayactcactaggatggctaaaatcaaaatgacaggtaataatgctggcaagaatgtggagagatcaaaaccctcacacattgatgatgggaaagtaaaatgattcagacatttaaagaacattttgacggtacctcaaaatgttaaacatagggttaccatatgacctgggaattctacggctagatgtaaacccaagagaatgaaaacatatgtccatacaaaaacctgtacacaaatgttcataggagcattattcatattgcctctgtttatagagataatccaaatgtccatcagctgatgaatggataaacaaaatgtgacacattcatataatggaatactacactgcagtaacaaggaatgaattgctgatatctgctataatgtggatgaccctcaaaaacattatcttcagttaaagaagccagtcacaaaagaccagatattgcatgattctattcatatgaaatgtccagaataagcaagtctgtagagacaaagtagattagtggtggcctagtgctgagagaga

SEQ ID NO: 640335 - DNA, 613 bp, Homo sapiens
taatcacaggaaaagatactcagcatcattaatcattagagagagacaaatcaaaaccacagtgagataccacttcacactcactaggatggctaaaatcaaaatgacaggtaataatgctggcaagaatgtggagagatcaaaaccctcacacaytgatgatgggaaagtaaaatgattcagacatttaaagaacattttgacggtacctcaaaatgttaaacatagggttaccatatgacctgggaattctacggctagatgtaaacccaagagaatgaaaacatatgtccatacaaaaacctgtacacaaatgttcataggagcattattcatattgcctctgtttatagagataatccaaatgtccatcagctgatgaatggataaacaaaatgtgacacattcatataatggaatactacactgcagtaacaaggaatgaattgctgatatctgctataatgtggatgaccctcaaaaacattatcttcagttaaagaagccagtcacaaaagaccagatattgcatgattctattcatatgaaatgtccagaataagcaagtctgtagagacaaagtagattagtggtggcctagtgctgagagaga

SEQ ID NO: 640336 - DNA, 613 bp, Homo sapiens
taatcacaggaaaagatactcagcatcattaatcattagagagagacaaatcaaaaccacagtgagataccacttcacactcactaggatggctaaaatcaaaatgacaggtaataatgctggcaagaatgtggagagatcaaaaccctcacacattgatgatgggaaagtaaaatgattcagacatttaaagaacattytgacggtacctcaaaatgttaaacatagggttaccatatgacctgggaattctacggctagatgtaaacccaagagaatgaaaacatatgtccatacaaaaacctgtacacaaatgttcataggagcattattcatattgcctctgtttatagagataatccaaatgtccatcagctgatgaatggataaacaaaatgtgacacattcatataatggaatactacactgcagtaacaaggaatgaattgctgatatctgctataatgtggatgaccctcaaaaacattatcttcagttaaagaagccagtcacaaaagaccagatattgcatgattctattcatatgaaatgtccagaataagcaagtctgtagagacaaagtagattagtggtggcctagtgctgagagaga

SEQ ID NO: 640337 - DNA, 617 bp, Homo sapiens
atgtaataaaagccatctatgacaaacccacagccaacataatactgaatggggaaaagttgaaagcattccctctgagaatgggaacaagacaaggatgcccactctcaccattcctcttcaacatagtactagaagccctggcaagagcaatcagacaagagaaagaaataaagggcatccaaatcggtaaagaggaagtcaaactgtccctgtttgctgattatatgactgtttaccttgaaaaccctaaggactcttccagaaagcttctaaaactgataaaagaatttagcaaagttcccagatacaaaattaatgtacacaaatcagtaggtcttttatacaccaagygaccaagcggagaatcaaatcaagaactcaaccccttttacaatagctgcaaaaaattaaaatacttaggaatatacctaacaaaggagtcaaaagacctctacaaggaaaactacaaaacgctgctgaaagacatcatagatgacacctacaaatgaaaacacatcccatgctcatagatgagtagaatcaatattgtgaaaaatgaccacattgccaaaagcaatctatgaattcaatgaaatctccattaaaataccata

SEQ ID NO: 640338 - DNA, 593 bp, Homo sapiens
ctagctcctcaaacatacctacctcaggacctttgaacttaatgctcccacttctttttatagcatggtctttttaagccataagagagttaagggacacttaaaaaaggccttccctgaacaccctaatgcagaatgatctaactcaacaaccacatttgtctaattcggggttatgtttgttcctttaataacagttatcaccatttattcatttttttgttttttttttkgtctcttcctctgacccatgctgtccaatacagtagccactagacacatgtggctctttagatttaaattcaagttgattataattaagaagcttacagaaaaaaaaaatgacaaattgtatttcaccaaaaataagaacttccgttcttttgaaagatactcttaagaaagtaaaaagacaagtcacagactgggagaaaacacaattaaaattgggcaaaatatttagacacttcaccaaagataacatatggatgaaaaataagcacgtgaaaagatgctcaacatcactaatcattgaggaaatgcaaatcaaaaccattagataccactttacatccattaagatgactgtaatc

SEQ ID NO: 640339 - DNA, 607 bp, Homo sapiens
gttgacagtactgatccagtaacacttgatagatttccatatttttcaggtagtaccactgatcaaaacaatacaatgaataatcttaggtattaaacacttcaaattttcacaagctttctaaatttstcaaattacacctttttctgctccacacattttcactaccatgaaatataacacagcagattccacttcaggttgtactgaattattgttttctcaaatgctttgaaaatattcttacccatagttattctatgcagactattcaaggttaattcttcagtcacttcaaactcagcattgacttcttgactaaacaacttagtggtattggtaacatttttcacctcatcaagaaccaaggaaagtcacttgccttgttttttagtttactattgatattactcctaatgccctcaactattcaattatctattctcactaaaaggctgataattttaaatctagtttctctggacccctttcttaatctactgcaagcacacagatttaatcagttcaccattggtaaatggttaaatggctttccttggttggctaacaaatgagccactcagaaacttaacttttattgtagcct

SEQ ID NO: 640340 - DNA, 587 bp, Homo sapiens
ggtcatgttccagtaaaactattctagacagtaaaatttttttttttttttttgagaaaaagtctcattcttatcgcccaggctggagtacaatggcacgatctctgctcactgcaacccaggttcaagcgattctcctatatcagcctcccgaatagctgggattacaggcgcctgccaccaaatacaaaaattagyattttttgtatttttagtagagatggggtttcaccatgttggccagactggtcttgaactcctgacctcaggcgatccacccgcctcggcctcccaaagtgctgggattacaggcatgaaccaccatgcctggcctaaagtttaaatgccatataatttttatgtgttattacatattattcttttgaatttttttcaactttttaaaaatataaaagccattcttagctcacaagttatccaaagggaggtggcaagccagatttagtccagggagcatagtttgtgccctctgattgaatgattaaaatatgcataattaaaaacatgccagctaaagactctatattctaccagactttataacagagctcacacaagtaacagag

SEQ ID NO: 640341 - DNA, 633 bp, Homo sapiens
gttataaacatagacaacagttgagtggttgcttagagctggggatgtggaagtgcagcaggagagaataggagtgacagctaatggctatgcatttcttttttggggatgaaaatgaagattttggtgatggcttcacatccctgtggatatagtaaaaaccactgaagtgtacacttttaactggtgaattataccataagaactgtatctccataaagatgttgttttgttttgttttaaaaaagatgttgtctggcccctttttcaacaaattacatgatctggggaattggccttttcatttataaactggaatagcatctgtttccatctttccacctctagctgtaagaatacataaaacatattaatacatgagagaaacattctagaaagctagtttcataacttgaagattrctctattgatttattgctgcaataacaaattacccccaaacatagcatcttaaaacaacaaacatttatttatttattcatttatttatcttttctgagacagggtctcattctgttgtccaggctggagtgcagtggcacaatcacggctcactgcgcctcaacctcctgagctcaagcaatcctcccacctcagcctcctgagtagctg

SEQ ID NO: 640342 - DNA, 468 bp, Homo sapiens
agatacaaccattctcttttattcacactaaaggatacactgatgcaaacaatgcaaaagtcatttacgtatgacactgaaatatattaccgtatttttatttggcagaacggcttcctaattaaattttgattaggcatctattaaaaggagtttacatttcttgatcaacccaatgactaaagtgtatgtcttctgggggtaggtgagaaaaactactgagtctgagaacttgctatgtgctcggaagaaagtgacgtgagtgtttttgtacatgtcacttgttgggatttggatatataacttatttttaatactgraaaacttccatactttcatatagtttttttttttttttggagatggagtctcgctctgtggcccaggctggagtgcagtggcacgatctcggctcactgcaagctccgcctccccggttcacgccattctcctgcctcagcctctaga

SEQ ID NO: 640343 - DNA, 615 bp, Homo sapiens
tgactgctgcggattaaaacatgagatagacactcttgcttttttatccttggtgtccgacctaggcctttctagagtggaaggaaggtgagatagagccaagggctttatcacgtcatgtcacaatcactgataattcctctactttttaatcagaatgctagttaattgagtgggagaaaaaaaatcaatggaaaaatatctttggtataccttgtggggaggcattrtttagatgaaaagaattacatggtagtgtaaaatttttgtttaatggtttgtttttatatgaaacagatacacctgggactatacaggaattctaagaactcccaaaaggtagatattacatatgtgatgatcctatgttctgtacattctaccacatagtagagtaggcacttaaatatgttttggattaatgaaaaccatatgagtcagaggacattcttaccaactttattagctttgtaattatggtatatgtttatgccagtttggctctgagatagccttagaatctaacctgaatccaaactgacctcaagggttgggtgtgctctcatctctttcagatcatttgggcaaagggttggttattccttttggaataac

SEQ ID NO: 640344 - DNA, 342 bp, Homo sapiens
catcttccactttgttcttcctcctcctcatgctgtttctaatctttgcctacccagaagcaaaaagartaagagaagagtttttacaatctcagaggctatattctgactagcatatttcaggtatctctgtttaccagttttcataaatgcaaaacaggcctgagtactgtcaagttcctctatttcttcctatatgtcttctcatatttgacctgaaaatatattattcatccttcgtattagaaacagaactttacatacgattttccagctcgtttttattattaggttggaactgctgatgttttgggcacgaagcccagttaggtggagtctcag

SEQ ID NO: 640345 - DNA, 576 bp, Homo sapiens
tgacacacagtgttgacttctttcatcatttgagacagatatggttgttgggtgaacaatttaataagacaaattgcccaaattttactttaccacataggcrtgactggcacatatgccccgaaaggacattttgtttttgccagaggaattactgtcctttatctgcaccctgatattattttctttatgcattgcatttctttctagaatgtcattctctgagtatgtttgtagggcaatgaatatgtgtgcaatgacgtgagttacaacatacctaaggagattaaaccatctcttattatttgtattgattttccattaccaactaaaatctgtttcaagggtataacaattgtagttaaattcaacaaaggactgataatgagtggattatttttcatgctttcttgagtcctgtcactattgacagataccctagaatgcagatatgcaatgaaatgctaaaatgtcagcatttcattaaaaataaacttctggagataaaagggtgactacttagtataccccaaagcacagagagcaccagtatatttgcaagaatgtccccagaga

SEQ ID NO: 640346 - DNA, 516 bp, Homo sapiens
cagcagagaagcacattttgttagagtggagaagaaagttatatgaaatctgatgtctgtcaaagatcactgctacaagactgccaacactggaaagggtcaggaaccatgcttcaaaaggcagcctgacacacagtgttgacttctttcatcatttgagacagatatggttgttgggtgaacaatttaataagacaaattgcccaaattttactttaccacataggcatgactggcacatatgcccygaaaggacattttgtttttgccagaggaattactgtcctttatctgcaccctgatattattttctttatgcattgcatttctttctagaatgtcattctctgagtatgtttgtagggcaatgaatatgtgtgcaatgacgtgagttacaacatacctaaggagattaaaccatctcttattatttgtattgattttccattaccaactaaaatctgtttcaagggtataacaattgtagttaaattcaacaaaggactgataatgagt

SEQ ID NO: 640347 - DNA, 547 bp, Homo sapiens
gactgctggtctgcctgccaaagccactctatctggtctgctcttagggtttctcttgtcctcctctgctgactggcatggtgctcctattattgcttcccacacttctttgtgcttagggagaggacggcctgtcctctgttaacgtgctttccaggtatttttctccagcactgtgattccctcatcatctccccagtttgcagcacacacattgtcgtattttacattcagattaaactattgactcaccatctcacctattgtgacaagtttctcttacctcatcggtatctggtcccatgataatgaaaargttcttagtcaatccaaagattcaggtcaaggaaagaaaaccagaaattggcttagccaagtaggaagtctgattgtcactgccacatggtgtcactattgaaacactggcaacctggcatgctggtgctgcccttgtctgctggcagtacagaggtagtttcctggagctgagtaggtggtgtgccactgctgatatctagaaatctgggatcctggggaagtctcgtcc

SEQ ID NO: 640348 - DNA, 468 bp, Homo sapiens
agcttcaaaaaagaggaaggcacaaggtcaatcaaaaaagcagagtaagaatttaagagagactgctgaagttggcctccaaaagagaagttttagtggaagagtagagamaggagcctgactgcagcaggtctgggagtgaggggaggtttcatggtgggaagatgaaatgtagaccatttctggaagcctggctgtaaaaagaggaaggagctaggaggtgttgaggggaagtttttggttactgtcccagtctggttttcatacccacagatttccagatgaaaatctccattctacaccttgtaccagaatgacaagctgtgcagaacatttcactattttgctccatagctctgcttcatgcccctacagtggagtgttcatacttctgtctcaggatctacatgttatttgtttgtttgtttgtttgtttttgagacagagtttctctcttgttgcccaggc

SEQ ID NO: 640349 - DNA, 468 bp, Homo sapiens
agcttcaaaaaagaggaaggcacaaggtcaatcaaaaaagcagagtaagaatttaagagagactgctgaagttggcctccaaaagagaagttttagtggaagagtagagacaggagcctgactgcagcaggtctgggagtgaggggaggtttcatggtgggaagatgaaatgtagaccatttctggaagcctggctgtaaaaagaggaaggagctaggaggtgttgaggggaagtttttggttactgtcccagtmtggttttcatacccacagatttccagatgaaaatctccattctacaccttgtaccagaatgacaagctgtgcagaacatttcactattttgctccatagctctgcttcatgcccctacagtggagtgttcatacttctgtctcaggatctacatgttatttgtttgtttgtttgtttgtttttgagacagagtttctctcttgttgcccaggc

SEQ ID NO: 640350 - DNA, 559 bp, Homo sapiens
atgttcagctgtcaggtttgttggtttcctaaatcaaccagtcatagaccatcacctaaaatatttttcactgtcaagttctagagcataaaattagtctttattgctttgaccattactgattttgaaggcygaggaatgatcacatagaaaaggcaacagagcctggaccagaagggctcccagatgaaatgcattttggctgatggctttcattggaacactgacatgaaggagctgtcagggctctgggcggtttccctagggtgtgaaggccaggcaggtcatgtggttacttttcatcctctgcactacttcctgagagctggacagtgtcattgagtttgggcccatggacaacgcatacaagggaaatcttggaactgcctgaccgttgttcagggcctctggtgctgaaatcctgcaaatctccaggacagaagtcaagatgttttctgagaagtctccaaagtctctccaatgaataagaaaataaagtcaagctagtggcttctccttcgaatgatacctggttttattttttttaatttcttttttt

SEQ ID NO: 640351 - DNA, 533 bp, Homo sapiens
ttttgtttcatacattttgcagctttgttttatggtgcatacacatttaacattgttatgtcttcttagtgaattcacccttttatcatatgatgtccttatttgactctgctaatttttttttgttctttcatctattaacatagccacttcagctctctttttattagtatctgcatggtattttttcccacccttttactttatttttaaattcttatttattttttgtttttgagacagggtctcactctgttgtccaagctggagtgcagtggcatgatcatggctcactgtatcacaaccttctgggttgaagcaatcctcccacctcaacctcctgtgtagctgagactataatcatgtgccacgatgcctggttaattttaaatttttttagacatgagatcttgctatgttgcccaggcttactttattttaatctaygactgtaattatatgtgaagttagtttttttgtaaacagcgtatagttggatcatgttccccaatgccacttttttcttcttttta

SEQ ID NO: 640352 - DNA, 630 bp, Homo sapiens
tacctaatgctaaatgacaagttaatgggtgcagcataccaacatggcacatgtatwcatatgtaacaaacctgcacgttgtgcacatgtaccctaaaacttaaagtataataataataaaataaaataaaaaaagaaaaagaaaatcaaaacaaaatatcaaaaacattttctatatggtaaaagctaaagtcatataacaccaaatactgtgctggaacgagagaaacgagaatcttcatgctgctcacagtagtaaagactggtatagccattctagagataaatctggaagtattttaatcaacaaatatttaaactattttaagggctaggaaatcagcagtgagtgaacaaaacatatagaaatatttgccttccttaagcttataatctagtggacagagaaaacagcaaacaaaatgttaaactaaggtatgttagatggtaataagaggcatagaaaaaataaagacaggatgagagtaaagtaggtggtcaaaagaaaaggaaacaattacaagtttaaatttggtggttagggaagaccctattgaggaggagacatttgagcaaagcccagtgagagataaatcacatgtataccctggagaagagagtcctaaggca

SEQ ID NO: 640353 - DNA, 624 bp, Homo sapiens
cttttcccaaatcttctccagaaagatttaagaggtgtgatttattataatttcaattataaaaggtttgggtttggcttaaagagttttcacttacaatgtctgagtctgttccaagggctgtaaaccatggcgggtttccagtggccccaggtagcatccccatagtcacattacttacaattggtaatgaatggctttgaccagaggggagwgtagatgagctgaatggaatgcttaagagcctaaaggcatgggagactgcttctggtggttagatagaattgatcatatcagtggcaatatgacacatatagaatatgttggaagacaggaagcctggagtggttttactcattcctgaatgctacgcctctgtgacatggaggtaggagtgccattcctgccaacgcactgtcattgaaatagattcatttgttcataagcatgcagagaaaatgtgtcctgactttgtacattcactctgggtagagcacctagaaacatctaagatgttggagattatgattgtctacttggatttgaaatgcctagtggcttcagagtgctttaaccattctgaatggtcatgataatagcatgtcttagaacaggggtccccaa

SEQ ID NO: 640354 - DNA, 593 bp, Homo sapiens
acatcatatttgcaggcaacttgtgtcagttatcacatttaggtcatatatcagctacatgaggcccatatttattgaccctattttatagacaggaaaaggtagagagatgtaaagtagagyaagcagaatcaccttgatcacaggtgatgactgcaaatctcatgctctattataaattcatctaggatttgatgggcataagccccattttctcctagtgttgagaagaaaaagaaactttctaatcaaaactcaaatggccatatctgtacgtcagagaacaaacttttgtaaagccatcgatgaggctgaacgaattgaactttgtgttttttcactcctgcaaaatcatcttctaaatgttatttatgagtctcttggagtttttgccttgcaagagacttcaaagattatgacatatcctcccttaatttatagatatgttcattacttggccaactttgtaattaaaaagtcatctttttcccaacccatgtagccctgggctgtcctctttctcctgaaatgcaaactgaggggcagacatgggctgtttaagaagggccagatggagctgtctgtagaaatat

SEQ ID NO: 640355 - DNA, 680 bp, Homo sapiens
tcttgcatctggccaatatgttttggattattttttcttatagtttgccacagagttcacctatcacagtaaaatctttccatgggtcctatagaagattgctgccatgagccttagtaaaaggcctttttaactccaacaaattrcaatctttagttctatcttatctctaacattatttgtctattctcaaaaaacagtcaattggagactagcaaaaatgaatttccctccccaaaataacacgaattacaacaatgataataataatggctaatacttttcaagcacttactatgtgaagtttctgtgtatttgatatatattatctcagttaatcctcactataattttaggtaaatactataattgttgttattataattattattatcataatcctaatttatagattaggaaactgagacaagttgcataagaaaagtaaggttatgaaagttttaagtggtggaacagataggatctcaggtctaactccaaaaactacatatacccttatccattatgctgattctccctaaggccatgcagattacatgcgttccattgattaataattgtatgctctatcatggattctatatcataattgtatagaagcatacattactggtctagttcccatagtacacttcaagcatcagcatactgttactgaa

SEQ ID NO: 640356 - DNA, 541 bp, Homo sapiens
tctttaatgtctctactcttttctaggtccttaagttttctccaattaatatttccactcagtagataaaaaaaggggatgtggaagaagtttttacagggaaggcctagcacagatcaatacctcttctccccatatttcgctggctagaactcagtcttacagtctctgtaaaggaggtggggaaattaagtctatgtctagacgtaaaaaggaatacgttccatgaacacagtggtctcacccagacagttcgaaatctcactaatttcttattcagaatgaataacagaatttgttcagattgtattgtctccttttcatctatgatcttgcatagcatgaccaccactaggcttactatttctctaaytgaatcctttctttcaatacatgtggtggctttgaaaatatgtctatgccttctttgattctcttttcctcatgaggtggagaatgattcccctccccttgaaggtaggctgcactcagtgattcacttctggtgagtagaatagagtagaaatgatgggatgtcatt

SEQ ID NO: 640357 - DNA, 597 bp, Homo sapiens
ttttcaacaaaatccgagtaaatcgaatccaccaatacatgagaaagataatacagcatactcaaatgagatttatccaggaatgcaagaatgattcaatatatacaaatcaataaatgtgatataccacattaacagaataaaggacaaaaaccatataataaacttaatagacacagaaaaaatatttgataaaattcaatagcttttactgataaaaactcaacaaactgaatatagaagtccatatatgacataaaaacactaaaggccatatatgacaaacccataggtaacatcatactaaatggggagaaattgaaagmtttttctctaagatatggaacaaaacaagggttctactctcagcacacttattcaacatagtacttgaagtcttagctgaagcaattgggcaacaggaagaaataatggacattcaaaatgaaaaggaagaagtccttgtttgcagatgacatggtcttatatttgggaaaacctaaaggcttcacaaactcttagatctgataaacgaattcagtaaaatttcagaatacaaaacgaacatacagaaatcactagcacctctgtacaata

SEQ ID NO: 640358 - DNA, 628 bp, Homo sapiens
ggatagctacttagtatggtaacttacatggtattgtggaattcgagagccagaagtggcttttatgagccaatagcacatttttagaggaggtaactttgaagaaaatgttccaaacaagagaagaaatggaaaagatagtctgaaagatatcaggtgaaaattactccttgcctaagtagagagtaataatataatcataagataattataacctacttggagcataaagcaaagctgggccccacatggctctcctttcatttcatcactactctgtgcttaccttgtcttcttttcaggctaggatttcttcactccaaccaygcacacccacagctaactttactaactcctgcctctaagccttcatcccaatcttttctcaacagctggaacgttccccttgtttctagccatgactccataaaccaccctgtcctaaaaaactgtgcaggattccccttcaaacagttgctttattttcatttttaggcattcttcacggatatttgtctcatcttgcccactggtctttaaattattggagagacagaattatccctcttctttatctttccttaccacattttgtcctatctcttctgctttttgagatgtgagttgg

SEQ ID NO: 640359 - DNA, 588 bp, Homo sapiens
tatcaaacttatatggttattgcagaagttgagtaatagtgcagctttataatatctaacacacagcttaactgtacttgctatctgtaggagcagttactatttggacaagatgtcattgtgggacaaaaaggggagtgttgtatctcagaatgtcaggaaaggatccagagcagtgatcactgacagctgaaacattaatatgtgtgattstattgtagttcttatttagttaaaaagctcatctcaaactagaaccgcaacagttggcatagttgtttcttatttacttccccatctcttattcgggggcctattcaccagttcatgtctgttagctactcagtatctgcctatctgtcccattcttttaattcctacagctatcacactacttcagccccttattgtcttgttgcttgactgaggcaatagcctcttaactggtctacctatcttcattttgtttttgtttttccagccctctcccctccctccactcccaagagtgatttactaaaattgtagatgcatggttctttatggtttgcagaatgaaggagaaatgcctcagcatggagttcagaa

SEQ ID NO: 640360 - DNA, 473 bp, Homo sapiens
attctgctggctgtatttttcttaaacattttaagagactgcagacatcatggctcagggtctgttgagatagactgctgaatagatattctgacacagcccttctggttatggtagtgatcattcccctggtaccatgttgccatggtcagagtgcattacaagagaagggttgtcttgaacctgcagcctccatccttctcatttgcagaagccccrctgcctcgaagaaagaactgcccagggccgcccactctagcaccttgttctcatctgtcttcccttgacaacagtccgtatgctgaaatagtctttcccatctactcttagtgccccttcttccagctaaactgccctgttttgagtttcagtgctgtcagctgctttctgtggtgatggtcaggagtctcactcattagtctatttgaggacactttcgttaacatggagaatgcatgtcttttggcatttca

SEQ ID NO: 640361 - DNA, 523 bp, Homo sapiens
tggtgtactgggattacattttccttttacaatatgttgttttccctggaattaataattatactacttaaaattcacttttgatgtagtcaccactaatttacccccagactttgcttagtggctaaatctcctcttagtacttttgttcattcaaacacctcggggactctgtttcatgttttcctggaggacttctggagccctctaggtctctgctccaatcttagctggattctcatggacctattacatagtgtctttctaacattttccctgagtcttctggaaattcctttcaccccacccctgggttggatttcctgtttcttggatcttgcatttcttrtttatgtgttcattttggtggggcacaccctccagtattttaagaatgagtgcagagaaactgcatttttgagaccttagttgtctgaaaaaatatctttgctctattttgaccttttattgatagcaagtgtagaattttttattgtaaattacttttccttggaaatttgaa

SEQ ID NO: 640362 - DNA, 562 bp, Homo sapiens
gcaacatcaagaatacagatagatttaatgccagggaaatctgggtctctaagtataagaaattatcgaatatggaaccagtatactgggtcttggaacaaagtaaattctcaaggtttgtttgacctgatgtttcctgcaaatattccacaccattcacgtattttctttctcacctagagttgagaggtggatgatttgagcctctcatgttgacaaagtatcaacattktagcagagagaagataatgaatgtttgtatttatgttttcgtagctgtgagttcatagtccccaattgtggcactgcgatttaaagtggaacaccacaaagttcaaagttagcttctcacagaaccaccactactctgtctaggctggaagtggtttctgggcctctaacagtggtacatttggaacgaatcataatacaacataccttgattgtctcttggtgtgtaaagcccttagcacattgcttgatacatagcaagtactcaataagggtaaccataatcactatggagaatattcatgaaggatagcgtaacaagctagttgca

SEQ ID NO: 640363 - DNA, 614 bp, Homo sapiens
ttcttacagaagcttatagggtggtactattaatatattgcttttgtggataagtaaattgaagaacagaaaggttaagtaacacagctaggaattggcaatcagaatttgaacccagacagacttgcggtaggacatgtgctcttaaccattggactcttaaaagtagaccaggtgggtaaaataggaaaggctggaagggagaggcctgtggaaggaagaatcaaccatgggtacctgaaggatgggatgttaacattctttatttcactaaagaaatgaatcattacaaagattaaataaaatcttgctatttacctrgtttttcaaaggaatatttactggttcttgataagttcagccccagggagccacaacaatgggttaatttttttcttgggctaaattttatttttttccctggtaaaaagaatatttaatacagagctcagaccatatgatttattgcctgtttgaaaatccttttcatcactgtatgttttaccagtaaatatttaatccttggcaccaagtgccaccctgtttattaactttagagttcatactttatagtaaactaaattctaaaatatcctatgaagagaaagacattt

SEQ ID NO: 640364 - DNA, 310 bp, Homo sapiens
agagtgcctatttcaacccgatttcaagccaggcttttattgattgttcccaaactgggagataattcagctatttacaagataagcattgatttctsgcactgagtctaacagcagctttctccaaatttgaacccattaaataaatcctgctgaagaattataactgttgtttgaaatgtgactaaaaatttgactaaaataattattgcatattaatttttaagtattaagcttattgtttgctcccgtccatttgataaccattctccttggcttaacaaactgctggttcttcccatcagtgttc

SEQ ID NO: 640365 - DNA, 613 bp, Homo sapiens
gggttttgctccatcgtacccctagggcacatgaacctacttgttttcttgttaactggcctacaggtgtcaaaataakccaaatttccacaagaaatctagaatgatgttacaagtaagcagatgaaaattatcctctcataattgtttttacagtggtaaagggaacagcagaggactccaaaagaaatatttaggtcatatatttctgctggcaggtgccagttgaggactgggttcagactggaatgcttatgagcaggcctagatagtttgtatgggtggctgcttgccaggcagtcatctggtcccggggataggggtcagggaaagaagaaactggctgcttgaccttcccctgttcctatgcaccctctgaaaaattgctagtaggagcttctgttgatgtgcttcagcactccagagctcctgtcttgtccagccaccctcaacccttgagactgaggaggacaggccctgcattgactgggaggcccagagaggaaactgggagactgatggcatctcaggcgacagagaccaaccacactaagccactttcttcttcaatccatggaggcataaacgtcagagaaggaacctcacaagttca

SEQ ID NO: 640366 - DNA, 480 bp, Homo sapiens
tgtgactatttcctaactgcagcgttttatgttttttacttaactagagcagattccacatatggagttatacatgcaggccagttctaagtcagatgtttataattacaaatactgaaatatctcagtcagataagaaacagagatagattgtgccccaggtgaaaaccaggtattatcaacaatgagaaaagaaaaggcaatggcagtattgattcccttgtctgatcccgtgtttttctaagtgaagagaccagtgtaattacccagatgaaatatyagtgcaattttctaatgacactgactcccttacagttattgaagttgtgatggtggcatggttagccttcctggcagtccccaacaagtcttcagaattggctgatgtccttattgtctgtgctaaaggaagagtctgtctccacaacaaaccctgccattctgtttcctactttaaagatcaaaatatcatttcagatg

SEQ ID NO: 640367 - DNA, 463 bp, Homo sapiens
gtttttttaaaatattttaagtaattcttaccctacctaccccaataccataatgatttccgtgtgtgtaaatatatacatacacacaagcacaggggattctgatccatgaacagggctaagaactctgggttcagaatttgggttctgaagccatagggasctgggtgtgaatgcaggttcctgggctatcagaccttgaatggggtccattacttccaggccaacagaatcaaaagctcgtggtatacagcctgaacatcagttagtttcagtagcaattactgatttaacgtgttctaaatgtgcagccaggactgaaaatcactagtttaatacttagttgtcagatttttttaaagggagataatatatgagattcaatgaaatactttatgaaaatgtttagcccagaccctggcccacccagctcaataatgctggtcgttattgttaaggcagg

SEQ ID NO: 640368 - DNA, 460 bp, Homo sapiens
atcatttatcttgccttttgcagtagagccttcctttcaggctattaatattcccttctcaagctctgagtagactaaaacagccaaaatgtgtttcttctctctttaaaaaaaaaatttgtattgcacatgtttaacatatataacatgatgttataagacatatataaacaaaatgacaaaccttagctagtctaaacaaaaaggaaaaggctcaaatgaaatcaaaaatgaaagtgaagaagttacaacagatgccttagaaataaaaaaggatcataagggattattatgagcagttatatrccaaaaaatgggataacctagaagaaatggataacttcttagaaaaatacaacatacaaagatagaatcaggaagaaatagaaatcctgaacagatcaataacatataaagaaattgaaaaagcaacaaaaacccttacagcaacaaaaaacct

SEQ ID NO: 640369 - DNA, 596 bp, Homo sapiens
tctcttcatgtataaaacattatagattattcttctgaaagcacagttctgatggctcaaaattgtctactacattaaggtatacatccaacctctgatatgatacatcctagcccagaatccagaattttcacatttttcatcccacaccccatgtacttctccagtctttggctcctctgctgcagccaaactcaactactctctccttcccaaacattcttgtccttgcttcctcctctttacccaaaatatatgatccctcactcttccccttcacccttcaagcatgaactcatttattgcttccttctcgggactttctccaatttctcctacctaytgggcattttctcatttctgaatccctttggtacattccaattttctgatacaaataagcagtggtgtcaaataggatgctgtgcacaaactaggtcacccaagtgtcttgtctgcttactcctaatgagtcatgctctccctctctcctctcttatggtttagatctcttgtcattccccttccaccctactgtaacctcattatgggcaggaactacatatactctatatcctaccatgcttcctcgtagt

SEQ ID NO: 640370 - DNA, 483 bp, Homo sapiens
tttattcctggccaagtctgcatttgctgtgactatcctttgattaaggtacttgacaccaaggagtgggtgacacacaagatacatcttttcagaagttattagcttctccaaaaaatggcattgctacctcttcataatgcccagtttaagaatgcatgaaagactagtaatcagtccttgtttcataatagttcctataagaygaaaggcttaaattaaatgatatatgggaacccttaatatggtacctgtcatacagtaagcactcaataaatgttggctgttattatttatattgtttgttttgaggaatgaggggtcacagccaccagtgtccatcaaacagtaaaattcgtagtcagttcactagttcttcaatggaagtggttctacccttgcgcagcctgtgtgtagtcctttctgtgggaacagactatccaattgctctagtggtgtatcctccaatgcttttggtggcaa

SEQ ID NO: 640371 - DNA, 542 bp, Homo sapiens
tttcttctagtggtgttttctttggccttataatctgaaaagagctggtactggttgacctttgatagttaaatccatcactgtaaagcaatttgtttacaagcaaatgccatcagccataagccctattggtaatggacataagacattagtgtcacacttgaaaacttgtttatctcatggcccttttaagtgacttctgtttactttgctaaaattgtagtcatatgttcatttggtaagatgtttagcagatttttaattagatggccatagtgagtgatttcgtccacacatttttctctttttttggaaattattttagctgattcacgtcctgtgaaaagttaaaaactgtatttttgaaacttaaaagaaaaaaaacaattcatacatcacttcctattttctgttaggactggtcaaataagtttgtatattttagaacattgtgccattccrcgggtggacgttttgtaacacagcttcattccagggacgttgccattcatctactacatagagcttcagtttgtggtacc

SEQ ID NO: 640372 - DNA, 531 bp, Homo sapiens
gaattcagagtgcagatggaagagatttgccttaatcaacaggaaagacaagttaacccatgagagactgaaggaagcatggttcaggggcacrgaagtttggggaggcagtgattttagggtattcaaatctaaaggacttattttttttttctgtgaaataggagacaatgacatatgcatagaaggaaaggagggggctagtagaaatgggatccccagtggagaatgaagaaagaagctaaccgggaagtgcagtggatgtgggcaacatttaaaaccattcaactcagattcttgattctggaaaatgtgttatggtggcttctgtgttacctagtccatctatttaatgaatacatagatccaaatgtgtttgagttatccatcatctgtgaccttaatgcatgatcaaagaggctgttatttagatgcctaaaaactagacagtcctccaaagatgctaacagcaaacaaaaaacctttacacaactgtaatgtggggggagtaaatgtcaccaccaattgctg

SEQ ID NO: 640373 - DNA, 555 bp, Homo sapiens
gaattcagagtgcagatggaagagatttgccttaatcaacaggaaagacaagttaacccatgagagactgaaggaagcatggttcaggggcacagaagtttggggaggcagtgattttagggtattcaaatctaaaggacttattttttttttctgtgaaataggagacaatgacatatgcatagaaggaaaggagggggctagtagaaatgggatccccagtggagaatgaagaaagaagctaaccgggaagtgcagtggatgtgggcaacatttaaaaccattcaactcagattcttgattctggaaaatgtgttatggtggcttctgtgttacctrgtccatctatttaatgaatacatagatccaaatgtgtttgagttatccatcatctgtgaccttaatgcatgatcaaagaggctgttatttagatgcctaaaaactagacagtcctccaaagatgctaacagcaaacaaaaaacctttacacaactgtaatgtggggggagtaaatgtcaccaccaattgctgaacatctattctatatctactatt

SEQ ID NO: 640374 - DNA, 444 bp, Homo sapiens
aatacatttaagaaatctcatccaaaagcatacttacaatggatgccttttatgatatgtacattgtacctcaacaaagttgatttaaaagcatactaagagaagatgacaaaaaaaggagtacataccatattatttatatgagttctagagctggtaaagctaatctatagtggcagaaatcttatcratggttatttgtggaagaggaaatgaggaattaacttgaaaggggacttgagaagtttgtagggtgacagaaaagttctactcatgatttggatggtgatgatacaacatatacatttgtcaaaacctacaaaagtgaattcttaatgtctgtattttaaataaagtatacttcagaaaaagatgatttttaaaaagcattaggaactattgctcctatgagtccattctgaagaatgtgacagagaacatgct

SEQ ID NO: 640375 - DNA, 530 bp, Homo sapiens
gccattcctctaattacctcatttgccagyggcttttctcattataatctgttaccataggtgggagtagaggacaggcatggtcacagtactcctattgaatagtgatatagctgggattatactatactgacagtctcataacttcaccatataattattttgacaagtttacacaaccttctgtccttttggtgttccgtaatttattttccactctttgttttgttaattttttcccatttttttccattataaatacctcattatcagcatcttcatgcataaaactttttctaaatttctcatctttttaaggtatataaaactgttcttgtaaactacttattccctgcttcttaattactctgggataaaataaccagacaagtaaacttttagaagtaagcctaaggtaaaagttaataggctctgaaggaaggttaaatatatggactttgtgatattttaacctctcaaaagcattttgtgtttttcttctgctttcaggctggtccacatggtgaatg

SEQ ID NO: 640376 - DNA, 530 bp, Homo sapiens
gccattcctctaattacctcatttgccagcggcttttctcattataatctgttaccataggtgggagtagaggacaggcatggtcrcagtactcctattgaatagtgatatagctgggattatactatactgacagtctcataacttcaccatataattattttgacaagtttacacaaccttctgtccttttggtgttccgtaatttattttccactctttgttttgttaattttttcccatttttttccattataaatacctcattatcagcatcttcatgcataaaactttttctaaatttctcatctttttaaggtatataaaactgttcttgtaaactacttattccctgcttcttaattactctgggataaaataaccagacaagtaaacttttagaagtaagcctaaggtaaaagttaataggctctgaaggaaggttaaatatatggactttgtgatattttaacctctcaaaagcattttgtgtttttcttctgctttcaggctggtccacatggtgaatg

SEQ ID NO: 640377 - DNA, 638 bp, Homo sapiens
ctctgtaccccttggtaccaaaacatttcatatatgttctgtacttgctgtttcatttctgctcctccctrtctctctaaatctcattcacatctggctttcacccctaccacactaccaaaactatctttgtcgagatcaccagtgatttccatattattaaacccattggcctattttaagtcctcaggttctacgacctagagtcagcacttgacaggttgaccaacccctcctccttggaatcttttggcttccaggaaaacacgttctcttggttttcctcctatttttctggtagatgctgctaagtttcctttgcctgttcctcctcatctccagggctcacaacttgaattgtttctttactctccatgttgttaggttcacatgcagtctcatggctatatgtgatcagcacactgaaacttctaaaatttaactctgctctgaacagcttccctggtacccagacttgaatatccaactgtgatagctccacttggatgtctaaaaggaatctccaacttacgtgagataaactctggatcttctccccatgtcagttagtagctactctatctttctagttgcttatgccaaaaaccttcaagctatccttgactctccttggccag

SEQ ID NO: 640378 - DNA, 541 bp, Homo sapiens
tttctcaaatggcaccttctttgacaggtcattcttttggtaaggtactctttgactgccatattcaaattataacttcccatcctggcctgcaacttcccttctcctttccttgctttatgtttttccgtttaaaacttctgtataatttacccacttaycttgtttattccacaaggatgtcatgtttgtccctttttttcgctgatgtgtttttgcaccgaaagaagtgactattgcatagttaaaacttaataaatatgtgttgattgattgattgaatgaataactgaatgaatgggtttggtggaatgggtctctgtagttagacctctagagtttgactcattcatattccttctatttctgctctgaatcattctgacaaatagtaaatttgtacaccaaacttgtctttctgtatgtacatgacagcagtgtcattatcatcatgatgttttctggcacctttatatagaaaagtagcatcctgctcaagtgtagtaactggtacaaaaggcactctggttatgaacaacaa

SEQ ID NO: 640379 - DNA, 633 bp, Homo sapiens
tacattcagagtgttcctctaatgttgtctatagattataaactcacggcaaggtagtacattttattcatttacactcaaacagttcttaccttagaaacaagctgtgtttgaagctatgtttaagcctagcttacatacatctaggccccactctatgcaagatggccatttgtccccagaattggcagcacatatgcctgtacattgaaacatgtatgtctttttcacaaaggcttttctgcctaaaatgctcattaggtcctttctgtctattgaagacttagattaatctctttgaaaccttccctagcacccccagtagcctgatcactatctcctcaactcccctagtgcctcatatggtattatgttataatayatcatatcatcattgtttcagaatgaagaagaaaaaggcataattcattgccccttaaggatactgtgtctttcttcatttttaaatcacagagcctagaaggtgctcagagcatgtttgtcaagtaagtgctgaaataatattaaggttcattgtttggaactcacaatgcattcttccactttaccatagaagcatactaggcaagcagttagctcctccagtccatcttacaagtgactaactaacaa

SEQ ID NO: 640380 - DNA, 633 bp, Homo sapiens
tacattcagagtgttcctctaatgttgtctatagattataaactcacggcaaggtagtacattttattcatttacactcaaacagttcttaccttagaaacaagctgtgtttgaagctatgtttaagcctagcttacatacatctaggccccactctatgcaagatggccatttgtccccagaattggcagcacatatgcctgtacattgaaacatgtatgtctttttcacaaaggcttttctgcctaaaatgctcattaggtcctttctgtctattgaagacttagattaatctctttgaaaccttccctagcacccccagtagcctgatcactatctcctcaactcccctagtgcctcatatggtattatgttataatacmtcatatcatcattgtttcagaatgaagaagaaaaaggcataattcattgccccttaaggatactgtgtctttcttcatttttaaatcacagagcctagaaggtgctcagagcatgtttgtcaagtaagtgctgaaataatattaaggttcattgtttggaactcacaatgcattcttccactttaccatagaagcatactaggcaagcagttagctcctccagtccatcttacaagtgactaactaacaa

SEQ ID NO: 640381 - DNA, 534 bp, Homo sapiens
agatcagcctaggcaaaatagcgagacactatctctattaaaaaaaaaaaatttgtacacaagtcagataatataattttgttttttaatgttttgctttgattattatactcttattctatactcatttgattctcttttggaactgtataaattcttttccattkgaaataccaaagggattattatgcttgattttgaagagatgattacacatggtgtttaaaaacttcaggcatcattacataacccaaacacagctatacacagataataaacgcatacatttttcttagtctatactatcatttaacttaaagttgcaaacatgggttattatatgcatcctttgactttgaatggctgccataattgtttactgaggtaatataccttacctctcctgcttttctctttagggaaaccttgtgacgtataaagtaatgtaaattaatagagtactgattcagagcactttccaaatgagttatgtttaagctgaaaattaataagtttaatgtatataaaataaaa

SEQ ID NO: 640382 - DNA, 436 bp, Homo sapiens
actgattcagagcactttccaaatgagttatgtttaagctgaaaattaataagtttaatgtatataaaataaaatacaggcaaaaataaaaaacatacctctttttcttcttcatgtgatccgagtaacagaatacaaggataaacaaaataggataactaattacaaagaaaaagtcatgatgacctctttcagtatacttttttgcagagataaacatagtggccctcagactcatgtagcttgcatggattcaagacaaaagaatatctttaatgcttgagttctagtcttcacctctgcaaatctttctcaacagtgaggaatggtatcaagttatgaaatattcaatctggaaaaattcctgattgggtccctttgaaaattcatctrttttgcttggtgtattaaaacttaagatgtcagttttttactg

SEQ ID NO: 640383 - DNA, 574 bp, Homo sapiens
ggtttagtgttatttttcatcaccttgacgtcagtgagaaatatcactaaattaatgcaaaaaagatgttcaataggatttcgtgaataactcaaagcccactgcaaatacaggattgtctatgatgttttgaattgatggwaatctgtctagggatttccagcaattcataaaccaatttcagctgaccgatgtaaagtttcattttttttaaaacctggcaagttagaatgaaagtagaatcccttccaggcaaacaccctgaatcgattcaattatcattgacaactaacgaattcactgcaggtatcagcaaaagtcccttacggagaaagtcgaccacggtggcttatgtccaaactctcttgacttaccttaaaacatcagcaaagaaagaattgtctccaccttgttaggcctgcctacacagatttctaactcccacattcccttcagccttcaccactgtctttagacgtgctttttcctgcatgtgcaaaagtcattccacttacactctaagcttgagaactttctcccacatgtttcttgtaggctgccaatattcatcagc

SEQ ID NO: 640384 - DNA, 574 bp, Homo sapiens
ggtttagtgttatttttcatcaccttgacgtcagtgagaaatatcactaaattaatgcaaaaaagatgttcaataggatttcgtgaataactcaaagcccactgcaaatacaggattgtctatgatgttttgaattgatggaaatctgtctagggatttccagcaattcataaaccaatttcagctgaccgatgtaaagtttcatttttttwaaaacctggcaagttagaatgaaagtagaatcccttccaggcaaacaccctgaatcgattcaattatcattgacaactaacgaattcactgcaggtatcagcaaaagtcccttacggagaaagtcgaccacggtggcttatgtccaaactctcttgacttaccttaaaacatcagcaaagaaagaattgtctccaccttgttaggcctgcctacacagatttctaactcccacattcccttcagccttcaccactgtctttagacgtgctttttcctgcatgtgcaaaagtcattccacttacactctaagcttgagaactttctcccacatgtttcttgtaggctgccaatattcatcagc

SEQ ID NO: 640385 - DNA, 429 bp, Homo sapiens
ctaagtacaaattcctttacctgccattcatcccttgatcatcgctataagctttctagactaatctctgtaacttccttttacatgccatacagaaaaactggtctatttggtactgactggacacacgccatgatttctcccttggtacctttgcacaaaccagccctcctgttggattgttgactctgttctttcttcatgacctgctcccacatcttgctggtcaaaatcttattcatcatccaagacattttccaattttaactcttttgtggacctttctgaatccttcaagtagaagtgaccactaactaaytgaaccaagaccctcttctcatgctgaatacgtttttgaaacatttgtgaactgtcatatttgtatataattcataagataagaccttgacatacaagaaaaataccatg

SEQ ID NO: 640386 - DNA, 570 bp, Homo sapiens
gtaaaatctggagttgattgtgttactttttcatayggttccagaacatccttcagagtcccactcaaccctacacaccggcagtctttaggaattagttggcactggcattcagtcagtagtagaattgagaagttcctgggattttgaattctatggggtctttcctgtctggcttatcccttgtgcttcctcagtggcaaatgaaaacatgaactatgcaagtgacctttgatgagacgctatctgggaacataattgtcttcaaataggtatactctagaagatgaatttacttttactagatgagaaaggatgcaaataggtgaaaatcactggaagacaactcttagaggattttcagatatatttttaagggaaaatagtgcaataattagagctgcgccattaggtggtgagttctttattgacaaagctacttgaatggattctggcagcagcaaactgccggggatattagaaagggaagattcatgggtcaaccctccttggtgctttcactatattttgtacatattctttatggtttctttactttattgttttgta

SEQ ID NO: 640387 - DNA, 606 bp, Homo sapiens
acacacacagttgacaatgtacaaggccaataacaaaaagataaatatgtttggaaatttataaacatacttctaaataagaagaaattataatggaaattagaaaatacgtagaactaaattataacaacaattacatatcaaaacatgcataatgtagcaaaagaactgttaaaggaaaatttataggcaarctcttacattcaaaaaaagtaaaataaggctgaaaatatatccacaaagcacacaacttagtgcagtatagagagataaaaagaaggaaaatcaagctaaaagatgtgaaggataaataagatgtttcaacacacaactcaggcatcctagaataagagaacagagtggggaaggggcactgtgtgaacacataaaggctgagtattcttcagaattaaagaaaattataaaatcttcatgttaaagaaacataatgcattcccaaaagaccaacaaaaataaatttgcacttggtcacactgttgtgtatagcaacagcaataatgtgtccaatttgcgggggttaaaaacaaagcaaaaccaaaaaactaaacagtgaggtgattgaaattaaacattctacagcctttc

SEQ ID NO: 640388 - DNA, 588 bp, Homo sapiens
tttagattttctttaacaaggtatgcatgcttaaaatttaggagtaacgggctgggcatggcgactcatgtctgtaatccccgaactttgggaggccaaagagggtgggtctcttaggctcatgagtttgagaccagcctgggcaacatggcaaaaccctgtccctacaaaaaatatgaaaattagctgggcttggtggcagaggctcgtagtcccagctacttgggagggtgaggcaggaggataacttgagcctgggaagccgaggttgcagtgagcctagatcatgccactgcactctagcctgagtgacagagagagactctgtttaaaaaaaaaaaaattaggagtaacaatttaaaaagtataagtaaaatgtattactgaaaaaccattagcaagaaaaagaggatgaggaaattgggtcacaatggcagaagagaaaggaggaaatgcatgcaaaatagagagtaccaagtaagacggtaaaaataaatcaaaacatgccagtattcacaactactayacaacaagtttaccagttaaagaattagagattctcatatttgattttaaaacaagagtgaa

SEQ ID NO: 640389 - DNA, 542 bp, Homo sapiens
ctgcgtgcccaaatctgttatgtaagggctggcttatgctggctccactgccttggctttagggccttacctgtcagagggagcttgatgctgctgccaacctcctaaactgtgtggtgttttctcccctcatgcctatgctaarttattctcctgtcaataatctttcatctgtgtttctttcagaggcatctactgcaagtgcaaaagaattgtggtgaaagctgcctgatcaacagctataacctggcagaatttctccttccagccttacctgaaaattgcttattatgaaatactataccacaatgcttcatgcttattccaatctcagattaaaggcaaactctttgtccaaaacagtacacacccacaggtgggggtgtatatgagcagttttgacaacgaacaacaaaagttggacctaaatttttcacttagcacaagcctagtaattttattattgttattattggatgtagttgcattgaggattctcttattagagacatatcttggttcaagtaatcaatggaatgtgt

SEQ ID NO: 640390 - DNA, 542 bp, Homo sapiens
ctgcgtgcccaaatctgttatgtaagggctggcttatgctggctccactgccttggctttagggccttacctgtcagagggagcttgatgctgctgccaacctcctaaactgtgtggtgttttctcccctcatgcctatgctaagttattctcctgtcaataatctttcatctgtgtttctttcagaggcatctactgcaagtgcaaaagaattgtggtgaaagctgcctgatcaacagctataacctggcagaatttctccttccagccttacctgaaaattgcttattatgaaatactataccacaaygcttcatgcttattccaatctcagattaaaggcaaactctttgtccaaaacagtacacacccacaggtgggggtgtatatgagcagttttgacaacgaacaacaaaagttggacctaaatttttcacttagcacaagcctagtaattttattattgttattattggatgtagttgcattgaggattctcttattagagacatatcttggttcaagtaatcaatggaatgtgt

SEQ ID NO: 640391 - DNA, 564 bp, Homo sapiens
cattaaataaaatagtctaccttcccatcttgacaaatatacctctatgacaacaaaattgaaaaaaggagtgcagctatgggattttttttgattgctagtcagcaagacatcaaagatgactgatattcattattactgtgtatgtcagcagttcttttgacaggccagtaatgtatagatgagtcataaacacatatataactcataaatatgtttacttcataaaatacaatatttcttgtcttcatttttataaaatacttaagttattatagttaaggttttcccataaatttccttatattgacagtaatgctaaattagataatcttttttgaatcatcatagttgttagattattttcaktattttcaattttgacaaacttctttatgttgaggcagtaactactggaactgtcaaaattattacagtaaaataaattcagagatggccactttatgtattattttatgttcaaatataacataatcataaatgataaactatattggctatacaaaatgtaacaatattttaatttaaccattccaatcgcca

SEQ ID NO: 640392 - DNA, 564 bp, Homo sapiens
cattaaataaaatagtctaccttcccatcttgacaaatatacctctatgacaacaaaattgaaaaaaggagtgcagctatgggattttttttgattgctagtcagcaagacatcaaagatgactgatattcattattactgtgtatgtcagcagttcttttgacaggccagtaatgtatagatgagtcataaacacatatataactcataaatatgtttacttcataaaatacaatatttcttgtcttcatttttataaaatacttaagttattatagttaaggttttcccataaatttccttatattgacagtaatgctaaattagataatcttttttgaatcatcatagttgttagattattttcagtattttcaattttgacaaacttctttatgttgaggcagtaactactggaactgtcaaaattattacagtaaaataaattcagagatggccactttatgtattattttatgttcaaatataacataatcataaatgataaactatattggctatayaaaatgtaacaatattttaatttaaccattccaatcgcca

SEQ ID NO: 640393 - DNA, 552 bp, Homo sapiens
gttgaggcagtaactactggaactgtcaaaattattacagtaaaataaattcagagatggccactttatgtattattttatgttcaaatataacataatcataaatgataaactatattggctatacaaaatgtaacaatattttaatttaaccattccaatcgccatctcattcaacttctgccctctttcaaagtaatatgtaaatccataaagaatttagttgttgttttttcaattttttcaatgctgagttataaagaaaaccaaacacagcaggatgttgctcaatttgttaaaatcttctttcaataaagactactgcctgatctacggtgggcagaagataatgtctacagaaagtgtattcagggtcacatacatgtaaatctttcccattatagagtgcatgacatttattggaaagcttttgtgtggcttcctagtttcttctaggtagtaaaactattttctctaaaatgttttgaaatatttttaaatcacttatcaaatgaagtaactmtactttgatacttctgggtttttatgaaa

SEQ ID NO: 640394 - DNA, 480 bp, Homo sapiens
aggggaaagagggaagagcagagcttgtagcttacagtttctttctttcaagtcatgtggtaagtgaatttttggtgtgagcrttcatgagaatttctgccaaaaaataaaatggtcaagtcttgcattaagtcaggctgagttgatgttcaatacactaacggctaaagatagaagttcccattataaatcacatctcaaaatgctagtaatttgcatttaggacaatgaactgcaaattctattcaaaaggtaaaattaaaataagactttcaggtgttgttctctcccaaatctttacaatcttatgaccattgtggggaaaaaatttgtggggaatgttgaagcacatcttacctagtctcagtgtgacctaagggttatcgtccacaccaaaaaggcaaaaggcaccctagagctagaagttgtcttccctttgaatggaagacaactcaaactctaactacacattgtgggaaa

SEQ ID NO: 640395 - DNA, 560 bp, Homo sapiens
tctagtcatgtgatacatgttagagcatgatgccccactatgcaagtgtataaaaaaacccatctaaacattgcttgtacatcattccttttcctacaacaccttccttaaaatgatgagaactgagccccttggggagctagtaccaggattcctttcctatatgctgcttccttgtatgtttgattcacaaatctattaaatcgtggccgagaaaaatttctgtttatcctggtgttaatttctacttatgcaagaaccaataaatgtggggtccgggctgcagtaacagccttggtgactctgctggagcccataagtgaggatatttccctaaggagaagcaccagagagccagcaagacctccagaatgtgaccttgtgatagatgaagtggccacttgaaatatttgcttcagtgtktctacagccagtgagtcctctcttggcccaaggtacttttgttctccttctgagccctgcccctcattttcttttccctcttgattggcttagggatttctggagtaagaggtcctagtcacctctgtgctaggttt

SEQ ID NO: 640396 - DNA, 496 bp, Homo sapiens
tctctgatccctgaggaccaggattcctccatccaggggaatcctgggctgactactgggcttaaaggtcttgaattacatcaagactaactccctgatgcttttccctctaccaggatctttaatcaaaggtaacaggagaggcaggattagacatgagcaatgatctcagtgttcccmgtgactctcttctaggatatattctctccaaatgggggcaatttaagctagaagacctaaagaaaaagaaagtaatctccctttgtaacatcacctggccccagaacccattgggagattaggagcaatgaacattatatgagtctcctagtataatgctactttacagctaaacttgttttataagcagtcacagaggtgggaagaaatctcttacgtgtgaacttttatgaagttgtatcaagatcctggattattggactcatgtcacatatgcatgatggcatctatcattcccagcttattgcctggggtt

SEQ ID NO: 640397 - DNA, 496 bp, Homo sapiens
tctctgatccctgaggaccaggattcctccatccaggggaatcctgggctgactactgggcttaaaggtcttgaattacatcaagactaactccctgatgcttttccctctaccaggatctttaatcaaaggtaacaggagaggcaggattagacatgagcaatgatctcagtgttccccgtgwctctcttctaggatatattctctccaaatgggggcaatttaagctagaagacctaaagaaaaagaaagtaatctccctttgtaacatcacctggccccagaacccattgggagattaggagcaatgaacattatatgagtctcctagtataatgctactttacagctaaacttgttttataagcagtcacagaggtgggaagaaatctcttacgtgtgaacttttatgaagttgtatcaagatcctggattattggactcatgtcacatatgcatgatggcatctatcattcccagcttattgcctggggtt

SEQ ID NO: 640398 - DNA, 530 bp, Homo sapiens
tcttgagattcacataaaagtagatatccaaggaagatggttcttgatatgacatcaggatatagcccaacaaacttgaggaaactttgacccataaaactctagttgtataaaataaatctaaaagcctmaatgagcacccaaaaatttgcactatgattaataagggctcagcattgttctttctctggactttaaaatcctttatctaaaactaatgaaagtggtagaattcagagttcagagtgaaagtcaagcctcagacctgggagaagcctgtatttcatttatttgaagtaaagacttgagggctataaacctcatgcactgtctcttcatctccctccagaatatattttaacataccatttgatataacatactacatggccttaaatagcagcctttttgtagattcggactaattgggctttcaactgaatgttgctgtgaaactgatggccttactatcagcagcgagctggctatttttaatccaaacacagagaaaatgcaatgacaaatatgaa

SEQ ID NO: 640399 - DNA, 510 bp, Homo sapiens
aaattttaatttagaatttttatggaacattaatcatcaaagcacccaggagaggtgaatgaaggttactaatattcttctttaggctctaggtcacaaatattcagtaacggcctacttgggtacaaaggaaaagcaaaaataataaaatggaaaggaaaactatcaatttcaatgtccttaaggtaatattcaaaaatttcttaaaaaatataatacagaaataaaagaatcccctaaaaggtaaaacaatctccaaattaaaagggtatatacattgttctaggaagtattagtagaaacaactaacaagacacaccctaatgagttgccaaactttaaaattgcaaaatcaattcttcaggcaaccagaagaaaatagtaagaggagaaaaaaatcaggctacccacagactactaggtgggaacaygtaatgccagaaaatgatgaaagactgtatacacaatttaaaataagaaaaatatgactcatgaatatataaatgagca

SEQ ID NO: 640400 - DNA, 569 bp, Homo sapiens
ctccaaattaaattatcattcacagcacagggtccccagcctcataggggcctgttaggaactgggtggtacagcaggaggtgagaggctggcaagcaagcgaagcttcatttgtatttacaactgctcccatcactcacattattgcctgagtttcacctcctgtcagatcattggcagcattcgattctcatagaagtgcaaaccctattgtgaactacacatgcgagggatctaggttgcacgttccttatgagaatctaaggcctgatgatctgtcactgtctcccatcacccccagatggcagatatcagtgacagatatcatcaagcattacatawtgcaatataataataatagaaataaagagcacaataaatgtaatacacttaaatcatccccaaaccatcccccatccctgttcgtggaaaaattgtcttcgacaaaaccagtccttggtaccaaaaagtacctttgtgacccatgacttatggtattgggaatcctaattatttcatttctctatctctaaaaaccatttacttattcgttttttacaaatattttt

SEQ ID NO: 640401 - DNA, 557 bp, Homo sapiens
gccccatgtaaatgtttgctatcattattaccatgatgttgggaaaaattatagggaccagatttggggaaagaagttcaggatttagtttgggggcatgtgaggtttgagacaagattcctatctgcaatccaagtggagctgttggacagtcagattcacatatatatgaatctacaggttaagtgttatcaatgtatagaagcaactgaaaacataatactggatgagataacaaagagaagagttataaaaatattgccctggagaacatgaagggagggagaatataacaatgtcctagaagccaaataaatcaatcatttcaaggaggaggcagtgatcagcttaaccaaatgtttctgagtgctcaaataagaaaaagactgagaattttctattgkatttagccatgcagaggtcctcaatcaagagctttctcatagaggtgttaagggtgaagactagaaggaagaattggaagtaataaacaaagtcaagtctttttaaaagttttgctctgaaaggcagtaaagaaatacagtattacttgaaaa

SEQ ID NO: 640402 - DNA, 532 bp, Homo sapiens
actctaattttaaacacttcttgcatttttatctaaaaatacgatgtcctttctaaggactatttctggacagcagtttggactaaccagtaatctcacaaaaactgattattcttttgctggcagtgtctgaaccttattagagacaaaactagatccaggcaaattagataagcactaagaagtttggcaagcttgagagtagcaggtgatgtccaggwcaagaaacaataattactagtggatccaaatgccacaacggtccgttggtcagagtgggagcttacgggtatcaagtgagagattttaggtatcaatttgcctaacagtgggcacagtgactacatagacatattacacagttactgctcacttcataagtgtatacctgtatagtaaatagactaagccactgcaaaattcccacagaagctctctaacacaatggagggagacttgtatcataaagagccaggagaagcccgtggagttttcctttcttaccacaatgataagctaaatgtaatatctt

SEQ ID NO: 640403 - DNA, 532 bp, Homo sapiens
actctaattttaaacacttcttgcatttttatctaaaaatacgatgtcctttctaaggactatttctggacagcagtttggactaaccagtaatctcacaaaaactgattattcttttgctggcagtgtctgaaccttattagagacaaaactagatccaggcaaattagataagcactaagaagtttggcaagcttgagagtagcaggtgatgtccaggacaagaaacaataattactagtggatccaaatgccacaacggtccgttggtcagagtgggagcttaygggtatcaagtgagagattttaggtatcaatttgcctaacagtgggcacagtgactacatagacatattacacagttactgctcacttcataagtgtatacctgtatagtaaatagactaagccactgcaaaattcccacagaagctctctaacacaatggagggagacttgtatcataaagagccaggagaagcccgtggagttttcctttcttaccacaatgataagctaaatgtaatatctt

SEQ ID NO: 640404 - DNA, 593 bp, Homo sapiens
acaataattactagtggatccaaatgccacaacggtccgttggtcagagtgggagcttacgggtatcaagtgagagattttaggtatcaatttgcctaacagtgggcacagtgactacatagacatattacacagttactgctcacttcataagtgtatacctgtatagtaaatagactaagccactgcaaaattcccacagaagctctctaacacaatggagggagacttgtatcataaagagccaggagaagcccgtggagttttcctttcttaccacaatgataagctaaatgtaatatcttgcccactgagtaatttcagagattagtgccrccatctagggctttgaaagattcagagattctgagtcctttcatatctcaattttatctgcctgcttggactatgcaaaataaagagtatttcagaatgacagtggattattgtaaactatcaattgttgctactgttccagatgtagcctctctcaacaaatacatccctcagctcctggaatgtgctattattctgatatccgctttttctctatcccccaaatcaaaacaataccaaaagcatttcatttttta

SEQ ID NO: 640405 - DNA, 490 bp, Homo sapiens
ctactctgactctaccaaaacctaatactgagtcaggagctgttaatcaaaagaagagtaatttgtcagtgatggcatagctttgctacaaaatcttagcggattgcactgaaattcttctaataatactttctccctataacatcctgtttgctccatatacttcaagctctatcgggcctatgggctcctaagctcccagtgatggagttgattacttacagcctgaaatagcaagagagatcctcttgctcaggacccattgaccaagatgttcacctcagtttgactaaactttagataagtttcttccttctttctttcctttcctttcctttcctttcctttcctttctctctctttctttcttcctcctcctcctccttcwcctcctcctcctccttctttcttctttcttcttcttcttcttcagatagggtctcatcctatcacccaagctggagtgcagtggaacaatttcagctcactg

SEQ ID NO: 640406 - DNA, 594 bp, Homo sapiens
caaaataattattgtataatgcttgtgaaaattcacaacatgaataaaatattacatgacttataaggtgttttgtccatgactcactttttwaaaatttttaatttttaacttttgtgggtatatagtaggtatgtatatttatggggtacatgagatagtctgatataggcatgcaatgcataataatcacaccatggaaagtggaacatttatccttcatattgcaaataatgcaattataatttttagttattttaaaatgaataattaaattattttgattataattaccctactaagctctcaaataataggtcttattcattagttctattttttgttgtacccatttaccattctcacctccctccccagagccccactacccttcccatcctctggtaaccatccttttactctctgtctccatgagttcaattgttttgacttctagatcccaaaaataagtgggaacatgcaatgtttttctttctgtgcctggcttattttacttaacacaatgacctccatttccatccatgttgttgcaaatgataggacctcattctcttttatggctgaacagtacca

SEQ ID NO: 640407 - DNA, 594 bp, Homo sapiens
caaaataattattgtataatgcttgtgaaaattcacaacatgaataaaatattacatgacttataaggtgttttgtccatgactcacttttttaaaatttttaatttttaacttttgtgggtatatagtaggtatgtatatttatggggtacatgagatagtctgatataggcatgcaatgcataataatcacaccatggaaagtggaacatttatccttcatattgcaaataatgcaattataatttttagttattttaaaatgaataattaaattatkttgattataattaccctactaagctctcaaataataggtcttattcattagttctattttttgttgtacccatttaccattctcacctccctccccagagccccactacccttcccatcctctggtaaccatccttttactctctgtctccatgagttcaattgttttgacttctagatcccaaaaataagtgggaacatgcaatgtttttctttctgtgcctggcttattttacttaacacaatgacctccatttccatccatgttgttgcaaatgataggacctcattctcttttatggctgaacagtacca

SEQ ID NO: 640408 - DNA, 476 bp, Homo sapiens
aaaattttcaactacctttttgaaactgaaaatccaagcaagtaaaatatagatataggtaatgaataagcacaaactactacatagaactctgcacccaacagtgaatgtacattcttttcaagcaaacaagggccatttataaatattgaccaagtactaaatttgaaaggaaatctcaataaatcataaaaaattggtatcatgcaaacagtattctctgatcacaatatcaggaaattataaataaacctcaaaaagataactcytctccaaatcctatacatttaccaagcagaaaatatactgctatgtacagtaagtcatagatttataaaggaaatcaaaatagaaaactacaaaagatttagaacaggatgacaacaagttagtacatatcaaatgctgtgggacatagctaaagttgtacttaacagccttaaagatactcattagaaagcacataagactgaaaa

SEQ ID NO: 640409 - DNA, 536 bp, Homo sapiens
tgaggtaaacttgacattggaaggcagaggctgaatggacctcaggggctaacagggtgttgaacttctgggaacagcagagaaacagcttggcacaatcagtcatcccaggcagtgctgttttagaaacgagctaccatacagctcatgtccggttgacggggagaccatccaagtagaaaggggatgatctgggcctctggtctaccgtgcgcacaaggataacagtcacttttacctagggtgtggatggaatgtttaattcattccagtcaggcatttgtatcttgatgtcctgtctcaattgctagggtttgttttagatcttttacttttaccagggacaccttggttttatcattaggtacaggaataacaggtgtttcattcaaagttgaaattatcrgggatgggggaagaggaggtgggaaaagaggtatatttgaaagatacttacaggatctctctcattataattggcccctacaccatagagactactgagggtgggcctagggtcagtggaggtagagatg

SEQ ID NO: 640410 - DNA, 589 bp, Homo sapiens
agtggggacatccccaaatccattctggtgaggaaaagtcagcaggagaagctatatcagctcccaggagctgtaatgcccagtggctagcattggtagtattaaggacacacgtgcatgtctatgcgcagaggtggcagtatcatcatgggataaaccaatttagttacttaattttggacgycagtcttatttcggccttccaagtctggttctttcagccttcctgagatattgtgaactacctatatcatataatttatatttttctgttcaaattatccagggttcttgtatgtaacaaccctgactgacacaatcataactggggaagtatatgagtggcagagtattttttttgaaatagtaatcattttctcccatttgttctattccttactcaagcatctatgtcattttattcctatgttttttgaggaatgatatggtaggataaaagcaaaggataagagaaaaagaacaatttctggcctccaaaggctggtggcctcggggagagtaacaacaaaacttcaacagacaaaatatttggaaatgatatcacaagaatgagagaattgagctgagc

SEQ ID NO: 640411 - DNA, 589 bp, Homo sapiens
agtggggacatccccaaatccattctggtgaggaaaagtcagcaggagaagctatatcagctcccaggagctgtaatgcccagtggctagcattggtagtattaaggacacacgtgcatgtctatgcgcagaggtggcagtatcatcatgggataaaccaatttagttacttaattttggacgccagtcttatttcggccttccaagtctggttctttcagccttcctgagatattgtgaactacctatatcatataatttatatttttctgttcaaattatccagggttcttgtatgtaacaaccctgactgacacaatcataactggggaagtatatgagtggcagagtattttttttgaaatagtaatcattttctcccatttgttctattccttactcaagcatctatgtcattttattcctrtgttttttgaggaatgatatggtaggataaaagcaaaggataagagaaaaagaacaatttctggcctccaaaggctggtggcctcggggagagtaacaacaaaacttcaacagacaaaatatttggaaatgatatcacaagaatgagagaattgagctgagc

SEQ ID NO: 640412 - DNA, 583 bp, Homo sapiens
atgagctatatatttttttctggaaatttttctaatctaacttttcacaattattggcagaaagttaatatccttttatctttttgatgtttgtggagggttaaggttatctttttcattatccacactgattatttgtatctttttttttttgagacggagtttcgttcttgttgcccaggttggagtgcagaggcacgatcttggctcaccacaacctctgcctcccagattcaagcaattctcctgcctcagcctcccgagtaggtgggattacwgacatttgccaccacacctggctaattttgtatttttagtagacacggggtttctccatgttggtcaggctgttctcgaactcccgacctcaggtgatctgcctgcctcagcctcccaaagtgctgggattacaggcataagccaccacacctggccctgattatttgtatcttatttacttttaggaagctctttacctataaaaaatgtttaatgacacttgagatgttgcacagctatactaactttcatgatacttaatgtctgatggaatgtaattgaactcttccacagttggaattca

SEQ ID NO: 640413 - DNA, 452 bp, Homo sapiens
ggaattcagagacatactgacaggttttgttccctgtgggtctcataagcaagttggattgaagggagagacaggagaacacacagtatgggagaaatatgtctgaggttcagagtaggcctactgagttcataatgytcatgaaactagtgggtccatgaatcagtcaggctccagaaaagacacagaaactatatcagtaacttgaacagaggaagtttactatgaagaattattaaccaggtaaaatatggtaaactttaaaaaaaaggcttgtaaggtataataaaggtagcaactgcataaagcagttaccactcataagattgaatcaaatgggaataaaaaacttaaaagtcttatgagtagagggtatgtctgttgcagaagtacactgcctgccactctagggaagaagaaacttgttggaagtccggcagtgcagaactgtg

SEQ ID NO: 640414 - DNA, 552 bp, Homo sapiens
ggatgttaatagttaatctgaattttattataacttctagatgatttcattctggtgataacaagagaagtcccaacattggaagtataaagattatccttggaacaggaaacaaaataaagtacaaagtgatacaatagagaaaaaagggaaaaaaattgaattatgctgaagatgtaaaagtggagaatgagctagtgagagtgttggtatttacttcaaaaggcaccaaacaatcgggaaataggaaaaaaaattgaatgggtatgtgcaggaatatatgcatcacaggaaaatagataaggattatcaatcagattcttttttcaattgacttacatagcagtgatgcatsactcccaccgatagatacatcatttcattgatggcggcatttttcatggcactatagtaaacagtgaaaacttgattacttttcaggaagattacttttcagtacccaagaagggagctggatgttatcctctgtttagttttcatttgtgtctttcatctttaatataatcagtagattataaatagaaacctttc

SEQ ID NO: 640415 - DNA, 534 bp, Homo sapiens
ttctcattttaaacacttagaagtattttaatctgctcaagtactctgatttcttgaattctatggcaccacacctcatggttttcattccacctccctggaaaatccttctgtcccagcacacttctttctctgtgaaagcrctgaatgacagaatagccccaaaccagacctagatgttcttctattttccatctacgtttacccaacccaccatgtctccaaatagcagatgtacaaaaagctcctttttctcatagttgttcttcttgacatctctactggactgtctaattgacactttagatttactgcctgtcaaatactggctatttccctctgaaagtgaaaatggatggcatacaaaacatagatggagagattcagaagatgaacatttcttccattgtacaggcagaaaaaaaagaggatgggtacaagtgccatcttggtaggtttaggcaagtatcaggcaggtgaagggagacctcaacttaaagcttctatcacctcataagtgaaaagagaatggga

SEQ ID NO: 640416 - DNA, 534 bp, Homo sapiens
ttctcattttaaacacttagaagtattttaatctgctcaagtactctgatttcttgaattctatggcaccacacctcatggttttcattccacctccctggaaaatccttctgtcccagcacacttctttctctgtgaaagcactgaatgacagaatagccccaaaccagacctagatgttcttctattttccatctacgtttacccaacccaccatgtctccaaatagcagatgtacaaaaagctcctttttctcrtagttgttcttcttgacatctctactggactgtctaattgacactttagatttactgcctgtcaaatactggctatttccctctgaaagtgaaaatggatggcatacaaaacatagatggagagattcagaagatgaacatttcttccattgtacaggcagaaaaaaaagaggatgggtacaagtgccatcttggtaggtttaggcaagtatcaggcaggtgaagggagacctcaacttaaagcttctatcacctcataagtgaaaagagaatggga

SEQ ID NO: 640417 - DNA, 504 bp, Homo sapiens
ttaacctactaaaactcaacataaacaagagtcaccccaaaataaataaataaaaataaagtccttacctcaaaaagagtgtatatgtgattgtgaggactatgcttcttaaagtgggaaaaagattgcatacattactcacttgaagaacccacaagcactaatagatccaagcccagtgttttatatcttatcatgtttctattttaattaccaaatagctataggtattaattcccaaatatgtgtaaacctattctaaaagccttgtgttagtcacctctctgaggacartatgtggacaagccacacatctcattttaactctgttttacagatgagaaaactaaggttcagacaggctgggttatttggtcaacagactgtatctatacagtactgtatatcctcaattctcagaacagaatctatgtggagaaaaaagtcaagtgcatgaacttagccaagatcaacatggcagtaattatcagatttgggaactga

SEQ ID NO: 640418 - DNA, 594 bp, Homo sapiens
tcagtaactcctttggctacttcaaacatgttatttaatcactggattgaatgtttacagaaaagtagttataatgcctattttgtacaggaggaactgatctcagaggagttagmtaactttatcaaacaaccacagttaataaactgaaagccaagatttaaacacagatgtgactctaaaagtcaatttgttatcctctggatcattatttgtgcaattcactataggttcaaaaggaattcaaatatatgagcatcagctggcctggaattatcagtaagtttcatgaagaagcaagtgactagttgggctggaaaactgggtcagttttggaaacactgagaattgaagatgaaatctttcaggcaagggagacctaactgaaggaaaccatctccaaataaattcatggattgtgaaagcacaactataatgttttcttactcacttattgaaacacaaaacttaatcctagcctgtatctatgaaattaatgtctggttttaaattgcatattttcaattctgaagttagaaacataatgccattggggtttcaaagaaaatgagaatgtctgtattgcagagaaat

SEQ ID NO: 640419 - DNA, 445 bp, Homo sapiens
agaattctgaatttgaatgacaaggaagctcaacaagatgcaggagagagttgaaacccaatacaaggaatacaagaaattcagtaaaacaatccaagaagtaaaaaatgaaatatctgtttaagaaaaccaaactgagtttctggaactaaaaaatttactaaggaaatttcattatacagttagaagcattaacaacagaatagataaagctgaggagagaattttagagctcaaaaactggtcctttgaatcaacacagtcacattaaaaataagttttaaagarttttttaaaatgcacagcctccaagaaatatgttattatgtaaggagaccaaacctatgactcattggcatccatgagagagaagaatagagagtaagcaacttagaaaataaatttgaggatataatccatgaagatttttccaatcctgctagaa

SEQ ID NO: 640420 - DNA, 600 bp, Homo sapiens
agtgaaactgatccatttttatgacgtttaattaactgcaataaaatgtgttctcatcaagactgctgaccattcttatgtcctgaaagcttaccctaagtgacatacttttcaattggtaaacacaggaatgggcctttttggggaaatgatctgcttgtttctataactgccctttgaaagaatgcaccatggcatcggagatccagaagaatgagccttgttgatccagtggggtccaggagttgctccgtccttggggggctcacgttctgtttgctccatgagaacagagaagggagactgttgattcaggggagggctcatctcaccaacctggcattgtatgagcctgctgaatcagatttggggccggttttgatcaccactagagtgtcagagaaactcagcagtagagaaagcagagattttccctatcaygtggtcaacaggaagcaaggaatcaagaaaccaggaaccaagctgatctcataatttgctcataatttgctcctggtatgctcctccttggtcaccaaggcagggtttccaggggttgccattgagatgaagccaccatattgattggaagggatgacc

SEQ ID NO: 640421 - DNA, 561 bp, Homo sapiens
ttgtcatcttcctggccggcttcgtggccctgatgaggtcggtgccygacccttccacccgggccctgctactcctggccttgctgatcctctacgccctgctgagccggctcactggctcccgagcctctggggcccaactcgaggccaaggtgcgagggctggaacgccaggtggaggagctgcgctggcgccagaggcgagcggccaagggggcccgcagtgtggaggaggagtgagccggatgccccacacaccgccagtgtcataccaaagagctgagctgcttcggggccatgcagccctcctgccagccccctgcccttttcttgccctgtctctgaaccttcagaacattgatccttgccgcagccccactagccaagagaaacagagaaagaccattccccctgcctgtccttgcggccctgtcttctgaggttctctgtctggggttggctctcttaaccctttctctgctcccagcctgcctcaccagggaaggttggaggggcctccctctggcttctgcatctgcgccagcaaacatcactgccgttg

SEQ ID NO: 640422 - DNA, 597 bp, Homo sapiens
cctcttgttgtccctcctccctcggctcccctgtccaggctctggggatcgagtgagggcctgcctgtcctgcagagaccttgccaacccactcaccagctgggtgtagcagaaggtggcatggaagcccaggaaggtagacaagaaggcgatgcctagtgccaggatggtgaagaacagcagcagcaccgagagactcttccagggcacctgcaaaaccagggtgcaaagcctgcaaaaactgggcagttttacaggccagccagtcccggaatcagtctgcagactctgaccaaggagatggataaaagaagggaagctttctagaaggggagtgacctgtcatctagtgagcacctgttacgtgcttattttaatcttagttgccttattagrtagctactctgattagccccatttcacagaggatgaaacagaggttcagaaaaattgaggtacttgtccaaagccacacagctggtatgtgaaagctgggattcagacccatccaattccaagacccatgtggtcaaccattcagactgacacccatcagcaaaaaagtacagaaaggtcaagtaagaaaatacatggaaa

SEQ ID NO: 640423 - DNA, 597 bp, Homo sapiens
cctcttgttgtccctcctccctcggctcccctgtccaggctctggggatcgagtgagggcctgcctgtcctgcagagaccttgccaacccactcaccagctgggtgtagcagaaggtggcatggaagcccaggaaggtagacaagaaggcgatgcctagtgccaggatggtgaagaacagcagcagcaccgagagactcttccagggcacctgcaaaaccagggtgcaaagcctgcaaaaactgggcagttttacaggccagccagtcccggaatcagtctgcagactctgaccaaggagatggataaaagaagggaagctttctagaaggggagtgacctgtcatctagtgagcacctgttacgtgcttattttaatcttagttgccttattaggtagctactctgattagccccatttcacagaggatgaaacagargttcagaaaaattgaggtacttgtccaaagccacacagctggtatgtgaaagctgggattcagacccatccaattccaagacccatgtggtcaaccattcagactgacacccatcagcaaaaaagtacagaaaggtcaagtaagaaaatacatggaaa

SEQ ID NO: 640424 - DNA, 514 bp, Homo sapiens
ttgggaaggcatgattgcattttgaaatgtgagaaggacatgagatttggggccagggcagagtaatgtggtttggatctgtggacatgagaaggggccaggggcagaataatgtgaattggatctgtgtccctgcccaaatctcatgtaaaattgtgatccccagtgttggaggtggggcctggtgggaggtgattgaatcatagtagagatttctcaggaatggtttagtgccatcctgttggtgccttcctcaagatagtgagtgagttcttatgaaatctggttgtttaaaagtatgtagaacctctccctactttgctccttctctggccatgtgatgtgtctgctccccttttgccttacaccatgattggaagtttcttgacktctctccagaagccaagcagatgctggcatcatgtttcctgtacagcctgaagaatcatgagccaactaaacctctttttgaaaaaataattacccagtctcgggtatttctttatagcaacgg

SEQ ID NO: 640425 - DNA, 493 bp, Homo sapiens
catgtttcctgtacagcctgaagaatcatgagccaactaaacctctttttgaaaaaataattacccagtctcgggtatttctttatagcaacggaagaacagccttacacaaagagtgaggtatttatgttagtcttcatactctgggcttgtttgtacctatcctttttttaggatggctctctagatatttgaagaaacttgggtattgtgatgtaagtctttgaacacyccagcttcatttgctttagggggcatcccaagcccagtaatttgccagctctagcagactcatagacgtaccaccttggtggtcttagtaagctctgaaagaactccctggattaccaggtggacctttgttctcctttcctcacattcctccaaagaaagagactctctctgtctgtgcttagctgcctggtattggggatgggtgatgcaagcatgcccttggccacagccactgggactgtgctgggtccgacctgaa

SEQ ID NO: 640426 - DNA, 323 bp, Homo sapiens
agcatgcccttggccacagccactgggactgtgctgggtccgacctgaagcaagtacagcactgggtttcacctaaagcccacagtgaccattgcctgtctactgcctgtgttcacccaaggcctaagggctcttcagtgatcttgtggtggatactgccagtcctkagtctctcccttcaggtcagtgggcactcccctggcccagggaaggtctagcaatgctgtctaggagctaaggcctagaatcagtgaccctaggagcctgcttggtgctctaccccactgtggccgagttagtgcccaagccacaaaactaagttc

SEQ ID NO: 640427 - DNA, 611 bp, Homo sapiens
taggtgctgatagttcagtgtgttatgccaattagatagaatctgcaatcacactttctatgcctttcttttgcggatagtatttggtcgataaattagttaatacaatttgatgaacacttcctacatttgtcagatggtactggataccttgctgtaaactaaatagcatcaggttgttttagaatatgcagtccctacaaagttgagagctcctgcattagtacatcctagaatgarctgtcattttaaaatgtttcattaaatttacttgtcagtgaggttaagaaaaaaacacatgattttaatatactaaattaacaatgtgactttttgatttggctttagcaatggcaatctcttcaatttgaacaacttctatcagccctagtctacttcaatcatagatctacttttttaaaacaaattatttttctttaaagttccagggtacgtgtgcaagatatgcaggtttgttacataggtaaacgtgtgacatggtggtttactgcatctataaacccatcacctgggtattaagcacagcatgcattagctattatttttcttgatgctctccgccccccagctcaccgtccaacaggccccag

SEQ ID NO: 640428 - DNA, 529 bp, Homo sapiens
agtgaggttaagaaaaaaacacatgattttaatatactaaattaacaatgtgactttttgatttggctttagcaatggcaatctcttcaatttgaacaacttctatcagccctagtctacttcaatcatagatctacttttttaaaacaaattatttttctttaaagttccagggtacgtgtgcaagatatgcaggtttgttacataggtaaacgtgtgacatggtggtttactgcatctatraacccatcacctgggtattaagcacagcatgcattagctattatttttcttgatgctctccgccccccagctcaccgtccaacaggccccagtgtatgttgttcccttccctgtgtccatgtgttcttattgtttagctcccacctataagtgagagcatggggtgtttggttttctattcctgtgttagtttgctggggataatggctttcagctccattcatgttccttcaaaggacatgatcttgttcctttttatggctgcttagtattccatggtgtatat

SEQ ID NO: 640429 - DNA, 431 bp, Homo sapiens
tccccaatgatgttggatgattagagactgaaatcttcgctatccaagctacattatcattaaaatcacaaatacatccaaagcaaatgaaatcgataacatcttatgatatcaaaaatgtttgggtaattaaagaaacctattgctcatgccattcawatatacaaataacttaaacaaaaggtgaatgccactcacaaaccaattagcctagaggttgagatggaacagattttttttttttttttagagaaaataaaaatctttatttgcatgtattttttaaaaaggaatgagccaattttattttgtttcttttggagtccaatgtgatcaaccaatccactttgtgtgaaataatgagaggaggcacagaaagtgtttagcatggtgcctggcacatggtaatgcttaaataacacagtttttat

SEQ ID NO: 640430 - DNA, 431 bp, Homo sapiens
tccccaatgatgttggatgattagagactgaaatcttcgctatccaagctacattatcattaaaatcacaaatacatccaaagcaaatgaaatcgataacatcttatgatatcaaaaatgtttgggtaattaaagaaacctattgctcatgccattcaaatatacaaataacttaaacaaaaggtgaatgccactcacaaaccaattagcytagaggttgagatggaacagattttttttttttttttagagaaaataaaaatctttatttgcatgtattttttaaaaaggaatgagccaattttattttgtttcttttggagtccaatgtgatcaaccaatccactttgtgtgaaataatgagaggaggcacagaaagtgtttagcatggtgcctggcacatggtaatgcttaaataacacagtttttat

SEQ ID NO: 640431 - DNA, 431 bp, Homo sapiens
tccccaatgatgttggatgattagagactgaaatcttcgctatccaagctacattatcattaaaatcacaaatacatccaaagcaaatgaaatcgataacatcttatgatatcaaaaatgtttgggtaattaaagaaacctattgctcatgccattcaaatatacaaataacttaaacaaaaggtgaatgccactcacaaaccaattagcctagaggttgagatggaacagattttttttttttttttagagaaaataaaaatctttatttgcrtgtattttttaaaaaggaatgagccaattttattttgtttcttttggagtccaatgtgatcaaccaatccactttgtgtgaaataatgagaggaggcacagaaagtgtttagcatggtgcctggcacatggtaatgcttaaataacacagtttttat

SEQ ID NO: 640432 - DNA, 478 bp, Homo sapiens
agatctcaggatcctttacacttaaaaactaccgagaatttcaaagagctttggtttatgtagggtattcaccatactaaaagactgaaactgagaaattctaagatgtgtatttgttgatttatttaaaataatactatttttttacatgttaaactaaataatgtgcttttaggaaaaattaatgctattttccaaaacaaacaaaaaaaagtaacaagaagaatgacatcgttttatacttttgatgactgacttaatatcttgcttaataaaacacaggtttattgccatatctatttctatattcaaccgctgactatatamtcttgtaattgaaaccttttaaagaaaacgtggcttcacatgtatatgtggttgaaaaagagaagagcattttaatatcctttctattaattttagatatttttatttaaatatacaatctgaaaccatatcaataaatacttaatgcttg

SEQ ID NO: 640433 - DNA, 581 bp, Homo sapiens
tcagttttttataaactcattcaggaaattaaggggaaaggaatattttataactcaatctatgaggccagtgttattctgataactgaatttgaaaaaaaatgttataagaaaagataactacagagtgatatccttgttgaccataggtactaaaattaaaaaaaagaasagccaatttaatccaataatatatacaaacagtatcatgaccaaggtgggtttatctcaaagaaacaagattggtataatatattaaaatcaatcaatataattcaccgtattaacagattgaaaaagaacaactatttgatcatcttaatagatgcggaaaaagcgttcgaccaaatctaacctgcatttctgatgggaactttcagctaactgtgaataatgcaacaagaaaatgttttccaaataaaaaagtttctctaaaaatcttgcaacttacgtcatgtttaatggtgaaaggccgaatgtttttgctcttagatagtgaatgaataaataaattgtactatgtacatacgataagatatacaataaaatattatctagctataaacggaaatgagctgttg

SEQ ID NO: 640434 - DNA, 581 bp, Homo sapiens
tcagttttttataaactcattcaggaaattaaggggaaaggaatattttataactcaatctatgaggccagtgttattctgataactgaatttgaaaaaaaatgttataagaaaagataactacagagtgatatccttgttgaccataggtactaaaattaaaaaaaagaagagccaatttaatccaataatatatacaaacagtatcatgaccaaggtgggtttatctcaaagaaacaagattggtataatatattaaaatcaatcaatataattcaccgtattaacagattgaaaaagaacaactatttgatcatcttaatagatgcggaaaaagcgttcgaccaaatctaacctgcatttcygatgggaactttcagctaactgtgaataatgcaacaagaaaatgttttccaaataaaaaagtttctctaaaaatcttgcaacttacgtcatgtttaatggtgaaaggccgaatgtttttgctcttagatagtgaatgaataaataaattgtactatgtacatacgataagatatacaataaaatattatctagctataaacggaaatgagctgttg

SEQ ID NO: 640435 - DNA, 611 bp, Homo sapiens
ggcaagctgcatgaagatattgtgggaatcactatccctgactctttcaagtccttgatgatggcattaactgcagtcctttcaggaatgtaggagtgcttctagtttactagctccaggaatgacttccacttggccttttccttccataataagcctcactccacaggtcaaggagcaaatgcgtggattttgtcagttgacaggttatgtctattccaactgcatactctggaaccagggaaataaacacaaggattctgcaacccattggacccctgtgagatgaaccagaacctaaaattacattgatcactttgatagttaattcagtgtgtcaccttggctaggccatggtacccacatattgggccaaacacttagatgtttctacgaatgcatttttttagagaaaattaacatttaaatcagtagamtttgattaaagcaaattatcccgcataatatgggaagtcctcatccaatcagttgaaggcttcaagtgaaaaaatactgagctcttctgaaaaaagggaattcagccagcagactgtcttctgactgcagattatcttctgactacaatactaacttttccctgagcttcaagc

SEQ ID NO: 640436 - DNA, 611 bp, Homo sapiens
ggcaagctgcatgaagatattgtgggaatcactatccctgactctttcaagtccttgatgatggcattaactgcagtcctttcaggaatgtaggagtgcttctagtttactagctccaggaatgacttccacttggccttttccttccataataagcctcactccacaggtcaaggagcaaatgcgtggattttgtcagttgacaggttatgtctattccaactgcatactctggaaccagggaaataaacacaaggattctgcaacccattggacccctgtgagatgaaccagaacctaaaattacattgatcactttgatagttaattcagtgtgtcaccttggctaggccatggtacccacatattgggccaaacacttagatgtttctacgaatgcatttttttagagaaaattaacatttaaatcagtagactttgattaaagcaaattatccygcataatatgggaagtcctcatccaatcagttgaaggcttcaagtgaaaaaatactgagctcttctgaaaaaagggaattcagccagcagactgtcttctgactgcagattatcttctgactacaatactaacttttccctgagcttcaagc

SEQ ID NO: 640437 - DNA, 615 bp, Homo sapiens
ctctccacatgtaatacttttaattgtattattgcctcaaagcctcagtttcttcatgattaaatttgaaattataacatttcctttattatgttattgtgagggttaatcaaactcatgtttgcaaatcatttaacatatggctgggaacagagtargttctcaattggtaactctttgttgtgtgattatgattactattttattattaacattattattatttgccttatcttgaataatttagtttttcttctatttatttgatagatatgaactagactttttattcttggtcattagccttcccaattcagtggtcagcattttcagttaggtcattcttcatgctctaaatggagccatttatcaaaactcaccagacttcttgctcatgtacaagaggccatcctggaatatcctctatccattgaaatgtgcactcaggcagtgacacggaaatcagtacagcaaaaactaatgatctggttctattaacaattgctaatttgggtggtaagtgacctgagatgaagaaaacgcaattttgcttgccaataaaataaaaaatggttgcccttccagttccgtagagattataatcaatgatacttt

SEQ ID NO: 640438 - DNA, 615 bp, Homo sapiens
ctctccacatgtaatacttttaattgtattattgcctcaaagcctcagtttcttcatgattaaatttgaaattataacatttcctttattatgttattgtgagggttaatcaaactcatgtttgcaaatcatttaacatatggctgggaacagagtaggttctcaattggtaactctttgttgtgtgattatgattactattttattattaacattattattatttgccttatcttgaataatttagtttttcttctatttatttgatagatatgaactagactttttattcttggtcattagccttcccaattcagtggtcagcattttcagttargtcattcttcatgctctaaatggagccatttatcaaaactcaccagacttcttgctcatgtacaagaggccatcctggaatatcctctatccattgaaatgtgcactcaggcagtgacacggaaatcagtacagcaaaaactaatgatctggttctattaacaattgctaatttgggtggtaagtgacctgagatgaagaaaacgcaattttgcttgccaataaaataaaaaatggttgcccttccagttccgtagagattataatcaatgatacttt

SEQ ID NO: 640439 - DNA, 620 bp, Homo sapiens
tgtgcagtagtccaattccacttaaaatttcagttctacatgcaattgaagtgttttctcttttttttagctttactttgacttgtagctcagggacttacaatatagaaatgagggtgtgagttcttgtttaagtcttccctgacttcctctctgtttttcttcctgtcctctaggttttatgtagagttaaaaaaagttagaaaaaaaatgtctaaatgagttatattgtttgttatctcttatarccatccactgtcagagctgaccttcaaatattggttctctcatggaaaacctgagacttttaaggttcctgtcttgagtgatacattctctgataaatgctttgctatgtcttctttatcctatccctttcttagtgggatagaagacccatgaatttttattgctatggtcctcttaccacagcagacaacccacttggccaaagtaacttgaagatgatttgaacccatcccgctttccctgagaatttattgcttaccctgccattcaggaagtgtacctgatctgaccactaatccttctttctttatcatgtagattcctgttacctcaaccaatctttggtctttagacttttctaggatagaaac

SEQ ID NO: 640440 - DNA, 620 bp, Homo sapiens
tgtgcagtagtccaattccacttaaaatttcagttctacatgcaattgaagtgttttctcttttttttagctttactttgacttgtagctcagggacttacaatatagaaatgagggtgtgagttcttgtttaagtcttccctgacttcctctctgtttttcttcctgtcctctaggttttatgtagagttaaaaaaagttagaaaaaaaatgtctaaatgagttatattgtttgttatctcttataaccatccactgtcagagctgaccttcaaatattggttctctcatggaaaacctgagacttttaaggttcctgtcttgagtgatacattctctgataaatgctttgctatgtcttctttatcctatccctttcttagtgggatagaagacccatgratttttattgctatggtcctcttaccacagcagacaacccacttggccaaagtaacttgaagatgatttgaacccatcccgctttccctgagaatttattgcttaccctgccattcaggaagtgtacctgatctgaccactaatccttctttctttatcatgtagattcctgttacctcaaccaatctttggtctttagacttttctaggatagaaac

SEQ ID NO: 640441 - DNA, 588 bp, Homo sapiens
atgttactctcagacctaagggaagctacaaaagaggcaggagtgcggaaacagaagaaacaatagcagtattctaggaatgtgtgatacattaaatatgtgcataatttatttaatgacaggaaataaaaaaaggtgttaattatttttcatgacttaatttgagcatttttttcgygtttatgatgcaaagaaagttcagctttgaaaattaatgttatctatttcagaaacacacacacacagagatcaaagcactgttctactattcatgaagttttaatgtggagtgtctgtctcaacagatgtttgtcgattttattgatcttatcatcagtatttgtatcatttttattatacttttttcatttttattcattttactctttactattttcttctactttacattcaatttgctgttactgttttagttgagatgaatgtctagcttatgaatttttaaacttttctttttctaaaatatacaaatagtaatataaattccactatatacacactttagctacattccagaagttttgatatattgaatattttatagattcaattcaaaatagtttgata

SEQ ID NO: 640442 - DNA, 588 bp, Homo sapiens
atgttactctcagacctaagggaagctacaaaagaggcaggagtgcggaaacagaagaaacaatagcagtattctaggaatgtgtgatacattaaatatgtgcataatttatttaatgacaggaaataaaaaaaggtgttaattatttttcatgacttaatttgagcatttttttcgcgtttatgatgcaaagaaagttcagctttgaaaattaatgttatctatttcagaaacacacacacacagagatcaaagcactgttctactattcatgaagttttaatgtggagtgtctgtctcaacagatgtttgtcgattttattgatcttatcatcagtatttgtatcatttttattatacttttttcatttttattcattttactctttactattttcttctactttacattcaatttgctgttactgttttagttgagatgaatgtctagcttatgaatttttaaacttttctttttctaaaatatacaaatagtaatataaattccactatatacacactttagctacattccagaagttttgatatattgaatattttatakattcaattcaaaatagtttgata

SEQ ID NO: 640443 - DNA, 605 bp, Homo sapiens
atatttaacacaagttattattttgatgttactattattacgaccatgcaagaagttaacgaagctcaaacatttggttaatacgggggaaataggaccatggagtaatcaattctaatatatatatattactactacattaggtttttgagttgatactgattcaaccacttcgaacttatagatgcagatatgaattcacaagaagaaggttttgttgtttttttgtgtatataaggagagcctaatctatgtgttatattcatccaccttctacatggaggctatgtcctagttaaaattagcagggtggggtggatggagatgatactaaagcaatgtatttatcatctttatactgaaccctctagtaatccattaaagtgttattatgatyatttgcacatcaattatgaagaaaataaggcatagaaaaattcagtaatttacctaaggttttacaactagtgagggacaaatgtaaaataaacttcctgttccttgaacactacatacagtctcattatagttactaaatttcaaaagcaacctcaaaatgcagatcgcccaccagatatgattcttttattcttccttggaactcc

SEQ ID NO: 640444 - DNA, 383 bp, Homo sapiens
aaaaatcatgaaatgtgtttatgttttaaattgatacctgcaataaagtattcaacaagtattacattatcattatacatttttaccaaatttagatttaataaaactagatgacgtttattttgtatttactcttaatcatttactatgttcaacattttatacacgttatctaatgtaatcctcagaaaaatctgataaggtgggtgttactataaytgctagtttgctgatgaagataatgaggcttagagagggttagtaaattatctaaggtcatagagttagtaaaggacaaagttgcatccaaagggacacctgtttgcatccaaatttaatgcctttaatccatgcgcagtgccaatttaatgcagaaaggagac

SEQ ID NO: 640445 - DNA, 573 bp, Homo sapiens
aacaaaaaccctttatctcccaaagcaggccttatgaccacattctaatcctatcataggttattatagtaccttttttttaaagcctatctcccaccactctctacttccaaaaatcccctcactatatccagtgaaacccattatcattcatcagaaaaaaaatcctgtatatctttaacctctactctgaatatttcctatgttttcttgcttttatggaaaccagtttttcttagagcactttttttccttgtcagtcttttcaagtggggaaagtctatactcctctgctctacatgggagacagatgtgtcccgtgatcttcattgtcagtttcaaataaaccttcttaaaatcccacaaactttgaatcttattccataaggccataayacgctttacttctttttaccatacttatctatgagaaataaaagtgaaaattctaagccctccaactggctgaatgggtcatctcttggccatggggaccatggaataagcttggtcagccctgaaagaggttaggaggtcagacatgccctcttacagtcccttccttgctaacca

SEQ ID NO: 640446 - DNA, 569 bp, Homo sapiens
gccaaattgtatggtattgacaaattatgtagcctttctatatctctgttctgcataggattgctgtaagacaattcagatagtgtgtgtgaaatgcttagaacattctgcaacattttagtaagtattcaataaatattacccattgttattatattccaaaaaatcctacatgataaatgagaagaaaaaaggatttaagagaaattaagtgattttttttttttccccaggagcctcagcaaataaatggcctaaacaattggaagcctagggatgtaattgctggtcttctattaaaaagtgaaggagacaagattttaatgaaggtactcattctattcataggctggacaaaaatagtggttttaatagaacgagctaataagtaagagataaaagtagaaaacccagagctacctggrattacactacactcaattatactcgatcgtatatagacagattagccttcctctcaggtgacatctcacgcaatccaagatttgaagttttttttttttttctatcactgctattttctctaggataatatattcaatgaatag

SEQ ID NO: 640447 - DNA, 453 bp, Homo sapiens
aaacctaagccaaacacataatctttctgagtccttaattcacctgtttatttaaaatatgaatttatgaaagtacaaccatcctctcttcttcctcaccaactgagcwtgtatgttccttgtttcaagtgtacctaaagaaaacttgttaggccactttaggaactgaaacctactggtcagtgcttgacaaccagaaagcgtatgttgagggccagagagttttgaataacaaaggagaattattggatcagcctcagggtagtgacattcagtacaagaaattttttatgaatccacttttttagccctggtagataggttctcgggaaagactatcacccatcatgtattaccaaccatgtaattagccaggcaagcaaataaattgaacttctttaggaaggtagtctttacatatgtgtttaccttttatttgtagcagaagttgac

SEQ ID NO: 640448 - DNA, 453 bp, Homo sapiens
aaacctaagccaaacacataatctttctgagtccttaattcacctgtttatttaaaatatgaatttatgaaagtacaaccatcctctcttcttcctcaccaactgagcttgtatgttccttgtttcaagtgtacctaaagaaaacttgttaggccactttaggaactgaaacctactggtcagtgcttgacaaccagaaagcgtatgttgagggccagagagttttgaataacaaaggaraattattggatcagcctcagggtagtgacattcagtacaagaaattttttatgaatccacttttttagccctggtagataggttctcgggaaagactatcacccatcatgtattaccaaccatgtaattagccaggcaagcaaataaattgaacttctttaggaaggtagtctttacatatgtgtttaccttttatttgtagcagaagttgac

SEQ ID NO: 640449 - DNA, 528 bp, Homo sapiens
gggtccccaacaaatagtaatcttttttatggtggagggtctcacctcaatgttgatggctactgactgatcaggstagtggttgctaaaggttgggatggctgtggcaatttcttaaaataagacaacaatgaagtttgctacattgattcttttttttatcctgaaaaatttctctgtagcacatgatgctattgaatagcattatatccacagtagcacttttttcaaaattggagtcaatcctttcaagctttgccactgctttgttgactatgtttatatattatactaaatcttttgttgtcatttcaacgatgttcacagcatcttaaccaagagtagattcaatctcaatgaacgactttctttgtgcatcaatcagaagcaactctccatttaagttttatcatgagattgtaacaattcaattacatcttcagtctccacttctaattctagttcctttgctctttctgccacatctgcagttacttgctgcaagactccgctggaatcctgagtgtc

SEQ ID NO: 640450 - DNA, 555 bp, Homo sapiens
atttgcagctgtggtaagtcctttggcagcagaggctgaatattttgggttcagtatctagaacaaggacactgataggatagcaacaactaccagtcaatcttggtttctaagggaaagcatttatatacaaatgacttttaaaccatccattgtttctacagagaattttgaggcgttatgaatttacctttatatacactataatgaatactccataaaggcaggaattattatccgttctattgcctattctgtcctcatcccctaaaacagtgcttggcacttagaagaagttccatgaatattgctgaaagaatataattcagattagagaagagggaagtaagtagtgtaggcatatgaataaacttcgaccccacactccccgtttagctcaagagtaaccaggttgaagcttccctaacatgccagtttctaccatcttcaatcatgggaactctgttctccagggtctgacatttgtctcctgatcatccacttcctccctgatgggctgctgtgtgctgtsctccccttctgctgaatgatgtc

SEQ ID NO: 640451 - DNA, 536 bp, Homo sapiens
ggcaggtaggtggagcactgtaaatgtctaattaactgccctgttactttaaaggagaaggtctagaaacaatgcaccccgcaacaaaaactgtctaactcattatggacacaaaacatgaacttcaggcagtccttaggccggtggaagagagattgaagaggctagtgaaaccaggaagcccatatcagatctcaggatgcaccatgcagacattttctctcctcttctcccactaagactgcagcttccattgaggccacgaagctgtcaccgaagtgtacaactgcctcattaccagagagaggagctgcacactgggaacctcattggccccctggggcatagagacccaggatcacagcrtggcaatgcaccccctgctggcttttattgtatgctaatgtaatgggccatcagtctgaaggctgtctgagcatagaaacaggatttctttttgtctagttggaacagtcatttgaaattctagcaagcagaaatgagtgtgagtgttacaggaaggaaggaaggaggaa

SEQ ID NO: 640452 - DNA, 459 bp, Homo sapiens
agaattctatcttgtagggtttttttttttccccacagcaaataaggtttatggattgcaatgaggagtctgtcgcattaaaataagtctttttacagtatttycccatttaagcctcacatggacagcatgctggattgggcccggaaaggcagactcactagtttttcaatttagtttgttaatagcctgcctttcataaaagcatcaggcacaatcacaccaatccctaaatcaataggatgatgcagcaatgcctcacaggaatgatatttttgaaataaatatataccattcagccaggcccgtttgacatcaaatttatatactcaataagaaagcacaattaatggtcccgaactgtgttttccttcacctatttcacatttcaagaagcacaggatttcttaagaaaaaaaataataaggaaagaaaaagagaaaaaaacattccattcat

SEQ ID NO: 640453 - DNA, 568 bp, Homo sapiens
catgctttcttggccccatatgcgctgaggaagtgcctattctctgcctttgtaggcgtgggatggctatatgtggagacgtgtgccgctggcattagctgcctctgtccagagcctgctgagccaggctatgggaactgcatgtgccccaccctcaacaccctgaatttctgaaggtggatttcataaccccagctacagtagttggtgcaaattttagagtcataaaaacatccttacagtccactgaatcaagcagcgtagttgacccttgtgaatggggttagggcatctcctggacagtgtctcaccctattaccaccactctgaccctcctctgcaggctaggattttgataaaagagattccagccttattcccagatacagatcacttaaagcagtcggtcttcatgttccccttagcccattgcagcacwgaggggaatattcctgcatgtataaaaggcactccatgcctggtatacattcagcaccatccggatgtaattggaatggctctcttctaatctggtttgggctctgatgataactgcttctgtttatac

SEQ ID NO: 640454 - DNA, 551 bp, Homo sapiens
atgggtgtagcaaaccaccatggcacatgtatacctaggtaacaaacctgcacgttctgcgtatgtatctcagaaattaaagtataatcaaaataattcagtwaatcatgctataaatagatgtgctgtcattcaagttttgtttttccatttatagagcacacacagagtagatgtagcatcattcttgagggctctagaatttttagaacggtaaaagagcattggcttcaatttgaagtcaacagctgcattagcccctaatgaaagaatcagcctatcctttgaagctttgaagccaggcactgacatcttggctttagctatgaaaattttagatggcattttcttccaataggaagctgtttcatccacatagaaaatctgctgcactttcatcaatgatgatcttatggctaacttgctgcagcttctgtatcagcacttgctgattaatctggcatttttatggtattgagatggtttatttccacagacttcatgaaccaacctctgctagcatcagacttttcttctgcaacttccttatt

SEQ ID NO: 640455 - DNA, 498 bp, Homo sapiens
aaaattgctaggtgccttgatgatgataactaaacacacatgtggtgaatcrtcactcatggtcctgatcacttgggttcattgtgcttgtcaatcaaaaggaccccagacgtgcctgccaccaatccccaggctgacccagatgcttctagtgactcagttaggaggatggagggcaaactgacaacaagcaaaattctaattgttgggaaggtattttgggtttcctgcactttgttttatatttttttttttttgagaaaaagatagtcaaaccatccaggcataaaatcattctaatagaaaagctgttgagaatcatggagaaaaaaaataaaccctgtacactggagctcactgcttactcacaggcacttacatcaggatagcagcagcagcggcagcaggagcagaaaaacaggctaatcagaaggaagaaaaaacattctctgaaaacgctaaaatggagcaacagtagtggcctagaaaggggtatca

SEQ ID NO: 640456 - DNA, 523 bp, Homo sapiens
cattaacactttggactactcagaaagtatatttatactttcaggaaggaatatggtagagtatgtacttaagtgggagcattttgtgtgtaaactaggaaggttggcttagtctctgggaggcaaacaaatcgaagtcgctgaattctgggggttctcaatgctcagaggaggcagctgtaatgaatggaagaaaatgacaggcaaaaagacatctaagacagttgctggcaccaagtaaataaataataaatagtacattaatgctgaccaaacaaagtgacaggattcaccaacacatcatatgggataagaaaaagtgtgaagaatcagaaattgtgataaaatgaaaatgtgtgtcttgactgtaggataataaackgttagagttgccaggaacctttaaaaacaatctagcccaatacttgtgacatattcaggagtgaatacatagggatccgagatgaggagccccagaaggccacttggccagccagtccagtctcctgcctcccctactact

SEQ ID NO: 640457 - DNA, 581 bp, Homo sapiens
ttaaaatgaagaaatgtgagaaaagaaattcttggaggaaatcttccaatgttggacatccatatttgaatcagatatcttaattgctggagctgggcatttcaggaggctctcatatgaagaagaatttagagattgggttaaaaagctgagcttctgagatcctgtgtcccaccccattcaacaaagcaatcactatccatcagtgtccaaccattgttaacgtctactggatgttaaagcaggtttacagaggattaaggaatcaaacttactattatgcaattttaaagtttctacaagagtctagygaattttcaaagggatttttgaggaggtgaggaggcaggacaagggaagctaacattaaattaaaaaatacttaattgctaagcaacaagataagaatctaagtgatcttaaagacaaagtcctcaggtctaactttgtaggtcaatagcattgatgcacaatcttgcaaagcctgtggctgtttggcttggcaacttttctaggtgcttttccactttggtattgaggaaatagcatcatcatacaattttatttattttaataatgat

SEQ ID NO: 640458 - DNA, 511 bp, Homo sapiens
cattggctaataacttactgagtgcctcccttgtgctgaaccctgaaaaaaacgaagaataaggcaatacaattgctcctaggaacctacaaatttagtgggaaaacactaccagacaattagcttcaatgccatgtggtaagggctatgacccaggtacattcaaaacattatacaggcaactagaaagggcacccttcttagagcatatagggatataagaaagactccttggaggaggaaacgttgctgctcctggctttgaggaatgcataggagtttgtcaagcaaattgggccagcaaaggcattctggacagagggaacagtttgtgcaactgcatgatctgttcaggmaatggaaatgattccctgtggttggaacacagtatgtgtaagggcaagtggagagaaataaaacttaattggtaggcaggggacaggttatgggggacacaggatactccattaaggactttgtatttgggcctgaaagttaaaaggctttcagc

SEQ ID NO: 640459 - DNA, 469 bp, Homo sapiens
caaattgcttcactggtaaactgtactaaacacttaaggaagaagtaatgccaattttatacagatgttccagaaaattagagacaggaatatttccaaattcattctatgaggcagcttaaccctgatgccaacaccataaaaaatgactacaggaaaagaaaactaaagatcaatatcattcaagaacayagatgcaaaactatgtaacgaaactttagctaatcaaatccagtaatacataaaaatgaaaatacagcctgaccatgtggggtttacccaggaatgcaaggttgctttaacatccaaattttaatcatgttaaaggaccacgaaagaaaaaccatatgaccaacaatgtagattcagaaaaaatatttgacagaatccagtatccgttcctaataaaaactctaagcaaactaggaatagaagaaaaccttctcaacctgatgaagggcatctataa

SEQ ID NO: 640460 - DNA, 469 bp, Homo sapiens
caaattgcttcactggtaaactgtactaaacacttaaggaagaagtaatgccaattttatacagatgttccagaaaattagagacaggaatatttccaaattcattctatgaggcagcttaaccctgatgccaacaccataaaaaatgactacaggaaaagaaaactaaagatcaatatcattcaagaacacagatgcaaaactaygtaacgaaactttagctaatcaaatccagtaatacataaaaatgaaaatacagcctgaccatgtggggtttacccaggaatgcaaggttgctttaacatccaaattttaatcatgttaaaggaccacgaaagaaaaaccatatgaccaacaatgtagattcagaaaaaatatttgacagaatccagtatccgttcctaataaaaactctaagcaaactaggaatagaagaaaaccttctcaacctgatgaagggcatctataa

SEQ ID NO: 640461 - DNA, 469 bp, Homo sapiens
caaattgcttcactggtaaactgtactaaacacttaaggaagaagtaatgccaattttatacagatgttccagaaaattagagacaggaatatttccaaattcattctatgaggcagcttaaccctgatgccaacaccataaaaaatgactacaggaaaagaaaactaaagatcaatatcattcaagaacacagatgcaaaactatrtaacgaaactttagctaatcaaatccagtaatacataaaaatgaaaatacagcctgaccatgtggggtttacccaggaatgcaaggttgctttaacatccaaattttaatcatgttaaaggaccacgaaagaaaaaccatatgaccaacaatgtagattcagaaaaaatatttgacagaatccagtatccgttcctaataaaaactctaagcaaactaggaatagaagaaaaccttctcaacctgatgaagggcatctataa

SEQ ID NO: 640462 - DNA, 545 bp, Homo sapiens
aagcttaccttctgtccaggaccataaatgggagaraaacacaaagagacagacctgtaataaatccatactccaagcctgtgccaaagtgggtatgaggtccacagttatactgactgggggtgcatgaacccaagctaagaagttaacagtaaatacaggtcaggacttacaaaagcctcataggaaaaaaaaatgagcttgctcatgctctctctctccctcttgcatgcatgtacacacacacacacacacacacacacacacaaattataaactgaactaggcaataatctacactcttaaggagagtctacagacgtagtgggagatttaatgatcctaggaccagagataatagaataatctcaaagaggctaagaaataaatatcttaaaaataataagcagatgaaagcatcaaaaataaataaagagataaagagaacaggacaaaataactatgaagacaaaagcaaattttaaacgaccaatataaaactttgagcaattaaatttagtcactgaaataataaacacaatgaa

SEQ ID NO: 640463 - DNA, 611 bp, Homo sapiens
tcacatttttccccagttttaaaatctaaagtacaaagtggagtttataaggatttgttttttaaaaacacatctcagtcctgaaattggcagttctgacacgacttatcaggatgtaccccaatgcctgaatgacagaggtagtgatcttcggggtcaggggaggtcaggaagggagcaggcgggcagttaccctgcacagcggcaccctctactggcgaggcagcaaatgataccagacagcacctcccacctctccctcttaagtacaggggtgcagggccagggtaaggaggagacagaagaaggagaactagcacagtgtcacgtaggggctgcagaactgattaacccaggctctctttatacgtttttaaatttcagaggtgagtacaagactctcagaaatacaggagtcgactgttaatgggtaactgttagaataattaaaaagttgctgtgtatgaacctggctttcgggaggaccagtgtggatctggcaagatagcagcggtgcacactctctatgcaacaatgggagatgtagaaaatggttcaaatgttttgcaygctgtttctcagaatctgtcactgtgaggccgggtgcggtg

SEQ ID NO: 640464 - DNA, 454 bp, Homo sapiens
gaattcctgctctaccacttttgggctatatgatactggaagagttgatttaaactttgggcctgtattcttatctataaaatgagtgttctaaaacttaatgagataatgcayttagcagaatacccaacatacagtaaatgttcaataaacatttgctattattataattggtatttcatcttcccagaaactctaggcatcatttttgaccccactaaacctcagataatttatatgatttacccaaagttatacagctagaaagaaactgaattggaacatgaacctagttcttggtacctacaaaacacatgtgtgtcagctgcacaaagttatacctgacactggtcagaaacagactctagattgtgctttttttgagttgcccagtgcactgctccagatattcttgattgtattcgtggagagaagacaggatcatagaagacac

SEQ ID NO: 640465 - DNA, 591 bp, Homo sapiens
gggcagtgtgcagaaataagtgaacctgggtccaagactgccatctttagcaaggcttgtttgcaaggttggcccttggctggtatctgacaagctggctgataaaacaaatccctacactgatataaatacattccctcagtgataagaatggctcactgtgcctcaactgtttgtataaatgatgtgatttatgttgaacaccyttccttctggaaatctagaaaaagttctttatgttgccagtatctaaaatttcaagatgatatcccttacacaggtcaattttcacccactgtaaaactgctattgccactcatctttttattgcagcactaagcagaccctcaatccagaaaccaatgtccttcagattagaaaactagagttcaaagatgttaagtgccatacaaatagtaaatgacaggccaacaaaattctttagggctaaattacaaatacatggctcattataaaactgtctcttcttcagtgatataaacttatttttatttgccttaatccctgaactcaatcccaaagcagattgtggccttattcttaaaggtgtactgtacttcaaatcacaag

SEQ ID NO: 640466 - DNA, 536 bp, Homo sapiens
ctctctctacagctttaaggaaaaaaagctccccatctttggggaagggaggaatgccccttttacagctccgttcaatataggcatccaaatcactatcctccttggccccatggggacagggaaatctgcacatagaggtggtcaaaaatgccaaataccatggggcagatctacaatagcatgcaggagagcagcgaaaaaaaaggagccctgagccctgggggtgcttgtcagagccaacaggtatttgaaggaagaggcaacactgttctggggcaaggagtcaaagtgggattacttcctagtaacaactgtctcctgcaggctagcctcttccacctcctccttccaccacctctcacacttctggctgtggaaataacatcatttcttggctgtgatctccaacatacctatcttaaactgcttggtktgggtgcccataggggagaaaaagtacctgaattcaactggtagggtctgttagcttacaagtaggataaaattcacagatgtgaaagttgtggtaatga

SEQ ID NO: 640467 - DNA, 548 bp, Homo sapiens
tttgtgaagataatttagattgatacctgtagctacaatttattctatttcactgctgtatactgttaaacatgacagtttatttaccctattaatggacatttaggtcttttataatttttcactattaaacatttgctgctatgagcattcttgtatggacacatctaatacaggtagtgggattccttggtgggagaggatatacatttttacttttctaggtattgctaaattttcctctaaagcgactgtaccaatttacattccttctattaatgaaggaaatacaagattggaataattgggatagttgtgttatctttgtgaatagattttaaaatactgatttagatttttaaatagttgtaagacttcacattttccatatcttagtttggtaactttttctaaaactgtattaactttatctagattttcaaacttaaggaataaagtttgtttaatatttattwctcatctctgttgtatccctgcatatagtctccttttcattaatatcatttataacttttaaaaatgagtct

SEQ ID NO: 640468 - DNA, 577 bp, Homo sapiens
tccatcacccctgaagccaggacatctcaggccttaaggcccatagtgtactccctcagtattgctgctggttattcagggccgaagggctctttagtcaacaggggatgaatcttgccagtactaggtccttcccttcaaagcagcaggttcccttttggcccagggtgtgtttagaaatgttgtcagggagctagggttatcaagggccatgtgatgaatcctgccaggactgagtccttcccttgaaagcagttttcccttttggccaagagtgtgtttagaaatgtttaagaactagggcctggaatgaggcctcacaagtcttcccagtgccctatcctgtgcctaagctggtatccaagatacaagacgaaatcttctttactagctctcctctccttaagtagaaggaaggagacacttttcttgctgtgaactgcactgcctggggttaggggaggggtggcacaagcactcccttagctgcgccagctggtgtctcyctaggtcatgtgccaccctagttcactgactctaagcccagcctaacactaggagttgcctaagaattaca

SEQ ID NO: 640469 - DNA, 450 bp, Homo sapiens
accctggcttttctgctgttcctcaaacacgttaagcttgggggattttggtgtactgttttcactgggacactccagattttctcatgggttactcctttattcaactctgctcagatgttaactattttccctcactattttttagtctttttaaaaactctattgcatttttctgtataatcttttttasagcctggaattatatgcgtatttgtttactttttatcttccatacaagaagaagctctttgagtgcagaatttgtcttgtttatgactatatccctagtggctagaacagtgcttggcacatagcaagcagccattcaatattaatttaaagaaaataaagagtgtaattgccataaaggttgtgtttaaaaatattatttttttcttttaaaagaatgtccaacactggaatgaattgctattgagaggcttggca

SEQ ID NO: 640470 - DNA, 579 bp, Homo sapiens
gttgtgtcaaaagtaaaataatcactttcacttggtctttaatacttagttcctaaatgtgacagattgttacactctccttaatccaatgagattgagaagaaatttaaagttatcattggaacctgaatgcatctccagaacattcagctcacccgagagagaacaggctagccccatggccagatttccgcttgctgtgtcagccagaatcctaagcccatacctttcagctgggcttaatttcacagaaaataccacacacatgacctgagtatcattcaatttttttatcaattcttaattgtaattttcttcaactttttaatcacctggttygggtgaatgtaattttgcatcctgacaagattaaattctgcatctcccattctttagtgattgtctcttgaccccttgatttgcacacacaagactctacacccactttgaccaccattatagtcatttatcaaaacatattgggcacctttttaggttcatcctctatctctgaagtctagataatggcagcagaattttatattttactctgttgcaactacttaactctgcccttgt

SEQ ID NO: 640471 - DNA, 442 bp, Homo sapiens
aaaggggattttattaactcacatgatcacaaggtccacagtaggccatctgcaagctggggagcaaggaaagccagtctgagtcccaaaactgaagaacttggagtctgatgtttgagggyaggaagcattcagcaagggagaaagatgtaggctgggaggctaggccagtcaagtcttttcccgtttttctgcctgctttatagtctagctgcactggcagctgatttgatggtgcccacccagattaagagtgggtctgcctttcccagcccactgactcaaatgttagtctccttcggcaacaccctcacagacacacccaggatcaatactttgcatctctcaatccaatcaagttgagtcagttttaaccatcacaagtgggaagaaggcagggagggggagaacaagctcaccttatctccatctgaagcccatt

SEQ ID NO: 640472 - DNA, 617 bp, Homo sapiens
atgagtgtgccctttcctctttctggaaggaccaactttcatacattgaatttttaatctctatctgagctattacagaacagtgcacagcagctgtgttgatttataattgattggccaatcttaattttactctagtgaaatatgaaacagctaagaaataagcctttaaaaaattcctcttaagctccataatgcagaagctggctctgtctcgtctcttgtgacaagttacactacttcgtctttttaaagttctaccctaattatagcatgggaaagtttcattttttgtctctaaaatagacatcttaaaatagaggggcagccatcagatgggtgagaagacagatgtctagcttcagaggaaagcagcaggctttcccaccgagcccctcctgtggcagttttggaagaaaagctcttcaaagtggcaaagtctgtcagtagtggagaagccggggtttccagctgttcagartggtgctatttttattatcacttctcttgccaaacagaattactactacttaaaatctgagagatttaatgaaagtttttcagaagctaagggtatgtgcagtggttggattcagcaatgggaatttgtgtaccat

SEQ ID NO: 640473 - DNA, 589 bp, Homo sapiens
gtattttccagctgttctctgcctgttctttcctctaccttgttcataatggtttgtcagctcttccttgtttgctatgcacacttgcttagcattgcaaacacagataaccagagtacagtggttctctaaccctcaatggtctctctctctctctctctccctaaaaagaatagaaggacctggatttactcttccctttgcagttgttttaacttgggtttgtgttgtgcctacacatgaatcaaatttccgaatattaaataaacaaagctaataaagaatgaggtttagkagaacaaagaaagtctgttatcttgagccagtgactcggataagagtcttaaagaccaattaagaaggataattttgaagagggaaaaaataatatgagcttacattttacgaatgaatgtgagatgtgtatgcaggttagaaaataccagttggatgtactttattttcttgaattggaaaataccagttggatatatgtcaacttcacacacacacacacacacatataccagccagaagtagacttaccctaagtattttggggccctatgcaagaagagaaccacatata

SEQ ID NO: 640474 - DNA, 592 bp, Homo sapiens
gtagacttaccctaagtattttggggccctatgcaagaagagaaccacatatatgtctcaatatttaaaagctttaaacaaaaaaaaaaacaattcgttaaaatctgtttctttctgctaccttaataaacataatttacaatgacctgaaatgtcagatttgagcttagaattgtgggacttctctgagtccactgttgcaacctggcacyaagggagaactggcacccagcatatactatccccttctcttcctacctctggatttgatccacatgaagcacctcatgcacaagtctatggctcccctagcctgcacaccaaagttccattcacactcactgcctaaagtcttccctggtcacctgcaggcctagtagtgtgcagatcagtggcatagtacatcctcaaaagacacaccaaggaagaggccctttcaggtgtagtaagtgtgctaaaaaacatctgagcagagacttttcgaaccctcggtccccatagaataatctataaagaggggtacaggctccgggtatgctgagtcccttgccccacagactccttgctccacagagagaagtaggactcacta

SEQ ID NO: 640475 - DNA, 592 bp, Homo sapiens
gtagacttaccctaagtattttggggccctatgcaagaagagaaccacatatatgtctcaatatttaaaagctttaaacaaaaaaaaaaacaattcgttaaaatctgtttctttctgctaccttaataaacataatttacaatgacctgaaatgtcagatttgagcttagaattgtgggacttctctgagtccactgttgcaacctggcactaagggagaactggcacccagcatatactatccccttctcttcctacctctggatttgatccacatgaagcacctcatgcacaagtctatggctcccctagcctgcacaccaaagttccattcacactcactgcctaaagtcttccctggtcacctgcaggcctagtagtgtgcagatcagtggcatagtacatcctcaaaagacacaccaaggaagaggccctttcaggtgtagtaagtgkgctaaaaaacatctgagcagagacttttcgaaccctcggtccccatagaataatctataaagaggggtacaggctccgggtatgctgagtcccttgccccacagactccttgctccacagagagaagtaggactcacta

SEQ ID NO: 640476 - DNA, 586 bp, Homo sapiens
actacctcctcaaaaagtagtccatagattagcatcattcacatcacgcaagagattcagaacttacatttttaacaaaatccccaggtgaattcagtgtacaatgatggttaataagtgctgttctgctattcacaattgcaaagatgtggaaccaacccaagtacccatcaaccaataagtagataaagaaaatgtggtatatatacaycacggaatactactcagccataaaaaggaatgaaataatggcattcacagcaacatagatgaaattagagactattattgtaagtgaagtaagtcaagaatggaaaaccaaatattgtatgttctcacttctaagtgggagctaagctatgaggacacaaaggcataagaatgatataatggactttggggacttgtgggggtgagattgggaatggggtgagggataaaagactacatattgtgtatgatgtacactgttcaggtgacaggtgcactaaaatctcagaaatcaccactaaagaacttacccatgtaaccaaaaaccacctgtgccccaaaaacaattgaaagacaaatttaaataaataaataa

SEQ ID NO: 640477 - DNA, 620 bp, Homo sapiens
aagtattctcatgtagaatattttattctacagcatcctgtttgctgaaggaastccagcctatttgcatcctccctaaaagatgtgactggctatgatctgactatcgcaacaaaaaatagaaatgatctctttcagtcaagactctgtatttccattaatgactgcattaacttgggttgttcatataacaataactcctttgagtttttagcaataggcagtgtgatgagggttcctgagatctgttatgaataatgggtaagtcaaaagtataacagagactctaggttacagaaaaagtttagaaattctagcctggacatcagctctacataaagtagttactccttttggcccattttgccttcctttttaaaaacattttgaaatatttaattgataaataaagatggaatatatccaaggtgtacaatgtgatgatttgttatacatatgcatcgtgtaatgaatgtcacaatcaaattaattaacacatccgtcatcacccatactatatagtagagcgccagaacttgttcatcttataacttaaagtttgtaccctttaaccaacatctcctcaattatcccaagcccttgacaaccactattctact

SEQ ID NO: 640478 - DNA, 620 bp, Homo sapiens
aagtattctcatgtagaatattttattctacagcatcctgtttgctgaaggaagtccagcctatttgcatcctccctaaaagatgtgactggctatgatctgactatcrcaacaaaaaatagaaatgatctctttcagtcaagactctgtatttccattaatgactgcattaacttgggttgttcatataacaataactcctttgagtttttagcaataggcagtgtgatgagggttcctgagatctgttatgaataatgggtaagtcaaaagtataacagagactctaggttacagaaaaagtttagaaattctagcctggacatcagctctacataaagtagttactccttttggcccattttgccttcctttttaaaaacattttgaaatatttaattgataaataaagatggaatatatccaaggtgtacaatgtgatgatttgttatacatatgcatcgtgtaatgaatgtcacaatcaaattaattaacacatccgtcatcacccatactatatagtagagcgccagaacttgttcatcttataacttaaagtttgtaccctttaaccaacatctcctcaattatcccaagcccttgacaaccactattctact

SEQ ID NO: 640479 - DNA, 590 bp, Homo sapiens
ttgtaccctttaaccaacatctcctcaattatcccaagcccttgacaaccactattctactckctgcttctatgagtttgacttttttagattccacatgtaagtgagatcatgtggtttttgtcttcctatatctagcttatttcacttagtatgatgtcctctgggttcattaatgtcttgagaaatgacaggatttccttcctttttatgtctgaataatattccactgtatatgtgtaccatgatttctttatccattcatttgctgatggacacttcgattgctcccatatcttggttattacaaaaaaggatgcaatggatatggggtgcaaatatctatttgagatactgatttcatttcctttgattatgtgtccagaagaaggattgatggatcatttggcaattttatttttaattttttgagaatccttcatattgcctttgatagtggctttaccaacttacattcccaccaacagtgtgcaaagattttattttctccttaccctcaccaacacttctttcttgtctacttgataacagcaatcctaaacagcatgaggtgatattttattgtggtt

SEQ ID NO: 640480 - DNA, 590 bp, Homo sapiens
acattgcctcagtcttggagaggcagcatagaatastagaatatggaatgtagcgtgaaaaggcataagtttaaatcccaagccaaccacttactagttattgtcccacagaataggctacttaaacttgagcaaaccagcaaaccataattcatgctccacttagtattgtgagacaattctccatcagtctttttttttagcacattttgcaggcagagatattgactgcctttgttcttttaaaatgatgtttgtagaacaaacatctctctggaaagaaaggtaggtttcttcctttcttcagagcaaaaagcaagcatgctcaatgcccactatagaaggcttgggttccctataatgagagttattattttgtaatataacttattgtatgttcaggagtcatccttagggaactgcggctatgggagctgaagacaaaatgatgttattctagctgtggctattgctgtgggtaataaacttttatctttgaaccaggggttttctgtcttctggcagcattcatgaggctgtggcaggctagcttatgggatacaaactgtgtcacttaatttctcagttct

SEQ ID NO: 640481 - DNA, 590 bp, Homo sapiens
acattgcctcagtcttggagaggcagcatagaatagtagaatatggaatgtagcgtgaaaaggcataagtttaaatcccaagccaaccacttactagttattgtcccacagaataggctacttaaacttgagcaaaccagcaaaccataattcatgctccacttagtattgtgagacaattctccatcagtctttttttttagcacattttgcaggcagagatattgactgcctttgttcttttaaaatgatgtttgtagaacaaacatctctctggaaagaaaggtaggtttcttcctttcttcagagcaaaaagcaagcatgctcaatgcccactatagaaggcttgggttccctataatgagagttattattttgtaatataacttattgtatgttcaggagtcatccttagggaactgcggctatgggagctgaagacaaaatgatgttattctagctgtggctattgctgtgggtaataaacttttatctttgaaccaggggttttctgtcttctggcagcattcatgaggctgtggcaggctagcttatgggatrcaaactgtgtcacttaatttctcagttct

SEQ ID NO: 640482 - DNA, 528 bp, Homo sapiens
tttgtaatataacttattgtatgttcaggagtcatccttagggaactgcggctatgggagctgaagacaaaatgatgttattctagctgtggctattgctgtgggtaataaacttttatctttgaaccaggggttttctgtcttctggcagcattcatgaggctgtggcaggctagcttatgggatacaaactgtgtcacttaatttctcagttctggacacccagcatctaggaatgttgtgagagatagtagcagagagaggagtggatcaggagtcagtatagctggytgtgatattaatggtgtgacttttgacaagtcacataaccttgctaaacctaagtttctttgccatgaatgtggggatgataaaacatgccacacctgcctgagagtgtgtctgtgataatcaaatacaataatgcctgtgcaagaactttgaatagtgatgaagatcctctattatattgaaaaaaaatggtagtcttcctaccatgctcttcaaaggagcatgatctttatgggc

SEQ ID NO: 640483 - DNA, 494 bp, Homo sapiens
cagtttctatgtcccctatagccagaagagagtgtatgcttccctttcttttctgggcatagcaatagcattagcttgtagcccctcagttttgtacttgcttatgctttccattgctctcaaacagamcaaatttcttgatcaccatagatcacaccttatattttgcttgtaattccccaaatgacttgcgcaacattgggaatatcacaagctcggtgctattccgttagaagaaattgcttaaaaggaaaaccgataggaaagcaaaagcgtttcttaagccccaatgggaagatggcaatgaactgtgctagagaaggtgctggaggaatacaaaggaatcagagtgatcacaggagtggaggctctggctgccgtccaagttaagtaattgcatcctgtctcttgaaagccccctgcagttccaatcagatatggtactcagcttcatttcttttctaatgtctgtgctctgataaatagaggctgca

SEQ ID NO: 640484 - DNA, 569 bp, Homo sapiens
ggttagtgtactaatgaattctgggataacaaagattctatataatcatagcttggtgataacttatattttttaatgtcatagaaagttgtagggaaaatatattctgtaaagaatttgtcccagggtaagtaagagattccaaaactgtttaaacatttgccatctgataagtcccctcacctccatcattttatcactcaagggagtatgaataacagaaagaaaagttagaaatgaaactgacatgcatcaggcccaggtctgtaatgcataggatgaccctagtgctcaagaagaccgagggaagggcaggtggcaagcagttttagaatcactctggctctggggtgtggcataggttctggtagttaaaaagagttgacacaaggcgatatatgaaaatgttctcaataagtagcacaatcactttaggaattcagaagaggaagatgcattgtgagttggcaggagaaagtgattttttttttttkgagacaggatctcactctattgcagaggctcgagcgcagtggtgcaatcacagctcactgcacacactcctcaca

SEQ ID NO: 640485 - DNA, 602 bp, Homo sapiens
aatttcttgatcaccatagatcacaccttatattttgcttgtaattccccaaatgacttgcgcaacattgggaatatcacaagctcggtgctattccgttagaagaaattgcttaaaaggaaaaccgataggaaagcaaaagcgtttcttaagccccaatgggaagatggcaatgaactgtgctagagaaggtgctggaggaatacaaaggaatcagagtgatcacaggagtggaggctctggctgccgtccaagttaagtaattgcatcctgtctcttgaaagccccctgcagttccaatcagatatggtactcagcttcatttcttttctaatgtctgtgctctgataaatagaggctgcacgcaaggattgggtgaaaggcccaggaagctgartaactgtgacagagagcctcaatgtttccctgcagctctctccatccccacacttgaatggcgtgtcttaagtctcattctcatcttcggataggtggcttgcattatctcctggagagagggcgtaaaatcagaggtaaacattcgtgaagaaacccagtttttgttttaacaatctcctcccttgcaagcgagaatagtataa

SEQ ID NO: 640486 - DNA, 602 bp, Homo sapiens
aatttcttgatcaccatagatcacaccttatattttgcttgtaattccccaaatgacttgcgcaacattgggaatatcacaagctcggtgctattccgttagaagaaattgcttaaaaggaaaaccgataggaaagcaaaagcgtttcttaagccccaatgggaagatggcaatgaactgtgctagagaaggtgctggaggaatacaaaggaatcagagtgatcacaggagtggaggctctggctgccgtccaagttaagtaattgcatcctgtctcttgaaagccccctgcagttccaatcagatatggtactcagcttcatttcttttctaatgtctgtgctctgataaatagaggctgcacgcaaggattgggtgaaaggcccaggaagctgagtaactgtgacagagagcctcaatgtttccctgcagctctytccatccccacacttgaatggcgtgtcttaagtctcattctcatcttcggataggtggcttgcattatctcctggagagagggcgtaaaatcagaggtaaacattcgtgaagaaacccagtttttgttttaacaatctcctcccttgcaagcgagaatagtataa

SEQ ID NO: 640487 - DNA, 602 bp, Homo sapiens
aatttcttgatcaccatagatcacaccttatattttgcttgtaattccccaaatgacttgcgcaacattgggaatatcacaagctcggtgctattccgttagaagaaattgcttaaaaggaaaaccgataggaaagcaaaagcgtttcttaagccccaatgggaagatggcaatgaactgtgctagagaaggtgctggaggaatacaaaggaatcagagtgatcacaggagtggaggctctggctgccgtccaagttaagtaattgcatcctgtctcttgaaagccccctgcagttccaatcagatatggtactcagcttcatttcttttctaatgtctgtgctctgataaatagaggctgcacgcaaggattgggtgaaaggcccaggaagctgagtaactgtgacagagagcctcaatgtttccctgcagctctctccatccccacacttgaatggcgtgtcttaagtctcattctcatcttyggataggtggcttgcattatctcctggagagagggcgtaaaatcagaggtaaacattcgtgaagaaacccagtttttgttttaacaatctcctcccttgcaagcgagaatagtataa

SEQ ID NO: 640488 - DNA, 572 bp, Homo sapiens
tgcatggaatatcacctgtctgaacccagagtttatctatgcttcctatggaagttgccactctgatttattatagttatttttaacttagtaatgagccctttagagcagaacctgtgctcaattcatctttacatcactcatgggatacatgtttatcagatactcagtgctctaagggttttagagaataaaaagacaaaacaggtccatgctgtttcctctggtgtagatgtcattggggtggtggtaggagagaaagtgtccctgattgaaaggtgtggcgagtgagtagaagtggatgagaagtgaataatcgtactaatcgcgtgtttgttgagtgcttactgtgtaacaggttccttatcaaatgcttagactctcaagaaatagacattagtattatgtccatttcacaggagaggaaaccaacccaggctcagaatggttaagttattagcagcgcaaaagagccaagaagacatttcygattctagaacccatttatttctctctctttcaccccatacatatatacatgcatgcatgcacacacacacacacacacacac

SEQ ID NO: 640489 - DNA, 550 bp, Homo sapiens
tttctctctctttcaccccatacatatatacatgcatgcatgcacacacacacacacacacacacaattttggctgaatttgycttttagtgacagtaacctttatattatttgaaagtctcatacgtataataaaacattaatcaacgtagtattacctattttgttgaataaactgacttgataatgtacgaccaaaagagtaaatgtgctctttcttccacagtccctaaaataatcactgtggattaatattttccatccctggggtaaaatttcaagaaaatctataagctgtctaggctccttttaatcacagaagcagtctcaatgtagtaattaaaacactcagtccactgtaatcatgaaaatgccatacctcattcaacttaagaattccccttagggccaagtctggcttcctttaggggcaaagcctgaagtgggccgtgggtgcaatttccctaccctgctctcccgttcctataccccactccctgcccaaggtgagacgaaattaggaggaaaagacacagtgtttcatgtaagg

SEQ ID NO: 640490 - DNA, 551 bp, Homo sapiens
gcttccttggtcactactctctggcttcatacctcgacctcaagggaaacctttgagggtatgctgccatcagagtagcatggagtaaagttccagctcttggkttgttaactggccttcactacttgttagctgtgtgaccttgggtgactaatgaatttctctgtgccttgacgttttcttatgtaatattgcactaataatagtacttatattagagggttgtgtgaaaattaaattagaaagcccttagtatagcgcctgacatgtaataagaagtattagttaatttttatcattgtcattattgttattgcaattgttatttttcaacatcagtagtgtagataaagaagaaagttttgttctcaaaggcccattaacttctaaaactgaaagacctagctaggtatccagtaaatgtcagtgaacatatggccctgctaaactagaaaacatgtaggaactatcatactcagagtagcatatacagagtataggttgcaagtgtttcaactggcatgtcaaatattaatagcccatgtttaaat

SEQ ID NO: 640491 - DNA, 571 bp, Homo sapiens
acctttgagggtatgctgccatcagagtagcatggagtaaagttccagctcttgggttgttaactggccttcactacttgttagctgtgtgaccttgggtgactaatgaatttctctgtgccttgacgttttcttatgtaatattgcactaataatagtacttatattagagggttgtgtgaaaattaaattakaaagcccttagtatagcgcctgacatgtaataagaagtattagttaatttttatcattgtcattattgttattgcaattgttatttttcaacatcagtagtgtagataaagaagaaagttttgttctcaaaggcccattaacttctaaaactgaaagacctagctaggtatccagtaaatgtcagtgaacatatggccctgctaaactagaaaacatgtaggaactatcatactcagagtagcatatacagagtataggttgcaagtgtttcaactggcatgtcaaatattaatagcccatgtttaaatatgttcattcagttctagaaaagatgtcatctccatatcaagggattaatatcattgcgtgaatgttt

SEQ ID NO: 640492 - DNA, 551 bp, Homo sapiens
gcttccttggtcactactctctggcttcatacctcgacctcaagggaaacctttgagggtatgctgccatcagagtagcatggagtaaagttccagctcttgggttgttaactggccttcactacttgttagctgtgtgaccttgggtgactaatgaatttctctgtgccttgacgttttcttatgtaatattgcactaataatagtacttatattagagggttgtgtgaaaattaaattagaaagcccttagtatagcgcctgacatgtaataagaagtattagttaatttttatcattgtcattattgttattgcaattgttatttttcaacatcagtagtgtagataaagaagaaagttttgttmtcaaaggcccattaacttctaaaactgaaagacctagctaggtatccagtaaatgtcagtgaacatatggccctgctaaactagaaaacatgtaggaactatcatactcagagtagcatatacagagtataggttgcaagtgtttcaactggcatgtcaaatattaatagcccatgtttaaat

SEQ ID NO: 640493 - DNA, 565 bp, Homo sapiens
catctaggaatcttttccttttgttgtcctttgcagtcaattagtttccaatgcttgtcarttctgcctttaatttcctattatctgttctctataacttctcataggcccccaccaattcttatctagactactatcatgggcttcaacaatggcccctatctggtttgttaatactctaatccatcctccatggtgttgtcatattaatctctcaagggcacatctcacactgtgtcatttcaaaagtcatctatgcccattacctaccaaaagcaggagtagagggtacaagttcttggccttctgtgtgctgggtcccaaattgcttttccaaccttatcttccactactctcttcatcaactttctttgctagtcagacaagattttttggctctaatgaatattttccctttgcatatttgtgcaatattttccaaatgcatgctctaccttctccaccctgctgcaccaggaagctgacctgtggaggctttcttgctctctggattctagctgggtttggtcattggaaacacaaataagagatcagaaagttggaa

SEQ ID NO: 640494 - DNA, 532 bp, Homo sapiens
ggcttcaacaatggcccctatctggtttgttaatactctaatccatcctccatggtgttgtcatattaatctctcaagggcacatctcacactrtgtcatttcaaaagtcatctatgcccattacctaccaaaagcaggagtagagggtacaagttcttggccttctgtgtgctgggtcccaaattgcttttccaaccttatcttccactactctcttcatcaactttctttgctagtcagacaagattttttggctctaatgaatattttccctttgcatatttgtgcaatattttccaaatgcatgctctaccttctccaccctgctgcaccaggaagctgacctgtggaggctttcttgctctctggattctagctgggtttggtcattggaaacacaaataagagatcagaaagttggaagaaagttaatatagggttatatatgttcctctactaaaagccacaggtgctgtcaggatgtctttcctgtaagctctctctgtattctctctattcatgttctagtaa

SEQ ID NO: 640495 - DNA, 532 bp, Homo sapiens
ggcttcaacaatggcccctatctggtttgttaatactctaatccatcctccatggtgttgtcatattaatctctcaagggcacatctcacactgtgtcatttcaaaagtcatctatgcccattacctaccaaaagcaggagtagagggtacaagttcttggcsttctgtgtgctgggtcccaaattgcttttccaaccttatcttccactactctcttcatcaactttctttgctagtcagacaagattttttggctctaatgaatattttccctttgcatatttgtgcaatattttccaaatgcatgctctaccttctccaccctgctgcaccaggaagctgacctgtggaggctttcttgctctctggattctagctgggtttggtcattggaaacacaaataagagatcagaaagttggaagaaagttaatatagggttatatatgttcctctactaaaagccacaggtgctgtcaggatgtctttcctgtaagctctctctgtattctctctattcatgttctagtaa

SEQ ID NO: 640496 - DNA, 597 bp, Homo sapiens
cagggggcaccaccctctagaaacctccacatgtcaactacacagaagttcttgaatcctgtccttttgggtttttatagagacgtcattaaattagccattatcaattatatmattggtcattggtggttaagtccatctccagttcctctcctgtttttggaggtctggggtgcaggcaggactaaaatttccaaccctccaatcaatttccctggcaaccgccaccctgcagctatccaggagcccaccacaagtctcattagaatgaaagattagatctcattagagcaaaggatgcttcctatcacccaggaaattctaagggatttagaagctctgtgtccgatgttcctattactcaggaaattacaaagacttaggagctctgtgtcagaaaccagggtcaaagaccaaatattagaacaaaagacatttctagtgcctctatctgcaagggttttcaggagttctatgtcaagaactgggagcagagacacatatgtatttcttattatttcacacactccctctgctcagaatctttccctgcttgtccttcattaaaagctcaaaagtcagcttttaaatgaagct

SEQ ID NO: 640497 - DNA, 597 bp, Homo sapiens
cagggggcaccaccctctagaaacctccacatgtcaactacacagaagttcttgaatcctgtccttttgggtttttatagagacgtcattaaattagccattatcaattatatcattggtcattggtggttaagtccatctccagttcctctcctgtttttggaggtctggggtgcaggcaggactaaaatttccaaccctccaatcaatttccctggcaaccgccaccctgcagctatccaggagcccaccacaagtctcattagaatgaaagattagatctcattagarcaaaggatgcttcctatcacccaggaaattctaagggatttagaagctctgtgtccgatgttcctattactcaggaaattacaaagacttaggagctctgtgtcagaaaccagggtcaaagaccaaatattagaacaaaagacatttctagtgcctctatctgcaagggttttcaggagttctatgtcaagaactgggagcagagacacatatgtatttcttattatttcacacactccctctgctcagaatctttccctgcttgtccttcattaaaagctcaaaagtcagcttttaaatgaagct

SEQ ID NO: 640498 - DNA, 597 bp, Homo sapiens
cagggggcaccaccctctagaaacctccacatgtcaactacacagaagttcttgaatcctgtccttttgggtttttatagagacgtcattaaattagccattatcaattatatcattggtcattggtggttaagtccatctccagttcctctcctgtttttggaggtctggggtgcaggcaggactaaaatttccaaccctccaatcaatttccctggcaaccgccaccctgcagctatccaggagcccaccacaagtctcattagaatgaaagattagatctcattagagcaaaggatgcttcctatcacccaggaaattctaagggatttagaagctctgtgtcmgatgttcctattactcaggaaattacaaagacttaggagctctgtgtcagaaaccagggtcaaagaccaaatattagaacaaaagacatttctagtgcctctatctgcaagggttttcaggagttctatgtcaagaactgggagcagagacacatatgtatttcttattatttcacacactccctctgctcagaatctttccctgcttgtccttcattaaaagctcaaaagtcagcttttaaatgaagct

SEQ ID NO: 640499 - DNA, 613 bp, Homo sapiens
ttctttttctgttattattggtagataaaaatattttattatgttatcaaccaataataacagcaatgacaagatcagaagtttaatcagcatagctgaaattatgttgggtgtgttttaccaactccccactccttctcctacacaatgaaccttagaactttctcttcccttgacagayggtaacgacctgcaataggtccctgatactggattcaacttctgggaaagaatgcaaaccttctaaagccagaagacttcaattctctgccattccttttagatctgtgcctgtgtcagcagggtactattacaacaggagactttattacatcttatccaactgttggcaagttctgaatcttaaagagaactgtttgtagtacaaagattagagtgctccatagaatactaaaaagggaaagagaaaaaaaaaactaagtcatcaagaaaactttttaaaaaccctctctgcatatgcttatttgaagagcctgtattatgcacttggaatttactttaattattaacattgaaggaaaatgttccttctaagcatagaaacttcaaaaggtaaatagtcaccagagttcaggtgccttttccttaaagt

SEQ ID NO: 640500 - DNA, 459 bp, Homo sapiens
tttttggtgggaggcaactgaaaactctgttcttttctttatgccatagctggggtccttaaagtatgctctttgaatgcacatttcacaggtggctcagctatttgggcaaagtttttttatagacagaatgtgaggctccccctctctggctctctcctttcaagaatccccctcctcttcaattctggctgctgcaaatgctctgaattatgttctctggttcttcaaggtaggacgactgaggttttctatccaagtttatcccaccttacctggaatatactagggtctgagctcagggaaaaaattaaaacaaaacataaaattagaaatgtgataacgggttgagtaacattgcagaaatttaattgacaaacctatacattaattagtaatgtgggagaagtcaaagatatacactcagtgttrcttttgtttaaaaatactttttcctcc

SEQ ID NO: 640501 - DNA, 496 bp, Homo sapiens
cacacattttcaaggagcagcgagtgattgtaggatcaatataaaattatgcagattctactttcccatcaatcccacctccagagaaaacccgccccaaactgtaaaatattgcatattcctcaaagagcaattcaacaattagggccagaaatccttcaaataggaaagattaccaaaaaagggctggtgtcacatctaaagacgcaaatgagacctcgtatataacatggcacctggcttcgctgaaggggcccagattctcactcagtgccccccagccttgcaggaccccaacacrgttccaggctgtgcccacattctgttttctgcctgccgggaagatgaagattccctgtgggtattttcaatcatttagtctcctcacctccagacttcagaaaaacaagagggggtagggataaggttagaataccaagcctttccccctacctcttttagcttttcagctagaaaaaaaaaaaaaaggtaaaag

SEQ ID NO: 640502 - DNA, 496 bp, Homo sapiens
cacacattttcaaggagcagcgagtgattgtaggatcaatataaaattatgcagattctactttcccatcaatcccacctccagagaaaacccgccccaaactgtaaaatattgcatattcctcaaagagcaattcaacaattagggccagaaatccttcaaataggaaagattaccaaaaaagggctggtgtcacatctaaagacgcaaatgagacctcgtatataacatggcacctggcttcgctgaaggggcccagattctcactcagtgccccccagccttgcaggaccccaacacggttccaggctgtgcccacattctgttttctgcctgccgggaagatgaagattccctgtgggtattttcaatcattyagtctcctcacctccagacttcagaaaaacaagagggggtagggataaggttagaataccaagcctttccccctacctcttttagcttttcagctagaaaaaaaaaaaaaaggtaaaag

SEQ ID NO: 640503 - DNA, 610 bp, Homo sapiens
agcttccatttgtgaaacattagctggcaatggggccaccatgggaagagcaaccacaggctaaagctcaaagccaggcttttggatgacagaggcaaccaaatacccactgasagtgagtgttcggtgactggctctctacctagcatcttcctctaatcttcctaggggtcatttagcaaagaatagaaagtgctggggctgaagaatgactttcctggggaaggctactgcagggaagctgtttaagttccataaaatctgactccgatcagtacattatttgcagcaatatggcaacaaaccacacattgttaaatgtagaggaatttaatagatttttaacgatagaaaatcagggaatctctagacacaaaggtttgttaaacagtgaatttagtcgaaggattataaattaataaatgacccagtgctgaaaatgaaactggctccagaatttattcgaaatatatttgagtgtcttcagaagcggcacgcattttgcagcctcccaattcaacacagtccccaccattgcctcttgtaatgtctattacctacccagcattgtaggtatttgttctttttttaattgatgcggaccctgcaa

SEQ ID NO: 640504 - DNA, 521 bp, Homo sapiens
cagtccccaccattgcctcttgtaatgtctattacctacccagcattgtaggtatttgttctttttttaattgatgcggaccctgcaaaccagagagttaagggcagatatgctttcactttagtttgcttgctgccatgccaagacacgtcacttcctctctggtaaataaatacctatattacttattctagtctcccaaggttttcatttctatactaagaattgaatcattttttgcctcgaaattctggcagcaccattccttcctttgcattgactttgggayggcatttttcccctgtagactgaggccacagcaaatgttctggacctgaatgaacttttccatctgggtccttctgacctttccagcattcctcaaattccaccagattgtgaaaaaggtaatagtgccttttctctcttctgttctcacaattcattgcctggtcctcaattcaagtctattacctttgaaaggatcttgaagaattgttttcctttagtcaaatctcagt

SEQ ID NO: 640505 - DNA, 541 bp, Homo sapiens
aatctgtaaacttcagcttcctcgtctgtaaagtgaggatcatcatagtgggcacctactaggattgctgggagaattaaataagaaactcacatgcaacacaatgctggacacatagtagacacccaatcaatgctgctattattttcatgaacgtcttgagaagtggggattcytaaaggtgagaaaacacctgctcaggaaatgttgacctgtctaaagtggagctgagagtcaaaatcagatcttctgaatttaagccctcattcttttttcataccccttctgaagctgccttgaaagtctagttcttgcaataccctagttaactgttggatgatgactctgaaagataatatgcccaaggaatatttgaggcctcaactatgtcttcagcccatatgagtagcgttcctctcagagtctccaaccagatcctgagcccccagtccagcccacctccccccaggtgtctggtgagcctcagagcatcctttctgaggtttgccctttccccgtcctgctctgctgtctatggtga

SEQ ID NO: 640506 - DNA, 692 bp, Homo sapiens
ctagattaatagtaacctttttgcatgtcttgatgctaagctgaactacatcaataaaatatttaaattgctaactagtcttgtcttagtaaccattgaatccaagtaatatgaataaactagcaaagacctgagactcgggtaaaatccagggcagatgatcatgggtatgcattgatacaactatgctaattggtaatgtctagcttcctttctgattaatgaacacttgcaattagatattaaatgatgttttctataagactgactctaagctagacagtttctgatacttgagctcatgaaatctttacaacaccactctgtgataagcaacagcctgtttttgttcctttttttttkggcacatcttaaataaattgcaaattttgtgatgatgatgttctatatctcacacagcctgtaaataaattgcaaattttgtgatgatgatgtcctgtatctcacacaggctgtagctgtaaggatacatactagaaaaagcagaaacctttgctttttatgtaggtagaggagagtggcagtaggtatttcatacttggagcaattataatctattgtatagccattgcaagagagaattttttaaaaatctgcttatcttccatttaggctttatttgcctttgacaagacctctcccttagcatggttttgcatgatacacaacag

SEQ ID NO: 640507 - DNA, 589 bp, Homo sapiens
ctttattatatatgttcagattttaaagtttcattaattcattaattcagattttagagaatgcagaattccttcccctacttactctggtctaaaataatgagaatttttgtatctactatttttgtcatcttggggcctcccaaggtgctggaagaggaagcaacatgaattcaatatatcaccatcattatcagcatttctggcattatttgtcaaggtgaggttattgtttctggccccatgaactttataacaggaggggcagatgaagaatcaaacctgagcggtcagatgggcacagctaacagcacacaaaggcacaagggaggctttgcatgggaggcaaaaagaaaagacttgtggtcagggtagttggtttggatggagattgttaggctaaacattaagtagtattctagaggagatgagtgacatcagaaggggtactgcctrttttacagaaatgactcacccatgagaaaaggcaaagaacagtagaaaacctgaatggtttattatagtgttatgtctgcaatttatggtcagagtcagtttgactctggtcttcacagagaaaataatacct

SEQ ID NO: 640508 - DNA, 404 bp, Homo sapiens
atctagttacaaagagctttacacttcaggcgttctctgggttttgacattctatgtgttattttttcttcctgtgactatggcagaagaggaataaccaagttatactgtcagagttcatttttgccctcaactgcaagatgaacaaaataagacaacatatatgtctttacagccaatgagaaaacacactggttaagataaatggcattgtaggaaggtataaagcacctagtgacccaataccaaaaaggaatttattttgaaagttgagacatgtccaaggagcagtattcaaccaaaatttgaaagcttacaagcttaaaaaattctttttggagtccaagctaagataartggctcaggtattagtgagagctgagtgagcctgggtgaaagtttga

SEQ ID NO: 640509 - DNA, 597 bp, Homo sapiens
aattttaaaataattatattttgaagttttaatatttkggatactaaatacatacactgcactaataattggactcctaccaaagagaccgtttggtatcatgcttttaaaacaataatatagcagaaggattttgctaggctattcaaactcattaacaaggcagtttttaagagctgcatagaaggtatttcatgatagggcggcacatgtttgattcaatactggtaattttgagaggtagaaaatatggttattgttgaaataaacagttagagaggttccagagcgtaagaatgggaggaattcagtttgatatatttgacaacaatacatattgagcatctctagtctgaatatctgaaacctgaaaggcccccaaatgtaaaactttttagagcaccgacgtggagaccaaagcctgctgcggtttgttgctgctgttaaagccagcacagatacctggtgatgctaccgtgttgttctgtcaccttgaacacattatttttttcactgtattcatgatatgtcatttttttttttactgttaagtacttatgtgtgaataagtataagaaaaggattgcttatgaggaa

SEQ ID NO: 640510 - DNA, 642 bp, Homo sapiens
acagggacagaaacccagaggtcatttaggaggtgggaagtgatggtagcttggaccaagatgagaacagggtagttgatgaaaagcagtcacattctcaacaatttgatggcaaataaaacaaaagttctgagtcattggtcgtgaagtgtaagagaaagaaagaagtcatgaatgaagctatggctttggcctgagcaaagaatgagctgctatgaactgaaatgggaataattgtgggaggarcatctgtgagaaggaagatcaggctttcgcttttggaatgattaagtttgaaatgtcttctgagtatccagggcatggagttaaatgtagatgtctgggttgactgtatacatttgggagtcactcgcatgcacataacatttaaagccatgctagtggatgagataatcaagggaatgattatagatagagaatctatctagttagagaattactatagatataactaaggctcaagtcttgggatgctcaaacactcaaatatttagagtttggagagttgaggaggaagcagaaaaatgaccaggaaagatccaccggtgaggatcaaaaccaaaagtgttcttttgagtcctgggagccaagtggagaaggtgttatcaaggggggaagaag

SEQ ID NO: 640511 - DNA, 597 bp, Homo sapiens
accacttattttaattgaaggacaattggataataatattgtgcaataatggtgcacctttgtgtgagacctctggagacctccccacrcatgatgtaatatggccccatatagttagaagaaagagccaggtatagctgccttattttgcaaaacaaatgaaactgggtctacatcttgcaagaatattctgaaagaaccattgctctaggcccctgatgcagcagtgcaaataagagtgaccatctggagaaaattgctgttgggtgactcttcagactatccagggcaaaagtagccaggagagcagtcagttatgcatgtatatttttcccaaggtaaataggttaaaagggtagggtggtgtcagatatccaggcaagtaaaggttcttctgaaagcaacatagagcaaggaactcacaccaagaatgcaacatagaaacataggaccacaggattttcagtatgcaagatacctttaagatggtctaggttaggtctagttcattcctcttttagctctttgaagtctatttctaaggcaaagtttcccccagctatggactccttgcatatgccttgtcagggcaagaaa

SEQ ID NO: 640512 - DNA, 548 bp, Homo sapiens
ggccctatctctaaaaaattaaattaaatcaaattaggctgagtacagtcacttactcctgtcatcctgacactttgggaggctgaggtgggaggattgcttgagtccaggtgtttgagaccagcgtgggcaacatagtgagaacctgtctctacaaaaaacagaaaaaattaactggacatggtggtgagcacctgtggtcccagctacttgggaggctgaggccggaggatcgcttgagcccaggaggagaagctgcattgagccaagatcgctccactgcactctagcactgtaggctggatgacagagcaagatcctgtctctctctctttctctctttctcttttgtgtgtgtgtgtgtgtgtgtgtgtgtgcamgtgctcacatatatgtttaggggaccttgggctagctgtttaatcagcttgggctttggtctccttatttgcaaaataagacatggtgcttgtcctgcacacacgacaggacagagggctggtgtcagggcataggaagcactatacccaggcctggatcaccattag

SEQ ID NO: 640513 - DNA, 533 bp, Homo sapiens
tcaccatcatcctctttgatgtataaatgatgaaatcaaggcccagagagagggaggttcccctagatgctgcagtgtgagcatccacccttggtccaaagatacgaatctgtccaggccaacttaggctcaaagaagggaccaatcacagccaggactgaggtgaggtaggaaggaaggcttcctggaggtggcgaactctaagcaggatttggaaggaaatgtggaactcagattggcaaggaaaggggttttcttatatgctgctccccataacccacattttgagtcaccaaaactgaaagcattttactgtctttgagctccaaacaatagtccctaaccccatccttacccaactgccctgtcccaacaaatggactcaaaatacccttacctgctctcctagttctaactagaactaggagacagacagacagacacacacacacacacacacacacacacacacacacacacacasagagagagagagagatgtttgtcttctcctcttgtgggaccctttcacc

SEQ ID NO: 640514 - DNA, 491 bp, Homo sapiens
ctgttggcttcccaagccatggtcggttctctaaatatatgcccaatgtcaaggttgctgtattttttggtggtctatcaagaaggatgaagaggtgctgaagaagaactgcctgcatatcgtcgtggggactccaggccgtatcctagccctggctggaaataagagcctcaacctcaaacacataaaacactttatttcaaatgaatgtgataagacgtttgaacagctcaacatgtgtcgggatgtccagggaatttttcgcatgaccccaccgtgaaaagccggtcatgatgttcagggctaccttgagcaaagagatccgtccagtctgccacaagttcatgcaagatccagtggagatcttcrtggataatgagatgaagttgatgctgcatgggttgcagcagtactacatgaaactgaaggacaaccagaagaactggaagcgctatgaccttctgaatgtccttgagttcaaccaggtgatg

SEQ ID NO: 640515 - DNA, 660 bp, Homo sapiens
tcaggattaatgagttgaaccctctctgggcaactaagtacctgtctgcccttgaacaggtcactttgccctgcatgggtttgtggttcttgcctktaaattataggggtgatggtggtatagaaaaatgacccaggtcattggctgtcggccctggctgtccatcagaaacacctgtggggtttctaaaatacagaacactgggtctgatttcagccctcctgaatcagtgtctcaggaaaaaattggccttttaaaaaaaagcttcacagctgatttcaatgttcatcagggttcagaaacagcgacctccaaggagaatcccagcagccgtcatcaattgagttctcctgtgagttgggcactgcactaagcctttatacacgccttatcatatttcactgactacagcctggctactttctgaggtcgggtccccccaggaaacagactctgagacagagtgttgtgggcaggaagatttctggggagccctcccagagaacaacatctgtacgggagcgagggatgcaagattggccagaggaagcaggtgaactgtgtttagagctgtgttgtaattaagcatagttaaaggccttatcccatcccagtgctgaggctgggatagtctttcagtaaaacagaggcagcagagcc

SEQ ID NO: 640516 - DNA, 548 bp, Homo sapiens
ctgatgaagctaggaaaagtgaggatgctacagagaatgcagccaacctgcccggggaagcaaattttgatttcagatgttagggatgtcagagagtgggatatttggagctagaatctggtgggggtgctgactgaaaaatccattttcaggaccaaacagtagctgcccattcccacactatgtattaatagaattccaagtagccacatttctaccatttagacaaaaacaatttttgaaagtttctcctaaaaagaaattgaataagtctcaagtaagaatgctgctttattctgacacttaggggtctcccagtaaaatggctggctcacagcccaatcaccctaagatgaagtccgttagtcagccagtccttcacatgaacacmaagctcccacgtgcctttttattcccttattcttatatttaaaaggatatcccataattccaaatatttaagattgcaagaaaaaaaaaacaggaaaagtaatcctgaaagattatactagtaacagaagataatttaaaagtaaacatttaaaata

SEQ ID NO: 640517 - DNA, 548 bp, Homo sapiens
ctgatgaagctaggaaaagtgaggatgctacagagaatgcagccaacctgcccggggaagcaaattttgatttcagatgttagggatgtcagagagtgggatatttggagctagaatctggtgggggtgctgactgaaaaatccattttcaggaccaaacagtagctgcccattcccacactatgtattaatagaattccaagtagccacatttctaccatttagacaaaaacaatttttgaaagtttctcctaaaaagaaattgaataagtctcaagtaagaatgctgctttattctgacacttaggggtctcccagtaaaatggctggctcacagcccaatcaccctaagatgaagtccgttagtcagccagtccttcacatgaacaccaagctcccacgtgcctttttattcccttattcttatatttaaaaggatatccmataattccaaatatttaagattgcaagaaaaaaaaaacaggaaaagtaatcctgaaagattatactagtaacagaagataatttaaaagtaaacatttaaaata

SEQ ID NO: 640518 - DNA, 484 bp, Homo sapiens
acagcctcctgtggccaccccatgtcacagctgttagctctactcctctgctctattgctggacttagagcttcttgaggcctctttttctccagtrccatatgagaggtgctgagtaaacagtttttggataaataaatgacaaagattgccaccctgtgggatttggctaagcaagaagaatgggggcctgccaacagtaacaataatggctaacgctgtcatttattgattgcagactgtgtgccaagtatgataacaggcagtttgcatatattacttcatttaatcctcagcacagcctttgagattgatcatttccattttacaggtcagaaaaactgagcctcagtttttccaaagtcacaagacaagggggtagcctagccaggatttgaatggaagtctgtctgatggaaacatttatgctcttagccagcatgttagtcagggttctccagagaaacagaaccgatagggtaat

SEQ ID NO: 640519 - DNA, 569 bp, Homo sapiens
caggtttcaagttgcccctcgcttagcatgaagccttcagaagcccagtggtaccatgggtgacagctttaggcatcttgtggtatggagatggagactgaggctgactcaaaacctggttatggacacggttggtggaacttgccatggccagaagactatccagtaatttcaatttgctcagcaatctacacaatggagtttgggttttttgtttttttttgttttttccagaatcaggaaaaactaatttttcataaacaaggcatacaaatacatgaatgaaaatacattataagttcttacatatcaccaaatatcaaataaataaataaataaataaataaataaaataaatgtgtttgtaaggagttgttatggatgtgttcccccaaatttagaagttgaaatgtaaaacaccaatgtgataatattaacaggcggaggcattatgaggtgagtaagttgtcagggcaaagccctcaaggatgggactaggrccctttaaaaggacctgaaggaatgggtttggcctcttccctcccttccgccactgaggacacagcgtt

SEQ ID NO: 640520 - DNA, 560 bp, Homo sapiens
gaggagggtggggggcagtcgccacctgtgggatgccatgaacagcctctgcaactggccagcaccaggaaggggggcctcctggtggtggagttggagtcctttctggctgaatgaggagcaatgtggctggggtgtgcgggtttctggtgaggtccgggtgggaagccgtctctccgcattctcctgaaagctctgttgtagtttgaaggtcggtagagcctgggctgaaaaggaaacaatttggggtttgaaaggatgtaattcattcttcctttcccgttaacctctttcctctctggaaagcaygtggaaacgctgaagggaggagtgagagggcaggcagcctgccgcggggaggaaagggttaagcctgatttcttttaattgaactccagaactggtggccccaggcaagggggggactgaccccgctagcggtaaccagatgtgtcggtcccaggggagccccggagcagacccctggattgagaagcagacaggagcggggggagtcagcccggcccccatcccaccatccaccccacccccacccccaa

SEQ ID NO: 640521 - DNA, 591 bp, Homo sapiens
gttacaagaacatctggctttgcacagttccacgcactcggctggcgcaaagatatttcagtaatactatccagtcatcgggttgtgtgagactgtggggcacagaagggaatttgagtgtcggatgaaaaatgtgcttgtaaaaaggtctgggttgttatctgtctaatccgtcctaatctgttcagtcatttgctctgggggctcttaagagaggaatactgacccccccctctggaaacmagtctcttagacagatacccctcagggccccagggttagggagggagggcagaaggttaacgaccctcccctcaaggagcaagctgccccaatgataactggagagatcatttttaaaagggacatctcaattttcaggaggacttgcagctttatttcaggcctaacactatggaggtgatctaaagggaacatggtaatacacatctttgttcttgttcatcttgtcgcttgcctgattggttccattccttgatgcccttcctctcttccctgcctcacattcttcactgtaggcttcccttttatttttaagaattccttgggctctgggcaagccaccatttg

SEQ ID NO: 640522 - DNA, 591 bp, Homo sapiens
gttacaagaacatctggctttgcacagttccacgcactcggctggcgcaaagatatttcagtaatactatccagtcatcgggttgtgtgagactgtggggcacagaagggaatttgagtgtcggatgaaaaatgtgcttgtaaaaaggtctgggttgttatctgtctaatccgtcctaatctgttcagtcatttgctctgggggctcttaagagaggaatactgacccccccctctggaaacaagtctcttagacagatacccctcagggccccagggttagggagggagggcagaaggttaacgaccctcccctcaaggagcaagctgccccaatgataactggagagatcatttttaaaagggacatctcaattttcaggaggacttgcagctttatttcaggcctaacactatggaggtgatctaaagggaacatggtaatacacatctttgttcttgttcatcttgtcgcttgcctgattggttccattccttgatkcccttcctctcttccctgcctcacattcttcactgtaggcttcccttttatttttaagaattccttgggctctgggcaagccaccatttg

SEQ ID NO: 640523 - DNA, 610 bp, Homo sapiens
aagcttccatgctccctgcaggtatttgcaagagaacgggatctctgcatggtgatacatgtggctctggggaggttgactgtaccctcagctctagctgtggagaaatcacctagcagcatctcccaaccacagtgattggttcagaagtgggcccatgtcctaagctggtccaatcagagtggcacgtagatggctcctctccttctgtatggtatggtgtgaggatgggaagcctggaaccattgtagctattttaccagtatgaggtaagtcaacctggagataaagctaatcacagaaatggactgaaaacaagagatttgcaggaaattaaagcaggttaaatcayaacccaacctcctcagttatgttagtcatacattcctattattatttaattcactttgaattcagttttctgtaacctataacagaaaacacaactgacagatataacttttttctgattaaaagattgattttttatacatgacatagataattctgaaaaatataaagaagagatgaaaataatctataattttactacccagaataactgctgttaacactttaaaggttcctttccagtgtttcttggagaaga

SEQ ID NO: 640524 - DNA, 330 bp, Homo sapiens
atgctggcacttctaatttttgtaattattttcgtgcaggtaggatttttctttttctttctcaccctatactgatacaatttttctttttttttctttccctttctctttccctcaattcctaggaggcatgactgtagagaattctgggtagagtcttttgactttgyttctatagtcatatgcactccttccagcaggttttatattgggctgtgcagctcatcctacaagcctatagatggcatttataggtatgaaccacctgcgggcaatgtggttgggtatatattgatccttgtttactgggagaagctctctgttgcctca

SEQ ID NO: 640525 - DNA, 596 bp, Homo sapiens
ctttgggaaacaatgtgtctgccatttagtttaagatcaaaatctcagagtatgagaatttttcaaatcacctcaaagggaaggcagacttgaacactgaaatgctttcccaagagcaagccccatttacccagmcagtgctatgtgtccaaggcaatgaaagatcttatgtcacatctcagtgcacacatgcaagaggctggaattacaggtgccatgggagctttaacctcgaatttctagacattgtgtgggtttcacatgtctactggaatctaacactccagtagcagaattgttaggtctgaatatatgggtattcattgatgttatgggaaaggaatcggagagtgagcaattctgcagtaccattcatgtagcaaaagtgtgaaaacaaacaggttaatattagaaaattactctgctcatgagttgttttaagttactgctgttacagtctatggaaaagcgtatgtttcaattgaaattctcatgtctacagagtcattttgtctttagacatttatgactgaattcatactcattcatgtattcaatactcattcatgtattcattcacccaaatgttgaataat

SEQ ID NO: 640526 - DNA, 529 bp, Homo sapiens
tgttccttctctctatttatttatttatttaataatctatcaacatcagtatggactcactcatggatatttgttttattttctggattgaaatccattcctctcataatatattttgttgctcatatgttctgactttgctctttgagagctcttccaggttgacttcttcttccatttgatgtgtcctatctttttcaatttttttctttagcacttccttactttctggtgccttaagatactctaggatcctcttgtattttccctgccccagccctggaatcaattgctttccccaaaatctctggtttctttcattggagaatggtacttaggaaccaagacttgggagttaggtgtgctcattgctraattggtgccactgcttctaaggtccctcagcagacccacaaggaaatgtatgtgtgtatactaacctaaatatatacatagatttttctatatctttgtgtttgtttgtatcttggttggctatgattgccataacaaaatgccagattgggca

SEQ ID NO: 640527 - DNA, 591 bp, Homo sapiens
ggtgtgctcattgctgaattggtgccactgcttctaaggtccctcagcagacccacaaggaaatgtatgtgtgtatactaacctaaatatatacatagatttttctatatctttgtgtttgtttgtatcttggttggctatgattgccataacaaaatgccagattgggcatcttaaacaagagaaatttatttctcacagttctggaggcccgatgtccaagatcaaggcatcggttggtttggtttctcttcaagccttctgcttggctttcaaaaggctgccttccccttgggtcctcacttggcctttgttctgtgcacttgccttcttgattacttcctctccttataaggagaccagtcatactggattaaggtccaccctgaagatctcatttaacttgaattacctccttataggccctaactccaaatacacagtcacacgggggattaggctttcaacctataaattttgggaggacacaattgagaacataccaatttgtatatatgttaaaaatggattaatgctgaygcctccaaagccaacccaataacacagtgttcattctagaatttcctcttt

SEQ ID NO: 640528 - DNA, 537 bp, Homo sapiens
tgactcatttccatttaagcaagggttggcggaataattatagtgaagttgtgaagaaacaaagactgagatgttaattgtactgtgagttgctgctctgtaaccttagtgaaagaataaatgcacttagcttaagacacagaagacagtagcccataatttggaacacagccttcatttgtcagtgctggctacttaaaataagaaggaatattcactactactgtaatgttggattacttagtcaagcaaatgaggttcttgtagatttagtagtgagayagaaaaaccatcttcagttcttctaatcctttttcttttctatgcgttgtaaccacaaagtttccatggggagtaaggaatgttcagctttcctagatatgatggatcttaaacctgagttcttagagaattggatttgggagcttttgttacagtgacaggtcagggaagacatctactcaaatgatttgggaaatacacgtgggctactcatgagaatcagaaagaacacactgaaggagtatagatgaactc

SEQ ID NO: 640529 - DNA, 617 bp, Homo sapiens
aagtacagtaaacctacctatattggcagaaatggggcccaagaaatttaatgcataaaatgcacagtacatcattgtcattattatcattatataatttttttagagataaggtcttgctctgtcactcaggctggagtgcagaatgcagtggcatggtcatagctcactgcagtctcgacatcctgagcttaagcaatcctcccaccacggccactggaatagctaggactacatacacatgccaccttgactggctaattttttttttttttttggtacagacaggggcctcactttgttgctcaggctggtctcgaactcctggactcaagcaatccttccaccttggcctcccaaagtgctgggattacaggcatgagccactgtgcctggyccatagttgcattattattaggcaaacaaagtgaccgaaatgagcctgagtggcaggtgactgggaattctggggttctggcttaatgttccaactgtgtcttgttctctacagtggttggtaccatctggtagtagttgtctgctctgccttaaatattgatggcaggaatctcttgattagatggcatccattggcacccattttcttagctcccttt

SEQ ID NO: 640530 - DNA, 555 bp, Homo sapiens
actccagcctgcatgacagagtgagaccctgtctcaaaaaaagaaagaaccctgtgggatggattggaatgtagcaatcagtgtaaattcataatttctacaataagcatacttgtgtaggtaatgcatgtaatatgagcgtatgcatacatgtctgtgtccacataggtatatatttkcctgtgtgtatatatacgcagatattttctagctctattcaataaaaaggcctagaaacaaaggcatcccagtaactatgaacacacctagcactctaatcttagattctaatgctgtgcctcactaaaagaaaccatggctctgttgaacaaggactcactacattactttaagaagtaaactctgggaaaagaaaaacttttgacaaattaaacttaacagaatttatttgagcaaaaaatgattcatgaaccaggcagcactcagaatcagaagaggttcaaagagctccacccaggagcatgagaagtgagcttccataggctgaacatggaagccaagtagagaacacatctgatttgttacagcaaggtg

SEQ ID NO: 640531 - DNA, 611 bp, Homo sapiens
gctcttctgactaatattattgttacacctcgtaatgtggggaaaaatacagttccgggtgtatgtgggttgttaggaaaaatttctcttgttttaaatcttaaggtggctctgcccctctacgctaaaaatcaaaaagaatatattcttacatgtatctccaggttagaatccttactaaaatattataagcatgagtgcagataaggtgaggagggatatttcttggatagtaaagtggcattccccaatcagttctgctgtaattaatttagaatttaaagctaaaaatccagacattcgatgatgtgttcaataactcgtgctgggatctattttttcagtaatgcttatctttccaaggggtgtagttaatttcttcagtattactctgtaaattattacagaaattacaaatctactaaaaaatcaatacaactaattgtaaattaatagatttctaagtgkgaaggagtgtgtaataatggagatgagttctttaaagaaaatgccagttccagcatcaagggctcaggactccagctgtttcatgtgacatcttcaagtgtaaacacatttctttccttcccccaactctgcccctgcacccc

SEQ ID NO: 640532 - DNA, 547 bp, Homo sapiens
tctaaacaaaaaatttttgaaataaaactttttgattaaataccacttggcagggaataaagttagtggtatgtactgaatgcttatgttcctgcaaaattcatatattgaaattctaacccccaatgtgttggtattaggagatggggcctttggtatgtaattaggtcacgagggtggagcccttatgaataggattagtgcccttatcaaaagacatgagagaacttgctcactctctctctgtgtcttcaccatgtgaggatacagcaagaagaaatccaactgcaagttaaaaagaggatccttcccgggaactgagtcagccagcaccttgatcttrgacttctagcctccagaactgtgagaaatacatttctgttgtttaagccaccagtctatggcattctgttacagcagctcaaactaagttggcttttcctaaataagtaataaacacttgttataggaactatggaaaattaagaatagaatttttttttttttaattcaggagttctagtatcctggttgtggtctaatctat

SEQ ID NO: 640533 - DNA, 639 bp, Homo sapiens
atgtctcgtaacctgacaaactactttacttagtaacaaattatccatataatgacctcaaactaaatttatataacccaagaagccatctaaaagaactcacaagcatgctttggtaaaaggaattttccctgcacatttaccttcatctgctccatattctttcagctttgaatagttgtaaagggaaatcaatctgttccaaaataagttttctaatgatatttctagcttcagtcaacatcttgtaaaaagtatataattcacattccctccaaccctcttgcaacrtaaagaattatgcaataaggataagtaaatttttaatattaaacacattggtaatagtggagaatcttttttaaaacattcttattctaggcttctgttttcaggatgagaacaccccagagggaatagaattgttttgtttgtttgtttgttttagcaataaggaagacacagaatattcagccaccaattttttaagctgactatttgggacattgacctcctggggctgaatcttagtgaatctgatggaagtacaatactgaggtcatttaaacctaaacttaaaagccaactagaaggaccaatcctcctttggccttagccacttaatgtgcacactacagc

SEQ ID NO: 640534 - DNA, 438 bp, Homo sapiens
caaaatatccaggcttcccttttcctttcactttataaaaatttagtatctgagagttactgcagtttctcaaattacagacacatctttgctttgacaaaaccctaaccgtcacatgctgactagcagtctgtggtattttcataattaatttgaactaaatagccgtgtcacagtaaatgcacagactattttcctattgttatctcctcgacttatcgtttgtccacagatccactggtgktaattcatagtgagaaccctgtcactaatgtgctctagcaaaagtatagcttttccgacactaattctgcttggatctggtcacgtgagaatccagggatatgatttctagcagataacattgaaatattgatcttataaagtaaactggaggctggccacacagcatggttttaaatttgtttccccttaata

SEQ ID NO: 640535 - DNA, 438 bp, Homo sapiens
caaaatatccaggcttcccttttcctttcactttataaaaatttagtatctgagagttactgcagtttctcaaattacagacacatctttgctttgacaaaaccctaaccgtcacatgctgactagcagtctgtggtattttcataattaatttgaactaaatagccgtgtcacagtaaatgcacagactattttcctattgttatctcctcgacttatcgtttgtccacagatccactggtgttaattcatagtgagaaccctgtcactaatgtgctctagcaaaagtatagcttttccgacactaattctgcttggatctggtcacgtgagaatccagggatatgatttctagcagataacattgaaataytgatcttataaagtaaactggaggctggccacacagcatggttttaaatttgtttccccttaata

SEQ ID NO: 640536 - DNA, 614 bp, Homo sapiens
ctaggtagaaaagacaaactcattttcattagctctcaatttgaacctgatgctcagggcccaggaacactttttctattaccagatttctttaaaaccatcaaaaggaaatgtaggtttctgttggactgggaaggatttctgctggtgcctccctcgggtccacttccataccctgactttcctttccaggacccatccttaaagcccaagggaaaatatgccaaaagaaagcccaagaagtagaatctctgaggggatgcccctcatgtgaacttgggacagatattcctttctggctctgtgacagcagctgttattctgtgacactgaggtgagagcagcccagctgagcatagcgccttgcacataaatagatacattttcattcttcctgatggacatgacagctcagaaagggggaggtccagttttgggccagaaagtatcctcactaagaatgttctgaggctgtcctttggccttctgagyttttaccttcctttatttaaaaattgagcagataagtccattcaaagccaccatacgcgattgacaaatcagataagagatgggatttgtttcttgtttagttttttttttaaatagataat

SEQ ID NO: 640537 - DNA, 606 bp, Homo sapiens
agttgcttgttatttacaacttatttcctggtatcaaatagtgtaacaaatttaccctaaaataagtatagcatttttatgttatcaaatagagctcacatgtgatagtacattactattaaacagaattttgtggtcagcaaaattcataactccctattcttgtcacttccaagaatagcctctttaagatctcaaatgtgaaattgtctgattttgcattttaacctaaatgtgatatatgttctctagaaaggaggtttttttttgtggtcagattttagtctgagtctaaagaaaattatcaatatagaaactgcccattgtactgaatgtgtttgactattagtcttagcttccargagtatttccaaaagcacaataaatgtaggctggggaatcacagcaaggggtacggaggagggaatgagaggtcacagcaggttccaacatatttttaaatgatttccccttacaaattgatcttatttacaaggatttggaggaagaaatcattcacttggcaggatccttgtcataggtaaagggtcataatttcagaagcaatatttcttgacatactggaaagtaaattcagagactggg

SEQ ID NO: 640538 - DNA, 469 bp, Homo sapiens
gtcacaactcaaatgcctacagatgccattccggtaatgtgaatgaatagaacaggctggagtaagacaagagggagcggcagggtctactacctgctggagagctcatgccttctcgaaggatgctaccactgtaattatgcaagaatactagcctagctctgctagtctattttttccatagaagtagacaaatatgtccttttctgtgatttcttctcrtttttaaattttggcaatcaattgaaaatctaaaaacattctgtaggccttataaacacacactgtgggcctgagctgtttccaggacatgcagtttgagaccttgacaattatcttctctccagctggtccttagccccaagcctcacaactcctatgtatttaggttaggtgtagtgatagtgccaaattggatctggttcccaaggctggtcattaatatcttgcatgaggaaaatactttaca

SEQ ID NO: 640539 - DNA, 475 bp, Homo sapiens
aaaaatgttcaccttcttatttgaaaataaggtacctgccttgccattgggtttctttatttatttttaattttgaaatcagtcattacttataggccttgcaagatttaacatatgtttccaaaagcaaatatggcattttctgaactcagattcgctttctgcctctgaaatgctaagccagagaccacagaaatggaaatgaaactaacaccaatttaaataaattacaagctgacaacaatctgcctcagtgatgttttaaatgaaatgtattaactgcaaaaatatcagaatgccttgggctatcttaaragactccattttgacactggggtaggtttttagatatctacatataaaggaacataacatgagggaggtttagaaataaaaaaggttgctcaataatggtttgttcttagtctgttctgtctgctataaaaaataccataaactatgtagctcatgaaca

SEQ ID NO: 640540 - DNA, 536 bp, Homo sapiens
tgagctctcacttactgtttcgtaaacagtcatcgttttcactatgtctttacatggcagaaggggcaaggaggtctcctttataagagaattaatcccattaataagggctctatcttcatgacctaaacaccttccaaagaccccatctcccaataccatcactttgggtattaggatttcaatatatgaatttcaacttatgaataagatcaatttatctactcatatttattgcaccaatcaggttccaaatctagcatattatgctgaggtcagaatgtctgtacattctgtattcaaagaacagctrtggttatgctcttagagcataggtactggcctagaatcagaacacttaagagttgtccttgatcatcaaatctgcaagcttaatgcaaatcacctggagtctcaatttccttgtccatcaaatattcagagggagagagatcctaggatgttgaacctttaagttggaaaagtctgtgattataagaacatctcaacggtgcatgcttagcccttaaaatgtt

SEQ ID NO: 640541 - DNA, 595 bp, Homo sapiens
aaaaccttcagagataattgtgcaaatgctgcatcactggttgtaaaaaaatatatattatatatgactttttaatatctcctaagagggatagtaagaaaaatatatttgcttttcaagaacatatatcaaataaggtaaatgactcmgtatataagaaaaaaacttccattaatatttttcataaaattttttcataaaaaagcttacatatgaaaataatgtttcacttaaatagatttactctttggcattaatagacttagctgcttaaattaattttacattttataaaaaacaatataaaacattggctttattatgatctatacaattattttttaatacttttttatacccttgagcaatttaaaatctgagaaataatacattctttcataggaaacaatcactatggtgatcctgaagccttaatttttatattaaacaaaagcattaggctttagagcttatcaagacaacaaaatgaaatacacaattgccttgaaatagtatcagcaagtaataaaatgtttagaaatgatttaactatttttaaaatgtagacttttaatctattatagttggggtgtgt

SEQ ID NO: 640542 - DNA, 595 bp, Homo sapiens
aaaaccttcagagataattgtgcaaatgctgcatcactggttgtaaaaaaatatatattatatatgactttttaatatctcctaagagggatagtaagaaaaatatatttgcttttcaagaacatatatcaaataaggtaaatgactccgtatataagaaaaaaacttccattaatatttttcataaaattttttcataaaaaagcttacatatgaaaataatgtttcacttaaatagatttactctttggcattaatagacttagctgcttaaattaattttacattttataaaaaacaatataaaacattggctttattatgatctatamaattattttttaatacttttttatacccttgagcaatttaaaatctgagaaataatacattctttcataggaaacaatcactatggtgatcctgaagccttaatttttatattaaacaaaagcattaggctttagagcttatcaagacaacaaaatgaaatacacaattgccttgaaatagtatcagcaagtaataaaatgtttagaaatgatttaactatttttaaaatgtagacttttaatctattatagttggggtgtgt

SEQ ID NO: 640543 - DNA, 584 bp, Homo sapiens
taaacattttcggcagagtgttaagataatttaattagaaatctgtttcttaacaggatcratttttttttacttcaacagagtgaaaagcatacacaaataaactaatattttagagttacatatgacaaatttttttctttaattactaatatcaaaagagatacatttaggcttaagaataaaactataaaaactatacaaatttaccattgtacctctctagctttgatgttattaggcaactgtttaaggctcattttcccactgaaacggaaaaaacaaaaacaaaaacaggacaagacaaatctctaaaatgtaacctctttttaaagatgactgggcagagcctcaaaataaaagaagtaaaggaaagagagatacaaaggtgagaaaagttaggaaattttatttgtccttctcttcactttatcagaatggcaaaattaacaatatcattccagtttattccttgggtaccggcaacatcttattgcttatctctagtgctatctagaaccttaagcaactcactttgtcctcccctttgtcctattagagacatcaggcaaggcagcagtatt

SEQ ID NO: 640544 - DNA, 584 bp, Homo sapiens
taaacattttcggcagagtgttaagataatttaattagaaatctgtttcttaacaggatcaatttttttttacttcaacagagtgaaaagcatacacaaataaactaatattttagagttacatatgacaaatttttttctttaattactaatatcaaaagagatacattyaggcttaagaataaaactataaaaactatacaaatttaccattgtacctctctagctttgatgttattaggcaactgtttaaggctcattttcccactgaaacggaaaaaacaaaaacaaaaacaggacaagacaaatctctaaaatgtaacctctttttaaagatgactgggcagagcctcaaaataaaagaagtaaaggaaagagagatacaaaggtgagaaaagttaggaaattttatttgtccttctcttcactttatcagaatggcaaaattaacaatatcattccagtttattccttgggtaccggcaacatcttattgcttatctctagtgctatctagaaccttaagcaactcactttgtcctcccctttgtcctattagagacatcaggcaaggcagcagtatt

SEQ ID NO: 640545 - DNA, 276 bp, Homo sapiens
aataaaagaagtaaaggaaagagagatacaaaggtgagaaaagttaggaaattttatttgtccttctcttcactttatcagaatggcaaaattamcaatatcattccagtttattccttgggtaccggcaacatcttattgcttatctctagtgctatctagaaccttaagcaactcactttgtcctcccctttgtcctattagagacatcaggcaaggcagcagtattaggaaaaggcatgtttgattacaccgttcaaaaatttgtcagttttt

SEQ ID NO: 640546 - DNA, 595 bp, Homo sapiens
actgtaatacctcccctaattaatataatcctttgattacaaatgaattttgagctactttcaaattctctaaagcacaggtaattttgaaggtgcttatgggatgttgcaatgaattaatcactttacaatagaagggaagggtataagatagattttaaaaaactttcaaccttatgtttattgtcttcatgatataggtggctttgtttggctaatcttattttaatttaattattttatattagatgtgctaattatacaaacactaattacctgaatccatttaattctgtggcattcatggttacctgacaaatactgaattgaatgacaacacctaaatataactgcatgacttagctgtctggcgcaatatttgcattattagggagttgtcatcttgtaaagaaatagaaatcatgaactatttaccatagcttcactkaataatagaagatattgctatctcagacagtgtagcttccaatgttgctttagaaccaggatagcatccttaagatttaaaaaactttgaatagccttttaaaaaaagtttttaaaatcatatgctgtgccaattaattttataagt

SEQ ID NO: 640547 - DNA, 554 bp, Homo sapiens
tggttcttcttagaatctcaaattgccaatcttaacttgcttagtgcttctcactcttaaaatgaagatgatttgtaggaattgcaaacttgtctgtgtatgaaaatggtgtgtctgtctctttaaatagaaaggcattagggaatattagccaaggctaattatgcagatcacttatagctaataataaaaatttgccttaggctttgtgggagtgtcgcttttagggactaagggttggttttccttcccttgttgttttacatatttccaaattagtttaaatgtgataatctgcaacactgataattataaatgcttgactaaatagaaatgtgtcaatcttgagacaggctccttttaagacaagtaagacaaaaccrctgatccaagcaatctccttacaccgtacccgttagctatggagggcttatttacagaagtgaaaacaaaaaaaaacaaaacaaaaaatcctcccaatctcattcagccttctgcctctttcttgaagccagtgtgggcatcagaaaatgtccactgtatagacatctgtt

SEQ ID NO: 640548 - DNA, 541 bp, Homo sapiens
gttgttggggcattgtcttttagtttgcattgtttccaatgagaaatctgttgtcatacttatttttgttcattggtatgtaatgtcytttttctctggctgcttttaagattttctttggccagccactgtggctcatgcctgtaatcctagcagcttgggaggctgaggcagatgtatcacctgagatcaggagttcgagaccagcctgaccaacatggtgaaaccccatctctactaaaaacacaaaaaagttagctgggcatggtggcaggtgcctgtaatcccagcaactcaggaggctgaggcaggagaatcacttgaacccaggaggcagaggttgcagtgagccaagaccgtgccattgcactccagcctgggtgacaagaacaaaactccatctcaaaaaaaaaaaaaagattttctttttctctctgctttcaagcaattggattttaatttgccttagtatagttttctctcatttttttcttatgcttctaattggtgacctttttggacctgtagtctacaactacaa

SEQ ID NO: 640549 - DNA, 538 bp, Homo sapiens
atctcctgaccttgtgatccgcctgcatcggcctcccaaagtgctgggattacagttgtgagccaccacatccagcctaatgccacatttttgatactgactctgtaggtcacccagaaaaataagttcccaatctgcccagttcctaatgatacagttctgagacttgtcctgatgctgctgttcaatgatgccagcagtgcatccgtgagacctactggggggaaacatgttgctaagcagtatttataacccctcttaagcaattctttaggaaatcccatattaaacacagcagaaacagaccccatttatctctgaggacatgaatattcatatgcactcatgaagacagtttttctatttgcatagaatttatatttttggtgtgttttactatattcaagacacatacacgatctcacttgatactcaagaaaagcccattttaccaatgaagtaactgaggctcattttttggaaactacctctccagcaagtggcagaaaakaaattcacatctaagtcatgattctaa

SEQ ID NO: 640550 - DNA, 614 bp, Homo sapiens
aatgcattcaacatatgtgtcacaaagaaccacactgtcctggttccaaaatacttactttgcccagtaagttcagttgtcttcacttttttaatgggtttaaatattcccaaacctaaactggtgtcaaagtcaggtagtcaagatttaaaattagaaggtgctgtaagagacatagttcagccaatcatttccattgagtggacacagggaaataayatcacttctctaaggccacataatggttggccaagacagcaggaaaccaaatctcctgatgcactattttatttacaccagtgggtctcaaccctatcacacctaacaccccgttttaatataaatattttctaattttatctttctcaccttgaaatgtaattcataaatgatataactaacatgcatatatttttaaaaaccaaactaaaacttaccaaaatgaagaaataaaaggaaaaattataataaaataatatgcattgcaatctgtaatgcttagacatggcatcactggtgggcataattatgtcagatggtcacacttgtatgtagaatgacatctacaaatgcagactgatgcagttgggttatgttggcaacttatattctgc

SEQ ID NO: 640551 - DNA, 614 bp, Homo sapiens
aatgcattcaacatatgtgtcacaaagaaccacactgtcctggttccaaaatacttactttgcccagtaagttcagttgtcttcacttttttaatgggtttaaatattcccaaacctaaactggtgtcaaagtcaggtagtcaagatttaaaattagaaggtgctgtaagagacatagttcagccaatcatttccattgagtggacacagggaaataacatcacttctctaaggccacataatggttggccaagacagcaggaaaccaaatctcctgatgcactattttatttacaccagtgggtctcaaccctatcacacctaacaccccgttttaatataaatattttctaattttatctttctcaccttgaaatgtaattcataaatgatataactaacatgcatatatttttaaaaaccaaactaaaacttaccaaaatgaagarataaaaggaaaaattataataaaataatatgcattgcaatctgtaatgcttagacatggcatcactggtgggcataattatgtcagatggtcacacttgtatgtagaatgacatctacaaatgcagactgatgcagttgggttatgttggcaacttatattctgc

SEQ ID NO: 640552 - DNA, 574 bp, Homo sapiens
tccagttcccaataagttcctcatttccatctgatacctcctctgcatggcctttcctatctgtatttctatcagcattttggttacaacacttaactagtctctaagaagttccaaactttccttcatctttctgtcttcttctgagtcctgaaactcttccaacctttgcctgttacccagttccaaagccacttccacattttcaagtgtctttatagccactcctcgtaccrattttcagtcagtctctccagagagacagaaccaataggaaacatattggtttcctgacacacgtttctataatatataaagaaagggaatttattagggagaattggctcagaggatgaaaaagtaccaggatagtccatctataagctggagaatgatagaagcatggcttttagagaagttggtagcatggctcctagggcaggcagtggcatgacttggtccaattctgaaagcctcaaaactagagaagctgacaatgtaggccagaggcctgagagcccctgagaggccactggtgcaagtcccagagtccaaaggccaaagaccctggagt

SEQ ID NO: 640553 - DNA, 607 bp, Homo sapiens
gtggtataactgtatgcttctggcaacagaaaacactcagcaacatttgactgtatgttgtcactttcatttattttacttggttccaaggtctctcttgagagtggccataagcraaaaatcaccattctgtaggatacccctgactaggtcaggtgtgtgtgtgtcaggtgagacacaatgagaaggtgaaacgaaaatgcatgaaatggaagaaatttgttactcacaagtcccagataggtaaggggtaatgacaggtgggtgacgtggtggggagtgcaggggaggactgatgggaagtccagaggcagcagggaacataaccagtggatgggaaagtgagagaggatcgagagagagagggagcaaaacagaacctatggacctgtgagattctgcctatactaaggtccatgggcattatccctcaggctctcatggggattgtggattagctagtttgaagaaaacgtgcatgaagggggaaacatatttacatgattctgctgttgaccattaggttttattgtggtcagtagctgtgggatatgtcagcttttgagtcagtgagataaggaacaagtgggccaaattgcaaacaacc

SEQ ID NO: 640554 - DNA, 607 bp, Homo sapiens
gtggtataactgtatgcttctggcaacagaaaacactcagcaacatttgactgtatgttgtcactttcatttattttacttggttccaaggtctctcttgagagtggccataagcaaaaaatcaccattctgtaggatacccctgactaggtcaggtgtgtgtgtgtcaggtgagacacaatgagaaggtgaaacgaaaatgcatgaaatggaagaaatttgttactcacaagtcccagataggtaaggggtaatgacaggtgggtgacgtggtggggagtgcaggggaggactgatgggaagtccagaggcagcagggaacataaccagtggatgggaaagtgagagaggatcgagagagagagggagcaaaacagaacctatggacctgtgagattctgcctatactaaggtccatrggcattatccctcaggctctcatggggattgtggattagctagtttgaagaaaacgtgcatgaagggggaaacatatttacatgattctgctgttgaccattaggttttattgtggtcagtagctgtgggatatgtcagcttttgagtcagtgagataaggaacaagtgggccaaattgcaaacaacc

SEQ ID NO: 640555 - DNA, 591 bp, Homo sapiens
acagcaggtgaccactggtctgagacacagtgaggacatcagccaggaccccacaggggtggraggaatcttttcctctccctgtgatatcttggattgccctcttagagagtttttcctttgactaaggcctttgtttccataaaaatgcagatattcccaagacagcagcacaggaaaccttatcatccatgtgcacagttcgtttttcagttgtgctattattctctgtaatgatatttttttacctgtatgaaatctcacatgctcaggtgcattcattttatagagttttaaagctgataacctcaaccaaaatgtgtattattgggttttattttccctttttttctgcagtaatttcaaaggtgtaactgagcttagctgtaaattgctggttttagctcttcatggcaggcagcatttgatcattgacaactctgttttcttcattgtttcctgactaaaatctccacagcctctataaatatgtaaattacccaaatcactagttttccattatttctgcccctaagctgtttaaaatgtttctatattcctacatttgcagtgcaaaacagagcagcaggt

SEQ ID NO: 640556 - DNA, 591 bp, Homo sapiens
acagcaggtgaccactggtctgagacacagtgaggacatcagccaggaccccacaggggtggaaggaatcttttcctctccctgtgatatcttggattgccctcttagagagtttttcctttgactaaggcctttgtttccataaaaatgcagatattcccaagacagcagcacaggaaaccttatcatccatgtgcacagttcrtttttcagttgtgctattattctctgtaatgatatttttttacctgtatgaaatctcacatgctcaggtgcattcattttatagagttttaaagctgataacctcaaccaaaatgtgtattattgggttttattttccctttttttctgcagtaatttcaaaggtgtaactgagcttagctgtaaattgctggttttagctcttcatggcaggcagcatttgatcattgacaactctgttttcttcattgtttcctgactaaaatctccacagcctctataaatatgtaaattacccaaatcactagttttccattatttctgcccctaagctgtttaaaatgtttctatattcctacatttgcagtgcaaaacagagcagcaggt

SEQ ID NO: 640557 - DNA, 549 bp, Homo sapiens
tatatgtgcatacagcttgagagaaaccaacagagagagacactgaaacaataggagaaaattttaggaaagagatcgttgtcaggaaagcttattgaagggatcttgggatttgcttacccaattcaaaccctagtgctgaggatgagaaataggtttctgtaatgactgcctcacatgactgaagaagccccaaaagtgaatgtgtatttcaataccagatgcaggctaagcctgagataggcatccatctaaactaggcctcaggctgggcacagtgactcacgactataatcccagcactttgggaggccaaggtgggaggatcacttgagcccaggagttcgagaccaacctgggcaacatagagagactatgtctctacaaaaaaatttaaaaattagccggcatggtggtgtgcacctgcggtccttgctacttcagaggctgaggcaggaggatcacttgagcctgcgaggttgaggctgcagtgagctttgcttgygccaccacacgccagcctaggctggagaccctgcaacaacaaca

SEQ ID NO: 640558 - DNA, 638 bp, Homo sapiens
caatgaccacacttggcccattttagtgacagatattcccctcaaatagaagggatcacttattcaccaaagcgaatggtaccctggggaccctcagttctcattgcctacccacccccaggccacccaggtgctagggctcctggcaagtggcgtatctgggggagaagatgcttcctgacrtcacaccgctctcacttgcaaaggggttggcaagagaagtgagaagggagggaatgagcaagagagaactgggactatatctctgctgccacctgctactctctccgggcgcagcggtgccctctttacttctcagccatttctttagtgaccctgctgttgctgggtagaaaatgccactcaaaaggactcagggctcatggaaaactccctgcaatgagtcgaaaggctcatgttgtttgatctaaagagaactattataaagtgacccaaaaaacctcggatccatatgtgtccaggctgcgaatgagaggagcccattatctggaatctttcagacttttacacaatacggtggagctctgtcatgccagataatttgtgctggccagtctatatgttattttcaaaaaatagaaaagaaagatttttttccacctatacaacaaatcgca

SEQ ID NO: 640559 - DNA, 575 bp, Homo sapiens
ccaagtgactgacttcaggctggatagcaaagagcaaggctaatttaatcccctccctctaaatccttgcctgaaacctggtgccccttatattctactaagatcaccaggacataattctctttccttggtcctactgccagcaaatgtattactagtttatcctycattttagtttttgttgaattaatgtgtttggtttagacaagggggagagtagaactagtgtgctggtttttaaaaagttttccaaggtgggccaggcatgggggctcacacctataatcccagcactatgggaggctgaaatggattgcttgagtccaggagttcgagaccagcctgggcaacatggtgaaagcccatctctactaaaaacgcaaaaaattagtcagctgtggtggcacatgtctgcagtcccagctactcaggaagctgagacacgagaattgcttgaacccaagaggcagaggtttcagtgagctgagatcacatcactgtactctagtctgggccacagagtgaggccctgtcaaaaaaattcaaaaaaagttttccaaggtgagtatggccta

SEQ ID NO: 640560 - DNA, 615 bp, Homo sapiens
taatgtataagctgtatggagattactatcattaatattattattgttgtgagcattatgatggtcattttgtgatgctactgagttctagtgacattagctgaggcaaaacagtagacaagacaactagtaataagtcacactgagtgtttaggatggcatttagtcttgcatgttcctaattattaagagcttttcaattaaccccaaccttgaggaaaatacttttcagtgttaaaatagaagtgaagggctatggtgagttcaggttgttttattagagtgtgaagaaataaactgtcacctactgaaaaaaaaaaaaaaaaaaaagaaaagcccaraatttatagagggtactaaaaatcacaatcattgtccattgtaaagatatatctccccaaatgctaaaatatgatctttcacaattaagtatactggtcattttctaaacaaaattcaataataatcttattttatacatcttcttccatttgttgataaaccatggcaacatatcgttagtagcactttacatgccccactgttttgcaactatatgatctttgatattataggaatacattatgtaaattaattcagcttgttgtattattt

SEQ ID NO: 640561 - DNA, 615 bp, Homo sapiens
taatgtataagctgtatggagattactatcattaatattattattgttgtgagcattatgatggtcattttgtgatgctactgagttctagtgacattagctgaggcaaaacagtagacaagacaactagtaataagtcacactgagtgtttaggatggcatttagtcttgcatgttcctaattattaagagcttttcaattaaccccaaccttgaggaaaatacttttcagtgttaaaatagaagtgaagggctatggtgagttcaggttgttttattagagtgtgaagaaataaactgtcacctactgaaaaaaaaaaaaaaaaaaaagaaaagcccaaaatttatagagggtactaaaaatcacaatcattgtccattgtaaagatatatctccccaaatgctaaaatatgatctttcacaattaagtatactggtcattttctaaacaaaattcaataataatcttattttatacatcttcttccatytgttgataaaccatggcaacatatcgttagtagcactttacatgccccactgttttgcaactatatgatctttgatattataggaatacattatgtaaattaattcagcttgttgtattattt

SEQ ID NO: 640562 - DNA, 516 bp, Homo sapiens
agtgataagataccaagcacccctgtagagtctggtcaacgttactgagagtcccagatatatgttcctaggacacacactgtaacacatgtactagagaaaggctcaggtatttataacgcccacttcagaaccaaagatcacaataataaaaataatgcagtacagcaacaagtttactagagagctctctgaacaagcataaaytgcagctgctcaattgctttcatcctatgtaatttaaaggaatcttaagtctctgtgaagacactgtatcagttgatgatttcaccatgcattttgaatagccaatgatcttgcttaacccttaatgctcccctcccaagcaagctaggctctaagtgttaccccttttcatagtggcaaggaccacattcacagtgagaggcaggttctcactccaagcaaataaagactgcgtctgtactcagaccaatggtccagagcaggcagttggcaaaccggaaaggtaattttcaaccccactcattccat

SEQ ID NO: 640563 - DNA, 516 bp, Homo sapiens
agtgataagataccaagcacccctgtagagtctggtcaacgttactgagagtcccagatatatgttcctaggacacacactgtaacacatgtactagagaaaggctcaggtatttataacgcccacttcagaaccaaagatcacaataataaaaataatgcagtacagcaacaagtttactagagagctctctgaacaagcataaattgcagctgctcaattgctttcatcctatgtaatttaaaggaatcttaagtctctgtgaagacactgtatcagttgatgatttcaccaygcattttgaatagccaatgatcttgcttaacccttaatgctcccctcccaagcaagctaggctctaagtgttaccccttttcatagtggcaaggaccacattcacagtgagaggcaggttctcactccaagcaaataaagactgcgtctgtactcagaccaatggtccagagcaggcagttggcaaaccggaaaggtaattttcaaccccactcattccat

SEQ ID NO: 640564 - DNA, 499 bp, Homo sapiens
gctctgctgtataagtaaaacaaatttttcagacattttccatctgtatataatcagtacctggacagaccttttcctttataattttatttttaaagcctctcctatgayggaaacctaccagtgcagctgagtttgagatgcaacagtaatccatttaagcagctttgggttcatgcctcaacacacacactatgtgagcctcctctgaattctcaaggtaaatacaatgtttaaatcaagccattaactatcatacattttctgcctagcacatgaatgatttttgtttaaaaataatctatttatatcagagataattatttttaaaaacagagccaaaattcaatccaaggaattaatatctggtggcctgaaaagctatgtaatttcagtgttgaatatagaccaaacaaaataactattgagacataagtaagttaatgtaaaaaattaattgtacaaagattttgattggtttgtttgcatatttgatatg

SEQ ID NO: 640565 - DNA, 496 bp, Homo sapiens
tacagtaataaataaaatccctttttatttccttaaaaatgagatccactaatgaaaacatacaaatcatttcattttccatcctgccacctacataaaacagaaagagcagctgctgaaatcttcaatgccaatatcaattacagatagtgttgctgaaaatattcctgatattaactgcaacctctctccagcttaaaaaatatacaaagttttaaaaaaggtgtaatagcatcatcttgttatatacttcatggctaactagatagaaaaggggagactgaattgttagttgtattctatatgtcagctatttttatgttaagcatctttatatgaagttaaaagtgccttgactttaagatgcacaaagtattttgtccactaaagtayttaacatgcatttccttagtattggtctaacatcagccatttttaaaatgtttacatactatctttattgttgtttacttatgttattttaaaatttaatttg

SEQ ID NO: 640566 - DNA, 591 bp, Homo sapiens
tttacaatcttcctggaagttcatgcaagaggtcctatatctcttttatccttagacattctatttgatgactatatatactaacatttttttaaaaaccttttttccaacaactacctaataatgcaaataaacatataaaataactgaaattaattgataaacacagtgaccactgtgcttttaagcatgtacataaatctagttttcttggtagaagaaacattgcycagcctctactactaaaatacttgtccaaaaactaagaaatgaacctatgttaagaaacaaacccttcatgtttcacagggctgtaaagtcacaatttatcacattttcacactcagagtaaaatataagtattaagagggatgccagtttagttccaaagaaatgaaaagacaataggagtggcttattactctctctgttttttaatggtgaacaggaaatgactacatcatcactcacgagggttgaaaatacaaaaattcaataacatgtctaacttcagttagacttcagctgagcaaaactattagtggccaacgtaacaactggtcccagtcttttaaggaaaggtttcagaac

SEQ ID NO: 640567 - DNA, 545 bp, Homo sapiens
ttatactcttttctttagtagactaagagagaaagggagaagggggaatgtaatccatgtcctcttgccctccacttcgggcataaactgaagttcacctttagtgaatgaattagcaattatgtatacagcaacatacatcaaatatgcaaaatttcaatctaattttactctaaaatattcaaaaatggttacccttgcaatgagttggtcatacagagataatttgtattgggaactaaattgaccgattcgacagacattactgagaagctactatatattaagggctgtgctctgtgctctgggagcatatatgaatattacaagatcctagtctcaagttttgcatattggcatcaggtacacaagcatatcaacagagaataatatgtataatggcagctgctacaacagaggtatgaacaaacaactacagggataaagaggaggcaacaaatgatgctgggtacattcagcttcagacttaagcttctcagtgtsgtggtttgccagacagtaaacatgagtactaaccctagctt

SEQ ID NO: 640568 - DNA, 570 bp, Homo sapiens
gatcaactgcttaaatcagagtcaccttccaaaagtactgctcagtgacagtgaaactcaaggttgctatattagggcagaaatgtgcttgcccatccatgctgatattgtggagcatgtgattacaaagttgttcaaaatagtcctactacaggtcaaaatcagaggcagagaatgacatgaaakagttggccaattagctgagaagctccaaagaattgtatgcaccccataatatctttcttaatgacttgtcacattatattcatttaaaaaaaaacttaggtaatacctgttattcaaaaatatttactcaattcttataatagtgcctatgagacaggcactattattctcattttatagatgaggaagcacacgaggtttaagtaacttgctcaaagttccacagctagtaaatggcagtgctgggatttgaaacaaggaaacctggatctagaaaccatgttcttaaatactctacttttatgtatcaatatattttaatagaagtattaaaaataagaacagtttctttaaggcattttttggggtgggtagaaggacatt

SEQ ID NO: 640569 - DNA, 612 bp, Homo sapiens
aaggttctatcagggtatggtttccagtgagctctctttccctggtttgcagacagctgccttttctctgtgtcctcacacagtggagacaaagatgaagaaatctgtctcttccgcttcttacaatgccaccaagcctatcagattcagaccccaccattatggcctcatttaaccttaattaccacctagaagtcctatctccaaatacagtcacactgaggacaagagcttcaacatatgaatttggggaggtcacaattcagtctgtagcaggtgggatggagattctctaaataactggaattttaggattgagagtgttcaaacaataaacatttcatcctcaactataagcttgtaatgatatggcatgtgggataaggcagctggaaaattttrgtttgatgtcattgttggtggctgaagaagactctggctttatgctagttactgtttgttttacttcagtgttagtggcatggagggtgagaaaggaagagaaccaaagcctcaaacgcaatgctataaaatgcctcataattcctctttctccaaagaaaaaaggcatttgaaaaagaagagcccctgagcatttttcatcttgctctc

SEQ ID NO: 640570 - DNA, 511 bp, Homo sapiens
ttcaaacataagtagaaagtttttgctttcaggaatgatggcaggactagtgaatgggaagatagatcaatagaaatctgtcttcaaatgaaagcaaagtaaaattgatagtctgcacatttgggtgtagcgtctcttgtactttccttaactcttcagttttgaccctaaatttgcgaaattaagaccttgttgttgaccagatttatctgttcacatcttcgtaaggtttgcaatcatctattaatacctagttagtaatctgttaatacttttataatactaaaagttctcaccttaccctttatcccaaacaaccagacattgtatttctgcctactatttatygtgcaattctgcaaggcttctctggtgaatgtccatgtttcatatggctattgtcatgaaagaatggcgggcagcatttagttattttatttcctgaatgtcataataaaattgtaattggcattttagagataatgaacaatgcgatgggtccagtcagtcc

SEQ ID NO: 640571 - DNA, 511 bp, Homo sapiens
ttcaaacataagtagaaagtttttgctttcaggaatgatggcaggactagtgaatgggaagatagatcaatagaaatctgtcttcaaatgaaagcaaagtaaaattgatagtctgcacatttgggtgtagcgtctcttgtactttccttaactcttcagttttgaccctaaatttgcgaaattaagaccttgttgttgaccagatttatctgttcacatcttcgtaaggtttgcaatcatctattaatacctagttagtaatctgttaatacttttataatactaaaagttctcaccttaccctttatcccaaacaaccagacattgtatttctgcctactatttatcgtgcaattctgcaaggcttctctggtgaatgtccatgtttcatatggctattrtcatgaaagaatggcgggcagcatttagttattttatttcctgaatgtcataataaaattgtaattggcattttagagataatgaacaatgcgatgggtccagtcagtcc

SEQ ID NO: 640572 - DNA, 511 bp, Homo sapiens
ttcaaacataagtagaaagtttttgctttcaggaatgatggcaggactagtgaatgggaagatagatcaatagaaatctgtcttcaaatgaaagcaaagtaaaattgatagtctgcacatttgggtgtagcgtctcttgtactttccttaactcttcagttttgaccctaaatttgcgaaattaagaccttgttgttgaccagatttatctgttcacatcttcgtaaggtttgcaatcatctattaatacctagttagtaatctgttaatacttttataatactaaaagttctcaccttaccctttatcccaaacaaccagacattgtatttctgcctactatttatcgtgcaattctgcaaggcttctctggtgaatgtccatgtttcatatggctattgtcatgaaagaatggcgggcagcatttagttattttatttcytgaatgtcataataaaattgtaattggcattttagagataatgaacaatgcgatgggtccagtcagtcc

SEQ ID NO: 640573 - DNA, 590 bp, Homo sapiens
tatgttagcttattagtttcatgtgtgcaaatgagttatccccaaactccatctcctttttgaactgtttagatggtggaaaatatggctgtgtgagttttaaacttgatgtttaattttaaatattcttacaataatacaggatatacagagaaaatagagtctctgtcattttatatgtttccttctagatcataaaattatattaaaaatatctatccaattggcagagttatattttttctgttttctcacttaaaataytgtaaaaatacctcaacttctatgtcctcatgtcattaattagtattttatttatagcaaatgtgatattaatttgtgatagtctaatttagatgaatatcttcctatgattgtatattttagatatttctcaattttcacattgaaaattgagatgacattgcaccatcttttattataaaactttcccatctcatttcacttttggaatatgttcttagagttgaggttactggtataaataaaataaacatgtttataattctgaagctatttactaatatgttttacaaaaggatgacatgaattaagcagttttattgtaa

SEQ ID NO: 640574 - DNA, 606 bp, Homo sapiens
actgttggatcatttactaacatgctttcctttgcaataaatggttattgacttatctaataaccttataaggtttgttccagctcatattttcctgatgataacttataactgtatatggaattcctagtgcagacactggttacaaatgaaactgaaaacataatggaaatgattgttttaaaataagcaaaagaacatatattaacatacacaattgtatatttgttagttttattaacattttaaattgtttctgttaactccaagtgacattcataaaaatcagcttatttaaatctcaaaataaatctctttattcttttttattcacttattttttaacaaaggtgtatacacatataaatatacacatatacaaatattcaaacacacacttatatatggtaattgaaaaacacatttcaattatatatatataggtgaagacagaattatcctttaaagctgtgtctgcctgtggaaatgaagtcaaaagttgragagtaattatctagatgactcatgaaaaagctttttgtagataaggtggctgactttttaagtgagtaaatacaattggtaagagcactttattataagtaa

SEQ ID NO: 640575 - DNA, 616 bp, Homo sapiens
atgcaagtgtttgtagaaaggccattcctactttgaagttcttactggaaaaggaatatccccactcctttccctgctgatctagtggaaaggaattgggtgttggagcctgagattytgtgttaatatcccagattgtctgttatttgcttaaacttaacttctttaagcatgagtttcccaccaatcaaataggaataataagacctaatgcagaccattccctagggcagtcggtccttagccttccattgtttcaccagttatcataacaacattctgttgtaggcattattacttttataataataataaacttctgttttcattttaaaatgacagatttaagaaaacactccgcacttaatgcatactttttatgttttaaatgtcaggctagagatttttctaaagatctttctcttttgtaaagaatgaattcagttaagacttttaaagaaatatttgaagagcagccataatttttaagtgcctcttgaactatacgctgttttcttctagttgcagataaagcagtctcccgattaggaatgggatgctggtcatccctgctctcatttgatgccaatggcagaaataagtaataagttacaat

SEQ ID NO: 640576 - DNA, 611 bp, Homo sapiens
gagtttcaacactactgctatatctgacttactcaaatttgtgaggcttaatgtagccctaagaataccactagaattcctgtctacaacaagacagttgtgatggctcagggatatgccatcacaaggtgaataacaacccatctcccaaggtaaagcttttaaaacattattttygatgtagcattattatgacacattgtcaaatactaccaaagtgaatattttttaatgtagttatttctcccatgtctaatgccaagaatgcaatttccccgctcagagtcattatagttttttcatactcttctactataattcatgtatagaaatatgcaggtgtgtgtagtatatattgtactgatgttaaggaaaatgttacaattctaagcatgcaatattaatctcttacatttcaatttacaccatatgtcagggacaattttgtgtgtgtgtgtgtgtgcgtgcgtgtgcatataaacacacagctatctgtatctgcttcattcttattaatgtttgcgtaaaaatatcatccttgattcattaatgtcccttctgatgggcactaaagttgtttcctatctcttgctaccatctaaaaaggcaaa

SEQ ID NO: 640577 - DNA, 538 bp, Homo sapiens
gttattagcacataagctggaatagtgtattctacttttcactcttctgattccttctctattcttcatttcacctgaatgctgacacaaggtgcaagagacagatgattgaaaatctatttatattgaggtcccacaagaacaatttttggttaattgattggactactgaatacttaatgaaattttctttcctctttaacctccttttcccttgycttcccatctattttctaccatggttatacacacacttttagaagacaccattgagaagcagtgttgtaaaaacaaagtaaaattagagaggaacatatatgggtagataagcatataaaaatatgcttaacactatgtgttattaaggaattgtgaattaaaacaatgagatacaactacacccctattataatgaccagaattcaaaataataacaacaccaaatgttgacaaggatgtgggacaacaggaactcttatacattgcatagaaagggaaatgaaaattgacattgaagaagcttaaagttttccaaata

SEQ ID NO: 640578 - DNA, 538 bp, Homo sapiens
gttattagcacataagctggaatagtgtattctacttttcactcttctgattccttctctattcttcatttcacctgaatgctgacacaaggtgcaagagacagatgattgaaaatctatttatattgaggtcccacaagaacaatttttggttaattgattggactactgaatacttaatgaaattttctttcctctttaacctccttttcccttgtcttcccatctattttctaccatggttrtacacacacttttagaagacaccattgagaagcagtgttgtaaaaacaaagtaaaattagagaggaacatatatgggtagataagcatataaaaatatgcttaacactatgtgttattaaggaattgtgaattaaaacaatgagatacaactacacccctattataatgaccagaattcaaaataataacaacaccaaatgttgacaaggatgtgggacaacaggaactcttatacattgcatagaaagggaaatgaaaattgacattgaagaagcttaaagttttccaaata

SEQ ID NO: 640579 - DNA, 448 bp, Homo sapiens
cataagtaattcatactcagagttctctaatactgtaaggttagtgtgtaaaaaaagttgtatcactacgtaagttttaaaagacaaaactattgaaaacaactgtagctacaataaattgttaaggcataaaaattacaaaaacaaatataaatgttgacatcaaaatcctaaaaagtgaatgggatgaaagtatagagtttttctatgcaatgaaaggaaagttgttatcagcycaaagtatactgttataagattaagatattttatgtaagctccatgtttaccatgaagcaaaaacctgtagtatttgcacctaacatgaaaaggactcaaagcacaccaccacataaaaccttcaaactacaaaagaagacaagacaggaagaatcaaaagatctgaaaaaaatgaaaaaagtaaaaaaatcagaacacaaattgtaaatgg

SEQ ID NO: 640580 - DNA, 526 bp, Homo sapiens
tagcacctcatgtttaaaaatgaacaggtccactgaaacaagacaaggatgtccattctcaaaatttatttttatatttaaattagtactgaaagtattagccagatcaattaggcaagataaagaaataaaagacatccaaatgggaaaagagaagcacaattatgcctgtttaaagatgacataacaaaatacaaaaacaaatacaaacatgctagacctcaaaaaataccgtaaagttgctgaacacaagtcaatatacaaaatttagttgaatttctgtacactaatgacaaaatcactggaaaagatattaagaaaacaatcccatttagtatagcatcaaaaataataaaattattttattttattttatttttattattatttttgtaagacagggtctcactctgttgcctagggytagagtgcagtggtgcaatcatggctcgctgcagcctcaatctcctggattcaacccatcctccagcctcagcatcccaaatagctgagactacatgcatgc

SEQ ID NO: 640581 - DNA, 561 bp, Homo sapiens
ttaaattgtttgcttgtttgtttagtttttgtcaatgatctgtaaaatttgtgaattctcttgcacaatttaccacagatataatcctccatgtttatatatatcatcactttcttgccattatgcataaactgttactcttttcctcaacaaactcctcacggcattttttacctctgtgtttctcacagtgtaaattataggatttaacatgggagtgaggattgcaaagaacacagtcaccaacttgtccacagagtaggtgaccacaggatgcatgtaggtgaatatgcaaggcacaaaaaagagtacaacgacagtaaagtgggagccacaggtggagagggctttgygctgtccttcagagctataggatttcagggagctcaggatgactatgtaggagatgacgagcagggaaaagatgagcaagcacatggctccactgttggctgccaccagcatcccaagtctgtaggtgtctctgcaggcaagtttcaacaatgggaagagatcacacataaagtggtcaatgacattggggaccacagaagggcaagt

SEQ ID NO: 640582 - DNA, 401 bp, Homo sapiens
ctgtgctgttaatttggtgacacggtatcaatgtcatcaagagcctacaagactcttaaccagctctcagctagctcaataaatgtatggaataaataagtgaaaatttatatgacattttcttgggtgtgttaatgaaatgaatgtcagcatcctagcttgaaattacccaaaagcaaaggctaagagaacgtcttgtatataagtagtttatttcagaaaacagaatraaggtattggggagagtgaaacagggaaggaaagaaagttaacccaagatggtgttaaggtgattaccatttatcaattggctcctagttactgatggtcaagtgtgttattcccttcttattttcagatgtgtgcactagaatgatgaggcagtgtctcctatgtgtcac

SEQ ID NO: 640583 - DNA, 401 bp, Homo sapiens
ctgtgctgttaatttggtgacacggtatcaatgtcatcaagagcctacaagactcttaaccagctctcagctagctcaataaatgtatggaataaataagtgaaaatttatatgacattttcttgggtgtgttaatgaaatgaatgtcagcatcctagcttgaaattacccaaaagcaaaggctaagagaacgtcttgtatataagtagtttatttcagaaaacagaataaaggtattggggagagtgaaacagggaaggaaagaaagttaacccaagatggtgttaaggtgattaccatttatcaattggctcctagttactgatggtcaagtgtgttattcccttcwtattttcagatgtgtgcactagaatgatgaggcagtgtctcctatgtgtcac

SEQ ID NO: 640584 - DNA, 492 bp, Homo sapiens
aaataaataaaacctccacccatcaaggtcttatagatgacttcagaaacttagcatcaaaattctttgcatatggcttccatttaacttttgctatgacaagagtagaacataggttttattgcctgcttaataatattttakaattagggctcagctcagtgactcatgcctgtaatcccagcaatttgggaggcaaaggagggaggatggcttgaatgagtccaggagttcaagaccagtgtgggcaacatagtgagaccctgtctctacaaaaacacaaaaaaataaaatagctgtatgtggtggtgtgtgcctgtaatcccagctacttgggaggctgagacaggaggactgctggagcccaggggtctgaggctgcagtgagctgtgattgtgccactgcactccttccagccttggtgacagagcaagacactatctcaaaaaaagagattaaaaattagaaaagccataatattttaggagtaa

SEQ ID NO: 640585 - DNA, 491 bp, Homo sapiens
aaataaataaaacctccacccatcaaggtcttatagatgacttcagaaacttagcatcaaaattctttgcatatggcttccatttaacttttgctatgacaagagtagaacataggttttattgcctgcttaataatattttataattagggytcagctcagtgactcatgcctgtaatcccagcaatttgggaggcaaaggagggaggatggcttgaatgagtccaggagttcaagaccagtgtgggcaacatagtgagaccctgtctctacaaaaacacaaaaaaataaaatagctgtatgtggtggtgtgtgcctgtaatcccagctacttgggaggctgagacaggaggactgctggagcccaggggtctgaggctgcagtgagctgtgattgtgccactgcactccttccagccttggtgacagagcaagacactatctcaaaaaaagagattaaaaattagaaaagccataatattttaggagta

SEQ ID NO: 640586 - DNA, 491 bp, Homo sapiens
aaataaataaaacctccacccatcaaggtcttatagatgacttcagaaacttagcatcaaaattctttgcatatggcttccatttaacttttgctatgacaagagtagaacataggttttattgcctgcttaataatattttataattagggctcagctcagtgactcatgcctgtaatcccagcaatttgggaggcaaaggagggaggatggcttgaatgagtccaggagttcaagaccagtgtggrcaacatagtgagaccctgtctctacaaaaacacaaaaaaataaaatagctgtatgtggtggtgtgtgcctgtaatcccagctacttgggaggctgagacaggaggactgctggagcccaggggtctgaggctgcagtgagctgtgattgtgccactgcactccttccagccttggtgacagagcaagacactatctcaaaaaaagagattaaaaattagaaaagccataatattttaggagta

SEQ ID NO: 640587 - DNA, 491 bp, Homo sapiens
aaataaataaaacctccacccatcaaggtcttatagatgacttcagaaacttagcatcaaaattctttgcatatggcttccatttaacttttgctatgacaagagtagaacataggttttattgcctgcttaataatattttataattagggctcagctcagtgactcatgcctgtaatcccagcaatttgggaggcaaaggagggaggatggcttgaatgagtccaggagttcaagaccagtgtgggcaacatagtgagaccctgtctctacaaaaacacaaaaaartaaaatagctgtatgtggtggtgtgtgcctgtaatcccagctacttgggaggctgagacaggaggactgctggagcccaggggtctgaggctgcagtgagctgtgattgtgccactgcactccttccagccttggtgacagagcaagacactatctcaaaaaaagagattaaaaattagaaaagccataatattttaggagta

SEQ ID NO: 640588 - DNA, 640 bp, Homo sapiens
tacatttccatcaatactgcacaagaattcctttctctaccgaaacataaatgccacataatgtcacatatgtgtgcaatctaaaaaaagtcaaacacataaaagtcagagactagaatggtkgttgccagggactgggacggaagaaaataagatgttggtcaaaggctacaaagtttcagtaatgcagtatggaatgcagtatgaataagttctgaagagctcatgtacagcatgttgatcttaattagtaatacatatgggatacatgaaatttgcaagaaaatatatcttaaatgttcttatcacaaataaaagtaactatgtgagatcatggacacattaactagtttcatagtggtaatcacttcacaatgtatacatatatcaaacattatactgtacactttaagtacataaaatatttgtgaagaaaacctcagtagcactagaaacaacaaaaacaaactatgtttgaaagactacaacaaaagacattaccaatttgcttggtatggcaaaagcaggtgaaactggacaaatgctgcacagtactcttcctgcaaggtgatattgaagcactgaggtgaagcaaaagcatcccggtgagcagtattttgaggattatgtttggttttcc

SEQ ID NO: 640589 - DNA, 640 bp, Homo sapiens
tacatttccatcaatactgcacaagaattcctttctctaccgaaacataaatgccacataatgtcacatatgtgtgcaatctaaaaaaagtcaaacacataaaagtcagagactagaatggtggttgccagggactgggacggaagaaaataagatgttggtcaaaggctacaaagtttcagtaatgcagtatggaatgcagtatgaataagttctgaagagctcatgtacagcatgttgatcttaattagtaatacatatgggatacatgaaatttgcaagaraatatatcttaaatgttcttatcacaaataaaagtaactatgtgagatcatggacacattaactagtttcatagtggtaatcacttcacaatgtatacatatatcaaacattatactgtacactttaagtacataaaatatttgtgaagaaaacctcagtagcactagaaacaacaaaaacaaactatgtttgaaagactacaacaaaagacattaccaatttgcttggtatggcaaaagcaggtgaaactggacaaatgctgcacagtactcttcctgcaaggtgatattgaagcactgaggtgaagcaaaagcatcccggtgagcagtattttgaggattatgtttggttttcc

SEQ ID NO: 640590 - DNA, 558 bp, Homo sapiens
ttctgcaacgtctaaagacactgaaggggctatcatctgaatgctgtctactaaacagaacacccaacaactggaaaaataaattcttctttcctaaatgaagggcaaggcagagcctcttcatatagaccataatataacccttatgccacttgaatttatatattcttatacattaccagaacagctcttttaggattctcttacttgaggagagcgagaagagaaaggttccatgacaaactatgtctcttgcaactgaatctgatctcagagttgccactgctatttaccaacttctttcttatcaattttttcccgtttcaccttccgctarcatctctgcagatctcataacttattgaatgggatagtccagactttcatcctcaaaatgtctcatccctgttcattatacccattcaggaaaggactcctgcactttctcatttattatcactattggaaaaggaaatggcaacatgtgttcaagtaagtcaattggaagaaaaaagtattatttcttgcaaccattgtgttataacatctccattccac

SEQ ID NO: 640591 - DNA, 527 bp, Homo sapiens
tgcatatcaggatcctgtgaaaagcccaggaggacaaattctgtaataytgttattaggtctcatttactcttctatcaggcttgtatcagaggtgagagctcaggagaacaggacctgtaatgagatcgtgaacaggaatatgattacatccattgcacatcttcactgttgtatcctgaatagtgatttacacacgataaatatttagtaagtctctactgagttcctcacccaaaaagcccatcttcccttgacaaatctatttctcctcaaagattttagttttagccacaggtaaaggcttctacctctaagttttagtgaatattccctacagaagaagtgttaaagtcccaacagccatccatacattttataacttcttttttttttcttaatgttattttatttttatttgacaaataattgtatatatttgtgaggcacaatgtaatgttatgatacatgtatgcattgtagaatgattaaatcagactaacatatccatcacctcacatacttatc

SEQ ID NO: 640592 - DNA, 557 bp, Homo sapiens
tggcatgatctcagctcactgtagtctctaccaaccaggctcaggtaatcctcccatctcagcctcccaagtatctgagactacaggcatgcaccaccatgcctggctaatttttgtattttttgtagagatgagattttgccatgttgcccaggctgatcttctgggctgaagcaatccacctgccttggcctcccaaagtgccacaattacaggcatgagccactgtgcccagacttatctgaggttttgctttccacagattcagttatctgtggtcaaccatggtccaaaatattaaatgaaatattccagaaattaacaattcataagttttaaattgcaggccaatctgagtattatgttaccatcataagccaccctgctcactcctgcccatgaagtgaatcatccctttgtccagcactgtagatgcccyctgcagattagtcccgtagtagccatctgagttattagattgacagttgcaaaatcacactgcttgtgttcaagtaactcttattttacttaataatgggcagaaatagtgcaagaat

SEQ ID NO: 640593 - DNA, 364 bp, Homo sapiens
tggaggatgtgtgctttgtaagcaggggcatactgtggcagattgtatttctgcaactgtatgtcttgttgcatatggtcttccaaagcattgccatttccccatcaggaagtggactctatcctctttgcttgcatgtgggagagagtttatggtgtcttgactaatggaatatggcagaatcwttctacgtgactttcaaggttaggtcaaagaaacaccaccgcttccacctggctcactctcttgggacacatggtttttagagctctgagctaccatgtgaaatgcctgcagtatcctcaatccagcatgcttgagaggccatatggggaaattacatacacaaaggggaagatgccca

SEQ ID NO: 640594 - DNA, 628 bp, Homo sapiens
tgtaagtgaatgaaatttgggaagggggcctggagaaaaggaaggggagtgtacagtgtttattggaggatgtgtgctttgtaagcaggggcatactgtggcagattgtatttctgcaactgtatgtcttgttgcatatggtcttccaaagcattgccatttccccatcaggaagtggactctatcctctttgcttgcatgtgggagagagtttatggtgtcttgactaatggaatatggcagaatctttctacgtgactttcaaggttaggtcaaagaaacaccaccgcttccacctggctcactctcttgggacacatggtttttagagctctgagctaccatgtgaaatgcctgcagtatcctcaatccagcatgcttgagaggccatatgggraaattacatacacaaaggggaagatgcccaagaagcaccaactattttagccctcactgttcaagactttcaggcctacataccagacatgtgactgaagaaacgttttatatgacttaagcaccagccaatttctgactgcaacctcgagataccctgagctagaagtatctagctgagctgctgcttgcaagttcctgactcacagaactatctgacataattaagtga

SEQ ID NO: 640595 - DNA, 523 bp, Homo sapiens
atttcaagtactcaacaaatatttcaattattaaaatgttcttaggagcattactattattctattgaaaattatcacctcgaatgattccaaattctgtattttatcaatattctatattatggaaaatatatatctgattcaaacatttgaaagattcttcaaatttcttaacatattcaatgagaaagagtgaatcatttaagaaatactcaaaaaatgtgaatccaggataggtattccacaataacaatttttacaaaatatgaaawctcgtgttctgaaaagtctggtgactaggtaaatttatggacctacacatataccttattagaaagggtcatttagtgtctatggaaaaagaagttatgaattccattaggtacaagatctacagaaacttagggaaaatgccaacatcaatttctgcctgtgagttaattacattaatatgccctaattttcagggttttaaaaatgttgtgagtaaaactggacacatcttgttatgtacccagttgat

SEQ ID NO: 640596 - DNA, 581 bp, Homo sapiens
tttcaaaatcattaatgaaaggggtctgatgtctgataaagcaggatgttgagcagagggaaataatgaaaatatgcagcacctatgatgatattctccaaaaggcatsacttctcggggaaatgatgatgagtagcaaggaaaggtacttttgggtgacctcctgggaaaggaaagtacaggacctataagaggaaattaaagtcctgaggaaacaaagaaggatgacaaaatctaaaggtattctaattcatccttcctcacttaaatgttgtactatgctaaaaaaattataaagaagccacctatgaactaaaaatcttagaagacacccaaaaaccgtaactcttcctctatctatacagagccttacttcagcacttcaaaatgaacagaagacaaaaatcattgtaactccatagaaagctctggtaagaagaaaccaaaaaaggagaatcataacaattcaattcatgaccccctctgagagaaccaagagcaaagaacatttacaaaattgtgtaggttgggttcccaaaaaagtcgtttctgctagattagtatgcaggatttgttggtgc

SEQ ID NO: 640597 - DNA, 564 bp, Homo sapiens
tgccccttcacctcactcacgaaaaccatgcaactgaataataatgtgactgagttcattctgcttggattgacacaggatcctttttggaagaaaatagtgtttgttatttttttgcgtctctacttgggaacactgttgggtaatttgctaatcattattagtgtcaagaccagccaggcacttaagaacccaatgttcttcttccttttctacttatcyttatctgatacttgcctctctacttccataacccctagaatgattgtggatgcccttttgaagaagacaactatctccttcagcgagtgcatgatccaagtcttttcatcccatgtctttggctgcctggagatcttcatcctcatcctcacggctgttgaccgctatgtggacatctgtaagcccctgcactacatgaccatcataagccagtgggtctgtggtgttttgatggctgtggcctgggtgggatcctgtgtgcattctttagttcagatttttcttgccctgagtttgccattctgtggccccaatgtgatcaatcactgtttctgtgacttg

SEQ ID NO: 640598 - DNA, 564 bp, Homo sapiens
tgccccttcacctcactcacgaaaaccatgcaactgaataataatgtgactgagttcattctgcttggattgacacaggatcctttttggaagaaaatagtgtttgttatttttttgcgtctctacttgggaacactgttgggtaatttgctaatcattattagtgtcaagaccagccaggcacttaagaacccaatgttcttcttccttttctacttatccttatctgatacttgcctctctacttccatarcccctagaatgattgtggatgcccttttgaagaagacaactatctccttcagcgagtgcatgatccaagtcttttcatcccatgtctttggctgcctggagatcttcatcctcatcctcacggctgttgaccgctatgtggacatctgtaagcccctgcactacatgaccatcataagccagtgggtctgtggtgttttgatggctgtggcctgggtgggatcctgtgtgcattctttagttcagatttttcttgccctgagtttgccattctgtggccccaatgtgatcaatcactgtttctgtgacttg

SEQ ID NO: 640599 - DNA, 604 bp, Homo sapiens
aatattctcctatgtcatcttcttgcattctctgagaaaccacagtgctgaagtgataaagaaagcactttccacatgtgtctcccacatcattgtggtcatcttgttctttggaccttgcatatttatgtacacatgccytgcaaccgtattccccatggataagatgatagctgtattttatacagttggaacatcttttctcaaccctgtgatttacacgctgaagaatacagaagtgaaaagtgccatgaggaagctttggagcaagaaattgatcacagatgacaaaagataaatgaaggtttcaaatccttctttatagtttggagtgacctagaagaaatcaatgagaatattatatttttattgttgatttaatgtaatcctgccttggtacatgaggattagttcctttgggaaaagagacagtgtaaacaaataacaatggttaatgttgagtcagttttatgtggcagaaaagacagcatgcaatacaaactagtatgtaaagctcattgccttcagtgctattcactcctgtgtctctggtcctcctgcctgcttagtgtcacttatggtttaggtctgtagtttgcctgtt

SEQ ID NO: 640600 - DNA, 604 bp, Homo sapiens
aatattctcctatgtcatcttcttgcattctctgagaaaccacagtgctgaagtgataaagaaagcactttccacatgtgtctcccacatcattgtggtcatcttgttctttggaccttgcatatttatgtacacatgccttgcaaccgtattccccatggataagatgatagctgtattttatacagttggaacatcttttctcaaccctgtgatttacacgctgaagaatacagaagtgaaaagtgccatgaggaagctttggagcaagaaattgatcacagatgacaaaagataaatgaaggtttcaaatccttctttatagtttggagtgacctagaagaaatcaatgagaatattatatttttattgttgatttaatgtaatcctgccttggtacatgaggattagttcctttgggaaaagagacagtgtaaacaaataacaatggttaatgttgagtcagttttatgtggcagaaaagacagcatgcaatacaaactagtatgtaaagctcattgccttcagtgctattcactsctgtgtctctggtcctcctgcctgcttagtgtcacttatggtttaggtctgtagtttgcctgtt

SEQ ID NO: 640601 - DNA, 550 bp, Homo sapiens
aagtttttaataacctttatcacctttattaaaaagttggctaatccttgaagaaaaccttgttaatctgacacagagatccatatgctgttcttgcatgagtgtgcctttgacgttaatgactgatttatagagaacctcaacctatttggtctctgaaaatcagcccttaaaatctcacatgcccacctcttccatgaaagtccccgggccttgaggagttgaatgagtttaatttttggccctgtgtcttagcaatgcagtttattttgattggtatcttctatgaggtctgaaggtgaggctttaatttttgtcgctgtttaagatttagcatgtcttggtgttctttttagactcaggagtcaaatccctgtaactcaatgtaaaaaggactttagaaacttatacaggaagatacatggatgtaataaccttaatttaaaaaaaatttcaggtttgtttataagcaaaccaaaacttaatcattatatgactacttgatctrctaattttttaaaaataaatcctcttattgtgatttacactg

SEQ ID NO: 640602 - DNA, 599 bp, Homo sapiens
cagtcccactgacatgatcttaagaaagtttacttgcataatctctgccttctacttagcrggatcatcaggtaactggcttttgggagtcacagagatgacaccaaacaccaaatgaactttggtgatgaccttaaatttttattcgagcattaaacatgttcctattaatttgagctactattttgaaactgttaaaataattgaatcacctaattgcatgcactatcatattatgcttaaaatgcccattaatttccttgttttatttgtatatgtaaattcagatctcagaatggagagactttatcatcagtttctagcttgatttgctttaatctttttgacaagctatcaaaattaagtatctaccttttggcctctatccagataattaagattagaaaataaaatagtgtattaatattctagaaatgtgctcttaggaaaaggaggaacagttatagctggtatgcctagtatggttttcagagagatcttctgtttctcttctttcatttgactctctctctgtgtatatatattatatatccatttctgctttcctcttgttccagtttcatttaatctttattttt

SEQ ID NO: 640603 - DNA, 599 bp, Homo sapiens
cagtcccactgacatgatcttaagaaagtttacttgcataatctctgccttctacttagcgggatcatcaggtaactggcttttgggagtcacagagatgacaccaaacaccaaatgaactttggtgatgaccttaaatttttattcgagcattaaacatgttcctattaatttgagctactattttgaaactgttaaaataattgaatcacctaattgcatgcactatcatattatgcttaaaatgcccattaatttccttgttttatttgtatatgyaaattcagatctcagaatggagagactttatcatcagtttctagcttgatttgctttaatctttttgacaagctatcaaaattaagtatctaccttttggcctctatccagataattaagattagaaaataaaatagtgtattaatattctagaaatgtgctcttaggaaaaggaggaacagttatagctggtatgcctagtatggttttcagagagatcttctgtttctcttctttcatttgactctctctctgtgtatatatattatatatccatttctgctttcctcttgttccagtttcatttaatctttattttt

SEQ ID NO: 640604 - DNA, 619 bp, Homo sapiens
gaccttacattttacacaaaaattaactcaaaatgggtcgtagagcataacataaaatgcaaaattataaaacttttagaatatacacgtgaaaatctacataaacttggatttggcagtgagggcttagaaataacaccaaaagtatgatttatgaaagaaaaaaatcataagttggactttattaaacttaaaaacttacagtctgtgaaagatactgttaaaagaatgaaaagacaaaacacaaactgggagatgacatttgcagaacacatgtctgacaaaggacttgtatccaaaatatacaaaaaacttttcaaactaaattataagaaaagaatctaattttaaaaagggcartatatctaaataaacacttcaccaaagaatacatacatatggaaaaatacatgtatatatatatggatgttcaacatcatttgtgactgggtaattgcaaattaagcaacaatgcaataacgctacaaacagaatggcaaactaacaagaagctgaaaataccaatttctggcaagaatgtggagcaacagaactgtcatttgttgctggtgagaatgcaaaatgttacaaccactttggaagacagttgacagttttt

SEQ ID NO: 640605 - DNA, 576 bp, Homo sapiens
attcctttgaatacaaaagtttttgtttttatcttcaagagatcttaaggaagctgaaaccaatacccgtgcttttcctgracacccactgagttccaggtcaccagacgcactcaggatgagggtccctgccgctgaaggtcctgcgggagctggagagatgagtcgcggaggggagcagcagctgagccggccttgggtgcgcggggaccgcatgtggagatgctgtgcgggtggagttggcacgcgctggactgctccaaggaaggcaggcttttggtgttggctgctgatcaggaagcctgaccggaggatgttgtgcttggtgggtttgaacaggctgtcctcaggggcatctaggagaggggaaggcaggctctccaggcagggatgccggggaggaggaaagaaggtgtgggctgtgtgtaggggagagtgagggccgacgtggcagaatcagaagtcaggttgctgatttaaacctgggcagttctggagcagcaaggagtgaaacacctgcaggtgcggtctccgcgacggtcctcttaagcagatgctgtgggttaggttccagag

SEQ ID NO: 640606 - DNA, 576 bp, Homo sapiens
attcctttgaatacaaaagtttttgtttttatcttcaagagatcttaaggaagctgaaaccaatacccgtgcttttcctgaacacccactgagttccaggtcaccagacgcactcaggatgagggtccctgccgctgaaggtcctgcgggagctggagagwtgagtcgcggaggggagcagcagctgagccggccttgggtgcgcggggaccgcatgtggagatgctgtgcgggtggagttggcacgcgctggactgctccaaggaaggcaggcttttggtgttggctgctgatcaggaagcctgaccggaggatgttgtgcttggtgggtttgaacaggctgtcctcaggggcatctaggagaggggaaggcaggctctccaggcagggatgccggggaggaggaaagaaggtgtgggctgtgtgtaggggagagtgagggccgacgtggcagaatcagaagtcaggttgctgatttaaacctgggcagttctggagcagcaaggagtgaaacacctgcaggtgcggtctccgcgacggtcctcttaagcagatgctgtgggttaggttccagag

SEQ ID NO: 640607 - DNA, 605 bp, Homo sapiens
taatcactgataaaaagcagagtgtgaaatccagagtgcctccccagcaccgtgtacagagacacttgccttcagcagagggcaggagaggctgaggatgaggcacagacatcccgtgagtaacagagctccagagcattggaatttccaaccctgaaggacttctttgccatgttcagggccctgattagaaagaggtggagccctgaagccaaggtgaggatatttaagtcagtgcccttgaaatattgaatccagctttctctggattcaccctctggacctacagcagtagcccctcctcccagcagaaggctagccctcgcagacaccgtgcaggctgcygctttgcaagacaacagataccccatggtctatctctgcctctcccgagcatcataccaatactggggctaagtcacatggtgcacatgctgagcctggtgaggaaggggcagcatgagatgcacacagccgtagcacccagccaatgtgcactgcaggctctgggggctgttgggctagctctgaatgtattggatcaaagaggattgagttggatataaagttggataagaaaaagcattattgatatagaggcaaac

SEQ ID NO: 640608 - DNA, 558 bp, Homo sapiens
gtgtgtgtgtgtgtgaatgggggatctgtggagggagaactcttggattgggtcccacgcatgactgtgaggctgcctcctccttccaggggtgactgggttgtgttttctgaggaagccagcctcaagacctcctcttcctcacggcccttcctctcgctttggtgcagtggaggatttcattctcttcctgccactgctccaggggtcccaggctcagctcttctctcagagcttgtctctccctctgctcgttggtggggttggccctgagtggagtggagatggtgtcttctcaggcttcatgctctcatgtttgaaactttggagcctgtagagaaacatcttgtgtaatctygggaaagggctgagggagagggatctcaaacttcccagtctcctcaaccagcttgctcattactcctggggctttctggagacactccctttatgttgcccaaccaggggagccacacgatggtgaacctcttaggctcgataggaaaacaggcagctctgtgatcactgctgaggggtgggtggtggttgtgtgtgtgt

SEQ ID NO: 640609 - DNA, 557 bp, Homo sapiens
ccttcttttgctttttatcttgagaaaaaaaccagccattgaatggtagctagaaaagggcctgactctgcctgaataggtgagtgggatggggaggaaaaaaagttagaatacagcacaaattactattttaagatatgattgtgtctcattgataaatcacaaagtgagycaaggtgtggagaggaaacgctctgccttttagagagaaccgagttccattcacagccctgcttcccactagctgagagactgcgtaagttccctcacaccgggagtctgcatttccctatgtagcataagggtgtgttaggtggttatgaggatttggtgagacattttgtggcacggtgacgcacactgactgcttcctccagcttcactagatacacggtcctggcataagtcaaatgtgagcagatcatcaaatccttgctgttgatttacaagtgttcagcaaggctaggaagaaagtcagcctccgcagctgcacaggggatgggttttctggtgggaggcagcagcggtctcgctaccttgtggtggtgaacagcact

SEQ ID NO: 640610 - DNA, 539 bp, Homo sapiens
tgagcagatcatcaaatccttgctgttgatttacaagtgttcagcaaggctaggaagaaagtcagcctccgcagctgcacaggggatgggttttctggtgggaggcagcagcggtctcgctaccttgtggtggtgaacagcactgtcacctggcagcagtctctggctttgcttcactgggacaccggtcctggcagataagacaatgtgattgaagcaggtctgggctgaggctaggaggtattactttttacagagattctatcgttttttttgaatcagtggcaactgcactgtggccacactcctgagtctgggccctgcctctgctgggggccctgcaggtgcttcctgtgatcctgcctatctggaggggatgctttgctcaccccaggcattgatagkggcccctggaatcctcttccagatcagccctgagagtcagagtgggtgccagagcagacaggaaggcacctcgtggctaagatggcatgactaagtgtggcccgagcggagacggggcgttaaccctcgtgctt

SEQ ID NO: 640611 - DNA, 547 bp, Homo sapiens
aaacacatgttttaaattttctttggtaaaaagccaggaggagaattgtttggtcataggtatgctggagtttataagaaactgtcaaggagtttaacaaagtgaatgtttcactttatgctccttcatcyatgtatgaagctctagttacttcacatttttaacagtgcttggtattgtcagagtttttctaatcagttggaattggcatctcactgtggttttaatttgcattactgggatagacgatgatgctgagcatgagtttatttgcttattagtattcttgtgattttttttgtttattgtttgtttacatttcctggccattttccattgggttctatggggttcttcacctatttatcattgaattgtatacaaagattgagtctctgcagacttaaacgtccctgtctgacagcttggaagacagcagtggttctcccagtacgcagcttgagatctgagaacggacagactgcctcctcaagtgggtccctgaccgccgagtagcctaactgggaggcaccccccagtaggggcg

SEQ ID NO: 640612 - DNA, 629 bp, Homo sapiens
accagacaaacacattattaggaatgacaactatagacacatccatgcaaaatccttaacaaaatattggcaaattgaatccaacaatgtattaaaaattatacactaggatcaaatgggattcattttaggcatgcaagtctggttcaacatttaaagatcaatcaatgtaatccctgtatcaacaggcaaaagaagaaacgccataccatcatatcagtagaggcagaaaaagtatttgacaaaatccaacacacttattcatgatgcaaactctcagcaaactaggaatggaggaaaatggaatattttataaaaatatctctgaatatatagaatattttataaaaatctaagctaatactgtacttactggtgagaatccaagtgctttacacctatgatcaggaataagagaaggatgtcgcctctcatgagttaattcaacattgtgcagtgagtcttacctaatgcaataaaacaaaaaaggaagtaaaaggtrtacagattgggaaggaagaaacgaaactgcatttgctcacagatgacatgattggctatgtagaaaattccaaagaatcaacaactgtgcagagagatgtttcaggaggaaacatggggaaagaatt

SEQ ID NO: 640613 - DNA, 532 bp, Homo sapiens
aagggaataattacccaataatcatgcattccagatgcttatgtacccttcttcataggagaaggggaggtgggggtgtaggagtaaacgttttttagggagaatgaatggactccattttcagacaatggtgagtaaataattgtccttgggagctgaatgaaagcagagaacaaacaatggtttgggacaaccgaaccattccaatttcatctgggctgtaggtgtgatgttcaatttttagactctacctctgtgatatgaattttaatcttctctggttaatgaaatttcagagaagggatagaagggattgtgttcctctttgggggtccagtttctgggtgtataaggacattttggggaacaggtttatcttgtactttggaagagacagaagactgagagacaaaagtagggagaaggtgagagggatcttgagcctgcttctctagtttagcaggtcaaagcaccgtawcttggggtattggtttctgagccccaacataggcatcttgaaaaggtctagatc

SEQ ID NO: 640614 - DNA, 428 bp, Homo sapiens
agaaagggctggtgttgagagggtcttggccaataagcctgtgtctcagggcacattctcacggggatgtgaggctcactacaatgggctttgagcatggaatgccagcatctacaggtcacacaaactccggacmatcagggactgctatgactgctgctgtgactgtctcccttgccctcatgggctgcactcctgccctgcccaccctgagccctggatctcaaggtgtcccagggtgaagatgaggacatattgcggacagccaagccatgcatccactcccctacccaggccagccccaggcagcacatcagatccccctgatggtaggactcactgacaaccactgtccatgtggctcaggacttcccctggccccagactccaagctccttagtctgcaggtggggccaaggccacatggt

SEQ ID NO: 640615 - DNA, 428 bp, Homo sapiens
agaaagggctggtgttgagagggtcttggccaataagcctgtgtctcagggcacattctcacggggatgtgaggctcactacaatgggctttgagcatggaatgccagcatctacaggtcacacaaactccggaccatcagggactgctatgactgctgctgtgactgtctcccttgccctcatgggctgcactcctgccctgcccaccctgagccctggatctcaaggtgtcccagggtgaagatgaggacatattgcggacagccaagccatgcatccactcccctacccaggccagccccaggcagcayatcagatccccctgatggtaggactcactgacaaccactgtccatgtggctcaggacttcccctggccccagactccaagctccttagtctgcaggtggggccaaggccacatggt

SEQ ID NO: 640616 - DNA, 428 bp, Homo sapiens
agaaagggctggtgttgagagggtcttggccaataagcctgtgtctcagggcacattctcacggggatgtgaggctcactacaatgggctttgagcatggaatgccagcatctacaggtcacacaaactccggaccatcagggactgctatgactgctgctgtgactgtctcccttgccctcatgggctgcactcctgccctgcccaccctgagccctggatctcaaggtgtcccagggtgaagatgaggacatattgcggacagccaagccatgcatccactcccctacccaggccagccccaggcagcacatcagatccccctgatggtaggwctcactgacaaccactgtccatgtggctcaggacttcccctggccccagactccaagctccttagtctgcaggtggggccaaggccacatggt

SEQ ID NO: 640617 - DNA, 579 bp, Homo sapiens
aagctgcctcctcggaactctattctcagtcaawgccctgtctcctgagtgggccccggtcctccttgctttctgccagcctctgcaaggtcccagcccccttgcacatgcccacagctgtgagcgttgtgcaggctcagcccctgggatgtggcctcattgtggtgttgaaggagggcatcacagtgtggccctgaccgtggggttgggcactgataacccctgcacctctacaccaggatgctggagcctgccatcccccactgtgctggggatggggaagatgcacccagggctttgaatgtcctcacaggtgacaagcctgcagcctgcatggaggccagcaggtgaaaaggaacagtttcagggtgcagaaatagaacataaccgtgtgaagcacagcctttccacaatgactattaataacacactgagtaacatttcttctgtagaaagatttggaggaaagtgagacaccacaaactggaaagaaatacaaaatcctaggttgagtaagacaatttctcatctgatgaactcttaaaatcagaatgtggtgtccctgttacagtaaagtgc

SEQ ID NO: 640618 - DNA, 583 bp, Homo sapiens
ctcacagcatggctctgtagcaggaggatccagatgacagaggtggttcccagtcttggtgcactgggatctcctgtaggaattttacaaaattacatccttgaacccaacctcagagattctgacccagtagctctaggggtgggaaaaagtgtctgtatttttaaaaagctcataagtgattccactgcagagcagagaatgagcaccactggataggaccatgaggacaatgaattgttcctaacaagatgggtcaattagttatatgtctgttgtttcctkggaaccaagggatgaactgggtgacacctggagttgtttaataatacagattctttttattcattcccagtattgtctgaagcagagttgaacctgaaacatctaaagtgtgaatcgcctacttcagctcgtgtcatttcagataaaagtcatacagtcatagaatctggggtttataagatatctcagggatcatctgggtaactcctctgttcaattcatgaatgtcatctctaatatctccttcaattcatcttccactcctcactggaatctcttaaatgaactatttgatcat

SEQ ID NO: 640619 - DNA, 592 bp, Homo sapiens
attaacttatgcttcgcatcaagagagtgctagtttaatttgtaacactgtgaayatcctgaccacatattctaagagttcagataatagaaacgagaaggctcacaataataatagcagtacgacacaggcaccactgaaaaagtctaaatgtctgtgttactttaatgacaaatgaacgaagacctacagctgaattaggcaaacaaccaaaacagagccccccagaataatatgcagaaacagtatggggcaggcaggggcacagtggagaaggggtgggaaagcttctgtggaggctgatctcacaggtccaggatgagacaggaaagcacgtctaaatcaatcaaggtttgtcatctctcaaaaagatgccaaagctgcattgtgaagagtgaaggctggatgagcttggacacagggcaggaatgaatatcattatcctagcatcccctttacggttccatcaggctaagcaaagggacagttcctcctttagaagctccaactaaagtgccctgtgggcaaacaaaaggagaattttgatgacagatgtgttggcccaggagtgcagagttgtttctgtcagatc

SEQ ID NO: 640620 - DNA, 593 bp, Homo sapiens
attaacttatgcttcgcatcaagagagtgctagtttaatttgtaacactgtgaacatcctgaccacatattctaagagttcagataatagaaacgagaaggctcacaataataatagcagtacgacacaggcaccactgaaaaagtctaaatgtctgtgttactttaatgacaaatgaacgaagacctacagctgaattaggcaaacaaccaaaacagagccccccagaataatatgcagaaacagtatggggcaggcaggggcacagtggagaaggggtgggaaagcttctgtggaggctgatctcacaggtccaggakgagacaggaaagcacgtctaaatcaatcaaggtttgtcatctctcaaaaagatgccaaagctgcattgtgaagagtgaaggctggatgagcttggacacagggcaggaatgaatatcattatcctagcatcccctttacggttccatcaggctaagcaaagggacagttcctcctttagaagctccaactaaagtgccctgtgggcaaacaaaaggagaattttgatgacagatgtgttggcccaggagtgcagagttgtttctgtcagatct

SEQ ID NO: 640621 - DNA, 579 bp, Homo sapiens
attaacttatgcttcgcatcaagagagtgctagtttaatttgtaacactgtgaacatcctgaccacatattctaagagttcagataatagaaacgagaaggctcacaataataatagcagtacgacacaggcaccactgaaaaagtctaaatgtctgtgttactttaatgacaaatgaacgaagacctacagctgaattaggcaaacaaccaaaacagagccccccagaataatatgcagaaacagtatggggcaggcaggggcacagtggagaaggggtgggaaagcttctgtggaggctgatctcacaggtccaggatgagacaggaaagcacgtctaaatcaatcaaggtttgtcatctctcaaaaagatgscaaagctgcattgtgaagagtgaaggctggatgagcttggacacagggcaggaatgaatatcattatcctagcatcccctttacggttccatcaggctaagcaaagggacagttcctcctttagaagctccaactaaagtgccctgtgggcaaacaaaaggagaattttgatgacagatgtgttggcccaggagtgcagagttg

SEQ ID NO: 640622 - DNA, 631 bp, Homo sapiens
gcaccagcaaaaagggaacaactccttaattaacaggcaatagtgggaaggactgtttatttcccagtcaattatacaatttagtgaacatgtttcctactgatttctayggacttcccttaaatcctattaatagacctttgaggtcctcatagtttcttttacagaaagccatgttgtggtcaacatcccatcctctttactacaactgtcagaaactgaaggatctgagactttaccctacagggaagctaacaaggtagcctaccgcattttcagtgatggtggtagaaaacaagagactcctgggtcagaaacaaaggacagtttattactcacagcaaaagcagtagatagaatatttttttgtggcattttgtgctacttccatgagctccaatttccacaggatgatgtgaaaagggccagatgacattttcacatgctgtacgttgtattacaggagaagaactcagaactcttgagttgagggaactggaaacttttataataggattaaccatgcctgtcttttgttccaggagagacattatcttcattgcattgggcaataagacgcctgccctttgctctgaaagatgacattatttttatcatccaaggttgtttg

SEQ ID NO: 640623 - DNA, 631 bp, Homo sapiens
gcaccagcaaaaagggaacaactccttaattaacaggcaatagtgggaaggactgtttatttcccagtcaattatacaatttagtgaacatgtttcctactgatttctacggacttcccttaaatcctattaatagacctttgaggycctcatagtttcttttacagaaagccatgttgtggtcaacatcccatcctctttactacaactgtcagaaactgaaggatctgagactttaccctacagggaagctaacaaggtagcctaccgcattttcagtgatggtggtagaaaacaagagactcctgggtcagaaacaaaggacagtttattactcacagcaaaagcagtagatagaatatttttttgtggcattttgtgctacttccatgagctccaatttccacaggatgatgtgaaaagggccagatgacattttcacatgctgtacgttgtattacaggagaagaactcagaactcttgagttgagggaactggaaacttttataataggattaaccatgcctgtcttttgttccaggagagacattatcttcattgcattgggcaataagacgcctgccctttgctctgaaagatgacattatttttatcatccaaggttgtttg

SEQ ID NO: 640624 - DNA, 469 bp, Homo sapiens
gctgtatttcagtttctacagcctcaatcggatgaactagctgagatctatgggactctgggctggcttttgctgactgccacaaactctttcaggtctcacatgcctccacatctctgagttcgtttttcttcctctttgctacagcactgagaaaaagatgctggatcactgtcttacacaataacagcatggctcaacaggttttccaaaggcattctgaagccttctttggaagcacagcatttctacccctttataaagtgtttaagataaacagaaaactaaaacacagtcccagtattgagggggcaggtgagttattatcttctccaggaaaggctacaaaaggacccttaactgtccctcctaccacacacatggcaggctgggctgtatctgcttcatgagtggctgttttccttatttctctgaggttccttcygggctatctgggccatggtcgtgc

SEQ ID NO: 640625 - DNA, 502 bp, Homo sapiens
ctctcactcttgtaatcttcgctcagggacgtttaagaggctccctcctgcagctcctccctcatgtgttcctaaacagctgcaattttctcagtgactactcagccatgctgcgggtccctatccaccccctggcccatcctgggtgttcatcagacagttctttccctcagtagcagaacgttaattgttctgcaatgtgaggtgatctgtctcctgaggctctggaccccaccaacctcctcagtttagacacatcccagtaacctgagacagtcctgttgtttctgtctcaaattctgttctccccctcacaagcacataattaagtgattataactactctggacacctaattcacatgcagataagcttgtccccaggaccatttgtacattttaacaagtaattagcaatgttaatactggctstcccctcaggacccttgatgtgtgtgaaggagactgacagatcagaatcaatctcaatagaaagagacttg

SEQ ID NO: 640626 - DNA, 668 bp, Homo sapiens
cgggaagaatttagattgcagtttaactttggcactaatgactgtctctctgttgaaacacacccccgaggasataaagaatcacacacacaacagtgctattttaaagatttacaggaacaaggtggatctgacaagtagtagaccaggagcaaagagaaaagagttttgcaacctcttcaggccccttttgacatccagaggtcacctgtcacctccgcaccttaaccgttccctgtttgcttgtcctctaacatagaaggagcctaaaaatgtatcagcgtcagatggttcttcagggcattagtccaccgtcttctcactttgctgactcctagaataaaatcatctttcttgccccagcactttgcctctgaacttattgactgtcatgcagcaggcggtgtgagctttggacttggctacaataagagctccttaagatctgggcagcaaaacagatacacggtcacttctaccattctccactggctgagctgtctcatcgtctgctcaggacagggcaggggacgcagtcccacctctccatggggggttgtgcaaccctttgcagttatctttaaattcacttcactgcttttttgagagagtaacagaaaaatagtcaccatgaggaaagaaaccatgcagtgtgactgagccatggg

SEQ ID NO: 640627 - DNA, 592 bp, Homo sapiens
atcagcgtcagatggttcttcagggcattagtccaccgtcttctcactttgctgactcctagaataaaatcatctttcttgccccagcactttgcctctgaacttattgactgtcatgcagcaggcggtgtgagctttggacttggctacaataagagctccttaagatctgggcagcaaaacagatacacggtcacttctaccattctccactggctgagctgtctcatcgtctgctcaggacagggcaggggacgcagtcccacctctccatggggggttgtgcaaccctttgcagttatctttaaattcacttcactgcttttttgagagagtaacagaaaaatagtcaccatgaggaaagaaaccatgcagtgtgactgagccatgggctgctccttcaactctaaaatgtgttgctgttttcagtcatggatggagcctgactggagacgctctgggatacggttatgtccttgtcctgaagaccctcacaygctagggagggagagggcatctgaccactggccaagcttcagggtggactgcaaaggctgatgtggagccgaaccagggtttctaattattttat

SEQ ID NO: 640628 - DNA, 595 bp, Homo sapiens
gaattcagttgcttgttgtaggactaagggcctctgacacactcttctaccctccacttccgccatcatatgaccgcatccagttggcccaactaggacatccaggagtacccccatctccagggacttagcaccacctgtatctgcacagcgcctcacggtctaaagcagtgtcttcacaggtcctggggattagggcggggacattatcccgcctgctgcagccacctggcttccacccacctggaactgaggatgtagtcatccctggagcctggacattgggtggggaaggtcgcggccagcctgggtgtacgcactgcacaatgcttgtctttgttctgmggacaaagaagcacgtcagtggcttaagaggtcccagaagattcactgcaattgtaccatccataagtttcagtactagcatccctagggaaggtgacgggcttaggacctctgtaacttcccggcgtggacccaaaatctgtgttcaggggtggctgagtcctcctcactggggccatctgaccctctgatgaagaaaacagcacggtttttagattaggctgcccagtgtgcagcacaagcagtgtgt

SEQ ID NO: 640629 - DNA, 566 bp, Homo sapiens
cctctgacacactcttctaccctccacttccgccatcatatgaccgcatccagttggcccaactaggacatccaggagtacccccatctccagggacttagcaccacctgtatctgcacagcgcctcacggtctaaagcagtgtcttcacaggtcctggggattagggcggggacattatcccgcctgctgcagccacctggcttccacccacctggaactgaggatgtagtcatccctggagcctggacattgggtggggaaggtcgcggccagcctgggtgtacgcactgcacaatgcttgtctttgttctgcggacaaagaagcacgtcagtggcttragaggtcccagaagattcactgcaattgtaccatccataagtttcagtactagcatccctagggaaggtgacgggcttaggacctctgtaacttcccggcgtggacccaaaatctgtgttcaggggtggctgagtcctcctcactggggccatctgaccctctgatgaagaaaacagcacggtttttagattaggctgcccagtgtgcagcacaagcagtgtgtc

SEQ ID NO: 640630 - DNA, 629 bp, Homo sapiens
ttactagttatgcaatgcactcgaatccagtttaagttcrgcgctctcatctgtaaaagtggggcaagaatttgccttttgatgttgggagatcaagttcttggctgagggagggtttggaaattatagatcactcacaaatgttattgctgtgggcgttggcagtgttgcctccagaaagcactgtggtgaaaggaagagtccattttctgaagctccctctgtctcatcagctaaactactccagtgcccagagctctctgatagaccccttctccaaattagaatcttcacttcagaatcagagcgtcatcctgatggcattgcttcccaagtgcttgagtgcaggaacatggctgctaagggtaaccccaaggaagggaggcttctagggccctgactgagcaagcaggcacccctgcctgactcccctcagcatgaaaagcattacatttcctccaccaccacaggagggatctaagctcatttctccattcacagtcacaatatttgatcctgtgcattcccatactaaggtttccatatgtggtagtcatcaccattatcattagcagcagctactgtaaatatttttcagtgccttagtatacgtccaagaggtcagccag

SEQ ID NO: 640631 - DNA, 549 bp, Homo sapiens
acatttttgctctgtagtaacacattccttgtgtgtggtgttctgctacaatctagtaacaatgtggtggagagaaaggaggaaaataggccacaccaaaggacttactagttatgcaatgcactcgaatccagtttaagttcagcgctctcatctgtaaaagtggggcaagaatttgccttttgatgtkgggagatcaagttcttggctgagggagggtttggaaattatagatcactcacaaatgttattgctgtgggcgttggcagtgttgcctccagaaagcactgtggtgaaaggaagagtccattttctgaagctccctctgtctcatcagctaaactactccagtgcccagagctctctgatagaccccttctccaaattagaatcttcacttcagaatcagagcgtcatcctgatggcattgcttcccaagtgcttgagtgcaggaacatggctgctaagggtaaccccaaggaagggaggcttctagggccctgactgagcaagcaggcacccctgcctgactcccctcagcatgaaaag

SEQ ID NO: 640632 - DNA, 629 bp, Homo sapiens
ttactagttatgcaatgcactcgaatccagtttaagttcagcgctctcatctgtaaaagtggggcaagaatttgccttttgatgttgggagatcaagttcttggctgagggagggtttggaaattatagatcactcacaaatgttattgctgtgggcgttggcagtgttgcctccagaaagcactgtggtgaaaggaagagtccattttctgaagctccctctgtctcatcagctaaactactccagtgcccagagctctctgatagaccccttctccaaattagaatcttcacttcagaatcagagcgtcatcctgatggcattgcttcccaagtgcttgagtgcaggaacatggctgctaagggtaaccccaaggaagggaggcttctagggccctgactgagcaagcaggcacccctgcctgactcccctcagcatgaaaagcattacatttcctccaccaccasaggagggatctaagctcatttctccattcacagtcacaatatttgatcctgtgcattcccatactaaggtttccatatgtggtagtcatcaccattatcattagcagcagctactgtaaatatttttcagtgccttagtatacgtccaagaggtcagccag

SEQ ID NO: 640633 - DNA, 517 bp, Homo sapiens
tgttcccttgctagggacaggtggagagcacgtgtctctgttgtgcccagtgggcctggcggcatcctgaatccacggcacaggcacaagccgtctgctctccaggttcagcaggggcttctttcccatgcctggccccggagggtcccctgggagycagagtgctccactgaaaggttgtggcatctggagggtcccccagccaagcttccaagacagctggtcaacaagaggctgatggaggtggaaggccaggtatccggcatcactttcacatcagcagaaacattccctgtttgcagagcactgccctcagggcggccagcccaagaaagaatcataagctcctttaggaagctctgatgaaatcactagaagagacagttgcagaggggtgtgtggaagtcattattcattgattacctactatgcgccacaaaccaagccagggccttccacacacatcactcatctggttctcactgcaccatgtaacgttgaatggccacacatgaca

SEQ ID NO: 640634 - DNA, 517 bp, Homo sapiens
tgttcccttgctagggacaggtggagagcacgtgtctctgttgtgcccagtgggcctggcggcatcctgaatccacggcacaggcacaagccgtctgctctccaggttcagcaggggcttctttcccatgcctggccccggagggtcccctgggagtcagagtgctccactgaaaggttgtggcatctggagggtcccccagccaagcttccaagacagctggtcaacaagaggctgatggaggtggaaggccaggtatccggcatcactttcacatcagcagaaacattccctgtttgcagagcactgccctcagggcggccagcccaagaaagaatcataagctcctttaggaagctctgatgaaatcactagaagagacagttgcagaggggtgtgtggaagtcattattcattgattacctactatgcgccacaaaccaagccagggccttccacacrcatcactcatctggttctcactgcaccatgtaacgttgaatggccacacatgaca

SEQ ID NO: 640635 - DNA, 624 bp, Homo sapiens
aatttctgtaaccatcttgggccataagagaatctgttgccctgatgggacaaacccagacctgagtccaggcaggcttcaccaactgctgaccacagtgacctcaggccttgaataaacatcagcagcaatcaggccatagcaattgtgggccttgggcaagtcccagtactgcaatggtgtgggaggccatgagctttgggtgtgacccagcttactgccagctgtggcagccacaagagtgtccattgtcacttcccttaactccaggcagcccaatgcagagaaagactccttccagttgaggaaaagagagggaagaaagcaagggtctttgcctgggaacccagggaattttcctgtatatttcccaagtctgtctgggttatatatctataarcctgaaagggtagcagtgtacctgggtttacgcaccctttcacactgaaagggctgcagtgacaacaaacttaggtaacaacacttaatcttctttgaaatgatagaagataaagatctctcaagaagatcaggtacaaacaaggtcatacagcagataccagtataaatacctaacttcagtggccagacattgatgaacatccacaagcatcaagaacatcc

SEQ ID NO: 640636 - DNA, 580 bp, Homo sapiens
taacaacacttaatcttctttgaaatgatagaagataaagatctctcaagaagatcaggtacaaacaaggtcatacagcagataccagwataaatacctaacttcagtggccagacattgatgaacatccacaagcatcaagaacatccaagtaaatatgacttcaccaaatggactaaataaggcatcagtgaatctggaattctggactgatgaagatatatcacctcttagatagataattcaaaatggctgttttcgggaagctcaataaactaaaagataacacagaaaaaatgcagaattctatcaaagacatttaatgaaaagattgaataattaaacacagaaatcctggagctgaaaaatgcaatagaccaatggaaaaatgcatcagagtgtctcaacagcagaactgatcaagcagaagaaataattagtgagctcaaagacagcctatttgaaaatacacacaggagaagaaagaaaaaagaataagaaagaataaagtacacttacaaaacctagaaaacagcctcagaaaggcaaatctgttatttatcttaaagagcatgtaaag

SEQ ID NO: 640637 - DNA, 645 bp, Homo sapiens
gcggcagggagagtaaagagagactggttaccaggtacaaacatacagttagatggagtaagttctaattttcaatagaaagagtagggtaactatagttaagcmcagtgtattatatatttcaaaatagccagtaaaaggaggagaaatgttatcaacccagaaataataaatactcaaggtaatggatatcctaaatacccttacttgatcactacgaattccatgcatgtaacaaaacatcacatatactgtataaatatgtacaactattatgtatccataacaacctaaagtaaatttagaaaaggattagaaattctggaattggctgggtacagtggctcatgcctgtaattctaatactttgggaggctgaggtgggaggatcatttgaacccagaagttcaagatcagcctgagcaacatagagagacctggtctctaccagaaatgaaaataaaattagccaggtgtggtggcacctgcccatggtcccagccactcaggaagctgaggtgggaggatcacttgaccctaggaagttgaggctgcagagaggcatgatcatgccactacacttcagcctgagtgacagagcgaggccctgtctcaaaatacatacatacatacatacatacatac

SEQ ID NO: 640638 - DNA, 645 bp, Homo sapiens
gcggcagggagagtaaagagagactggttaccaggtacaaacatacagttagatggagtaagttctaattttcaatagaaagagtagggtaactatagttaagcccagtgtattatatatttcaaaatagccagtaaaaggaggagaaatgttatcaacccagaaataataaatactcaaggtaatggatatcctaaatacccttacttgatcactacgaattccatgcatgtaacaaaacatcacatatactgtataaatatgtacaactattatgtatccataacaacctaaagtaaatttagaaaaggattagaaattctggaattggctgggtacagtggctcatgcctgtaattctaatactttgggaggctgaggtgggaggatcatttgaacccagaagttcaagatcagcctgagcaacatagagagacctggtctctaccaraaatgaaaataaaattagccaggtgtggtggcacctgcccatggtcccagccactcaggaagctgaggtgggaggatcacttgaccctaggaagttgaggctgcagagaggcatgatcatgccactacacttcagcctgagtgacagagcgaggccctgtctcaaaatacatacatacatacatacatacatac

SEQ ID NO: 640639 - DNA, 567 bp, Homo sapiens
tatcagtcccttccaggaccctgcaggaaagccgttctcccagggtcaccccccactgcattggcccatatccacaggcagatgaaaataggggtattgaggcctgaccagggtggctgcagttgcaactatacatgtcccttttcgtcaagaagcaaacatttccctgaagatagctctttctgtttcattgggtagaatgggtcgtacagacaccctggctacagagaagtttgggaaagttgatttttggcttcccaatctctatagtgtgaggtgacaaggaagagggcagttggaagcaggtgatggttactcagttgagttggctgtccatccatagacatcaaaatgtgtcatgaagtgaaattttacaaggggttgaagctctgccagagaaagactggagggtccggccagcccaccttatctggacacaaatgcctgcctgctggggcttccagaagaaagaaagcctgccctacctgccttctggctcctctccaatcccartgccaccacctcagttgtctggcacttggagtgtgtggtctttccatacccagt

SEQ ID NO: 640640 - DNA, 588 bp, Homo sapiens
aatcaaccacataaatagactaaagcaataaaacccaatcatctcaatcaatgcaataaaagcatttgacaaagtacaaattctttagtaataaaaaatactcaataaataagaatataaggtaattttctcaacataagtgaacattccacagctaacattgtatttaatagtgaaagactggacctttctccccatgatcaagagccagacaagatgcttgcttttgctatttgtattcaacatagtattggaagttttaagcagagtaattaggaaagaaaaataaataaaaggcatccaaattgaaaagaaagaagcaaaattatatttgttgcagataacatggtcatacatgaatactaaaagttccatrcacaaaaacacaggtaaatacgtgaaatcagcaaagttgcagaatagaaactcatcacagaagaatcagttgcaatcctacacattatcaatgaccatttcacaaggaaaattaaaaaaatttccataaatacaaaagcatcaaaatacaatatacttaggaatacatttaaccaaggaggtgaaagacttgcacactgaaaatgacaaaac

SEQ ID NO: 640641 - DNA, 612 bp, Homo sapiens
aaatagacccacacaaataaagtcaagtgagttttgacaaaggcgtaaaggtaattcgtgaaaaaagaagagtcttttaaacaaatggtgctgaaaaaattggatatacgtgaacctactgaactatacacttcgagatggttaagatgttaaatttcgtgttatgcatgttttaccataataggtattctaaaattcttaaaagaaggaacctagtcacagaccttacattttacacaaaaattaaytcaaaatgggtcgtagagcataacataaaatgcaaaattataaaacttttagaatatacacgtgaaaatctacataaacttggatttggcagtgagggcttagaaataacaccaaaagtatgatttatgaaagaaaaaaatcataagttggactttattaaacttaaaaacttacagtctgtgaaagatactgttaaaagaatgaaaagacaaaacacaaactgggagatgacatttgcagaacacatgtctgacaaaggacttgtatccaaaatatacaaaaaacttttcaaactaaattataagaaaagaatctaattttaaaaagggcaatatatctaaataaacacttcaccaaagaata

SEQ ID NO: 640642 - DNA, 630 bp, Homo sapiens
taggagaatatcttcatggcattgcattaggcaattatgtgttggatatgataccaaaagcacaaacaacaacaaaaaatagataaattggactttaatgtgaagaactatcctgcatcaaatgacactatcaacagaataaaatgacagctcacaggatgattgaaaacatttgcaaatcatatacctgctgaggaattaatattcagaacatataaataacttctacaactcaacaacaaaaaacaaatagcccaattcaaaaaaaaaraaaaatgaaccaaggacttgaacaggtatttctccaaagaaaatatacaaatggctaaaaagcacatgaaaagattctcagcatgacttatcattagtcaaatgcaaatcaagactacatgaaaagatacaacttcacatccatttggatggctcttaaaaaataaaaataaaaaagcaaggaaagaaagtaacaagtgttggtggagatgtgaagaaattagaacctttgtgtattgctggcaggaatttaaattaacacggctgctgtagaaaagtttggcaattcttcaaaaaagtaaacagttactatatctaatcttatgtatataccccgaagaattgaaatcggggtctcaa

SEQ ID NO: 640643 - DNA, 625 bp, Homo sapiens
ataccagatacttgttttatgtggctgtgaaatgggtgggaaacagagggaaaaggcagtaaagccaagattctgctgtgacttcagtcactgggaatgtcattgtattctgaacttgccacctgattcatacacartgacaacgggagagtgaggggcaaaagaccaagacaaacccatcttcacagagaaaaagccatatgaacatacatgcccttaccacatgtcagggttccatttttctctgtagtagttgctttctaaccagtgctttttttattaccatgtgattattattaatgattttattactgttactctttctttaatgaggaactggcgctcatgtcttataaaacttcagtgtactttgccaacattattttttttcctagacagtccttctctctttttttactctgcattggtatgttaattctttcccaatgagtcagtaaggacggaaatattgaattagttgaaaagacatatttacatagctctgaagaaaagtaccagtatcctagattagcacaaagctttaaaaaatttataaagccactgctttcatctaccctgagaggaaaattacaatggattttctgacaatagagtaggaaaatag

SEQ ID NO: 640644 - DNA, 266 bp, Homo sapiens
ctgcccttcattatgttctcctgcaacagttagaaaggaaagtattccaatactctgattctgatattgaatataattcargttagatttttgtcacaaaattgtattttaaatatttataaacctcagcttaattttcaaatcagtttctccacaaactatttacttacaaaatgtacaaagaatgaaggcttacgtgaataaaaattagaaatgaagagaaaaatcctcatcatgttaaaaactaattcggtttactaatggtt

SEQ ID NO: 640645 - DNA, 610 bp, Homo sapiens
agtctgtgcattgtgacaagttttgatcttttctccaaaagtaaacctttcctggttatttgatgtgattcctaggaatgaggttgtattaatttgttcttgcactgttgtaaagaaataccmgagactgggtaatttaaaaagaaaagaagtttaattgcctcacagttctgtaggctgaataggaagcacagtggctcctgctcaacttctggggaggcctcaggaaacttacaattatggtggaaggcaaaggggaagccagcatttcacatggctggagcagacagaacagagagattgggtaggtgccacacacttttaaacaaggtctcataagaactcactatcactttgtcagcaccaaaggggatggtgttaaaccatgagaaaccgcccccatgctccagtcacctcccaccaggctccaccttcaacactggagattgtaattcaacatgagatctgggtgaggacacaaatccaaaccatatcagaggtttcaagacaatttcatttcttttggaagaagtttccttcctcagtcagataagagaacttccagagagagcccttccctgtgcgtggttgggggtgaaaggaaaggtta

SEQ ID NO: 640646 - DNA, 557 bp, Homo sapiens
aaacactttgtgcgtcagtttcctaatctgccaaatggacatgatcatagaacctctaaatgattgttaagaggtttaaatgaaaaatgtacttagaatgttctgacatatggcaccccaaaaatattcttttattaatttgtgacatgttctctttcaaccaggagaggtaaaaaggaggaactgcctgctgaattttgacaacatttaacccttaggttaaatggggatttctaaacttgcctgggggtcttccaaggcactgacacaaggggaattctggkgcccgtctaaagtatgatcttcttaaactcagcttagaaataatttgttgcatttttcttttgcaagaaggctaatctgctactccggatattacttccacgggatggtaatgaggctttctgggaagtagtagttaatagctttaggtgtcttttgtttcctttgtaactgttagggtgcagacgctgattgatggatgtcagcaagagagactgcaggtaagaacaattggggccgctgtaaggtttcagagtaaaagagagatgaaggtt

SEQ ID NO: 640647 - DNA, 625 bp, Homo sapiens
tttctaagtatagagtcatatcatcagtgaagagaaatagcttgacttcttcttttcctgtttggatgccctttatttctttctcttgactgatttctctggctaacaattccggaactctattgaatagtagtggtgggagtgggcatccttatcttgttccagttcttaaggggaattcttccagcttttgccaattcagtatgatgctggctgtaggtttgtcatagatggcacttattattttgaagtatatgcctctgatacctagtttgttgagtatttttatcataaagagatgttaaattttatccacagtttttctgtgtctattgagatgattatatkgtttttgtttttaatcctgtttgtgatgaatgacatttattgatttgcatatgctgacctaatcttgcatcccaggaataaagcctacttgatcaaggtgaattagctctttgatttgcttctggattcagtttgctagccttctgttgaaaatttctgcatttgtgttcatcaaacatattggcctaaagtttttttttttttttttttcgttgtgtgtttttatggtagcaggtaccattcttttgtttccatgtttagcactcaaagacccctt

SEQ ID NO: 640648 - DNA, 655 bp, Homo sapiens
ctggtctaatgctaattaattcccttagcgtttgcttctctgaaagaaattttattttcccttcacttacggagcttagtttcgagggatatgatgttctcagttggattttttttaaggatgctgaagatagttctccaattkcttctgctttgagaggtcccttgctagcctgatgggtttccctttgtaaatgacctgatccttttctctagttgcctttgagatttttttctttcatgttgaacttagacaatctgatgactgtgtgcctagcagatagtcattttgtatgatatctttcaggggtctctgaattccttgaattttcatgttggtctttctagcaggattggaaaaatcttcatggattatatcctcaaatttattttctaagttgcttactctctattcttctctctcatggatgccaatgagtcataggtttggtctccttacataataacatatttcttggaggctgtgcattttaaaaaactctttaaaacttatttttaatgtgactgtgttgattcaaaggaccagtttttgagctctaaaattctctcctcagctttatctattctgttgttaatgcttctaactgtataatgaaatttccttagtaaattttttagttccagaaactcagttt

SEQ ID NO: 640649 - DNA, 496 bp, Homo sapiens
aagcaggccaataacctgacacctggtggctggatgatcaccctcaggaaaggtgccataaggccaaatggttcacaggccaaggaacctggagttttgatgtacaagagcaggagaagaagggcatcccacacattttgttccagctgggccccagccaattagatggtgcctccccacattgacagtaaatcttccccactcagttcactaatgcatacacaactcccccctggaaatatcctttcagacaatccagaacaatggtttgccagccatccaggcatccttccttcaacccagtcatatwtgcctctatcattaaccattacagacaccaaacccacatttcatcacagtctgactttatcctcctattctcgatggacttcagcaatgtgactcaggtcctcacagaacaactgccaagactttgatgtgttcttctcaaaaatgcagcaatttatattcactctgccacactcatttcctattc

SEQ ID NO: 640650 - DNA, 619 bp, Homo sapiens
catagggtgaaaatgaagcaaagaaagcaggtgtttttaagggggaaagattacaatgctgagatattaagtcagataaggaccaaagagtttcaawtagatttagcaacaagtgatttcagtgctgttacagggactaaagcaagatggcaatgaattgagcaagtgaataaggtggtaagaagatggagactacagtataaattattcttttaagaactgtgtcttctttaacagaaaaaaagagtagaaatggaataaattctgatagaagttttccagaagagaaacaaagattgaaacaccaaaggcagaagatctctgcatcatcagtctctccacttctccagttctcagtacaaaaaatattctcagatctcccacgtgtaaaaattgttttaaaacattctcttttgatcaccccatgtctctattatcttatttgtctcctcctttgtacaagagaacttctcaaaggaaggatccataatcattgtctccacttcttcaccttgtatctgctacttaactgcaattctgccccagtcactcctctgaaactactttattgtgaaaccaaggacctctatctcatcaaagtcaacataaaatcacacct

SEQ ID NO: 640651 - DNA, 619 bp, Homo sapiens
catagggtgaaaatgaagcaaagaaagcaggtgtttttaagggggaaagattacaatgctgagatattaagtcagataaggaccaaagagtttcaaatagatttagcaacaagtgatttcagtgctgttacagggactaaagcaagatggcaatgaattgagcaagtgaataaggtggtaagaagatggagactacagtataaattattcttttaagaactgtgtcttctttaacagaaaaaaagagtagaaatggaataaattctgatagaagttttccagaagagaaacaaagattgaaacaccaaaggcagaagatctctgcatcatcagtctctccacttctccakttctcagtacaaaaaatattctcagatctcccacgtgtaaaaattgttttaaaacattctcttttgatcaccccatgtctctattatcttatttgtctcctcctttgtacaagagaacttctcaaaggaaggatccataatcattgtctccacttcttcaccttgtatctgctacttaactgcaattctgccccagtcactcctctgaaactactttattgtgaaaccaaggacctctatctcatcaaagtcaacataaaatcacacct

SEQ ID NO: 640652 - DNA, 570 bp, Homo sapiens
tttaaattctagggggatatctaaagtgcccatctcttccctgtttgtccaggacatccaccagttttaaaactcaaagttctgtgttctgggccctcccttagtcctgggcaaattaagatggtcatcctagagagaatttgtttatcaacaggacttttatagaaaacaagtcttaaaactctggtaggggagctcaggaagtctttttcagtaatagtttaaattgattgttgtgggaaaatctcataggtactggcccatgtgtacaaacctcactctataaagaacactggcttcctwtaaaccctaactttgtacctggcactcacggagggcttgagataaaaatttttatttttatttttttgagatgaagtatcactcttgttgcccaggctagagtgcaatggcacgatctcagctcacagcaacctccgcctctcgggttcaagccattctcctgcctcagcctctgcagtagctgggattacaggcatgtgccaccatgcccggctgattttgtatttttagtagagatggggtttctccatgttggtcaggttggtc

SEQ ID NO: 640653 - DNA, 482 bp, Homo sapiens
acctatctacattctgttttcatggcagtttttactagcttttatcagagtggtgattatacttaaacataatcatgtgtttctatatctacttctaatatgtgagttccttcaggcaggaaaaatatatcctttacctctgtctccccacctgtatatagaaagtgttttggacttctgttttcaaaaatgtgaaaactgaactgcctaaaaggcacctggaaaatgttaaataaactattacaggcagtattttaaatgcacgtttcagttgtcaagaaagtaagagaagtcytcagggatcggaaacaaagaagaaactgaaagagtgggaagtgtgaaataacactggggttatcgagtctctcagcctcagaaaccaaagatttttaggtttcaatggccacttagggacagaaaaatcggccttggttttgagcaatgtggggagttggaactgatatgcctgaaaagtttctcaa

SEQ ID NO: 640654 - DNA, 328 bp, Homo sapiens
gaaaaagcaaaagtggaaacccctgatgaacccatcagatctcgtgaaacttattaactattacaagaatagcacagaagaggctggcccccataattcaattacctccctctgggtccctcccacaatatgtgggaattctgggagagacaattcaagytgaaatttggatgaggacacagccaaaccatatcagaaggtaaaggcagagtatagaaaaggtaactgactttgggaggtcacggtgggtggatcacctgtggtcaggagttcgagaccagtctggccaacatagtgaaaccccgtctctactaaaaaatacaaaaaa

SEQ ID NO: 640655 - DNA, 595 bp, Homo sapiens
tttttaactggtatccttccctccaggacttaactctccaatccattctgcacacaacttttaggtcacctgtcttatacacagaagctgaaaaagcctaagggatagagttacttaggcagctagtattccagcaggtcataacgcttctttggcttcattctcctcacaggaaaaggaagaaattggactagatcagtgaattctaaaccttataacatatcrcagcaatctgtagtcatataaaaaaagtcagatgactacccccttcctcaccgcgaatagctcaatcttaaataccctgcaggcatttattacctttgaagatcgtcacataattcttatgaaactgacttgacataggtttgttctattaggaaagttgaccagttagttaacactctctgcttatctgctagtgatctattaatgtaattaactttgctcagggacatacagtggctccctattgccttttctcttttttactatctgaactttcagacaattttttctaccttttgaaacatgtgtatccagtttttccattaatctttgtaaagcatgatttcaacttcataaaaaaatactgtat

SEQ ID NO: 640656 - DNA, 595 bp, Homo sapiens
tttttaactggtatccttccctccaggacttaactctccaatccattctgcacacaacttttaggtcacctgtcttatacacagaagctgaaaaagcctaagggatagagttacttaggcagctagtattccagcaggtcataacgcttctttggcttcattctcctcacaggaaaaggaagaaattggactagatcagtgaattctaaaccttataacatatcgcagcaatctgtagtcatataaaaaaagtcagatgactacccccttcctcaccgcgaatagctcaatcttaaataccctgcaggcatttattacctttgaagatcgtcacataattcttatgaaactgacttgacataggtttgttctattaggaaagttgaccagttagttaacactctctgcttatctgctagtgatctattaatgtaattaactttgctcagggacatacagtggctccctattgccttttctyttttttactatctgaactttcagacaattttttctaccttttgaaacatgtgtatccagtttttccattaatctttgtaaagcatgatttcaacttcataaaaaaatactgtat

SEQ ID NO: 640657 - DNA, 582 bp, Homo sapiens
tatccccaaaattcaaactgtcagataacacaatgcaaaacagaacagagcctttgattttgagagtgatccatctacttttaattccttggttgtcatgaagaaaacagagggttttttgtttgtttcttgttgtttgtttttcccaaaatggggtctgtggtgcttcctctgtttttctcaaggagtctcaggctaccaaaagttatcttagtgcctcttatgtgtgcattaagagtggcaagacaaaaaatggagaaaaataattcagtttactaagaagaaaaaaccctcttttacagaaaaacgagatccaagaagagaaaaacataaaggtcttttaaatgtatccataacttgtttattcacttttaattaagctgacttttaaccttagtgctcttaacaaaatccttttaaatttcgtattacccaactttagccatgcggccaacatttctggcttttgaactttatcaaaagtaacttcccaggtgyttcaaaggtgtggtaagcagtttctttttacaagatttagaatttccccaaggtagtccagagaaaggaaaattcaagagagga

SEQ ID NO: 640658 - DNA, 502 bp, Homo sapiens
gtgatctgcccgccttaacctcacaaagtgctgggattacagtcgtgagccactgcgcagggcctaatttacgttttaccaacagtgtacaagagtttctttttttctacatcctctccaccayttgttatcttttgtctttttggtaatagccattccaacaggtgcaaagtgatatttcattgtgacttcaatttccctggtggctagagaggttgatcatttttcatatacatattctctgtatgtcttcttttgaaaagtgtttattctggtcctttgcttatttctaaatcagtttattttctttctattgaattgtttgtgttctttgtattttgcatattaattctttatcagatgtatggtttgcaaatcttctctaccatactgttgattatctctttaatcttttgattgtttctttgactgtgtaaaagctttttagtttgatgtaatttcatttgcatattttagcttttgtttcctgtccttttctgtc

SEQ ID NO: 640659 - DNA, 572 bp, Homo sapiens
ggtggggatgacagtaaccattttcaataatgcttttactaagggaaagattatgtgacttcacaatgataccaatcctttctcaatccatgatgcagatcattttatcatgagttgaaagaaaattggtatttctattgctcctgtatttattcttgtaattatttggattttatggcaattgtagcattagccatggaataaacatatttggaggataatatagctgacttgtaattggttgcactctacttgaaaagtctagacatgaaggatacttgggaaatataattaaagcttgaaaaacattataaatttatgtgttaaaaatagtaacaaaatagctatgcttccraaggcaaagacttttgctgtattcatttttcactggagtcaacgacaacatctcgttttgtatgaaatttgacctgaactttgaatgctaagaaagattggagtaggtgaagaagaaaagggagaagaaaaggcataggaattatctagtttcctcaagattcttaataacaatttcagatatgtccggttctttccctgggttcttgagagagaga

SEQ ID NO: 640660 - DNA, 572 bp, Homo sapiens
ggtggggatgacagtaaccattttcaataatgcttttactaagggaaagattatgtgacttcacaatgataccaatcctttctcaatccatgatgcagatcattttatcatgagttgaaagaaaattggtatttctattgctcctgtatttattcttgtaattatttggattttatggcaattgtagcattagccatggaataaacatatttggaggataatatagctgacttgtaattggttgcactctacttgaaaagtctagacatgaaggatacttgggaaatataattaaagcttgaaaaacattataaatttatgtgttaaaaatagtaacaaaatagctatgcttccgaaggcaaagacttttgctgtattcatttttcactggagtcaacgacaacatctcgttttgtatgaaatttgacctgaactttgaatgctaagaaagattggagtaggtgaagaagaaaagggagaagaaaaggcataggaattayctagtttcctcaagattcttaataacaatttcagatatgtccggttctttccctgggttcttgagagagaga

SEQ ID NO: 640661 - DNA, 410 bp, Homo sapiens
aattcaagatgatttcactatcagtaggcacattgttgaatgacactggagagaaagaaaagtggtgtgtgtgtgtgtgtgtctctctctgtgtgtgtttgtatgtgtgtgggtctgtatgtatgaaactagtaagaatgaacattcaaaaagaacaaggtgggcaactgtgacagccattctgtgggaggcacagcagtgtgcagaaagttaatgtctccatagcaaaccgtggggaactgtgggtcagagactctccagcatccttggaagtggcctcttcacagtcatctgagaacctrgaggaagatgctgtttacaagacccacgtggagaaggacttcattgctttctgctcttcaacgccacgtatgtatctttcagtggcagtaagggatttgtgggcctga

SEQ ID NO: 640662 - DNA, 541 bp, Homo sapiens
atagaatgttgtgtgctctccacatattttacatgatcttatgtgtgccgtgagaacagattcctaaagcaacccgatacatggaaacccattcaccactcaccatttaaacagatgatgaattctgttttttttattaagcccatttaacattttacatagtgtttttatggattccaggaatggcttctctttctcaaatgatcaacttcaagtcttctttccatatttcacatctgattmtacaatgagcagtgccattgcatgccctgctagaactgtggataccctttaaaacaagtagaaaatgatagggtggggctgattaggtctaatctcagggaacactggttagtatttcatgtctaggtaattatcttaaggagcgtacatttaactgtttttgatttgtatatttttaaatcttattttttaaaaccactttattgaggtatgattgacatacataatgttacatatttaatgtatacaacttaatgagtttggagatttctatgtactcctgaaatcatcaccacta

SEQ ID NO: 640663 - DNA, 629 bp, Homo sapiens
aagtcttctttccatatttcacatctgattctacaatgagcagtgccattgcatgccctgctagaactgtggataccctttaaaacaagtagaaaatgatagggtggggctgattaggtctaatctcagggaacactggttagtatttcatgtctaggtaattatcttaaggagcgtacatttaactgtttttgatttgtatatttttaaatcttattttttaaaaccactttattgaggtatgattgacatacataatgttacatatttaatgtatacaacttaatgagtttggagatttctatgtactcctgaaatcatcaccactatctatgccataaacatatctctcttctccaaaagattcttacacttctctgtttattattatcatcattccgtgactgcgtgtgagaagtatacttagcataaaatctactctcttaacaaatttcaagtacataacacaatgttggttactactggcaccaycctgtacaatagatttttatcacttttttcagcttctatcactgaaacttgtcatgtgttcatctatttctattatacggtgaaagacagtgtggcataatctgcaaacaactttggagcctggtggcaattttttg

SEQ ID NO: 640664 - DNA, 521 bp, Homo sapiens
ccagaaccagcacagtcactcattcctgtaatcccagcactctgggagtccgaaggagggtggagtggcttgaacccaggaatttgaggccaacctgggcaacatggcaaaacccatctctacaaaaaatacaaaaattagccgggcatattgactggaacctgtaatccgagctacctgagagctgagatgggagaatcgcttgagctcaggaagcggaggttgcaatgagctgagatttcaccactaccctctagcctggatgacagagtaagaccctgtcttaaaaaaagaaaaaraaagaaaagtagtgaaataagaagaaggaggaggagaaggaggaggaaatgcagcataaattgagacagagctcctgtgaatagagatctgggaagttaaatcttttaaatcttcttggataagtgggagttagacattgtactttcaaggatgttcatagaaaaaggaactaaaaattctggatttaggataagtagacttaccaattagttgatgcaaaa

SEQ ID NO: 640665 - DNA, 600 bp, Homo sapiens
aatcttttaaatcttcttggataagtgggagttagacattgtactttcaaggatgttcatagaaaaaggaactaaaaattctggatttaggataagtagacttaccaattagttgatgcaaaaaaactacaagatcagcttggtggtggagatatgaaagttgttcagtgtttgggtcttaaagataagatactggggctgggcayggtggctcacgcctgtaatcccagcactttgggaggcagaggcaggaggatcatgaggtcaggagtttgagaccagcctggacaacatagtgaaaccacgtctctactaaaaatacaaaaaaccaattagctaggcgtggtggtgggcacctgtaacctcagctacttgggaggctgaggcaggagaattgcttgaactctggaggcggaggttgcagtgagccgaggttgcaccattgcactccagcctaggcaacagtgcaagactccatcttaaaaaaaaaaaaaaaaaagaaagataagatactgggattaaattctccttcaattgaggaatcagccttggtgagtgttgaaagtacagagtccttccttatctggttttcatgaatag

SEQ ID NO: 640666 - DNA, 625 bp, Homo sapiens
ttaggataagtagacttaccaattagttgatgcaaaaaaactacaagatcagcttggtggtggagatatgaaagttgttcagtgtttgggtcttaaagataagatactggggctgggcacggtggctcacgcctgtaatcccagcactttgggaggcagaggcaggaggatcatgaggtcaggagtttgagaccagcctggacaacatagtgaaaccacgtctctactaaaaatacaaaaaaccaattagctaggcgtggtggtgggcacctgtaacctcagctacttgggaggctgaggcaggagaattgcttgaactctggaggcggaggttgcagtgagccgaggttgcaccattgcactccagcctagrcaacagtgcaagactccatcttaaaaaaaaaaaaaaaaaagaaagataagatactgggattaaattctccttcaattgaggaatcagccttggtgagtgttgaaagtacagagtccttccttatctggttttcatgaatagttttcaagggataacttattgtcagatctgtaggtcagaaatggaaaatagaggaaatgaatgttgaaagaccttggattagacatgaggtgtttattttgatgtaaagca

SEQ ID NO: 640667 - DNA, 581 bp, Homo sapiens
cattactgacatccagataccattaccagatggtacagaatacatcctacactgtagagtttgtgttgatccaggctctggttctcagactgttctcacaatgcagatcaccaatcactcagggttggcttttgaatcttcaatcacagtccagaagttccttcaagctcccatgtaacttttgttattattttgaccaaaatattatagaatgggtacattgagtctggactaaatgatkactttcttcactcataatagctttatttaacactagactataagactattatcaatctccctctaagatacatacttaaaattatattttatagtgaaatgtataaagttgttctcaatacttccaacatttaccacataatttttactcttggtttctgacacttcagtcacaatattgcatcatttcagcataacagctttcagtgcctaatccatccagtggggctgcatttggacattgaattgtttgttgactaatatttgccaacactaactgtgcaccaggttttgttctagatgcttggaatatgccaattaacaacgtaaatagatttctt

SEQ ID NO: 640668 - DNA, 595 bp, Homo sapiens
ttatattttatagtgaaatgtataaagttgttctcaatacttccaacatttaccacataatttttactcttggtttctgacacttcagtcacaatattgcatcatttcagcataacagctttcagtgcctaatccatccagtggggctgcatttggacattgaattgtttgttgactaatatttgccaacactaactgtgcaccaggttttgttctagatgcttggaatatgccaattaacaacgtaaatagatttcttacactctgaaagcttatattctagtgagtagaaacagactctgaagacataaagtggtaaatatatcacaggccrgagagcaaaaaaagataaaaggaaaaataaaggaagacaaaggaaaacacagaatgatggatgctgtactcctatagatatttcactcaaaagcttttcttgaaataatgaaatcagaacaaagaatggacagagttggggagtgaataatgtggttcttatgcaggaaaagtgttccagcacagaatacagccagtgcaaatgccctgggatagcaatgcactaaacatgtttaaagaactgcaatgagacagtgtgacc

SEQ ID NO: 640669 - DNA, 595 bp, Homo sapiens
ttatattttatagtgaaatgtataaagttgttctcaatacttccaacatttaccacataatttttactcttggtttctgacacttcagtcacaatattgcatcatttcagcataacagctttcagtgcctaatccatccagtggggctgcatttggacattgaattgtttgttgactaatatttgccaacactaactgtgcaccaggttttgttctagatgcttggaatatgccaattaacaacgtaaatagatttcttacactctgaaagcttatattctagtgagtagaaacagactctgaagacataaagtggtaaatatatcacaggccggagagcaaaaaaagrtaaaaggaaaaataaaggaagacaaaggaaaacacagaatgatggatgctgtactcctatagatatttcactcaaaagcttttcttgaaataatgaaatcagaacaaagaatggacagagttggggagtgaataatgtggttcttatgcaggaaaagtgttccagcacagaatacagccagtgcaaatgccctgggatagcaatgcactaaacatgtttaaagaactgcaatgagacagtgtgacc

SEQ ID NO: 640670 - DNA, 543 bp, Homo sapiens
gtaaatgtaagctttggtgtaagatccttgcttttatagactgacacagccacttagtacttggtaaattaatttcatttatttagcttctctgggctttctttgagttccttactaatagatgtgaatataaatatcattgttctaaggatgtaatgagttaatataggcaaaatatttagcatagtccagaataaagaaggtgttaaacaactgctatcattaaagatatttctactttgtaacttaactcagttaacttccttatcaaggtttaaataaaagtcatttgaatcttttcattcaccatgtttggcagtttcctgggacttgcattctcttggtcacctatggcctgaaggtcttggctctgctcatatagttaaattacatattgtctayaatgagatgccctccctcaggagacagactggttccacattgtgctgaccatatcctaaggtagaattaactttttccatgatcaaaaacgatgataccacacaaaagacccaaacatttctagcttcagtgtaattagta

SEQ ID NO: 640671 - DNA, 598 bp, Homo sapiens
tcccaaacctggagcgggcagattttcaaagcctctcagctagaatcaacttaagcttgcctagtttccagcgggaggggcgactagcaccacagctgtggctgcctgctatctaagccatttgaattccttgggggagggtcggcagccagcactgagactcataactgcctaacatgctcagctccctaggcaggggaaggaccacatctatctctatagctccaggccatgcttttccccccgctggagccagggaggctggacagcttagtcccaataggtgtctcccacagccscacacaccagctgtggcagactgtggacagagtgcctcttcagggcttaccctgacccatcccacctcactgggaggggcctccctgcaagaactccaacaactccagctagaggctcagggacagaaccctgatctccctgagcctgagcccctagggggaaggctggctgcagtctccgtggaccagcagacttagccttttttactggtagttctgaggaatccaggcagcccagatgagtcggttccccccagcaaagcagactccctccaccaaaagacagtcaaagtgctttg

SEQ ID NO: 640672 - DNA, 557 bp, Homo sapiens
ggtagcatttctatctgccaatggtaaacaatatgaaaaagaaatttaaaaatttcatttacaatagctacaaataaaattaaatacctaggaattacgttaaccaaagaagtagaagaccctcacaatgaaaactataaaacatcaatgcaataaattaaagaggatgtgaaaaaaatgtaaaaattccttgttcgtgggttggaagaatcaatatttttaatatgttcgtactacccaaagcaatctccagattcaatgcagtccttatcaagataccattgacattcttcacagaatcaaaaaaaaattctaaaatgtgtatgaaaccacaaaagacctgaaatagccaaagctatcttgagcaaaaataacaaaactgtaggaatcacaatacctgactttaaattacactgtagttatcaaaatgtcgtagtactggcataaaaaccgacatgyaaataaatggaacagattacaaaactcagagataaattcatacatccacagtgaactcatttttgacaatggtgccaagaatattcatacgttggtga

SEQ ID NO: 640673 - DNA, 566 bp, Homo sapiens
acactacggaagcatagacaaccaaagcaaaaatggacaaatggaattatatcaagttaaataccttctgcacagcaaaggaaacaatcaacaatgtaaagacaaaacccacagaatgggcaaaaaatttgcaaactattcatctgacaagggattaaaaaccagaatatataaggagctaaaacaactctataggagaaaattttaataatctgatttaaaaatgggcaaaagttctgaatagccatttctyaaaagaagacatacaaatggcaaacaggtacatgaaaaggcgcacaacattagagaaatgcaaatcaaaactacaataaggtattatctcatgctagctaaaatggcttttatctgatagggaatacaagtgctagcgaggatgtggaaaaagggaaccctcatacactgttggggataatgtaagttagtacaaccactataaagaacagtttagaggttctttagaaaactaaaaataagctgccatgtgatctagcaattccactgctgggcatacactcaaaagaaaggaaatcagtatatcaaagaga

SEQ ID NO: 640674 - DNA, 566 bp, Homo sapiens
acactacggaagcatagacaaccaaagcaaaaatggacaaatggaattatatcaagttaaataccttctgcacagcaaaggaaacaatcaacaatgtaaagacaaaacccacagaatgggcaaaaaatttgcaaactattcatctgacaagggattaaaaaccagaatatataaggagctaaaacaactctataggagaaaattttaataatctgatttaaaaatgggcaaaagttctgaatagccatttcttaaargaagacatacaaatggcaaacaggtacatgaaaaggcgcacaacattagagaaatgcaaatcaaaactacaataaggtattatctcatgctagctaaaatggcttttatctgatagggaatacaagtgctagcgaggatgtggaaaaagggaaccctcatacactgttggggataatgtaagttagtacaaccactataaagaacagtttagaggttctttagaaaactaaaaataagctgccatgtgatctagcaattccactgctgggcatacactcaaaagaaaggaaatcagtatatcaaagaga

SEQ ID NO: 640675 - DNA, 579 bp, Homo sapiens
atctataacttgatgaatatagttaatacactattatatgtttaaaatttgctaaaggagtggatcttaaatgttctccagatccccacacacactcaatggtaaggatcttagataatggatatattaatcaatttggttctggtaatcatttcataatgtacacttgtatcaaaccattctattatacacattaaatagatacagttttttgtcaattatacccaataaagctagaaaaaaaaaaagaagatgaaaatcatggagttttgagagatataggatttacaggttgacttgatgtggatatacaaaataagagagaagtcaaggggagctccctgtttctggctttgacaatgagctggatgctagtacccttcactacaaggagaaatcaatatgtattacaaattagctacacaggaacgggttgacatcacatttgaacctgttgtttgtgtaatacatccactggtgacattgaatgaagggttgggtttatggttatagagctcaggaaatacagattttggagtcttagccttatacawgaacactgaatccttagaaataaat

SEQ ID NO: 640676 - DNA, 569 bp, Homo sapiens
aatgccaaatgtaaagtgagttgcaggagaagagcctgcttttgaagaatctgtgaataaagtgcctcagaatacagagactataggagggaaacgtctgcagtgatatttgcttgaaacaagttaacttttactttggcttatgaataattggtgtccctgtcaagagcatttcccatgaattaattatgagagaagtcacacaacagtagttccagaaatrtgtgagaattagaaaatgaaggctgtaaaatgcaacaagctattgaatggacaggaatcttagaattttaaagtcaaagaaatgctgaccacagttaagagatatcagaagagaagaatctgtggttatgcaaaatagttatacaacagttatacaaaggccagctggctcttattaaatagaaaatgagggaaaagtggaggaatggcatgcaatattcaaaaactcctgttgctttctacaattatcattgaaagtcacatagtacatccttactaatgtttagtgtcttgtccttatgtgatatttgtaagagcatggctcctttttctgtattattgaccag

SEQ ID NO: 640677 - DNA, 569 bp, Homo sapiens
aatgccaaatgtaaagtgagttgcaggagaagagcctgcttttgaagaatctgtgaataaagtgcctcagaatacagagactataggagggaaacgtctgcagtgatatttgcttgaaacaagttaacttttactttggcttatgaataattggtgtccctgtcaagagcatttcccatgaattaattatgagagaagtcacacaacagtagttccagaaatatgtgagaattagaaaatgaaggctgtaaaatgcaacaagctattgaatggacaggaatcttagaattttaaagtcaaagaaatgctgaccacagttaagagatatcagaagagaagaatctgtggttatgcaaaatagttatacaacagttatacaaaggccagctggctcttattaaatagaaaatgmgggaaaagtggaggaatggcatgcaatattcaaaaactcctgttgctttctacaattatcattgaaagtcacatagtacatccttactaatgtttagtgtcttgtccttatgtgatatttgtaagagcatggctcctttttctgtattattgaccag

SEQ ID NO: 640678 - DNA, 536 bp, Homo sapiens
taaactttcacttttggtaaaaattaaatattatggccatattaggtagctaaaggaaagcatgccatggagtagagaagagggtttcttcagcactatttccaccaaaggttaagacaacaatgagacagaaaagcgaaggcaccttcaggatccaataacacagtttaaacaggaaatataaactatctggttaattcttatgaggaaataaaaggaggcttgttagattaaactccttcagaatttgtgtttttatgtgattagagaaacaaaaactgagcgatcaaaaagaggagacagatggatagaagaaggtgtggggactacagagcaggaaaaggaaaaggagggaaaaaaacaggctgaagtgtcaacgcacataacaatgttggtcgtttccattctttgtttcttcccacgggaagaaactagagtccagtacttggatgccaatttgctgatgacaaggaatttcttgacaatgagcctagaatttctaagcagcagtckctcaatctgtgattacatatttc

SEQ ID NO: 640679 - DNA, 612 bp, Homo sapiens
caacaaagtttaacaatctctgctaccttgtgtgtgtgtgtgtgtgtgtgtgtgtgtgtgtgtgtgtgatgcaaaaaatgaaagcattagattggtaaatttatgtctcttttttgctccaaatgtcctcaattccataaaactagacaaaatatgattggcacgagttttcacatttctgattgagattcaaagtctggtgattgggatgcagccccaagattctccataaaattatatagtaataagtgttaaagaggagtacagtcttaaaacaaatattgagtmctaaattggtgaccaaagctattcctagcattgggagtaggtctgtaaatgagacaggaagttcccagtcggcatccatctaggttacagtagagagaaacagtgaagttataagcaaaacggacagcttcagagaacaggtgtgcatatatgtgtgtctacataagagtgacaagaaagccaagagtaagaaaaaagaaaaaggaaacatgacagagaattgtagggtaaggaaaaatgttcttgggttggctgaaaaagcctccgtggggagataacacaggggttggactggactaccagaaggagacaaccttggagaga

SEQ ID NO: 640680 - DNA, 229 bp, Homo sapiens
cacacaccatttaaacacaaatgatggattctgttatttatcaaacccatttaatgttttgtgtagtgttttcatggattccaggaatggcttccctttctcaaatgatcaatttcaagtcttattctccatatttcccatctgattccactatgagcagtgccattgcatgccctactagaactgtggataccctttaaaacaagtrgaagatgatagggtgggactc

SEQ ID NO: 640681 - DNA, 462 bp, Homo sapiens
atttttaagtcttattttttaaaaccagtttactgaggtatgattgacatatataatgttacatatataatgtatacaacttaatgagttacagataagtatgcactcctgaaatcgtcaccacaatctgtgccacaaatatatctctctcctccaaaagatccttccacttctctgtttattattataattccacgagtgcatgtgaaaataacacttaacataaaatctaccctcttagcatattttaagtttacaatacagtattggttactattggcaccatcctgtacagtagatttttatcacttttttcatcttctatcactgaaacttggtgtgtgttcatctattttgtttattatatggtgaaagacagcatggcatratctgcaaacaacttgggagcctagtggccattttttgttgcttactcactgtggtaatatgagggagtttctt

SEQ ID NO: 640682 - DNA, 618 bp, Homo sapiens
gaagaaaactgactgtgacttagccccaacaataggatgaaagaagatgatgccgaaaactatagtgacgtagtgcgcctcatayccattagaatgattcccatcaaaacaaacaaacaaacaaacagaaaataacaagtgtttgcagggatgtagaataattagaaccctgtgatctgtcgttgagaatttcaattggtacagctactgaggaaagctgcatgaaagttctgcacaaattagaagtggagttaccatatgatccagaaattccatctatgggtacgtacctaaaataattgaatgcagggtctcaaagatttatttatacacccacattcatagaagcattgttcacaatatctaaaatgtggaagccacacaactaaccaataaatgataaatggataaacaaaatgtggtatacactcataatggaattttagccttaaaaacaaagttctgacatttgttacaatatgaatgaaccttcagaacattaggctatgtgaaataaggcagcaacagaaaaaccaacactgtatgatttcacttacatatgaggtacctagggtctcaaattcataaagacagaaagtagaatggtgatggtcaggg

SEQ ID NO: 640683 - DNA, 618 bp, Homo sapiens
gaagaaaactgactgtgacttagccccaacaataggatgaaagaagatgatgccgaaaactatagtgacgtagtgcgcctcatacccattagaatgattcccatcaaaacaaacaaacaaacaaacagaaaataacaagtgtttgcagggatgtagaataattagaaccctgtgatctgtcgttgagaatttcaattggtacagctactgaggaaagctgcatgaaagttctgcacaaattagaagtggagttaccatatgatccagaaattccatctatgggtacgtmcctaaaataattgaatgcagggtctcaaagatttatttatacacccacattcatagaagcattgttcacaatatctaaaatgtggaagccacacaactaaccaataaatgataaatggataaacaaaatgtggtatacactcataatggaattttagccttaaaaacaaagttctgacatttgttacaatatgaatgaaccttcagaacattaggctatgtgaaataaggcagcaacagaaaaaccaacactgtatgatttcacttacatatgaggtacctagggtctcaaattcataaagacagaaagtagaatggtgatggtcaggg

SEQ ID NO: 640684 - DNA, 618 bp, Homo sapiens
gaagaaaactgactgtgacttagccccaacaataggatgaaagaagatgatgccgaaaactatagtgacgtagtgcgcctcatacccattagaatgattcccatcaaaacaaacaaacaaacaaacagaaaataacaagtgtttgcagggatgtagaataattagaaccctgtgatctgtcgttgagaatttcaattggtacagctactgaggaaagctgcatgaaagttctgcacaaattagaagtggagttaccatatgatccagaaattccatctatgggtacgtacctaaaataattgaatgcagggtctcaaagatttatttatacacccacattcatagaagcattgttcacaatatctaaaatgtggargccacacaactaaccaataaatgataaatggataaacaaaatgtggtatacactcataatggaattttagccttaaaaacaaagttctgacatttgttacaatatgaatgaaccttcagaacattaggctatgtgaaataaggcagcaacagaaaaaccaacactgtatgatttcacttacatatgaggtacctagggtctcaaattcataaagacagaaagtagaatggtgatggtcaggg

SEQ ID NO: 640685 - DNA, 603 bp, Homo sapiens
ctgtcactaagttccttagtgaattcactttgcttcyctgaatctatttcaccatctatgaaaatggagagaattgaacaagacaggagcttctccacgtgtggtccttgcaccagaggctttggcatcacctgagaaattgttataaatgaaaattcatgggcccattctcacctatcaaataaaaattatttggactaggatgcaggaagctctgcttactaagctttctaggtgattcttatgcacgttaaaatttgggaaccactaccctagaatggggatctaaagttctgtccatatctaagattctatcattttcacagatgagaaaccatccaacggtgttctggtccacatggtgaagttgctgatcaagacctttctagatggcatttttgatgatttgatggaaaataatgtattaaatacagatgagatacaccttataggaaaatgtctaaagtttgtggtgagcaatgctgaaaacctggttgatgatatcactgagacagctcaaactgcaggcaaaatatttagggaacacctgtggattccaaaaaacagctgagttcaggtgagtattgtggggctaacagctag

SEQ ID NO: 640686 - DNA, 482 bp, Homo sapiens
gctaagttttatcttagtttacataaaataagttgacattaaaaagcagaartaatatgacatatgataaattgccctgagtaagaacttggtactcccttttaccaaaatgtaaataaggtgtttccaactgagagttttttaaaaaataaaggagcttttaatctcccacttttctttctccatctctttcatttttcctttcttatcatctgttttattttctttcccattgacattctttttcttgtttctgttttttccttctctctttttttcctctgttctttttctccttctttccttttactttcttccctccgtactctcaattctccctttaatttcactgccaattttgaaatcattacatgctaattgagccaagtaggttgtaactgcaagggcatgtcctaatgtctacagcagaaaaatgataaatgatgcatcctgccttcatttacactaccttagaagctgtt

SEQ ID NO: 640687 - DNA, 482 bp, Homo sapiens
gctaagttttatcttagtttacataaaataagttgacattaaaaagcagaagtaatatgacatatgataaattgccctgagtaagaacttggtactcccttttaccaaaatgtaaataaggtgtttccaactgagagttttttaaaaaataaaggagcttttaatctcccacttttctttctccatctctttcmtttttcctttcttatcatctgttttattttctttcccattgacattctttttcttgtttctgttttttccttctctctttttttcctctgttctttttctccttctttccttttactttcttccctccgtactctcaattctccctttaatttcactgccaattttgaaatcattacatgctaattgagccaagtaggttgtaactgcaagggcatgtcctaatgtctacagcagaaaaatgataaatgatgcatcctgccttcatttacactaccttagaagctgtt

SEQ ID NO: 640688 - DNA, 482 bp, Homo sapiens
gctaagttttatcttagtttacataaaataagttgacattaaaaagcagaagtaatatgacatatgataaattgccctgagtaagaacttggtactcccttttaccaaaatgtaaataaggtgtttccaactgagagttttttaaaaaataaaggagcttttaatctcccacttttctttctccatctctttcatttttyctttcttatcatctgttttattttctttcccattgacattctttttcttgtttctgttttttccttctctctttttttcctctgttctttttctccttctttccttttactttcttccctccgtactctcaattctccctttaatttcactgccaattttgaaatcattacatgctaattgagccaagtaggttgtaactgcaagggcatgtcctaatgtctacagcagaaaaatgataaatgatgcatcctgccttcatttacactaccttagaagctgtt

SEQ ID NO: 640689 - DNA, 571 bp, Homo sapiens
aattctccctttaatttcactgccaattttgaaatcattacatgctaattgagccaagtaggttgtaactgcaagggcatgtcctaatgtctacagcagaaaaatgataaatgatgcatcctgccttcatttacactaccttagaagctgttaaacgaggagtgataggataagcgtcgcatcacaaaggccagttgaaagcrgtttaaatatttcagttagaaaaacaatagcttttagactgggtttatggcaatagagctgatgaaaagttgttaaatttgagacctagttttggcagcagaatcaatgcaaattgactaatggattggatatgggatgtgaaagaaaggaaagaattaataatgactaggtttttggcttggcaactggggtgtatggtgccatttactgagtcagagaaaacaggtgtgcaggggacacagatttgaaggaatgcacaatatcagggtcctgttttgtatgcttactttggaacatgtggtacctccagtggtggatgttgaataggcaaatggatgggctcacagagaaatctggactgggaaaa

SEQ ID NO: 640690 - DNA, 602 bp, Homo sapiens
gaacacttacaccacatacatgctttcagtctggttttctgcctctttcctcacgagggtgtattttcatgcagaaactttgtgtcacttactctatatttatattggcctgttgtgtatgaactttgcaggcaaaagagaaaagtcctggggaaagtcattctgtgtgtattaattgcagatatatccagtgatggagaaagagaggcgaacatgcctggcctcaacatccgcaacaaagaattcaactatcttcataatcgaaatggttctgaacttgaccttttggggatgygagatctacttgaaaaccttggatactcagtggttataaaagagaatctcacagctcaggtaatggctccagagagaagaacaagctgcttcccctccacctccacctttagacacttttcaacctcttacctcttaattggcagctgaaagagcaagatgtatgatattataggaattatattttctccagaataggatcccctggattttagccttctctaatgcacagtcttatagcatatgagtatgcgtatgtgtgtgtgtgtgtgtgtgtgtatttacagaaattctacgtagcagagttt

SEQ ID NO: 640691 - DNA, 614 bp, Homo sapiens
ttaataagaaagactttaaacatgcaagcttccttatttttttttctctcctcttctcatttttctttcctctgctttctgggagatttttctaacctttttctaaattttatttcctaataaatctattgagttaaaaaaattgaagctctcatgttttcaattccatactctttcttttgttctttgaatgctcctttttatagcatcttatcaatgctcttctttctctaggattgttgtgtttttcttaaggttttttttttyccctgcagtctttgtttcctttgcattttttttttctgttttcttgttctcaattattcacattataaggttttctctgctgtctgtagatcttggtagctcacttatgtttaagagtatcaacctaagattaatatccacagaataaactcatggtgttctgcctggtgatgggggagaatttgcccaacttcatagagtagaagaggggatttggtatttgttccttaaactgctcttaaccaattttccttatgttagcaccccatttctgggagcacttagtccttctgatatctgagtctttggaggagtctgtgaacacattcaggcttcccacattacta

SEQ ID NO: 640692 - DNA, 641 bp, Homo sapiens
tatgcaaactgaaaggattttttttttttttttttttgagatggagtctcactctgtcaccaaggctggagtgcaatggcatgatcttggctcactgcaacctctgcctcccaggtccaagcgattctcccacctcagcctcccgagtagctgggattacaggcacccaccatcacacccggcaaatttttgtgtttttagtagagacggggttttgccatgttggccaggctggtctcgaactcctgacctcaggtgatcggcccacctcggcctcccaaagtkctgggattacaagcgtgagccaccgcacctggccatctgaacggattttaagagggcaaggagccctcttatatttttgtgtgtttgtgcaagagacattatacacgtggataactgtgttgtatataaatgtatagcatctttgaatggagaatggtctgtgtgtttacacgacacacaacatttgcaaaaaaaaaaaaaccaaacatggcaggccagttggaaaaggagagccacaattaaaataacacctatttaattttttagaaacataaaatatatgaccttttacttataggagcaaaccctagtttggactaagaactgaatcatgtgagcttatggggagattcatc

SEQ ID NO: 640693 - DNA, 519 bp, Homo sapiens
actgccatgacccaaacacctcccactgggccccacctccaacattgggaatcaaattttaaattgagttttaaggaagcccaaatattcaaattatagcactggccatatcagtgttggcagcatctggagggactagaactctcatatgctccctttaggaaggtaaaatggtgaaaatagttttatggcttatataaaactccagaaaatggaaagccatggattttggcagaaggtagatcagtcattgcttgaggatgcgggaagaaaggaggggagagtgggaaggattasaaaggagagaaacttgggggttgatggatatgttcactatttgcttttggtgtttttatggctgcatacatactccaaacttataaaattgtactatttattacatttttttcttggtagtgacagagtctcactatatgcccaggctggtctcgaactcctggcctcaagtgatcctcctacctcagcctcccaaagtgctgggactgtaggtgtgagcca

SEQ ID NO: 640694 - DNA, 530 bp, Homo sapiens
agttcagtgattttttttaattaataaattctcaatttgttgtttgtatttgtttaatttccagagacctgaaatatgtgtggtttgtctgtttatacttaaatgtgtccagtttcatacttattttagtgggagaatatttgccagcctcttcactttgccataatcgggaatccctatctaggccacctggcatctytgattcctgcctgttttcatttatttcatttttacttatatttattgctaattttcacacacttgccagttgtcagaataatatttcatcagacataagttctctgttttcatgttttatttttgaagacttcccttctgagaacttttattctgcttttatctggagtagaaataaattgcaccagtaatgtcttgcaccatcacctcctaattgttgtaggaattccctttgcttatctcctaatttagattatacatctcatgaatttcaagattttctgcttttttggtgttttccatcattttggtggaacctggtctccagtagc

SEQ ID NO: 640695 - DNA, 530 bp, Homo sapiens
agttcagtgattttttttaattaataaattctcaatttgttgtttgtatttgtttaatttccagagacctgaaatatgtgtggtttgtctgtttatacttaaatgtgtccagtttcatacttattttagtgggagaatatttgccagcctcttcactttgccataatcgggaatccctatctaggccacctggcatctctgattcctgcctgttttcatttatttcatttttacttatatttattgctaattttcacacacttgccagttgtcagaataatatttcatcagacataagttctctgttttcrtgttttatttttgaagacttcccttctgagaacttttattctgcttttatctggagtagaaataaattgcaccagtaatgtcttgcaccatcacctcctaattgttgtaggaattccctttgcttatctcctaatttagattatacatctcatgaatttcaagattttctgcttttttggtgttttccatcattttggtggaacctggtctccagtagc

SEQ ID NO: 640696 - DNA, 599 bp, Homo sapiens
aaatttttgtagataaaggaaatgaaataaaggaaacttacatctcaagagagcattcataatgatgtgctataccttgggatatagtttttactccctaacccactcatttgattctcacaacaatttttgaaggtttgcacatgagaaaaaccgagactcggttttaagaggttaggcaacttatccaagtctcagaaggaaactgaaatccaatttggtttgaatctcacattttaaattctacttttaaactttcttggttaaaaaaagtatttcaaaatatggggaatgtatcagaaatggcaggattcagaaatcactgtagtttttctgccctatatatttaatcaggatgaaaagaaaaccaaaaaaagtacctgttygaagcatttgtcattcattattttgaggaaatcttggagtaagatgtccaggtttgaaaaaatatttgctattttttctgttaatgacaacattgctatttagctaaaaaaggaattttggaaaatgtagaaaattatggagaaaataaaaatcactaggaagcccactatattagtcagagtttatgctagctgctataataaagtcacccc

SEQ ID NO: 640697 - DNA, 576 bp, Homo sapiens
ggttgtgtaaattatactttttggtaaatacaaaacagtgttatccaaaacagtcrtctatcaacaggatcatccagggaacattttataaatgattccaggcctctcttcaccctttagaaatggtgatcattacagagcagatccagaatctctatattgttgttaagaagtccctcagatgattttaataatcagcctgcccagggttgctttatagaatatttcttgggaacattataactcttgaaacattgaattctcaccttctttaaattctctcctttaacttctagtcagaataatgactatgattcttgtttcttagaccacagtactagtggaaaactgaggctcataaatgcttaagatccaggactcagcaggattcaaggttttggggaccaatgtgtctcactgtcaatgacagattttgattttggtcttccatgactatgtgtataatcaggaaaggaggtaacttcgtggtccctttccttcccaggaagtcctgtggagggcttctgtgctggaaaattccaggtggcaccacccatatgtcactaagtgttctgt

SEQ ID NO: 640698 - DNA, 592 bp, Homo sapiens
atttaccagatttggcagtattaacacatctaaaatagtatsaaatcatgtaatgcagaacgaaattaagtgctaaaatatgtggaaaactataaaaaagtgatttaggattctattgcattgtctgcccctgtgtcataaaaaagaaaaccataacaaagcaccaccacacaaaacacgcaaaacttgctcgactgggtcatgccactttactaaaatgccatctttctctttgctagggattattttactatcttctctcttttcttttttgttttaacctagcagctaagcataacaaatgtagaaaaactaaataggaaagtgggaaagctgcctctcttattttagagcttgacaagatgtgttagcttttacattttgagctctgtaggatgtcaggcacttcagagcaggggtggcatctatctttatggtgctagatgcacaggcatcctatttggatgaaatcatcctttgtttcatttttttaaaaaaatagagtttgtcaaggtccccagagttccttctaaagaggcaatatgtcctctattttcatctgcaattctgggcaccccactgcagagcaacg

SEQ ID NO: 640699 - DNA, 513 bp, Homo sapiens
agagcaagttgtctcctgggacttctagtggtgcggttctatgctcatattttcagaatagtacactgaacaaactttctgattcagtaacgagaacacctggagccacctggcatctacttttcaaatcttggtatttatgaatatttasattttttttcaaatcaatgtagctctacccaagactctcaagtgtcccacgcatacagatggtttggtaggtcctgatggtgatatgtatttttttcaaatcttattgccttgcctgaaaaacagcatagcattgtataacaggtgcgaacagtggaatacaaggctctctatgtctggagaatcatcttctgccctaaagtgtcttcccacctcctcaatttccctgcagcttcttttctcctgctggaagagtgggtggagtgggggggttgtggcaatattttatattccatttgctgccttctgttcttgttgtctctgattttgcatatgcctttatcaaggactggagatgcacat

SEQ ID NO: 640700 - DNA, 562 bp, Homo sapiens
catgttgccaatctttttgctactacctatggtgagtgctcaccatttcttagctggaagcctggtaatctcacctctagttccatctctccaattattgctatgctttctcaggaccttttcaacagtttctcactaactgaagaaagcattattatactatcattcactgagtttttatcattttccataaattgtctgcaatccttatagtaatcccacaaggaacatgccatcattcaggaagtaaaccatataccttacatttggatgcagggcttattgattccaaagccttgttcttttcactattcttctcccagcctgttctccacgctcacatccatccatccatccatccatccattctgcttcctatttctctgcctgtgaatcagtttctatacacttgcagtattgaagctaggagtcagcttttccaagacacccctttcaaatayacattcagtatgtcacaatttattttgtgagcctcttttagacattcattacattccctattaccctccaagtctgtaaataccatgaggctggagactgt

SEQ ID NO: 640701 - DNA, 553 bp, Homo sapiens
atcagtttctatacacttgcagtattgaagctaggagtcagcttttccaagacacccctttcaaatatacattcagtatgtcacaatttattttgtgagcctcttttagacattcattacattccctattaccctccaagtctgtaaataccatgaggctggagactgtccacatatgtcatttctctttcctctctccatccatccctgctttttttgagagggatttaaggctatgagggtaaatattgggtcttttatcttcacattcccactgcttagaacagtttctgatacataagatgtgatgattaaaggttttatgaatgtatgaatgatatcaataaaactctgtgaagtgacagctargaattaaaaaagtctccattttagcaaagatgaaggtgaagcttggacaggtgggatgggcctgttcaaggattctcacaacttattaacacagacaagaccttgatatttatctcctaattcagtgagacaaagctgcaccacaacttttatgatttttgttgcttttacttcatttctattc

SEQ ID NO: 640702 - DNA, 502 bp, Homo sapiens
tatcattcatgaattatctttcttatttctgtatatgattgtatattattccatcatgcaactatactacagtttattcattctaatattgaggccatttgagtggtctacagttttgggcattgatgaagaatactgctatgaatatttctgttcatgtctttttgtgaacataaatactcatttstctgggtatatactgaggagaggaagtgctgagtcatagagtgggagtatgctcagctttagtagatattggcacaccgttttccaaagtatttgtatcactttaaagtttcaccaggcagtaatttaagccctgctgatgggctatgtagggatacctcatgtggctttagtttgcattcttctgataatgatgtttacaccttctcattcatttattgataatttggctatcttctttatgaagatatcagatattttgttcattttttaattgcatagtgtaatttcttcttacagacctgtggaaattcat

SEQ ID NO: 640703 - DNA, 655 bp, Homo sapiens
gtgtttgtttcccttactagttagttgaaagtttttgtcatgwgcaggtattaaattttattacattttttcctgtatttgttgatcccatgatttaaaaaaattttcaatcaaatgtgatttgattgattttggatgttcaataagtcttgcattcttggaataccaagctaacttggtcatgatgtatttctttttttatatcattgattaattttgttagtttttttgcatctaataataagatatatttgcctataattttccattcctataaagtcattttcaggttttggctttaatattattcttaaatcataaggcaagtttggaagattttctcattttctattctctggaagagtttgtatgaatttttttatttgtttctcaaaagtttagaagaattcaccactaaaaccatctggacctgcgaatctcttttttactcaccataatttccttgaggttcatccaaactgttgtatctatcaatacttcattcttttttgttgctaaataatattccatgatttggatgtaccacaattaatttaaccactcacccattgaaggccatttgagttgcttccagatttggccatttagattagatctgctatgaacatttatttacaggttcttgaatgaacat

SEQ ID NO: 640704 - DNA, 655 bp, Homo sapiens
gtgtttgtttcccttactagttagttgaaagtttttgtcatgagcaggtattaaattttattacattttttcctgtatttgttgatcccatgatttaaaaaaattttcaatcaaatgtgatttgattgattttggatgttcaataagtcttgcattcttggaataccaagctaacttggtcatgatgtatttctttttttatatcattgattaattttgttagtttttttgcatctaataataagatatatttgcctataattttccattcctataaagtcattwtcaggttttggctttaatattattcttaaatcataaggcaagtttggaagattttctcattttctattctctggaagagtttgtatgaatttttttatttgtttctcaaaagtttagaagaattcaccactaaaaccatctggacctgcgaatctcttttttactcaccataatttccttgaggttcatccaaactgttgtatctatcaatacttcattcttttttgttgctaaataatattccatgatttggatgtaccacaattaatttaaccactcacccattgaaggccatttgagttgcttccagatttggccatttagattagatctgctatgaacatttatttacaggttcttgaatgaacat

SEQ ID NO: 640705 - DNA, 524 bp, Homo sapiens
ttgtatgaatttttttatttgtttctcaaaagtttagaagaattcaccactaaaaccatctggacctgygaatctcttttttactcaccataatttccttgaggttcatccaaactgttgtatctatcaatacttcattcttttttgttgctaaataatattccatgatttggatgtaccacaattaatttaaccactcacccattgaaggccatttgagttgcttccagatttggccatttagattagatctgctatgaacatttatttacaggttcttgaatgaacataagtttttattttactgggataagtgcctgagagtataattattgtcaaattattttccagagtggctgaaccattttatatttataccagtaatgcatgagtaatccagtttctttgcatgcttgacagaatataacattataactattttttattttagtcattatgaaagttttgtagtaatacctgatatggtttggctgtgttcccacccaaatctcaacttgaattgt

SEQ ID NO: 640706 - DNA, 524 bp, Homo sapiens
ttgtatgaatttttttatttgtttctcaaaagtttagaagaattcaccactaaaaccatctggacctgcgaatctcttttttactcaccataatttccttgaggttcatccaaactgttgtatctatcaatacttcattcttttttgttgctaaataatattccatgatttggatgtaccacaattaatttaaccactcacccattgaaggccatttgagttgcttccagatttggccatttagattagatcygctatgaacatttatttacaggttcttgaatgaacataagtttttattttactgggataagtgcctgagagtataattattgtcaaattattttccagagtggctgaaccattttatatttataccagtaatgcatgagtaatccagtttctttgcatgcttgacagaatataacattataactattttttattttagtcattatgaaagttttgtagtaatacctgatatggtttggctgtgttcccacccaaatctcaacttgaattgt

SEQ ID NO: 640707 - DNA, 524 bp, Homo sapiens
ttgtatgaatttttttatttgtttctcaaaagtttagaagaattcaccactaaaaccatctggacctgcgaatctcttttttactcaccataatttccttgaggttcatccaaactgttgtatctatcaatacttcattcttttttgttgctaaataatattccatgatttggatgtaccacaattaatttaaccactcacccattgaaggccatttgagttgcttccagatttggccatttagattagatctgctatgaacatttatttacaggttcttgaatgaacataagtttttattttactgggataagtgcctgagartataattattgtcaaattattttccagagtggctgaaccattttatatttataccagtaatgcatgagtaatccagtttctttgcatgcttgacagaatataacattataactattttttattttagtcattatgaaagttttgtagtaatacctgatatggtttggctgtgttcccacccaaatctcaacttgaattgt

SEQ ID NO: 640708 - DNA, 524 bp, Homo sapiens
ttgtatgaatttttttatttgtttctcaaaagtttagaagaattcaccactaaaaccatctggacctgcgaatctcttttttactcaccataatttccttgaggttcatccaaactgttgtatctatcaatacttcattcttttttgttgctaaataatattccatgatttggatgtaccacaattaatttaaccactcacccattgaaggccatttgagttgcttccagatttggccatttagattagatctgctatgaacatttatttacaggttcttgaatgaacataagtttttattttactgggataagtgcctgagagtataattattgtcaaattattttccagagtggctgaaccattttatatttataccagtaatgcatgagtaatccagtttctttgcatgcttgacagaatataacatyataactattttttattttagtcattatgaaagttttgtagtaatacctgatatggtttggctgtgttcccacccaaatctcaacttgaattgt

SEQ ID NO: 640709 - DNA, 627 bp, Homo sapiens
agaattattaaataaaaaaaggtttaaaaagctgttaataggtgaacaaatttatttaatattttatgtagggatgtgtgtgttaagaatggattgtcttcaagcttattgatcaaacattcgtatagttacgtgtctagttgatgggacttcgtatgaatatatttctttctacttcatgtataaattttactacaaactgcacaataaggctgtttgcattttgaaaactagtcaagagagtctgtgccctgtagattttcagtttagagagtcaaaaacaatcartgaaaaatatgagacaatttagtatataaataaacaccaaaatatatcttacctgacttagaaccaacatgagttgaaaaaagaggaaaatatatgtaaatttaacaaaggagagaggacgtgacctggactttgagagaaattgtagacaatggatagaactagggacccaaatgcccatcaatcaaagagtagataaagaaactgtggtatatatatgtgatggaatactactcagccgtaaaaaggaatgagttaatggaatttgcggtagcctggatgggactggagactattattccaagtgaaggaactcagaaatggaaaaccaaacattct

SEQ ID NO: 640710 - DNA, 532 bp, Homo sapiens
tcagaaatggaaaaccaaacattctacattctcattcataagtggagctaagctatggggatgcaaaggcataaatgatacaatggactttggggactctgtgggggaaagtgtgggaagggggtgagggataaaaaactacaaattgggtgtagtgtatactgctctggtgatgggtgtaccaaaatctcacaaatcatcaccaaagaacttactcaggtaaccagatcccacctgttcttccaaaacctatggaaataaaaaaatttaataaaaaaaatagagaaaggagagcattcagacagagggcaatatgagtagtaaaggaaggtctgatttggtgggctggcagcatgcaggagtggaagatgaaattgtatagacaattcggagccaaattatcttctaaaatctgcaacaaccatagcaagtgtacttgattgtttcatccttttttgggttattttaaagcagatcttcaatgytattgttagatctttcttgtcaaagcactttgcaagtcccacatcat

SEQ ID NO: 640711 - DNA, 620 bp, Homo sapiens
tccaatactaactttccttcttaattatgctagaagaggtagagcagaaagctatggatttattattaggaattaaaatttagagtctagagattctcaaatccattttctataataaactaaaattgatagaacaaggtagttcactaatacaaatgaggactgtcagcattccaatttctggctaaaattcaaaggactaaaacatttcaaaaaggcagtggagtttattccaatgtaataaaaataaatcctttctctaaagaatgagaacattaaacatctgtgatgcttgctggaattctggatttaagtctataagactatgacagggatcataaactcaaatgtctacagggccaggtcagaaatattcatcttggcttgtgagaatggaggtgaaccagagttctcataccatcagaaggggcagctgcaacttggcttttgccggttgttatcattcggaaatgtgratctggccttgttaaagctttcacctctttaagagaagccataaatccagatttgtatgagaaagttcttgtatccttggcctagactttcacaggacacgttattttatctttgatattatctctgcatctcaaatagctatt

SEQ ID NO: 640712 - DNA, 595 bp, Homo sapiens
tacacttgaccatttcgactcttgaggagaggtctgaaaactttgataatacaggcctttgcaaaatctgcacctctctatcttattcagcatagtcctaggccttgtgactttctcagtcctttatttcttatatgatatcagcagaccttgggtcagaaaggtctttggtgatagatagcctgtcctctctgaatcagctcttttgcagatttttcctatcttcaggacttgttcatttttcttctgttgcagccatatccccacgacgtgggcccacaattctgagtcaccagctttacttgtgtcaaagaaagtatgatgacaaagggaaactgctgtatttattatttgccataaaytgtgtgctgacttgctcagagagggagaatccctatattttgggcagaaaattccagtgtcatccaaagctcaataatgggtagagttgaaatgaaacaatctggctagatgtactagaaataatccatgtgtatacacaatgagtttgtagagggtaattgacagactttaagggccctggttctgttgccctttcacagatattcttctggttgtggatagtaggacatta

SEQ ID NO: 640713 - DNA, 595 bp, Homo sapiens
tacacttgaccatttcgactcttgaggagaggtctgaaaactttgataatacaggcctttgcaaaatctgcacctctctatcttattcagcatagtcctaggccttgtgactttctcagtcctttatttcttatatgatatcagcagaccttgggtcagaaaggtctttggtgatagatagcctgtcctctctgaatcagctcttttgcagatttttcctatcttcaggacttgttcatttttcttctgttgcagccatatccccacgacgtgggcccacaattctgagtcaccagctttacttgtgtcaaagaaagtatgatgacaaagggaaactgctgtatttattatttgccataaactgtgtgctgacttgctcagagagggagaatccctatattttgggcagaaaattccagtgtcatccaaagctcaataatgggtagagttgaaatgaaacaatctggctagatgtactagaaataatccatgtgtatacacaatgagtttgtagagggtaattgacagaytttaagggccctggttctgttgccctttcacagatattcttctggttgtggatagtaggacatta

SEQ ID NO: 640714 - DNA, 595 bp, Homo sapiens
aagcttcatcttcccatatctaaatttccctgagactgagtctgggacccctattgctgaatccccctaagttctcctaatccacttggacctcagccaggtgtctgccctacctcattttcagtggacaccttagaccttgtacttggtttggatattttgttaatggtatttgcaaatctctcttgctcaggcctaagctctcctatctttatgtcctccttttaaaagcaatctacccccagtcctgcttctctgatcagaacccgggagttttactttgtgttctcatcatamcctgtgctttcctttctctgagaatttaccatgcgtcttatcgtaattcacatggcctcaatcatctccagacagtgagatttttggaggcagggactcaatgtccatttgacgattccattatctagagaaatatctaacacatactaggcccctagacacttgagatgagtaattctactgtacttaaactgctttgggcaaccagtcttaatagacgatataaaattcagtgggactttgtggcacaatatctatgtattttcaattcacttctggtgatattttgctctatttt

SEQ ID NO: 640715 - DNA, 599 bp, Homo sapiens
tataccatatcaagaaatattcaaagtgtgcaaacgtcagagcttcaccctatttagccatccattgggaaccagggcatagcaaagtgaattagctctctgcccttgaaaatctargaactgtttttaggcagtaagtattaagttagaaatatcgccctgagatataaactccaggtccttcttggaagatgttgcaacctttcccagtaatcatcacaagtgctaatgccagatgcattattaacaaagcatatgcacacgctgggaactttagaacagtaaaatttgtcttaatgatcaggcagactccaatatgtaagtgacacagactctgaacagctgcgctgcataattcaccttcatcttacagttttgaaaacgaacatgtttgcctcataatctattgcagatgtgaagtaattccaaccatttcaaagcccaggtcttccatacagttccttctttatgggagtgtaccacacttcattagagaaaaacaagtctaaaatatttgatttgcagaaatactataaaatctcacatattacatcaatcacacttttcaagactatatggaagctaagcttgataacatc

SEQ ID NO: 640716 - DNA, 571 bp, Homo sapiens
gctccattggttggaacaatcataaactctagtttggattcaaggggatagaacatatactccccaccccatggcaagacagatgtcagtcatgagacaagcatgtgggagtgaagaaatatatcattgtggccatttctgaaaaaatacaatatgtcataaaatttttctgtaaatcccccttttccttagttcagattgggtttctgtcacttgcaagcaaaatagwaatttaaaaaccctcactattaccagttaataatatttcaatgatcacttgagagtttgggttggcatttattgatagttatgaatattaagaagcctaatctagtcctgaactggttactctataagctaagggaagtaggcaaggaaatacctgccaccaatgccaaggtttcagccagaaagagcctgtatctgcctcagcatgtgaacaagtgtattatgagggcgctaaattttgtgcaatattaatcttggctgagaaacatgacaaaggagccattactaatttcctatcataggaaaaaaaataaaaagcttgagaatgttcccactactagag

SEQ ID NO: 640717 - DNA, 582 bp, Homo sapiens
agcagacctctggcgacagatgggatgagttaggaaggacgtcatggtagcaagataggagtcctatttgctgatcgtttcatgtgtcaatctcttgtgaaatactcaataagttccatggagtaatagacagtgtttcatacttcatctgatctcctgaggtgcctcacatggggcttggccctgcacaggtgctcaatagaattgtttgaataattatcaaggtgttttgaatctctggcttaattgccatgttcttgaaagacaactgaagcatggactaggctctagtgatctagttctggtccttcctttgctatctttttagtggtgtacattgggtaaatcacagmctctctgggcctcaggtggcttattttcaaatggatatgccaaaagggacactcaaccaggtatttttattttgggagtgatcatctatatcttatacctctaaggttaacatacccctgtgtaggaaaatcattgcatggacgtgaggtgggctcaaatttcccctttcctctgcacttccccaatagcttccagggctgttttggtgtcagaatcctaggagagaaa

SEQ ID NO: 640718 - DNA, 494 bp, Homo sapiens
atgagactcactcattatgagaacagcatgggggaaactgcccccatgattcaattacctccacctggtcccacccttgacatgtagagaatatggggattgtaattcaaggtgcgatttgggtcggagcacagagccaaatcctaccaacttgtgtctgtttattgctccgtattggagtcaatgggttaataaaatcatttctagataaagtatgtgtaggaatcagtcatggagaacatgtatggtcataccccatgagactgagattatattgctaaataccataattgagtctgattctactaaaatagcattaaggtgccaatcatgttcaatttttcccccactttcaatgtatgataattaaaaagataagatttaattctgaacgatgactgcctcaatgcaattattstagttccaatggctgaatagatgctgctctacaaatatagacagcagagaatcaaatccaccaacctttcagtcac

SEQ ID NO: 640719 - DNA, 603 bp, Homo sapiens
tgtgccttaacagtgaaacttaatttgtgcaattgaattgtcatgaaaacattactgcttctttctctttgcctcactgttatagactgttgggataaaaaataaatagcaaatggcattaaaaagctgtggttgagaaaaaaaaagcataggcctgagttctaatccatttacttccattaaccagctagagatattggatgagtctcttctttagcccctccctcctttttaattatatttttgttatcagtttttcaagaattttcctacttcaattatcttttctctcaaacataatcaatccctatgtctccatggggtcattcctatatgtttggatatttcccatcttaatttaaaaaaatgaaatgaaaacttaccatgtcatcatatccctctagtcaacatccctccacccaaactgctagaaaaaattgtccatataacttgtttccccttttcttttctaatatggcttctgtatttattatgccaccaaaaccacatcaatgagtatcactgygacttatgtgttgccaaatgcaaaagatacttttctagactgataaaccacctcgctgtgaaacattttcctattag

SEQ ID NO: 640720 - DNA, 591 bp, Homo sapiens
tcaagcatgagtgacataaagtaagttgttagcacaattcaccagcatctgtttacttgttactatgcttccttcttgggaggcattccaattacaatgactcagttacctcctccacctagggggactgtgaaaaacaaacttttaagctgaaatattcaaactatttgacatcagtctgaaaagatgcattgttcatccattcaatagacattgattgcctaccctgcaaggtgctgccatgggttgcaggacccatgatgctgaccggcagataggattcctactagcraagcttgcagtgtaataagggccagagttgtggggcacagtgcaggatacagggcagatgatagagcgaggctgtctgaagcaagaatggaaccttgggcattttagagcagtgaatcagtccttcaggaccatgtgctcagtttttgcttgaaatgtaaccacaaaacacacttcccaaaacagggagttttgtttcctagtatattcagttctgcagtagggcagataatttggcagggattccaatccactacattcgatactgctttgacccagactagttaactctagaggttg

SEQ ID NO: 640721 - DNA, 621 bp, Homo sapiens
atatacaaaaaagtagaaaaactggtataatgtaccctgtgtatcgtcatgcagcttcaactcctatcaatgtacagctcatctagtttcaacaataatccctactcctctcccctgcactcctggcctggattattttaaagcagtctaagacattttttcagttcataatggggatgttttagagggcaacaaacactgatctccaagtagtgaaagtggtttaggggctcagtagaccactggccagcaccaaggcagaggctggtgatctagagctctgagcttttgtacatatttcaaagtgwcttgagaatatcaggttgtacagataattgacatcaaatgtttttgcttttgactgggagtgtgtccacctgttgtattggcaatgagtctcttatgccaatcagatgctctggtgttcgtagggacagggtctttaagggaaagaccttaaaaatcacagtcttaaggccaggatgtcaagcccattctgaagtttcactcagaaaggacaaaaacttttagtcatcttcccataagtgtgtgtgtgtgtgtgtgtgtgtgtgtgtgtgtgtgtataggtgatgtatatccatttatttaaaaaaacccagt

SEQ ID NO: 640722 - DNA, 576 bp, Homo sapiens
ttcttttcctacttaggtatggtgagaaaaaccatccatttacagttgcttcttttaaaggcagatgggaggaatgggaactatatcaacaaatcagttatgcmgttagtagagcctcatcagacgtttcctctggcacttcctgcgatgaagaaagttgtagcaaggaacctcgtgtcattcctaaagtcagcaatccgaagagtatttatcaggtcaagagtgttccagttcttttctatactttttttctatctaattctaaaaagaatgcactcattatgaaaacaaagaagcaaaaaaacatggaaagaacaaaactgtagatttttaaaagccagactcttaatattttggcaaaactttttctgtctccttcactgcacaatgtattccctacacttggctgagcttttaggatccacataatcttttattgtcctatttcttcatacagtatttgaagatacacaggtttccttccacttaaattcctacagaatcaaagattaagattagtgggatttttttttctgtcaattgaaaataccacggcatttatagaaaatttggata

SEQ ID NO: 640723 - DNA, 546 bp, Homo sapiens
aattgttcaatattgacaattagaccatgagagataaagggaacatgctgctaattgtataccattcagttcctggtctttatatcaaagctccaagttttcatgtctcctagcatgaatgacctgtcctttcttcctagggaaacaattccaagaaaaaggacattcttcacccagcagctcctgccatattcactgagatgtgtttttgtattttcctatgtatttcttcatcagagatggtaggtaagtcaatgtggggtctgttaccctttgagtaataactgaaaaagtgaggagagcagagggcacttgggtcaagttgttatgtcagatgattccctgccccctgtttcatggtgtgcttcacctctctagggacytagaaaatgcttcctaaccacagatgcttaggttgcttcaggtaaggcatcatcttaattctttgatgggccgcagccctttctcctctagctggatgacattgggtaagttgcttactctcttttgaattttagttttcttcatctataaaatggatgtatt

SEQ ID NO: 640724 - DNA, 470 bp, Homo sapiens
agtatggggggaactgcccctatgactcaattacctcccatggggtccctcccacaacatgtgggaattatgggagctacaattcaagatgagatttgggtggagacacagccaaaccatatcagtatggaaagggcaggaacttcaagccacaggaatgggctggctaccscaagttcagaaagctggactcatcaacttgacttcttccccatgcctaatgttccctgggtcattcctagtgtgctctctcttgttcagtgcttagtaatacaatggccatttcttggtcctctactattgtgaggcttcatgatgtgccttttcatgcagtatctgagttgatccttgtaacagcctggtgaggaactcttgtatctgtatcgtacaggtgatgaaatcaagacacagagcattaagtgcttttgctcaaggtaacagttttaagaggtagacctgagatttgaacc

SEQ ID NO: 640725 - DNA, 645 bp, Homo sapiens
acctggctaaattcctgcctgtatttcaaaacctacaaaaaatttggagcgacagaaaatgggtgtgttggctcaagactcaagactctgaacagtatgagtttggagtytgtcgcagcaactggggccattgtcttcaaaaaccagcatcctgaatagggtccctggggcttgatgactgccgttaacatagttgggctggagaacttgctctccaacttcagatgcagccactgatgtctatatggttgtctacccctgaaaaagagtaaaggaactgttatcaattaatcaatgagactttatcgagcacatactctattactgtttttatgccaaatttgctggttacgaaagaaacctaaggtgcttccttgcaccagaagtctgccaaattttctgcaatccagggcttggcatcatttaataaattgggccatccaaactccatcggaggtgggtctgagtcagcttagcaatctgcctggaactttgctttggagtctgtgcatctgcctgtgaagtctgcctcaactggtgcaaaatggttgccttgttttgggaagataaatggtctgagttgcatcatgagatgttcaagtgggactggaaggcttcgaagaaagagggagagtcaagatgctc

SEQ ID NO: 640726 - DNA, 599 bp, Homo sapiens
gtcacattcattattaatgaaaaagtagtaataacagaactagctaccatttatagagtcttttctatattctgggcattgtgcactttggtggaccacggatcatggatacccaggtattgactgaatgtcagactttgtctctgggttcactgaggccaggcttagcttactttgttcattagtctcactctagtgttactatggccaacaaatgcctcaggtagagttaatccttaattgaattgactgctctatctttggaagcagatttctttttttcttttggaccttcaaggtgtctaaaattttgagttgtcrttatctctttctcactctttcctcttttttcttcctacactgacatttctatttatatctcgttttcattttctctgtctcttcattcattcatttattcaagttactttcccaccaaattacagaagtggtagttgaaaaacagcagtgcagctgccagccctatagctccacccatgacagaaagttgcccaggagcatggcatgcatgcaaatagacttgccttcgcatgttggatccttttcctttttataggaaactacacctttgattcata

SEQ ID NO: 640727 - DNA, 509 bp, Homo sapiens
ttctttttttcttttggaccttcaaggtgtctaaaattttgagttgtcgttatctctttctcactctttcctcttttttcttcctacactgacatttctatttatatctcgttttcattttctctgtctcttcattcattcatttattcaagttactttcccaccaaattacagaagtggtagttgaaaaacagcagtgcagctgccagccctatagctccacccatgacmgaaagttgcccaggagcatggcatgcatgcaaatagacttgccttcgcatgttggatccttttcctttttataggaaactacacctttgattcataaggaaatggactttggctttattgtaattcctattttcatggtgttttggcacaaatcatgaaatacacctggtgaaactcctgagtcactggagggcttaaagtttcaggaagaggaagaggaggaggttcctgtgtggcatcttcagaaagaaggatgattggcaagtattacctccatc

SEQ ID NO: 640728 - DNA, 497 bp, Homo sapiens
actgaggatttttgcatctatattcatcagagatactggcctgtagttttcttttttctgttgtatctttgtctgggtttgatatccaagtaatactggcctcatagtatgggtttggaagtattaccttctgctcaattttttagcccaattttttagaatagtatgaatagtatgtatgtgtgtatttatttatttatttggagrcagggtcttactctatcacctaggctggagtgcaggggtgtgatcttggtgtgatctgcaacctctgcctcccaggctcaagcaatcctcctgcctcagcttcctgggtgctatgactacaggtgcacaccaccgtgtctgattaatttttgagtttttgtagagatggggtttcaccatgttgcccaggctggttcttgaactcctgggctcaagtgatctacccaccttggccttccaaagtgctgggattacaggcatcatagttctttaaatgtttggtagaattc

SEQ ID NO: 640729 - DNA, 497 bp, Homo sapiens
actgaggatttttgcatctatattcatcagagatactggcctgtagttttcttttttctgttgtatctttgtctgggtttgatatccaagtaatactggcctcatagtatgggtttggaagtattaccttctgctcaattttttagcccaattttttagaatagtatgaatagtatgtatgtgtgtatttatttatttatttggaggcagggtcttactctatcacctaggctggagtgcaggggtgtgatcttggtgtgatctgcaacctctgcctcccaggctcaagcaatcctcctgcctcagcttcctgggtgctatgactacaggtgcacaccaccgtgtctgattaatttttgagtttttgtagagatggggtttcaccatgttgcccaggctggttcttgaactcctgggctcaagtgatcyacccaccttggccttccaaagtgctgggattacaggcatcatagttctttaaatgtttggtagaattc

SEQ ID NO: 640730 - DNA, 596 bp, Homo sapiens
tttgttcttttgtatttttttaaagtctcaatttcattcacttctgctctgatctttcacttcttctactggtttttgagtttggtttgctcttgcttttctagttcttcaaggatgcattgttagattgtttatttgaagtttttcttattttttgacggaggcatttattgctataaactagcactcctagtactgcttttgctgtattccattggttttggaatgttgtatttcatttgtttcaatacatttttatattytcttaatttcttcattgacctcatggtcggttaggagcatattttaaaatttccatgtgtttgtacagtttccaaagtttcctttgttattgatttctagttttattccactgtggttggaaaaagtagttgatatgatttcattttttaaaaaatttttgagacttgttttgtggcctaacatatggtctgtccttgagaatgttccatatgctgaggagaagaatgggtattctgcagcagttggataaaatgttctgtaaatgtctgttaggtccttttggtgtgcagtacagattaagtccagtgtttctttgattttctattggggtc

SEQ ID NO: 640731 - DNA, 602 bp, Homo sapiens
gtgtgcctttataggtgatatgagtttcttgcaggcagcatgtagttgggtgttttaaaaactccattcagccactgtatgtcttttgattggagaattcagtccatttaaatttcagtgttgttattgataggtaagaacttactactgccattttgtttgttttctggttgttttgttggtcctctttccttcctgtctttctttgtgtaaaagtgattccctctgacagtatgtcttaatttcctttttttktgtgtgtgtatctcttacaggtttttgctttgccattaccgtgaagcttgcaaatagcatttattaaccaatttaaaaatggtgacaatggtgacaactgtgattacaaagaaaagcaaagcaaagataaaattaaaacactacacttgaactccatctcctccctaccccctgctttcactttttgatctctttatttatctttttatactgtgtatctattaaaatgtagttgtaattatttttgatagatttgtcttttagtcttcctatgaaagatacaagtggtttatatgacactgttagtgcaactatactgttagagcaactacagtgttagtgtattt

SEQ ID NO: 640732 - DNA, 623 bp, Homo sapiens
taaagtagatcagaatgtaatgctcttctattttatagaagaaattgcatagagttgatgttaatcctatttttaaatgtttggtagaattatattatgaagctatctgggcctggagacttcttccttggaaatcaaaaaattataaattcaatttccttaatagttttaggattatttaaataatatgtgtcatattgggtgagttgtaatactttgtgtttcttaacaaattagcctattttatctctgaaatttatgcatgtggagttgtttatagtgtttccttattatccttttggtgtctgcaggtctgcagtggtatccctacattcattcttkatattggtaatttgtgtcttcactttctttttaattgtcagagggtttaattctagagggttgtcaattttattgacctttccaaagaaatagctctttgctttactgtgtttttttctattgttttgtgtttagtttcatttatttttgctattacttcctttcttctgcttgctttgggtttattttactctttttctagatttttggggtagaagctaagattattgaattgacactttccctcttttctaatgtatatacttagtattataaatttg

SEQ ID NO: 640733 - DNA, 467 bp, Homo sapiens
cagctccctcatagcccgtcttatgggcaatgactattttaccattttattagtatctgtgccatgaaagcacgatttcaatcaaaatggtaactaatgaggtatttttaaggctgtctaatttggtacttacctgatgactaatctaactatgtgagctgaattaagatgactaagtagccaattctaacaacaaaaaactcaaaatagaggagttagatgtagtgacttgattctgagcagawgttcctgatagcttgatttaaaaatccttgtttaacttaattgtaaatcttcttttcatgttatttcactgtttttattttattttcttgaaagtaatctaccattagtattttcatcagttggattgacagctaaatcctcagccatgtatggatgtctcttaattatgacaaaagacctacagagctaaaaatgttgaataccagatggacactgaattc

SEQ ID NO: 640734 - DNA, 614 bp, Homo sapiens
ttggggttctctctttgctaatattttccattgaccttacaaaatattagtgatgatttggaaccaaaacgtgtgatttttaaagatacaacattttaaatgcttaggattaaaaataaacttttgtaaaacagcagttggtatctttgtggtgtagtggaagaaaccctgaatgagaagacagtggacccatgttctagctactttttgttctcctccagcttgatgaatgggggcaagtctaatcctcagttccttctctctaggattaatatgttacctgcctaaagggaaagggataaactatgctttaaactacaacttttttactattttcatttttctggtgtgtggtatctcaatgtagttttaaatttccctgatgaccaatgctctatgctctcttggatcctttctgaaatataagatccaccctctgttgttgtrggagaagctcttaaaggaagtgatgccacttattcataccatcactcatttccaaccttttattctgtggacatgttcaattataaatatggtccaaacacaataataaataatagttggcatatagctaattgttatcttaatgctattgatcataagggtatctc

SEQ ID NO: 640735 - DNA, 528 bp, Homo sapiens
ggacgggactgagtcctggccctccaacattaagaggccggagaaaagagcagggatcagcaaagaagactgagaaggaacaatcagagaaggaggaaaaccagaggaggccagtgtcttgggagccaaatgaaaaaaatatgtcaaggaggagaatatggtcagatatgtcaaatgctgctgatggatgagcacagaaaatggactgttctctgtgatttgtgggaattggggtccaacagaattctgtggtctggattaccgacatcattatcaaacccacaaaataaatctgccttagtaactaatagagattcaatgatggagatatgtgtacgggacaattacttagcaggattcaggaaatctagaatctagtctcagatccaccactacaaatagctttataactttgggcaaattccttatcttctttttcaataatgtggctaaaagtatagacactacctactttgcaggmttgttgggtggatcgagtgacactatatataaaagtggctttgaaaa

SEQ ID NO: 640736 - DNA, 528 bp, Homo sapiens
ggacgggactgagtcctggccctccaacattaagaggccggagaaaagagcagggatcagcaaagaagactgagaaggaacaatcagagaaggaggaaaaccagaggaggccagtgtcttgggagccaaatgaaaaaaatatgtcaaggaggagaatatggtcagatatgtcaaatgctgctgatggatgagcacagaaaatggactgttctctgtgatttgtgggaattggggtccaacagaattctgtggtctggattaccgacatcattatcaaacccacaaaataaatctgccttagtaactaatagagattcaatgatggagatatgtgtacgggacaattacttagcaggattcaggaaatctagaatctagtctcagatccaccactacaaatagctttataactttgggcaaattccttatcttctttttcaataatgtggctaaaagtatagacactacctactttgcaggcttgytgggtggatcgagtgacactatatataaaagtggctttgaaaa

SEQ ID NO: 640737 - DNA, 501 bp, Homo sapiens
gttttacagatgggattctgcttaattattgataatacattagtgagacatgaagttagcccacatttgtactcctcatgactcagtcatgtaactactgtctgccctgtagaataggatttttattgtcatgaggccaggtgccatggttcatgcctgtaatcccagaactttgggaacactgaggcaggtggawtgcttgagcccaagcattcaagaccagcctgggcaacctgacaaaaccctgtctctacaaaaaattatgaaaatttgccgggatggtggtgtgcacctgtttggaagggtgagatgggaggatcgcttaagctcagcaggtcaaggctgcagtcagctgtaatggcatcactgcactccagcctgggcagcggagcgagatcctgtctcaaaaacaaaacaaaaaatattgtcatatgtggcttgaggtcagaaatatctgaatacactgaggcatttactctgtgaagaagtccattttagtca

SEQ ID NO: 640738 - DNA, 517 bp, Homo sapiens
ttcgtttacccatccataaaatgggattaaattctcgtctatttcatcgagttgctttgaggatcaagtgaaatgtgtggagagtaccatatgtgagtagtttctggttttattaaaccccccaacaacctactartcaagtataaacctttttctaaccctccagtatcgatgagcagtttctcctctcagaattgtttagcaatagactgtcatcagtgtttaaggcagttaccagcaaggcacttccaatctacatatctgaagaactgccaggacaggaacaatttagatccttttctgtagaaagatgctgattgtccaggattttctgaagctggaaccatgactcttataggaaataccagcctggaacctctggctttgataatgacagagatctattaaagggcaccaagctattatgcttctctgggcacaagccagaacatattcattttactgattagagaaagctcttacactgtgacatttattatgccttagctaaatgact

SEQ ID NO: 640739 - DNA, 522 bp, Homo sapiens
atggtggtgacaggtggagaaatggtcctttttggttgaaaagtgtccattaactttatagaagtaccttgcttctcttcccctccccaggggcactggagtagagatggggaaggggagagggaaggttgggggtaagaggctgagaggatgaagggtggaaagagggtcgtgggtggagtttgtggctcagatcagaacatggagggtgtagggggctgagaggaaggggactgggaggccaggccaggcatggaggagggcgagggaggacaatgctgagggctgccgggagacctgtgttttcatccaacccgactcccaggatgggcgagatgcctcctgtgactggatcctccwtgggccccccatctccagaggggccaaggtcttggtgagaggattgcagtatgtcctcccaagagtgagccactgccttgtttgggggtgcagattcacagccagcacgggcaccttgatgcctgtgacggggtctgtcatgagagcccccagcggggacgt

SEQ ID NO: 640740 - DNA, 551 bp, Homo sapiens
tttggcttcctgaggtcaggtcggagcacaaacagatctgaaacgccgttagtcacatcatggaagggagtgagttgggtgcttcaggtagatccagagtacacctkggctctcactcgttattatttcttaacagtgtgaaacccccaggacatcccgacagcgtctgtcctgggtgggccaatgtgagcagagagcacgggctttgaggctggagcccctgcatttgtattctggctccaccgcctaccctgtcaccgtgagaaagcggtttgacttctctcaatctccttttcccctaggtaggaaagggacagtaatggtccttagtaggactgaatgagatactgtgtaggcccagcacggtgcctgagcagatgaaaaactcaataactcatagtcattcttacttttaacagcacttccattatcattgttatcctccaggtcaggagccacgctgggcctgcggtgaattttcttagagtagatttttaagggagccggtccccagctctttccagaatccccagaagctattaaggttgtct

SEQ ID NO: 640741 - DNA, 551 bp, Homo sapiens
tttggcttcctgaggtcaggtcggagcacaaacagatctgaaacgccgttagtcacatcatggaagggagtgagttgggtgcttcaggtagatccagagtacaccttggctctcactcgttattatttcttaacagtgtgaaacccccaggacatcccgacagcgtctgtcctgggtgggccaatgtgagcagagagcacgggctttgaggctggagcccctgmatttgtattctggctccaccgcctaccctgtcaccgtgagaaagcggtttgacttctctcaatctccttttcccctaggtaggaaagggacagtaatggtccttagtaggactgaatgagatactgtgtaggcccagcacggtgcctgagcagatgaaaaactcaataactcatagtcattcttacttttaacagcacttccattatcattgttatcctccaggtcaggagccacgctgggcctgcggtgaattttcttagagtagatttttaagggagccggtccccagctctttccagaatccccagaagctattaaggttgtct

SEQ ID NO: 640742 - DNA, 597 bp, Homo sapiens
ctgggagctcctctccttggcttccagatggccgccttctctctttgtcttcatatggtcttccctctatacctatctgtgtcctaatctcttctcataaggacaccagtcatattggattagggcctactcatatgacctcattttacctaaataacctccttaaagaccttatctccaaatagagtcatatcctgaggtactggggattaggaagtcaacctataaacttggaggagaagaaggaggctgcacaattcagcccatgacagaagttaacactgatgctcagagaagtgccagtgagtccctgataaaagctacagccaatcagttcaggaaccaagaattaggcctgtaactgccttccttcttggctgactgacaaccctagagayacaaagcttcatccagcactggtaaccgaacttaactctattttgccaccaccacttcctgtacgtgcccctcgccccttggcctccccacagcactggtgctacctgaggtgtctgtatttgagccaaaggcaagagaaggtgtcaatacggaagagagaaagaaacatgtctcccttgggactagggtgggaaatga

SEQ ID NO: 640743 - DNA, 597 bp, Homo sapiens
gtcaacctataaacttggaggagaagaaggaggctgcacaattcagcccatgacagaagttaacactgatgctcagagaagtgccagtgagtccctgataaaagctacagccaatcagttcaggaaccaagaattaggcctgtaactgccttccttcttggctgactgacaaccctagagatacaaagcttcatccagcactggtaaccgaacttaactctattttgccaccaccacttcctgtacgtgcccctcgccccttggcctccccacagcactggtgctacctgaggtgtctgtatttgagccaaaggcaagagaaggtgtcaatrcggaagagagaaagaaacatgtctcccttgggactagggtgggaaatgacaaggatggaggcaacttccaaggagaaccactggctcgcttcccaagctcataagcagaacatagaaaaaaggtccaaatgccctggctagatggaagagagccaagccaccagcaagtaccagcagcgggtctctgactgccagccaaggccatggcgctgccagacaggaactgacatggagcagagagagaggcctggcagcgggatggctt

SEQ ID NO: 640744 - DNA, 597 bp, Homo sapiens
ctgggagctcctctccttggcttccagatggccgccttctctctttgtcttcatatggtcttccctctatacctatctgtgtcctaatctcttctcataaggacaccagtcatattggattagggcctactcatatgacctcattttacctaaataacctccttaaagaccttatctccaaatagagtcatatcctgaggtactggggattaggaagtcaacctataaacttggaggagaagaaggaggctgcacaattcagcccatgacagaagttaacactgatgctcagagaagtgccagtgagtccctgataaaagctacagccaatcagttcaggaaccaagaattaggcctgtaactgccttccttcttggctgactgacaaccctagagatacaaagcttcatccagcactggtaaccgaacttaactctattttgccaccaccacttcctgtacgtgcccctcgccccttggcctccccacagcactggtgctacctgaggtgtctgtatttgagccaaaggcaagagaaggtgtcaatacrgaagagagaaagaaacatgtctcccttgggactagggtgggaaatga

SEQ ID NO: 640745 - DNA, 597 bp, Homo sapiens
gtcaacctataaacttggaggagaagaaggaggctgcacaattcagcccatgacagaagttaacactgatgctcagagaagtgccagtgagtccctgataaaagctacagccaatcagttcaggaaccaagaattaggcctgtaactgccttccttcttggctgactgacaaccctagagatacaaagcttcatccagcactggtaaccgaacttaactctattttgccaccaccacttcctgtacgtgcccctcgccccttggcctccccacagcactggtgctacctgaggtgtctgtatttgagccaaaggcaagagaaggtgtcaatacggaagagagaaagaaacatgtctcccttgggactagggtgggaaatgacaaggatggaggcaacttccaaggagaaccactggctcgcttcccaagctcataagcagaacatagaaaaaaggtccaaatgccctggctagatggaagagagccaagccaccagcaagtaccagcagcgggtctctgactgccagccarggccatggcgctgccagacaggaactgacatggagcagagagagaggcctggcagcgggatggctt

SEQ ID NO: 640746 - DNA, 380 bp, Homo sapiens
tagcctaataaacataatgataactcccwtttttggagcccttgatgtgtcaggcactgttctaagcactgaatttacagtatctcatgaatcttcatagcaagcctatgatgtaggcactgccattattaccgcttcatagatcagggaattgagactcagagaagtaactttcctaaaggggcatagccagtaaatgatagaattggaatttgaacacagagcattttgattccaaccaagaggcccctccaaaacctacttagggaataatacctcccacctaagttcaatattcaagcttttcatattctcaaatattcactgtttaatcaacagaagttaactgattcacataatatacggcccatcctgtgcag

SEQ ID NO: 640747 - DNA, 385 bp, Homo sapiens
tgtgtgtgcacttggtggggtgaaaccctcatgctgtccatgaagaagagccaacatcatcagaagcggcagctgactggcttgcctactaaagcaggtgtcatggcactagccagcccagcctctgctgccttgaaacttcacatctggcacccaaagagagagagtgtgtgtgtttaaataagacagctattgaatgagtggactgaggagggttggagttggctggtcttaaggaatgatgcaaaccacaaggggacagtgctcaggaggtgaacagagaaaacagatgggctcaaactgcaggcgtgactatagcccaagcaccccatacatcattgggrgaggcttctttgctgccaaagatctgtttattttttcatta

SEQ ID NO: 640748 - DNA, 580 bp, Homo sapiens
cgtcactccctttgtccccccacgaacactgggctctgggaaatggcagtatttctgagaaacaggacgtggcctgtggtttagggctagcctgggggtgagggatggcctggggccccactggacacaatggcatctctctctagggctggctcagccaccctgcttcccctcaccctggtccctggaagacaccccctgcctgccacctcctccatcagagtcagttcatggaaatgagcaggaaccgctgtaggaaggtggctgaggttggaaagggggtgggttggcatgggtttctgtgtatagggcgttttctcagactttctagaattagaacctgcatctctggtacccagctcaagactgatttaatgaccacatgaaatttgatttctctcaccaatcccacatttatcttcctccagcacagatcagagctcacatacttgcccaaagtcaaacagcaactgggaggtggggctgtgattggtactcatagggtctcactccaaagttcgggcctctcctgccckgtgacaactgggccaagggtgagatcagccttctcaccagctcc

SEQ ID NO: 640749 - DNA, 530 bp, Homo sapiens
ttatatccagaatctataaagaacatttaaaactcaatagcgaaaggacaacccaactgaaaaattggcaaagggtctgaaaagacatttcttcaaagaatatatacaaatgaccaacaaacatcaaaacatcaacgtcgtagtcattagggaaacattagtcattagggaaatgtaaatcaaaatctcaatgagaaataactttacacccactagaattgctgtaaacaaaaagagacaatagcaagtgttaatgtggatgtggataaatttggaaccttcatccacrgctggtgggaatataaaatggtgcaggcactttgggacactttggcagttcctcaaaatgttaaatagagttaccctatgacccagaaatttcattgctatatatgtacccaaaagcagtaaaacatacattcatacaaaatcttgtacataaatgttcatagcagcatcgttctgatagccaaaaaaatggaaacaagccatatgtctataaggtgatgaatggataaatgcaatatgat

SEQ ID NO: 640750 - DNA, 615 bp, Homo sapiens
tgtgtgtgtgtttggggagggattcaggaattggaacaagtcaagtgtttaccagcctgcttattaagaggacaaatcttattaaaagtaatggaatatggctggaaaaggaagatagcttaaggagaagcaatgtggagcttaaggagaatggtggtagaagcgtcagtaatatctctgccattttagaacagaaatattctcatagtcttcagaaaggcctggaagtttggtgaggggtagtgtcaggagctagccttttcccagtgcttccttgggctctctgccatgttgagttcttagcataccctcatgtgatttaattctcatattcatcctgcaaaatgtgtgacatcactgttttacagcaaaggaagctgcaattcaaagaggttaagtgactcacccaagaacctctcaactcattagagtacagagawggaattggaacccagttctctttttactccaaatctgtgttctttctgttgttatcagaactctgtgacaaaaggccctgcacttaaatatgtgttttgaaattatctatctttgcaacagaaggctgctctccttccattttttaaaaaaataatttataccctccattgttcc

SEQ ID NO: 640751 - DNA, 563 bp, Homo sapiens
agacttggctgtggttcccgttgccgagcctgcctaggttacagcccattttccatatccgatgctgcagttttcctgtcaactctttgtatcctttcagtaaatttcattttttcttaaatgactcacagtctctgttgtttacatcaaagtactctaactgagacattagcttgttgtttttgaagtgtcrcctaaaaatggttgtcaagggtgcttggtagattataaaatgattacaagaagcttagccaacagcctagagtagtacaagcccatatagcttttctctaaggccccacctgcaccacagaccaccatgggaagaaggattcacagactccctttaatgcacgatgccaactggaacaaatggcagtgcagccccaggtaccaatgcttcccctccagctgctttctgaggattgcattgctgtcagaattccctaccatccttctcatagcacctctacccagatagctctgcatggttccaccccaccactaccccttcctcactcctcatccacatcactacaaaacttccctctagctgatggctc

SEQ ID NO: 640752 - DNA, 573 bp, Homo sapiens
tagtacaagcccatatagcttttctctaaggccccacctgcaccacagaccaccatgggaagaaggattcacagactccctttaatgcacgatgccaactggaacaaatggcagtgcagccccaggtaccaatgcttcccctccagctgctttctgaggattgcattgctgtcagaattccctaccatccttctcatagcacctctacccagatagctctgcatggttccaccccaccactaccccttcctcactcctcatccacatcactacaaamcttccctctagctgatggctccagcttctccttgctggactgaaagactcagatatgagcaaggccattcagcctagttccaggtggagacaaggctgtttcttcctgcaagcccaagacctctccttccagcttaagtgctgctgagtccatcctgagaccttacacatctaaaaaggagaaggctaagcccctcagaccacaccagtgccacctgtcctctttggatagcatcttcttcctgtgctcttcctccctcaagtcagatctccccctgagatttggccccttccatt

SEQ ID NO: 640753 - DNA, 589 bp, Homo sapiens
aaagttgaactgagctaataaaatttagyatcaaattttaaggctgctcacttaggttccataatttacaccaccgattactactatggtagtagtagtactactactactgtgtttttaaactattctttggcaaagtactaatcaaacagaaatgccacagcccacacaagaacttatgaaatgctatgtaacatctgatctagtaatttaatttctaggaatcgatctaagacagttatctgaaatatcgcaaaacttttacataaaaatattttcattgcaacattgttaacaactgcaaaataaaaatcaagaataatttaactgtccaatactgagaaaatggttaggctgattatggacagaccatacacttgtactattattcagtcactaaaattgtatacttttaataatacgcagtattgctttcataagatgggaaactgcttaagttagtgaaagatgcaagtcacctgtatggtaaatgcacctgatagcaataacttcagcataccctgagaataaccgatatggtggacacatctgaatgtgtgttccaagctagggaatctgggagtggcca

SEQ ID NO: 640754 - DNA, 589 bp, Homo sapiens
aaagttgaactgagctaataaaatttagcatcaaattttaaggctgctcacttaggttccataatttacaccaccgattactactatggtagtagtagtactactactactgtgtttttaaactattctttggcaaagtactaatcaaacagaaatgccacagcccacacaagaacttatgaaatgctatgtaacatctgatctagtaatttaatttctaggaatckatctaagacagttatctgaaatatcgcaaaacttttacataaaaatattttcattgcaacattgttaacaactgcaaaataaaaatcaagaataatttaactgtccaatactgagaaaatggttaggctgattatggacagaccatacacttgtactattattcagtcactaaaattgtatacttttaataatacgcagtattgctttcataagatgggaaactgcttaagttagtgaaagatgcaagtcacctgtatggtaaatgcacctgatagcaataacttcagcataccctgagaataaccgatatggtggacacatctgaatgtgtgttccaagctagggaatctgggagtggcca

SEQ ID NO: 640755 - DNA, 635 bp, Homo sapiens
atctttatataaggtatagggaacagcatcctgaaaggggcctggtgctgtcatcttccagaaaatacaggaccattccccaacaccctctcctcggagtccctggggaaagccataggcaccatgttcaaccctcatctgaagaatgagactactgagggccagagtacgtatggtcagggatgcagcatgaagcctggagcccaggactggaattacatcgtccaggcactaccgccaaatcactctgggacttggacaggtcattttacctctctaagcccctgtttcctcatctataaaattggggataattattcattgggtagtttcaaggtagaaataaaacaacttacatcatgcatggggcacatcatagatgcccaacaagtatgatttccctttccacccccrcctcagtccgtacccagcactccggctgctatacaagtggccttaggctagtgaggcccaggaggagagaatcctaattaggaagcaaattcattctggcccttctccatgacaggtgaaaagcgaaatcccaaaggtgccgaagcagcctctggtgctccatcacccgcgcatgacgacaaccaagtctccctcaaaggatatgctagagccagaggcag

SEQ ID NO: 640756 - DNA, 597 bp, Homo sapiens
ccctgcgcccactccttaccccagccccactcctgcctcttgctcccagggctacttagcacccacccatgcatgcacagcagggaagtcccacacatggatgagctttgggctcaatggagagatagttggtggctggtggacacattcttactgcttcctctaccacgcccagacttttctgagaagcagagactacttagagcaataggtcacttttgcttggttagcaagcagaggccagcccctggacatattcctgtattgcttctctctctttaccttcttcactctgcctttccctctttcctcccccaatgactgcaataaaaataagkaacacatcagcttctgccaggctctgctttctggggggtgcaggctaagccacaccctggaggaaagagccgtctgctacatgctgggtgtcacctgcagttcctcacggctctcacagtccatggctaggcccatggagtggaggggtgggtgagtgctgccagatggagggacagactcacctttgcaggcctggcagcaggagtctggcagcgggaggggtgctgggcagcctggttcggggcaggttgtgaggcc

SEQ ID NO: 640757 - DNA, 597 bp, Homo sapiens
ccctgcgcccactccttaccccagccccactcctgcctcttgctcccagggctacttagcacccacccatgcatgcacagcagggaagtcccacacatggatgagctttgggctcaatggagagatagttggtggctggtggacacattcttactgcttcctctaccacgcccagacttttctgagaagcagagactacttagagcaataggtcacttttgcttggttagcaagcagaggccagcccctggacatattcctgtattgcttctctctctttaccttcttcactctgcctttccctctttcctcccccaatgactgcaataaaaataagtaacacatcagcttctgccaggctctgctttctggggggtgcaggctaagccacaccctggaggaaagagccgtctgctacatgctgggtgtcacctgcagttcctcacggctctcacagtccatggctaggcccatggagtggaggggtgggtgagtgctgccagatggagggacagactcacctttgcaggcytggcagcaggagtctggcagcgggaggggtgctgggcagcctggttcggggcaggttgtgaggcc

SEQ ID NO: 640758 - DNA, 551 bp, Homo sapiens
tgtgttatactcaccagaactccacagcatcacaagctgggacaacatcctcacactgtggtaaggaattatgaaccgctgaaggtttttgaaaaggagacatgagaaaagcaggggctttagaaaatggatcttcagaaagtagggtaaatgataaattggatataagaaagtctaaagagaaagaggcaagcatagaagcattttcaatagctgggcataagataagaaggtctatacagggggataagggtcattcattcattcaaccacttatatttgtaragaccattaagtgccaggcattttgccaaacactggatttatagctgtggcacattgtattttccaaagaaagatggctgcatgagtatttcccatcccacatgctctccttacaacaggttgctgaccttcccctgtggggttgagagatgtgttaccctccctccccattgactctgggtgggcctgggactgtgtcaaagtggcactgggtgattggactcagtggtagaaggcaatacagtttctgcctggttcactctctt

SEQ ID NO: 640759 - DNA, 482 bp, Homo sapiens
tccctccttctcattctgtcccatgtcacatcctcaggtgagtggagctgggtgctggggtatggtcacaagggtctttggtgttgacctatgccctagagcaggagtgtccaatcttttgtcttccctgggccacactggaagaagaattgtcttgggccatacataaaatacactaacaatagctgatgagaaaaaaaatcacaaaagaaacacataatgttttaagaaagtttatgaattkgtgttgggctgcattcaaagccatcctgggctgcatgtggtccatgggctgtgggttggacaagcttgtcctaaaggataaagcaattaatcttgccactattgacctgatagccttgaaattggatatcccccatttgtgtagcaaatgtccttggaatactatgtagaacagacacttctgaccatcacaccttctttcaagctgtgactccatagcttttcctgtgttggatgga

SEQ ID NO: 640760 - DNA, 587 bp, Homo sapiens
tgcttattttacttaggataaggttttggagctayatccatgttgtgtttgtcagtgtatttatccattctcgtgctgatggacatttgggttgttttcagtttgggacttttataaaaataaagcacgaagaacatttatgtacaagtttttgtgtagacatatgttttaatttactgggggtagatacctaggagtggaattgctggttcatgtggtaatcacatgtttaactttataagaaactgccaggcagttctccaaagtggtttcactcaaatctaccaattttccacagttcgttttgtgcttttgtggtcttgtttaagaagttcttcctcactaagaaggtcataagaatagtctgtggtgttttttgtttttgtttttttttctattagctttacagttttactttttacatttgggcctttaattcatctgccattcacatttgtaaatggcatgcaataaaaaaatccaactttactcttctgcatagagtgagccagttgtccttccaccatccaatttacaatcaatattttctccactgattttgttggcacttccataatatattattc

SEQ ID NO: 640761 - DNA, 566 bp, Homo sapiens
attgtgaaaagatgtttgctgtttatttgaaaacaaacttgaaatatttttgaaggactcagtaaagatggattactttacaaagctgctgttgattttatagttatgagaccactacaaaaatgttgacaaaaaatctaaaaatctagaattctgcacttagctttttttttttttttccatgtagctttctttataaatgacttgaagttctggcttcactttaaagaaacaaaamccagagatcatgggtgatgcttgaaagtgtattgtttatacagtaagaactaagcagaactctgatcagaagagtcaaagaaaaaattgtggccttattattataagactagtaaataaaatttacatttctatttgatatagttaaaattaaaatctatagtactttgttataagtccccatccacatatcctcattttaagtggctttttgtttatctatgaaaccttaggtttctgctagaacatgtttctggttaactatctcagtgctggatggtacttggtgctaatgaggctaaccctgtctgatactttccaggcaatga

SEQ ID NO: 640762 - DNA, 475 bp, Homo sapiens
tactaaggaactcaatatacagtgytccttgaatcttaattttgtgaatgaagcctgagcttgggcaaacacctcatgcttggaaacggggcattacagcaatctgagcctcaatttgttcatcatttctaaatactcatttgcatgcagaatacacttacaatgattttaagctgagaataagaagaaccaatacatatttaatgaagttcagtaacactaaatatattagtactatattgatctttgaggaaaacatcgattgacacagatttccgttcccttgaacagtattgtctgccaacaccagcaagtttccgtgtcctagataaagactagttccaaactcctcagctcagaataagactctaaagcatttcttttaaatgagcattctgttgaagtcagagagtgctggaaaagtccaaaggagggatagagaaagagaaggccttcatctttcagtggagctatc

SEQ ID NO: 640763 - DNA, 514 bp, Homo sapiens
tcttagtgtctgttcggtctaattttaaggtctatgagagcagaatttagacctgagtaagaaagtattgatggacatatttttttctcctatcaatgatcttatgtaccacgtgttgagaaggataaatgtggggatacatgtgattacaaatgaacaaaatgtggctgatatcagaatcctgccttttttcccccagtggttttcaagagaggaagagacaataacacttgtaaaattatcacttatactttaataataataaaaagtctccattaaaaaatgaatatttatcctgccatgaatttaacaaatcttagcctcaggcctgtttttrttaatttccttttatttatttatttttactcctcttatgctttttcatgcaaaggcaaggcaatcaatgaaggcacttaacgtaattctcacctccccactataagtgaaagctggtatgttcgagctcttattccctgaatttgtatagaaagctagtatctgaatatcccactca

SEQ ID NO: 640764 - DNA, 566 bp, Homo sapiens
taactactgcaagagaggcttatgtaagtttcagaagagaatatcaaagtggcccttgccagtgatgggtcagggarggacatagccattaaaatcatttaaataagcagggagagatgtatttaatgattaattcatggtagccttgccctccagaagctctcagtctaatgcaggaaatagtgggagggtcatcattcagtatgtcaagctctgcggtagacgaataaacagtgccattcacacacagaggaataagtgactagttggttcaagttactatccctttgagctataaaactgtttgcttcaaaataaacctagaggaaattatccacaggaatataatttaaaaataaaatatattaacttgtgacgtgactgttgtttgctacgtgctagacagtatgccaagcatgacacagtggtacacaagacatttcttccaacatatggtgttaggagggaaaacaagaaatgaaacctaaacttgtcaagaatttaaaagcagaaatccaggcttgttgccctagctcctccacttattaactgtgtgacctagagaa

SEQ ID NO: 640765 - DNA, 566 bp, Homo sapiens
taactactgcaagagaggcttatgtaagtttcagaagagaatatcaaagtggcccttgccagtgatgggtcagggaaggacatagccattaaaatcatttaaataagcagggagagatgtatttaatgattaattcatggtagccttgccctccagaagctctcagtctaatgcaggaaatagtgggagggtcatcattcagtatgtcaagctcygcggtagacgaataaacagtgccattcacacacagaggaataagtgactagttggttcaagttactatccctttgagctataaaactgtttgcttcaaaataaacctagaggaaattatccacaggaatataatttaaaaataaaatatattaacttgtgacgtgactgttgtttgctacgtgctagacagtatgccaagcatgacacagtggtacacaagacatttcttccaacatatggtgttaggagggaaaacaagaaatgaaacctaaacttgtcaagaatttaaaagcagaaatccaggcttgttgccctagctcctccacttattaactgtgtgacctagagaa

SEQ ID NO: 640766 - DNA, 566 bp, Homo sapiens
taactactgcaagagaggcttatgtaagtttcagaagagaatatcaaagtggcccttgccagtgatgggtcagggaaggacatagccattaaaatcatttaaataagcagggagagatgtatttaatgattaattcatggtagccttgccctccagaagctctcagtctaatgcaggaaatagtgggagggtcatcattcagtatgtcaagctctgyggtagacgaataaacagtgccattcacacacagaggaataagtgactagttggttcaagttactatccctttgagctataaaactgtttgcttcaaaataaacctagaggaaattatccacaggaatataatttaaaaataaaatatattaacttgtgacgtgactgttgtttgctacgtgctagacagtatgccaagcatgacacagtggtacacaagacatttcttccaacatatggtgttaggagggaaaacaagaaatgaaacctaaacttgtcaagaatttaaaagcagaaatccaggcttgttgccctagctcctccacttattaactgtgtgacctagagaa

SEQ ID NO: 640767 - DNA, 602 bp, Homo sapiens
tagaataacataaatttgagggtcactattcaaccaagttcagaagccccaagtgaaaacttagcaaatccttgaacgctttactatactaacattaccttatgaaattgtgaaaactacttttaccaagcctaactagatctaaaatctggttctggctgcaatttcttcctacaccatcagtgtagcatgtatatctttgtaaccagtctggggcccacataagaatttctctacaaggtgcaagaggctggagtcaggcatcagctcaggtgttggaggatcttctctcaatttatccagaatttctgtcaagttttccatcactctgtttccctcaaccttggccaaggcctaggggcttagggagtgttaaattaacctttgagyctcttactggtctttggatatttatttcctttcctagttgttagaaagcatcctgccttacttgatcaagcattggtattgctatataaaggagaactttgataatttagagaatatctcctttttgttttctcccagaaaacccaagtgtcaagattattgtctcattgtgaacttaaacaatccagagttgaaactccaagttgagctgt

SEQ ID NO: 640768 - DNA, 602 bp, Homo sapiens
tagaataacataaatttgagggtcactattcaaccaagttcagaagccccaagtgaaaacttagcaaatccttgaacgctttactatactaacattaccttatgaaattgtgaaaactacttttaccaagcctaactagatctaaaatctggttctggctgcaatttcttcctacaccatcagtgtagcatgtatatctttgtaaccagtctggggcccacataagaatttctctacaaggtgcaagaggctggagtcaggcatcagctcaggtgttggaggatcttctctcaatttatccagaatttctgtcaagttttccatcactctgtttccctcaaccttggccaaggcctaggggcttagggagtgttaaattaacctttgagcctcttactggtctttggatatttatttcctttcctagttgttagaaagcatcctgccttacttgatcaagcattgstattgctatataaaggagaactttgataatttagagaatatctcctttttgttttctcccagaaaacccaagtgtcaagattattgtctcattgtgaacttaaacaatccagagttgaaactccaagttgagctgt

SEQ ID NO: 640769 - DNA, 507 bp, Homo sapiens
aaaaatagcaacggtaactacacttattgaaatcttactgtgttccaggcactggtgctaagagctttgtatgtattgtctcatctcttctttccaacagcctggtagtgaatctataggaactattacacctkcattttacagataataaaactgagatacaaaatgtttcagtaactcgcccaagattaaacaaacagagacagatctggcattcttaactcctgcactatgataagacaccacaggaagtcccacactgtcaccctggtgttgatcagctaaggctgggtgttgggagagttgggctgtagtgctactcctagccggtgtgagcccttttggacccagaggacaggggagactagaggtaggtgattcttcctcctaatgagtcatatttccgtgtgttggagggggcaggggaacaagtcagaatcatacttaggacaaggggtgggaggcactggggtgttcagagttagaattcccaaagaaaaaggaatg

SEQ ID NO: 640770 - DNA, 507 bp, Homo sapiens
aaaaatagcaacggtaactacacttattgaaatcttactgtgttccaggcactggtgctaagagctttgtatgtattgtctcatctcttctttccaacagcctggtagtgaatctataggaactattacacctgcattttacagataataaaactgagatacaaaatgtttmagtaactcgcccaagattaaacaaacagagacagatctggcattcttaactcctgcactatgataagacaccacaggaagtcccacactgtcaccctggtgttgatcagctaaggctgggtgttgggagagttgggctgtagtgctactcctagccggtgtgagcccttttggacccagaggacaggggagactagaggtaggtgattcttcctcctaatgagtcatatttccgtgtgttggagggggcaggggaacaagtcagaatcatacttaggacaaggggtgggaggcactggggtgttcagagttagaattcccaaagaaaaaggaatg

SEQ ID NO: 640771 - DNA, 582 bp, Homo sapiens
attcttaactcctgcactatgataagacaccacaggaagtcccacactgtcaccctggtgttgatcagctaaggctgggtgttgggagagttgggctgtagtgctactcctagccggtgtgagcccttttggacccagaggacaggggasactagaggtaggtgattcttcctcctaatgagtcatatttccgtgtgttggagggggcaggggaacaagtcagaatcatacttaggacaaggggtgggaggcactggggtgttcagagttagaattcccaaagaaaaaggaatggggaactacagcaaaccacgttttcatctggactcctgtaggatcccatgtttttattgattcttcacatagtggcacattcagcatacagttttgttgagtgcctactatttaccaggcaccgtgatatcagtgcatagtaatgatctggtttcttctcctctagttccccaactgcttgggagttctctgtgtagtcagtaaggaacaaaatgcctagcatgtctaggtgaatgaagaacgacttggatttaaatcctggatctgtcacgtgatagctgtgaagcc

SEQ ID NO: 640772 - DNA, 667 bp, Homo sapiens
gggaaactacaatggcaatgctttaactcgctcacccacaaaatgaactaggatgtctgtagtgaagatatcaacactgccagtggatttctttcttttttctttttttaaacaaaacttgatttgagaggaagagaaagatcattttaggtttagcctgggaacttgtcttagggcttgagtttggattaagtcatgtaactgtattacctgtattcactaaccactcttctcctccccttcctgcttccagaatccccactcagagacttcaaaatagtgaataacattctcagatgctgccaggcctgtgtggccattattctttagtgtgagaagcacttaaacatgaagagagctaaataagtaacatttactgcccctttaccaccactttcccacagcacaataaagctggagataatwtttaatattgcagatttgggctatttattctgcattaaactccactttcttatcctcctcagacttataaagaatgctaataaattctataaattgtagaattttattagtaacagagagaatgtgatcaagtttcttctcatctccataaacacttgggtgcaagaccgttgagttcagggttcaccccatgtggggcatagcactaggcacagagaagatgcttggtaaaagttgttaa

SEQ ID NO: 640773 - DNA, 452 bp, Homo sapiens
gactgatgctttgctatttctgagtaaggaattcttctagattcttagtgagaaggaattaaggtaaagccaaagcgatacgtagtatttatgctttgttgtatatattatggtttatgcagcttttaaataaactatatgtagttcattctgtctacgatggtagcaataatagctattatttattgatgtcttattatatacttgatgttcagcgaggyattacatatgtccacatctctttgctcacatgactccaagctggcataggcctcttccctgcatccatccttccaagagcagaaagcgtatacctgctggtgtatgctccttcatttcaaggagttgcaaaggagtcttatatataaaagtgtggatggagcttggacatgtgggtggaggtgtccattggcatatgaactgaggccctttgtagtatggatgggaagaga

SEQ ID NO: 640774 - DNA, 590 bp, Homo sapiens
tacctaggagttctaattcctagtagaaaccacattaacctaataggattaaccgaataggatcccctctacattactctcaagcactgctctctgttaatttctttcattgattttaccataatttacaattatgattgtatttgtttgtcttgtttattgcatttcactcctcttctaaatgtcacaagggcatataccatgtttgttttattcaycaatacttttcacccacacagtaggtgctcaaaaactatctgatgttgtgagtgaataagtgtctaatgtattttggctaacatcataatcattatgatcatcttcttcattgcttatgttcacaccttccatactatgttgtaagttgtcgatttacatccctttcctctcttagactatgaaaactttaatgtcagtacctctgtctcttttttatcttggaccctaacctgacactcagtagaccctcacagatattaactgcatgaatgaaatggaattaaacccttttagagcagaaataggagtctgagaattgagacatggagtttgtgtgtccccatggaggaaagcattaaaagaaatagaga

SEQ ID NO: 640775 - DNA, 590 bp, Homo sapiens
tacctaggagttctaattcctagtagaaaccacattaacctaataggattaaccgaataggatcccctctacattactctcaagcactgctctctgttaatttctttcattgattttaccataatttacaattatgattgtatttgtttgtcttgtttattgcatttcactcctcttctaaatgtcacaagggcatataccatgtttgttttattcaccaatacttttcacccacacagtaggtgctcaaaaactatctgatgttgtgagtgaataagtgtctaatgtattttggctaacatcataatcattatgatcatcttcttcattgcttatgttcacaccttccatactaygttgtaagttgtcgatttacatccctttcctctcttagactatgaaaactttaatgtcagtacctctgtctcttttttatcttggaccctaacctgacactcagtagaccctcacagatattaactgcatgaatgaaatggaattaaacccttttagagcagaaataggagtctgagaattgagacatggagtttgtgtgtccccatggaggaaagcattaaaagaaatagaga

SEQ ID NO: 640776 - DNA, 596 bp, Homo sapiens
gattaattgtacaactcttggtttatgtctatctacccactggactattgactccgtggttattctattcactgacttatccccagcaactagcatggtgcctattagttattaattagttactattattattagtcaatcatttattgaattaaacatgaccatagtagaggaagtgctatgatcaagtatatggtttttattccccggggaagcctatcaccagcccatcactgaggccctctgcatgccactgtcttggacacatcaatgaagccctaacggtgaaaatataggcacaccacccagcacagtccctggcatatagtaggcatcacatgcctgttagtggctttgcctccccaactctctccctcagctcttttatgcaagttgtcaagtataaattataaataatgaataatcacaaacaagccacaatacataaaatcaattaaatacacatttgcatctttatatgccaggaatgttagggaagttcctggccctatgtccaagatgccggcactctgcactrtggttctcggaaagagtcacctggggaatttaggcatggaagttcctgagccccactt

SEQ ID NO: 640777 - DNA, 542 bp, Homo sapiens
gctaccattttgggagcacctcccatgtgccagtcattatgggtattatttctactttttgtaaccacaggtgatgttgggacaatcattatccctagacaagaatgaagttaagagagtcagtgacacacagattaagactgcataaatagttgttaaatgaattaatgtgtgactaaaatacggataaatggagggtggtccaaagtaactctgtagtaagtggtggagtgtggtcttgaaccatgaaatattgaagactttgctcttaaccacagcactatattaagastaagctttggtggggagacagctgtggaaggggtgatcgctggaggaatctctgttgcaaacaaggacagggaggggggtactggagagctggcctggatttgggagagggcccaggagctgccagatagaaagggtggggggctttgccaagatatgcttcaatgaagctatgtcagtctgaagcaatctttttaacccttccctcttctacattactcaacttcagtttcttctgtcagcttcctgcc

SEQ ID NO: 640778 - DNA, 495 bp, Homo sapiens
aggacatcatacaaattggcaaaaattcaactttgtatttatacccgctaaagattactgaggaagaagctacaaatcctgtgaaaaatttgaaggcttgttctggctagagaattgcaggaagggaacactgaagaatccaagtacagttagggattgtcatcaaagaaaccccagggtccttctaagtaggaaaattgatgagagaatctgaatttttattcacccccttgatatcaagcagaaactcccacacaagcctctttattccccataatagtcttcagagcaccttgcaccatacatgtatttttcttcygttacaaactcatttgcacgtgtcagcactaattttcaaatgtgccttgaagcagtgaaaaatgaaacttcagattggtagcagctttcaaatagcgttcacccacagctggctctcaacttttacttgttattaaaaaggaggaaaaggcgaaattggtattttttttattgctc

SEQ ID NO: 640779 - DNA, 603 bp, Homo sapiens
gaaaatgaatacaacataaaatatttgtgggatattagttcattattggtgtatatagaaatgctgatttttctatgctgattttgtatgttgcagttttgccaaacatattaatcagrtccaagagctttttggtggagtctttaggtttttctaaatataacatcatatcatctgtaaagagagacagtttgacttcctcttttccaatttggataccttttacttctttctcttgcctgattgctctaggtaagacttctagtaatacctcataaaaaaataaagatggctattccatttacaatagctaccaaataaaataaaatacaatacctaagaattaatttaagtatggaggtgaaagactacaattttccttctacaaggaaaattataaaacactaatggaagaatcgaagaggacacacacaaatgaaaagacatcatatgctaatgatttggaataataatttggaataatattgttaaaataaccatactatccaaaacaatctaaagattcaattcaatctctatcgacataccaattacactctacagaaataaaaaatgcaatcctaaaattaatatggaacgaaa

SEQ ID NO: 640780 - DNA, 596 bp, Homo sapiens
aggaaaacagcaggatctagaagatcaaccaactatcaagcaaactgacctgattaacatttatagacacactaacaataacagaatacacaattttttaagtgtgcatggaacattttgtagcctcacccatattctaaattatactacaaatctcaaaaaaatttaacaaggttcaagtcataccacatatattctctgatcacaatggaattacattatcaatcagtaacgtatatttctaaaaattcctcaaatatttggaaactaaataattcacttctaaatactccataggtcaaagagtaaattgagagggacactgaagagagaactgaatgaaaatgaatacaacataaaatatttgtgggatattagttcattattggtgtatatagaaatgctgatttttctatgctgattttgtatgttgcagttttgccaaacatattaatcagatccaagagctttttggtggagtctttaggtttttctaaatataacatcatatcrtctgtaaagagagacagtttgacttcctcttttccaatttggataccttttacttctttctcttgcctgattgctctaggtaa

SEQ ID NO: 640781 - DNA, 603 bp, Homo sapiens
gaaaatgaatacaacataaaatatttgtgggatattagttcattattggtgtatatagaaatgctgatttttctatgctgattttgtatgttgcagttttgccaaacatattaatcagatccaagagctttttggtggagtctttaggtttttctaaatataacatcatatcatctgtaaagagagacagtttgacttcctcttttccaatttggataccttttacttctttctcttgcctgattgctctaggtaagacttctagtaatacctyataaaaaaataaagatggctattccatttacaatagctaccaaataaaataaaatacaatacctaagaattaatttaagtatggaggtgaaagactacaattttccttctacaaggaaaattataaaacactaatggaagaatcgaagaggacacacacaaatgaaaagacatcatatgctaatgatttggaataataatttggaataatattgttaaaataaccatactatccaaaacaatctaaagattcaattcaatctctatcgacataccaattacactctacagaaataaaaaatgcaatcctaaaattaatatggaacgaaa

SEQ ID NO: 640782 - DNA, 612 bp, Homo sapiens
cctaaaattaatatggaacgaaacaagagcccaaatagccaaagcaatcctgagcaaaaagaacacagctggggggcatcacaccaaccgacttcaaaatatattacaagcgtatcacaattgaaacagcatggtaaattatatggtttggctctgtgtccccacccaaatcccatctgaaattgtattcccmatgtgtccagggaggcaactggtgagaggtgattggatcatggggcagttttcttcatgctgttcttaagacagtgagtgagttctcacaagatttgatggcttacaagtgtttgacagctccccccaaccccacccctctcctactgccttgtgaagaaggtgcttacttttccttcgccttctgccgtgattgtaagtttactgagccatgaggaactgtgagtcaattaaacctcttttatttaaaaattacccagtctcaggtaggtctttatagcagtgtgaaaacaaactaacacagcattggtataaaaacaaacaaatagaccaatggaacagaatagagaactgagaaatccacttatttataaccaaccaatttttgaaaaaggtgttaagaacacacattgaggagag

SEQ ID NO: 640783 - DNA, 612 bp, Homo sapiens
cctaaaattaatatggaacgaaacaagagcccaaatagccaaagcaatcctgagcaaaaagaacacagctggggggcatcacaccaaccgacttcaaaatatattacaagcgtatcacaattgaaacagcatggtaaattatatggtttggctctgtgtccccacccaaatcccatctgaaattgtattccccatgtgtccagggaggcaactggtgagaggtgattggatcatggggcagttttcttcatgctgttcttaagacagtgagtgagttctcacaagatttgatggcttacaagtgtttgacagctccccccaaccccacmcctctcctactgccttgtgaagaaggtgcttacttttccttcgccttctgccgtgattgtaagtttactgagccatgaggaactgtgagtcaattaaacctcttttatttaaaaattacccagtctcaggtaggtctttatagcagtgtgaaaacaaactaacacagcattggtataaaaacaaacaaatagaccaatggaacagaatagagaactgagaaatccacttatttataaccaaccaatttttgaaaaaggtgttaagaacacacattgaggagag

SEQ ID NO: 640784 - DNA, 560 bp, Homo sapiens
caatatattaaagaaataaatgtactcccatatttattgcagtattactcacaataacaaaaatatggaacgaacttaagtatccatcaatggatgaatggatttttaaaaatatgctatagttatataattgaatactattcagtcataaaaaaatgaaatcctgtcattttcagcaacatgaatgcaactgaaggtcattgttgtaagtgaaataagccasagatagaaagacagttatcacatgtacttactaatatgtgggtgctaaaaaatgctgacctcatggaggtagagagtagaataatggataccagggactttgaaggatgtgggtggaagatgaagagaggttggttaatggcacaaacatacagttagatagaagaaataagttttaatgttcaatagtagagtaggatgacaatagttaataacagcgtattatatgtttcaaaagagttagaagtgaggccttgatatattctcaacacactgaaatgataaatgcatgaggtgctggatatactaaatacaataatttgatcattacacattct

SEQ ID NO: 640785 - DNA, 554 bp, Homo sapiens
tgtggaatgcagctaaagcagcacttacaggaaaatttataagcagaaaagtaaagatctcaaactaatgacttcagcttcctccatagcatacaaacccattcataatttgaccttgcctagttttatgttgtccaggctgatctcaactttgcaaagttttataataacatctctcttcactagctactgaccagtatcagcactggtagtagttgtaacagcaatagtagtaacagctactgctaatttattgagcatttactatatgccagaagtgttctatacatcacctcatttaatcttctggtagatagatattatatgtatcgtctaatttattccttactacagttctatgaggcattattactattattattaatattttcattttaataaggrggatgcttatttaataaggttaaggaaattgcttaaggtcacataattatcctgccaaagattattgaacatttaccatgtgcaagactctgttccaattacacagctagtgagtagcagattcaagactcaacctctgtggtttcaaa

SEQ ID NO: 640786 - DNA, 612 bp, Homo sapiens
acattctttcactctcacctggataatgctattcataattcatttccttccttgtatgttataccctgttagagatctcttctgaccccattccaatatcactttgcctaattaatccctctcacctctcacaacttcctgttcttttcatttggcactgaggttcagtagagatctagatcttatacaaattaataactctctatctttatctcactctattttgcaacagcatttacacacatgattgtccattttttccatttttgaaagaatttcttctgttggcttctataacatcacattcttctgtttgtcatcctctctcacagactattgcttctcattttcccatgctagacccttcttctctgccagaattttgaatgttagcaggctttgggctcaatcctagatggtgttattttctctatcttacctttctctcagatctcgtgtttatgcatggctttaaatcccaataatacactgatttacccmtgcttactaaatatctctacttggatgtcggacagaactctcagagaacatgactgaaacagattcttcatgccctcaaaacacataaaacagattccccaagccttgccc

SEQ ID NO: 640787 - DNA, 635 bp, Homo sapiens
taatgttgttttaagccttaatatgatattgctattttaaasacttatcattaaaatttttattgtcaactaagcaataatagcaagatttctgtgggtttctgttgtctatgtctgtaatacttcaatctgctagcatataaaaatctcctagaaaatgtatacaaaaacagattcttatttctcatcctagacgtgtagttctcaggtgttagagtatattagagtcatctggggaacttggtaaacatacagaggtgaggtctctgtattttttattaatgctccaggtgattctgataaatactgaactttgagaatcactgttcaaataaattagagtctcctgggctgatgcctgatatttatatttttaaaaggcctatcagatggttctgtaaccaatccatggaagaaattttggttacaagttgaaatacaaattcatcattactttgtacagaatccttccaaaatctgccccccaactttctttccagtctgatctgtcactctctttcaaacaacatccattcctgccagcctgaacttctcatggtctttcttcatgatggcagccaatggaatgtccaccatggactatgtattgtctcacaatggcagtcctttgcata

SEQ ID NO: 640788 - DNA, 598 bp, Homo sapiens
tttttaaaaggcctatcagatggttctgtaaccaatccatggaagaaattttggttacaagttgaaatacaaattcatcattactttgtacagaatccttccaaaatctgccccccaactttctttccagtctgatctgtcactctctttcaaacaacatccattcctgccagcctgaacttctcatggtctttcttcatgatggcagccaatggaatgtccaccatggactatgtattgtctcacaatggcagtcctttgcataccctttatcaaaaactcatcccctttctttttttagatacttgtgtttacaggtagaacgccgctggaacatatttccctcatcaaagccttctctgacatcacaggacccttcttctatgttcctttggcattttaagatccccatttatcacttgaaattgcactttttctgtttacatgcttctctcaygcttcactgtcagcatcttaaggcaggatatccaatgaaaatagcacagacatctgagtcagatggatgtgggtaggtatccagctatgatatttagtggctgtgtaaacctggtcaagatatgtaacttctctaaaactc

SEQ ID NO: 640789 - DNA, 598 bp, Homo sapiens
attttacagaggcaatatgcactgcatctattctttgaaaaaatttttttgagttctttctctatgtcaagtattctgctgggcctaggaatggggaggatgaggtatgggcccttccttcaactagctcataatggtgtgcagacagatttacagtgatataattcagtgtttttagtgctgcaagagaggtatttataatgaacaatggttatgtaaagaaaggaaaaattgaccatttgytctgtgtatttggggggaaggtgaggtttgtaggaaaaagtttatcaaaagagttaacatgtaacctgtaagctggatgttgaagtttatcctttcttatataggtgaaagatgggacagtattccagagagaaggaggagaatatgcaaatgtgccatttgtggaaaagtgtatatatttaggaaaatgttaatatggctagtccatggggttgtacaggagacggggctgggaagtaggagaggagagtgagtgatttttttttacaaacatgatcctttggctatggggaagaaaaacaaatacaaaaaggttttaaagaggaaagagacatgatcaggttttatgatttat

SEQ ID NO: 640790 - DNA, 598 bp, Homo sapiens
attttacagaggcaatatgcactgcatctattctttgaaaaaatttttttgagttctttctctatgtcaagtattctgctgggcctaggaatggggaggatgaggtatgggcccttccttcaactagctcataatggtgtgcagacagatttacagtgatataattcagtgtttttagtgctgcaagagaggtatttataatgaacaatggttatgtaaagaaaggaaaaattgaccatttgctctgtgtatttggggggaaggtgaggtttgtaggaaaaagtttatcaaaagagttaacatgtaacctgtaagctggatgttgaagtttatcctttcttatataggtgaaagatgggacagtattccagagagaaggaggagaatatgcaaatgtgccatttgtggaaaagtgtatatatttaggaaaatgttaatayggctagtccatggggttgtacaggagacggggctgggaagtaggagaggagagtgagtgatttttttttacaaacatgatcctttggctatggggaagaaaaacaaatacaaaaaggttttaaagaggaaagagacatgatcaggttttatgatttat

SEQ ID NO: 640791 - DNA, 554 bp, Homo sapiens
cttagacactgcttcctctctgcttccatgaccctttctctctctctatcctagcatttgtctttgagctttactgctctgtcctcagcccccagcacagggtctggcacatagttagcagctagagaatacttgctgaacaagacattgaaggacaaggagttgcttttatatacatccctgactagttccccttccttgctggccaaatgcagtggtcaccaagctctattctcctggatgttcccccgcttgtctctgcacttgccctctcttgcctggataaagacaagaaccttcttatgcctccaaaggcattcttgcaattggatcctaccagtcctcacttaaaattatgctgtgactccctattgcccccgattaacatccagagtccttggttagcastcgaggcctttcccattgtaataaatagaactccatctctgtccttctatgaggctctgaggtctttaagagcttgtcctgcatctctccatgtccaaagtccagtcaagcacgtggagcacagtatgtgtccagtaaatgtgaaa

SEQ ID NO: 640792 - DNA, 607 bp, Homo sapiens
attatttatttaggttaaacaattaaactgtaagcttaagaggaaagggaccttgtacattcttcaacattatagcctcagacataacagatgctcaataaatgtttggataaatgaatgaataaataaatgaatcagtttcctaaaacttagcaactatctatcatgacctgatgtagcatagttggttcattatgctgtgtctcaaattcaatgatccaggcctttctcctgagtctaccccaaataccatgagactatattggagytctcttgggattatacatggaggatcaataggctggacaaccccactccctcagacagtcagcctggcactgcccttatagagatcctggtcaaacagtagacataggccaagcacggtggctcacgcctgtaatcccagcactttgggaggccgagttgggaggatcacttgaggccaggagtttgagaccagcctgggcaacatggtgagacctcatttccattaaaaataaaaaatttagccatgcatggtgtcatgcacctgcacttcccagctattcatgaggctgaagcgggatgatttcttgagcctgagaagtcaaggctacagtaagct

SEQ ID NO: 640793 - DNA, 608 bp, Homo sapiens
attgtctgtgtagaagttcaaactcctgaaagttggctagtccttgttcatatctaccccatacctgtgttaataccgtttacatttactctttcagacacaggggaacaaggtcctgagcaaaggaggacttggtatgaacaagtgggtttggtgccgccattgcttctggcttgggtctctgcaactttggtggagcttccaagagctccatgtggggacggagcattagatggttgacaacatctgtggtctgcaggagccactatgcggagggcccagggaagaatttgccattttcaatgaaaaacacgtggcagttactaattatgaygactttgtactgggatcgggatctgcggcacccttctttaaagtaaaacaccaactgcttaagaaataagaatgttttagtttatccattgaacagacatgaagagtgtttcaagagatgcaatccctttgaaaaatggatcaaactcttgaactcatgtagcatactagatatgtttgtgaataaactcatgacatgaaaaatcagtcaatcaatttagccttggacataaatagataatggcttctcattccccgtttacagtggcccctcc

SEQ ID NO: 640794 - DNA, 542 bp, Homo sapiens
agtgacatgatcatagctcactgcagctcaagcttgggctcaagtgaccctcctgtgtcagcctcccaagttagctgggactatagatgtgcaccatcatgcctggctaatttttaaaatttttttatttttttgagacagagtcttgctttgtcgcccaggctacagtgcagtggcatgatctcagctcactgcaacctccacctcccaggttcaagcaattctcctgcctcagcctcccaagtagctgggactacaggcacacaccaccatacccagctaattttttttttttttttttagtagasacagggtttcaccatgttggccaggctggtcttgaactcctgacctcgtgatccacctgcattcgcctcccaaagtgctgggattacaggcatgagccaccgcgccctgctatttttttaaactttttatttgtacagatggggtgtcaatgtgcttcccaggctggtattgaactcctgagctcaagagatccttccgcctcagccttccaaagtgctgagattataggcata

SEQ ID NO: 640795 - DNA, 625 bp, Homo sapiens
gaaagaaacatgagccaggtgtgcagtggctcacgcttgtaatcccagcactttgggaggctgaggcgggcagatcacctgaggtcaggagtttgagaccagcctggccaacgtggcaaaaccccgtgtctactaaaaataaaaaaaatagctgsgtgcggtggcaggtacctgtagtcccaactatttggaaggctgagacaggagaatcgcttgtacccaggctgtggaggttgcagtgagctgagatctcgccactgcactctggcctgggtgacagagcaagactccatctcaattaaaaaaaagagagagaaaagaaaagaaagaaagaaacatgaaaacaaatgcaatgcatggtcctggaagagacccttttaatataaaggacagtattagggccgggcatggcagctcacacctgtaacctagcactttaggaggctgagggaggaggattgcttgagcccaagagttcaagaccagcctgggcaatatagggacctatctctatgaaaaacttttttaaaaatttgccaggcatggttgtgcacatctgtactcctagctactcaggaggctgaggcaggaggatcccttgggaagaacagttccagactatgct

SEQ ID NO: 640796 - DNA, 414 bp, Homo sapiens
tcttcacaataatctccaaaaacagatataactactattcctactttacagaagaggatttcatgacttagtaaaggttaaatagctagttcaagatcacagctgggatttgaataaaaaatggtctctaaagccatgatcttaatcccttctctattttagtttgcaatctatgctaagaggttttgttgatattaaagcactttacacatacaaggtgattataaatgtagttactattattagtcataataacactaacaataatgacatcaggaacttagtaatacaatttttttttttttkggtcttcaacatttagaagtgtgcctttgacaatggtgaagatgaaagaggacttctacatgtacataaaactaaaatctcagggagctcctctaatcaatgctctag

SEQ ID NO: 640797 - DNA, 595 bp, Homo sapiens
tattttccaggaatacatggctcagataaagttcaraattgtcattcttagcttggttgttaactagaactaaactgtcttgcctcttgagagttcacctgctatgcaacctgacttatttatgcagttgttcatatattgatatatcactcattgaagacttcatgttgctacaaaagataattcttacaaaaagataaaatgacaactttcacacagatataaaaatgcatacatgttaacaatttcattctactcattaatcaataagggaactggaaccagttagatgtcataaaagtcaaaaagagaattcaaagactattcttgatatctttagttcaggaatattaaaatgatatacaaattaaggcaaaactggtttttccaaaggtagtggaaaaacgtcaattggaattgtctataggaattattttgtgttgttattagttgtctacaattttacaaagtgacaaaatagctcaaagactacgaaagactagaatcatataagccaaaagagtcactaggtaatgtgtagttccccgctgaagcatatttttatttacgttacctttagggctataacctaaca

SEQ ID NO: 640798 - DNA, 504 bp, Homo sapiens
atgtaacagaaagatttttaaaaaatgaaagtggcttaatttgtaaacataattattgcttacacaataagaaacccagattattagtctgtttccacactgctataaagaaatgcccaagactagggagctttgttrttatgtaacagagatattacaaaggaacacatatgcaagtataattttattatttttcagaataacttatgcttttattctttcccttttgcagctatataaattacctttttgaatggaacccccgacccaggccttgggggttcctgcattaggatcattcatggatattcattaagcccattttttttcacattgtcagctgagaaatggccaagacttttgaattattagttaggatttttcaagtgccttagcactgttgtctgttctagcatgtgattgagttctaaaacacagttattagaaaactcacaaaggcattttttaattagaaaaaaaggaattatgagatagatttaatct

SEQ ID NO: 640799 - DNA, 504 bp, Homo sapiens
atgtaacagaaagatttttaaaaaatgaaagtggcttaatttgtaaacataattattgcttacacaataagaaacccagattattagtctgtttccacactgctataaagaaatgcccaagactagggagctttgttattatgtaacagagatattacaaaggaacacatatgcaagtataattttattatttttcagaataacttatgcttttattctttcccttttgcagctatataaattacctttttgaatggaacccccgacccaggccttgggggttcytgcattaggatcattcatggatattcattaagcccattttttttcacattgtcagctgagaaatggccaagacttttgaattattagttaggatttttcaagtgccttagcactgttgtctgttctagcatgtgattgagttctaaaacacagttattagaaaactcacaaaggcattttttaattagaaaaaaaggaattatgagatagatttaatct

SEQ ID NO: 640800 - DNA, 589 bp, Homo sapiens
taagcttcttaaatctagcatcaaaaatttcttctttctatagatttacaacatataccaattaaaatattccaaatttaaaatcaccgtaagaaatctagaattgtggattacaattacctaaccctaaaagctgtatgtaaaactgttatgtaatggctcctttkgtctaatattccatcttctgtcatttccgggtaataacagatgtgtaaatcccttaaactaccaaaaaaaaaaaaaaaaaaggaaagggggacagacagtatgtggaagaaggagaaaaagtcagtctgataagtctgaagacaacagaaacataaaacaatggatatattaaaaaaaaaagttggatgaagcaaacaacatttcaggatcataaactatcatgatctggttctggtaagcctataggataataatttgcatgcacattaggagattatatacccctgtagaataagaaatatctcatttattcttgcatcataaatacagaatagttggcactaattcacttaacaggtatttattgtttcttgaccatgtcggaagaaatttgccaagtaagtaaaaatagatgtttgac

SEQ ID NO: 640801 - DNA, 589 bp, Homo sapiens
taagcttcttaaatctagcatcaaaaatttcttctttctatagatttacaacatataccaattaaaatattccaaatttaaaatcaccgtaagaaatctagaattgtggattacaattacctaaccctaaaagctgtatgtaaaactgttatgtaatggctcctttggtctaatattccatcttctgtcatttcckggtaataacagatgtgtaaatcccttaaactaccaaaaaaaaaaaaaaaaaaggaaagggggacagacagtatgtggaagaaggagaaaaagtcagtctgataagtctgaagacaacagaaacataaaacaatggatatattaaaaaaaaaagttggatgaagcaaacaacatttcaggatcataaactatcatgatctggttctggtaagcctataggataataatttgcatgcacattaggagattatatacccctgtagaataagaaatatctcatttattcttgcatcataaatacagaatagttggcactaattcacttaacaggtatttattgtttcttgaccatgtcggaagaaatttgccaagtaagtaaaaatagatgtttgac

SEQ ID NO: 640802 - DNA, 358 bp, Homo sapiens
tataaacaatatgatatcatccaagctactgtttcattkgtagatcaaaggcagagtagatttaacataattcttaggggccctaggattttcagagtggtaaatgaacattgacatcaactaagtcaccagctgcattagcccctaccaagaaagtcagcctgttttgaagctttgaatccagacattgacttccctgtagcgtgaaagtcctatgtggcatcttattcattagaagcctgtttcatctgcattgaaaacctgttacttagtcaccttcatcaatgatcttagctaaatggtagataacttgtgtgcagtttctttatcagcactggctgctttaccttgcacttct

SEQ ID NO: 640803 - DNA, 536 bp, Homo sapiens
gttatgtgctgctcaagtccactggctccaacaccagcacagcaccaggacttgcccaagaattgcagtccttgtggcctagtctgcttttcaagtttatttaggaccccaggaccctttagcttgggtrgcaaggctttccagaactcaaattcagaacactggaatgggtaattcacctctggctaaggctggtctaaatcctccctctgtggaaacttactgagtcctgcccagtgttgctttccactgtgacagggcagcactgagttccaatgcaaagtcacacaatcactgtgctctccctcccacaagcacacagattctctctccgttccacgcaaccactgccagcagatggggaaggggtgatgtcagtaattcaagactgtcgtttctatcctcttcagtgtctctttaagtgatatgaagataaatctaggtactgtgatcattcacctgatttttggttcttatgaaggttcttttttgtgtggacatttgttcaatttggtgttcctgtggggaggacgaca

SEQ ID NO: 640804 - DNA, 503 bp, Homo sapiens
tgtcttctccgaattcctttaggatttaaagtccataccttgcaatttagcacttaatgatatgccctctcttcacagtctctaatactttcaacatgtgtgagtcttgccttcccaagcagactaggaattcttttcttccttattcccacatctttgttccagccagccatctaacagacattaaaaaaaamaaaaacaaaaacaaaaaaaaacaaaaaaaaaacccttgagattggctgagttcttttccctactactttgagtgaaaggaagtcacccaaggccagttgtaagaattgtctgcatggggcggctcccattgcatagcactgagcttaggctgcagataccttggtttgcatcttggctccattacttattggctggtgtgatcttggctaatttatttcagctgtccaagtctcagtttctgcaggctcttagcccagttcctgacaaataataaagctccataaataatcatggttattggtaaagtc

SEQ ID NO: 640805 - DNA, 503 bp, Homo sapiens
tgtcttctccgaattcctttaggatttaaagtccataccttgcaatttagcacttaatgatatgccctctcttcacagtctctaatactttcaacatgtgtgagtcttgccttcccaagcagactaggaattcttttcttccttattcccacatctttgttccagccagccatctaacagacattaaaaaaaacaaaaamaaaaacaaaaaaaaacaaaaaaaaaacccttgagattggctgagttcttttccctactactttgagtgaaaggaagtcacccaaggccagttgtaagaattgtctgcatggggcggctcccattgcatagcactgagcttaggctgcagataccttggtttgcatcttggctccattacttattggctggtgtgatcttggctaatttatttcagctgtccaagtctcagtttctgcaggctcttagcccagttcctgacaaataataaagctccataaataatcatggttattggtaaagtc

SEQ ID NO: 640806 - DNA, 503 bp, Homo sapiens
tgtcttctccgaattcctttaggatttaaagtccataccttgcaatttagcacttaatgatatgccctctcttcacagtctctaatactttcaacatgtgtgagtcttgccttcccaagcagactaggaattcttttcttccttattcccacatctttgttccagccagccatctaacagacattaaaaaaaacaaaaacaaaaacaaaaaaaaacaaaaaaaaaacccttgagattggctgagttcttttccctactactttgagtgaaaggaagtcacccaaggccagttgtaaraattgtctgcatggggcggctcccattgcatagcactgagcttaggctgcagataccttggtttgcatcttggctccattacttattggctggtgtgatcttggctaatttatttcagctgtccaagtctcagtttctgcaggctcttagcccagttcctgacaaataataaagctccataaataatcatggttattggtaaagtc

SEQ ID NO: 640807 - DNA, 571 bp, Homo sapiens
tgagaggtagaacctattgtacttggctgaccagatgtggagactgargtaagggagaagccaaggatgattcctgtctaggtttggtctactggttgagcaatggaactgttctgtagcatgtcgaaaacctaggaaggagctgttctaatggtgatgagggtggatgttaagataattacagatttggacctactaagtttgacacatctgtgatatatgcaagaggaactgtccaataagccactgcatatgagtctggggcacagagatttgtgagcaggagatctaattttgagagtcactggaatatgaatggtggttgaagccaaggaagtagatgatgcttcaagatgtgtgtgcagtgagaagggaagatggttgaagacagaacccaacagaacactaaggaatccagaagcgagtatggggagtagtggccaaaacacggaaggagaaaagtgctgtctcgaagatagagggggaagtttcaagaaggaggagttggtcaacagatgcacatatgacaagtcacataatgcaagaactcaagtctgttgggtttcccatc

SEQ ID NO: 640808 - DNA, 613 bp, Homo sapiens
gaaccaaatctgcattgtaaaaatactatgttttcagctgtactggacaggacttttggctcaacctttgttttcaagagtaagtaccatgctttcctttgattggactgactgatgcagtgagtacttgtgtgcttttttttttttttttttycccaattcaacacaccttttatggagtacctactctgtcgtactctaggccaggccctgcaccggtcactggggatacagacatgactcggacagtctagcttgggaaacagactcatgtccgactaattataaaacagtgagataagtgtcacagcagaagcatgaaccaagaaagcacagcacatttggagtgtaggcatttatcagaaaaggtttctttgaacagctgtcgaaatatgtagtgagagaaatagcattcgtgttgcaaatataaggttaacccattttggttaaccaaggcactcatgctcagatttctcagataaaaagatgattggttgttttttttccttctaaaacagcaggggtaacaaaagattcaagattaagatacagcctccagagatgattcttgtgcttcttgacacccttccaaggtttgtttatgtcaccctgg

SEQ ID NO: 640809 - DNA, 410 bp, Homo sapiens
ctatcagtggtcacatgtattttgtgtcaggcttcccacttcatttttacaacagcactacaaaggcatcccttttggatatggaaacagagtcatcgagaggttgaggacctttcggcctgaggaggtcaggacagagcttcagatgtccacctccaacacttggcacttcctcagatctccttcctagctgctttgtatcttcctcttctaatgtacttgcctggtctccagtattttaamaaggataagaggtactgtttctcctaaaataaaattggtgtgtctctttatagaaagataagggaaggttttctggggtgggagaaagaaagagcaacaactttgtagtaggaagataatgctaatttcattttgtgttcttgctggatttaataacaacacaggaa

SEQ ID NO: 640810 - DNA, 567 bp, Homo sapiens
atttactggtaaccttaaagagttagagcttgagtttaagcaacaagaaaccatctgtaccagacagagcaaagcaggcaagagtaagaaaatgtttcataaacatgagyttgctctaaatagcagaagttttagtgttgtaggcaacgttagtgcataattcattttccgtgccttgttgctttctgtctggctggctttttctgaggtctgtgcccagccaaaaaaagagaaatccatttgtgggttccatgagagagaagtgataagattgataaacagatgcatttctatttcatgtggttggccattcctttcagttatattattaactgacccacctccctcagatctttgaaatgctttttaatctggtctcctgataaaccctaaggccaagtggctctcggaatttggagagaacagtttttcctccctgtcctgactatggcatttaagataaagagcaaatagtgccatgtgattaaacgatatatgtaaccttgaaaacttgccatagtggtttcagtgtcatttactcatacatcctaagcactgctagaaagt

SEQ ID NO: 640811 - DNA, 515 bp, Homo sapiens
atgcagacatggatgtggtgatgccatccttagcagagcccactctaagccagaagcgtcaaggctgccggctgggacgtcaagtcgatggtgattttggggaccctgtcctggggctgctycgtcctccatagggacagcacatctccttttacttacccccatggctttagaggggaagcaccaggcttgtggttcccaaactgggaaagaaaagtggagaaagccagttcctccttcctaagatatagatcaggactgtggggcagttaacaaaactgagtgagtggccaggctggaagtgagagtggagtcactaacaacctgacaagctgtgtggaagggaacgtcttcaagtctttatctgttgaactaagtgtcgacactcctcccctgctgaaccccaaacacatctaacctgcttcctcctcctcctggaagcctttcctgaattcctatccaccaagaagggatttccactttctctgagcacccacattcctactacctgtgct

SEQ ID NO: 640812 - DNA, 528 bp, Homo sapiens
tgaatgagaagaaatgcagacatggatgtggtgatgccatccttagcagagcccactctaagccagaagcgtcaaggctgccggctgggacgtcaagtcgatggtgattttggggaccctgtcctggggctgcttcrtcctccatagggacagcacatctccttttacttacccccatggctttagaggggaagcaccaggcttgtggttcccaaactgggaaagaaaagtggagaaagccagttcctccttcctaagatatagatcaggactgtggggcagttaacaaaactgagtgagtggccaggctggaagtgagagtggagtcactaacaacctgacaagctgtgtggaagggaacgtcttcaagtctttatctgttgaactaagtgtcgacactcctcccctgctgaaccccaaacacatctaacctgcttcctcctcctcctggaagcctttcctgaattcctatccaccaagaagggatttccactttctctgagcacccacattcctactacctgtgct

SEQ ID NO: 640813 - DNA, 528 bp, Homo sapiens
tgaatgagaagaaatgcagacatggatgtggtgatgccatccttagcagagcccactctaagccagaagcgtcaaggctgccggctgggacgtcaagtcgatggtgattttggggaccctgtcctggggctgcttcgtcctccatagggacagyacatctccttttacttacccccatggctttagaggggaagcaccaggcttgtggttcccaaactgggaaagaaaagtggagaaagccagttcctccttcctaagatatagatcaggactgtggggcagttaacaaaactgagtgagtggccaggctggaagtgagagtggagtcactaacaacctgacaagctgtgtggaagggaacgtcttcaagtctttatctgttgaactaagtgtcgacactcctcccctgctgaaccccaaacacatctaacctgcttcctcctcctcctggaagcctttcctgaattcctatccaccaagaagggatttccactttctctgagcacccacattcctactacctgtgct

SEQ ID NO: 640814 - DNA, 466 bp, Homo sapiens
caaagtcataaattccattgcagaaaggcaaagcatgtcagagcggagctttaagagcgctgtgcttgtcgactgatggtgattctgttgctaggccacttaaatcaaacagtcctcactcactggcaaggagggaggcctgctgcaacccttctagttttgcagtctctcctatcaaaggatgcatacgttctagatcactaacgcataataaatccccttacaaaggaacagtgaccaacaaacggcaatccacgatcatggccagaggaaaggctgtctcctattcaaagacaggcttcctggcatgcaatcasacaaatgtgctcaactgtttttcttcttcctgggggtgggcctgtgcctgttccctcaaaggacaggcctgtgatgcagatgtgacacagcccactgtgacatgaggacagctggaggccagggagtgagcaatgaaaactgttcatgt

SEQ ID NO: 640815 - DNA, 585 bp, Homo sapiens
ccccaaccttttttggcaccagggaccagttctgtagaagacaatttttccacagaccagaggtgggggatggtttggggatgattcaagcacattacatttattgtacagtttatttctattatcacattgtaacatacttacacaactcaccataatgtagaatcattggaagccctgagcttgttttcctgcaactagatagtcccatttgggaatgatgggtgacagtgacagatcaccatgcattagattctcatgaggagtgtgcaacctacatccctcacatacacagctcacaagagagttagccctcctgtgagaacttcatgctgcagctgatctgacaggaggtagagcacaggtagaaatgctcacttgcccacagcccggttcctaacaggccacagacctgtccatggcccagtggttggggacccctgatttaaaggaamaaaaatatctaatattttttctgacatacacagcaaaagcaatagttgcaagactaggggctcttactctggaatgacgcaaaagttttgttggaaaactcaccatggttctgtgggattagggtgagtt

SEQ ID NO: 640816 - DNA, 594 bp, Homo sapiens
tcacatgccaagttgaactctgtgtgttctgtcactcctcctatggtcttccctgccttaccctttgtggtttcctttatggcaaattgaagtccgattgcctggacagccctggccagtgcagggatgttattattggaaactcttcccatttggcacctgtatkagtccattttcacattgctgataaagacatacctgagactgggcaatttacagaagaggtttaatggactcacagttccacatggctggagaggcctcacaatcatgacagaagaagaaggaagagcaaagggatgtcttatatggcatcaggcaggagagcttgtgcaggggaactcccctttataaaaccatcagatcttgtgagacttattcactattatgagaatggcatgggaaagacttgcccccgtgattcaattacctcccatcaggtccctttcacaacacatgggaattgtgggagctatgattcaagatggaatttgggtggggacacaaccaaaccatattagcacctgtcctgggatcctgctacatatagtattaggataaacaatctcatgtaggtcaaaaataactcattct

SEQ ID NO: 640817 - DNA, 511 bp, Homo sapiens
cacgtggggaaaactgtgtctctttttctgcatgtgcatgttccttctcccctctctccctcctcttcccttcccaactctttcctttcstattcccctccctcttttgacttggcttacaatggtgaagatcaaaagctgtggaagtgttgaatgggactgggaataccgccctctcttgtccagctttctgccgtgaattccctacctgcttgtctggcttgtgttggaagaattgaggtcccttttcttcagtgatgtggaccactaggagtttataaaaatggtttcatcaaaaatgaagttagatataaattcagctggaatagtttaagacctctttacctcatcaaaacaagaggagtttaaaaaaaatcactgagtttaaaacacatttaaaactcacttggaaccataagccaatgagatttggaagaaaattccaaacaaggataatgagatgtgaccagtctgaccagacaagaacaaaacactaagatcactttttaaa

SEQ ID NO: 640818 - DNA, 478 bp, Homo sapiens
ctccactatacacgaagtaaaatatagttatgtaaactttctcagcctccaataattatagttattaaaaaaaaactgggtagtttacagatgtacataataaattctgagcacttcctcttatcctaagtagagatacagatactttttaatggccctcaaggtttagctgcaaagaaacttttctaggccgggtgtggtggctcatgcctataatcccagcactttgggaggctgaggtgggtggatcacttgaggccaggagtttgagaccagcctggccaacatggcaaaaccccatctctacygaaaaattagcagggtttggtggcacgccacctgtagtccccgctactcaggtggctgaagcaggagaatctcttgaacctgagagatggaggttgcagtaagccgagattgtgccactgcgctccagtctgggcgatagagctagactctgtctcaaaaaaaaaaaaaa

SEQ ID NO: 640819 - DNA, 625 bp, Homo sapiens
tttggctgtttatctgaataacctgggaagctatgtgactactaaatcttgggtgtcagtcccttatctaattggtttgggatgaaacctagataactagattcgtatggcaaaggctgagagtcggtggctcatggcaaccctgtgaagcaggcatgacaggcagtatccttcccatttagcagatgtgaaagctgaagtctrgagtgatgaactgacttgcccaacatgacacagttggtctgcaggaaagtcaggatgagaaaggcttccgtccgaacaggctttgaaattaaatctggcagtccatttaccacattgcggccattgtgtgaaattccttggttattaccttaagaatccgtttctgggaaacttaatgcaacttgtctaatcctggcacccctccaaccttaacagactcttttgtgtaccgaacttttgacttgtagggggagaagcataaaggcaactggggtcttagggccaggactgaggaatgggtttggcgcctagccactaaggggagtttcacaagagacaagttccagccaagatggcactgcctgtctctagcttgggagacctgtttcctccttggggaggcatgttctctgagaaggga

SEQ ID NO: 640820 - DNA, 625 bp, Homo sapiens
tttggctgtttatctgaataacctgggaagctatgtgactactaaatcttgggtgtcagtcccttatctaattggtttgggatgaaacctagataactagattcgtatggcaaaggctgagagtcggtggctcatggcaaccctgtgaagcaggcatgacaggcagtatccttcccatttagcagatgtgaaagctgaagtctggagtgatgaactgacttgcccaacatgacacagttggtctgcaggaaagtcaggatgagaaaggcttccgtccgaacaggctttgaaattaaatctggcagtccatttaccacattgcggccattgtgtgaaattccttggttattaccttaagaatccgtttctgggaaacttaatgcaacttgtctaatcctggcacccctccaaccttaacagactcttttgtgtaccgaacttttgacttgtagggggagaagcataaaggcaactggggtcttagggccaggactgaggaatgggtytggcgcctagccactaaggggagtttcacaagagacaagttccagccaagatggcactgcctgtctctagcttgggagacctgtttcctccttggggaggcatgttctctgagaaggga

SEQ ID NO: 640821 - DNA, 655 bp, Homo sapiens
acctgggtctctttttccattawaccttttaagaggaaaccctgatttgatttatacctatttctatattagtgttagggaatgcaatgagtagttgataacgaattggaacatttagcacaatatcaggtagagtcctgacttttgaaaaccttcacatctaatatgaagtttagttccagacattgacaaaacagaatatatgaagctttatgttaatacaatcaatatacaattgaaagagctcaaaactaggtcataagatatgccttttatttaaattactagttattcacaggccttaatttttccagaatagaaaataagctgaagagagcctagagggcataaagagaaaggttccatgagcagatcttcaggtatccacggaccttcctggactctcttatacggtatctcgctgtaaatatatgcatctctatatatgtgtgtatatatccatatacaaacattttaaaggagacttcagttctccccctataatgacagtaaatacctattataaaagactccaaatattcagaagtacgtaaaaaactcagtatgcactctcaacacaatttcacttctcattcagacccttttctctatatcggtgtgagcacccacaacatttttgttttcatggaaatgg

SEQ ID NO: 640822 - DNA, 655 bp, Homo sapiens
acctgggtctctttttccattataccttttaagaggaaaccctgatttgatttatacctatttctatattagtgttagggaatgcaatgagtagttgataacgaattggaacatttagcacaatatcaggtagagtcctgacttttgaaaaccttcacatctaatatgaagtttagttccagacattgacaaaacagaatatatgaagctttatgttaatacaatcaatatacaattgaaagagctcaaaactaggtcataagatatgccttttatttaaattactagttattcacaggccttaatttttccagaatagaaaataagctgaagagagcctagagggcataaagagaaaggttccatgagcagatcttcaggtatccamggaccttcctggactctcttatacggtatctcgctgtaaatatatgcatctctatatatgtgtgtatatatccatatacaaacattttaaaggagacttcagttctccccctataatgacagtaaatacctattataaaagactccaaatattcagaagtacgtaaaaaactcagtatgcactctcaacacaatttcacttctcattcagacccttttctctatatcggtgtgagcacccacaacatttttgttttcatggaaatgg

SEQ ID NO: 640823 - DNA, 556 bp, Homo sapiens
ctgaatatttgtagattttccaatgaaaatagcctttcgttttcatttgcatttctttgactaatgaagttgtgtattttttgtgtttatgagtcatccccatttcatcaataaactgcctgttcgtatctgtagtagactgttacacgggggcttcccatgaatcacccctcatattcacactctaatgttatcacctcctacattggctctgggcttggccatgtaacttctttctggtcaacagtgaattagtcatcatagcccaagctgaggcttgataagggtttgtacagtggggtttttatctttgtgtagctccctcttagaaccctatgccatttcacagaggcccagtcccctgcaggaaaggccatatgaagaaagagctgaacaaccatttgaacaaactatttgaagtggtttgttcaacagcaatagataaaagaaacaaaakccttgatctatttttgtattttcttactaatttgtagaaacctgttatagttaagaaatccaaatcccttcccacattatatctggtaaatattttcct

SEQ ID NO: 640824 - DNA, 561 bp, Homo sapiens
ggctataaaaacaggtcccccaacgccaaccgaattaagagcgtstaatattttattgcagtaattgaagctgatttttaaaataaactccatctggtgcaccggggctcaggaaggtaacctctgtcagtcaggtgattaagaccttgggaacagcaaagaccttactccaagtcccactgacttctgttaatacctgagcaactgtcaggagggagatgccagaacacaccaattattatatgatgaacaggcaggcccagcagtcaaatgtgctgcagtgatatagtacccagttgggcaattaacttgtccctagcaaaatttgtggacaacaaagcacttataatctacagctgctatccacattggtcagtgattgcactgaaattgattcttctcaataggcatggggtaaagagtacagcaatgtgacattagtggcccactcattttgcagagtctgcccattatcctccccatcatgcagataagcaagctgagactcagagtaatttgcccaaggatacaatagaggaccttgtgccagatggttgttgg

SEQ ID NO: 640825 - DNA, 580 bp, Homo sapiens
gcttgtttacacaaaagttacctggagactgtgtcatcattcaaaccctatagatacccaagccagcaaaaccaccacargctctggagcagcctcttggtgggcaagcttcctctaattcagggattggcaaactatgacccatggaccaaatccagtccactgcctgttttatgaataaaatgtgctggaacacagccatactcatttgtttccacattgcctatggctgatttcgagtgacaacagcagagctgagtggttgtgacagaggcaatctagcctcaaaagcctaaaataactatctggcctttagagagttttctggatcctaactggtggcgtcgctgctcagaagggccttcatctgcactcagaagccttcacaacaccaccctccgcagtgggctgactccctggtcaatcttttccttcctcaagtggactggactcaaaagtactcataggttccctcaggaaaggaaaagctgcacctcagacaagttaggcctgcccaaaccgtgagccctgtgacgttagaacattagcagctcaagaatcctaatgcaaaccccaaaca

SEQ ID NO: 640826 - DNA, 488 bp, Homo sapiens
caacccaacatctctttatgcttccactcgccaagtatccatttgctgacttaatcatccaaaagaagagtatttcaaagttggcaatagttcccacatcgtttttctatcagtaaacctggtttggaaagatcactttactgtgggaagtagtctaaataaaaaagggaaayacctggtcaaattcatttatcataatgtgaagaggcagctgatggaagatgtgtctggagtattttcacttgcctctctagtgaaaggaacaaatgtaaccaatcactttgaaaaacaaaatcaccatacacttatgtctttgaaatgaatgtttcgatttggttaaggagggagtttcctccttgaattgatgctaaacttcctctgatctataatgtagctgtcccacctgtccagccatacaaagatataaaacagtaacactgaggagataaggcagagatggaatggtagtctcctctagttgcattgct

SEQ ID NO: 640827 - DNA, 524 bp, Homo sapiens
tttagcacctccccgttgtccctcttgcttgtgcttcaccatgtaagatgcctgttcccccttcaccttccaccacaagtaaaagtttcccgaggcctccccagaagcagaagctgctatgctctctgaatagcctgcagaactgcaagccaattaaacctcttttctttataaattacccagtctcaggtatttcttaatagcaatgcaagaacggactaatacacaaactcaaagcctttgtatgtgccctgagagaatccatccagaagacaagtttgattctatgactctcctgcttgagattggcaagttaacagtttcctattgctgtaaggcaaaggatcagaatgcaacacacatgttctgcccttcacctggcttgcaagacgcaccatggctcatgacctcccagctgtccgagttggagtcacactgtcytgctttagtttctgcagcagcccgccatgttccttccagccaaaaagccttcaacatgttccctcaatatggaatagccctgg

SEQ ID NO: 640828 - DNA, 416 bp, Homo sapiens
aggtgtttcttgattttgccattaagycaaaggtcctctgagtaaccaaaatagctatattgtattgactggttatgttgtccccattcgcctttgagtcactagtcccaagaagcagggaggccagaggacttgagataaaaggatgaactctagtatagaacaggccaacactggctaactcttaaggactcaaaaggcagatctgttgaatgttcatgggctacttgactctcttctctccctattacatgagagattttatgtgagaaggtggttgagaaagggtcccatagtccagcaggggttaccagcctcctccagccagacaggacaaccccgtggagacaaaagaaggggtaggttccagagtgcaggtcatggcccttctccccttgcctagccactacctgcaa

SEQ ID NO: 640829 - DNA, 519 bp, Homo sapiens
tgaaaattttggttgattcttatgtgagttttggagcatattcatgcaatgtaaattttgggagaaaaggaatttttcattttaatttaaatgggagttttaaggaaccagaagataaggtcagattcatccagccttagagaatcatgatgatgttactgccaatagccttatgccttgtctgatttttgtcatttgtgttagttatctattgctgcataacaaaatgctccaaaacttagcagcttaaaataacacatgtttcttgcccttcgtttctgttggtgagcaatttgggccctgtttagctgagtcctctacttcagagtccctcataggctayaatcaggtgtcagctgaaccatagctgttctaagtttgaaggatttgcttccaggctcatatggttattggcaggattcagtttctcatggggcgttggacaagggcctcagttcttcgctgactgttgcccactctcagttccttgaaatgtgcctcttcagtgtggcagtgttc

SEQ ID NO: 640830 - DNA, 619 bp, Homo sapiens
attactgctgaaggcagaactacagcatgctgaatgcctcgtctaagatcaaagacattttagtgcagttttcacaagtctttctgttatatagacttgagatattatttggggaaattggggattcgaaactggtgtgaaggagctatygtgtaacattttatttgcctctctaaaagtcagtaatgatagttttcaatttgggaattaaaaatgagggaaaatgagttttgttctgttttttcttctaagccttggcaccattacttattactacttttatccttccctcctcatgctcaagagagcatttctatatgcatggtctgttattgggagacagaaaatgtacaggctgtgaattccaggctacgcagctctagatctggggccagaagttctccttctggaaccaaacaatctagatggagcctcattctctacagtggacatcagaaatgacctggacagcttgtgaaaacacagcctgctggccccacctccagagttcctgatctcataggtcttgggtggagccaaaacttttgcatttctaacaagtttccagatgatgctgatgctagagaccacactgtgagaatcactgctttgaagcaat

SEQ ID NO: 640831 - DNA, 548 bp, Homo sapiens
attttctttacatatttctaacataagagttatacatagtcaaagttggtatgtatatgtgaatataaaattttgaaaagtatgcactaaaaatacaagaaaaagtgttctctttataatctctatttttataaataactggccttttatgggagaatttagtgaagctattttaagttttctaacaaagtttaccttggcttaagtttcaattttygtctatttcaaaagacaaatgcagattcataatcgggagtgatggaaaattgtttacacttacctctaatatcactagcatttaattttaaactaacaaaattctaacatgaagtcttgaacttttgtgttcagaataaatgtgatttctagttgcgatctactttgttttgtttctaaagattttgtttgaacatatattaactataatgaaataaaagccaagaatagcttgaagagggggaaaaaagagaacttaggatcaaggtttcaaaatattatgaaaaggaaataatcaaatgcaatactttgcttttatgttgaccttctca

SEQ ID NO: 640832 - DNA, 567 bp, Homo sapiens
ttctaaagcctgtggccattggtgaactgccaggcaggaggtcacaattcccaggcagatgcagcagtcctgtgtaccattgatgggattcagtaaaaaaggacaaggcctagatagcctccagaacaattttattgtatataattgttttcaggaggaaagattaatttgaaatctccgtattttgaattccaaagtgacttcacgtggtagaaagaacatgaactttggaatcagatagcaggcatrgaagggagattgtcatcattataattaatccaagttaattagctgtaacatctgcaagaatgtttcttcagtctgtggagtgggtaacatcataggattttgaggatgacatgggacaacatatgagaaaatgggaggcaaattattgatactcagtaaatgttaattcctgtctcttcctgcccaagctagtcttcaaagcataacaccagtagccttcacagccagcggccttgtaggtgaagcaagctattggtacaggtccacattgcctagtgctgtggctggaaggagtcagtttaatgcgaggcaaaccac

SEQ ID NO: 640833 - DNA, 553 bp, Homo sapiens
tgtgtttttatcttgtatgtgtctcttctcatctttcacactggcttggggtattgatgaggcaggatttccagtgtctgggtcatttcttctcaatgttgggagttctcattcagttttggtaatcgcatggccaacaagctgatttggggaatatcagatcattcagctcactctgtgatccattgttatgctggaaaaacatggagtaytcagatgtatttgaaaatacagccctttctaggggatgctccaactgagtttttggtattttactttagcaagtttaaactcctcaattcagggccaccacttagataactgacttggtctaaatggaaaagtttgctcattgtcataaaacatcctattaaatattatatttgaaaaaacatcataaataatttaagaaatagtatagatccagtattaagatgtcaaaatagttattgttgaagacgatagctttcctaatagtattgattaataagatatttaagaaaactatctgagaacaatggggatgtggtgtgtaaggaaattcatttgtatg

SEQ ID NO: 640834 - DNA, 553 bp, Homo sapiens
attctcaaactagaacagcagcatcagcatcacctgggaacgtcatagaaatgcagattcttgatccttactgtatagccactaactcagaaactctgggattggggcctagaactttgttttaatgagcccttcaagttgttctgatacttgctaatgtctgagaacttcagaacaagaccctatgcattcaagacagtataggtttgagagcacagttttttccaaaagatccatatggttttaagcttgaaaaactttagatatttcaatgccaccaggggctaggaggggccaagatcaatgacyagaaacagctgcagttggaggctcccactgagaagaactaaaactgtgagtgaatcctgcaccagcaactgaggtaccaggttctctcactgggactgactaggtggttggtgtgacccatgaagagtgaaaacagggtggagagaccacccactcaggagccacacagggcaaggggagctcccaccccacccccagccaagggaggcagtgagtgacattgctaccctccccaggaaaccat

SEQ ID NO: 640835 - DNA, 524 bp, Homo sapiens
gtggaagacagtgaaatgattcctcaaagacctagaaccagaaataccatttgacctagcaatcccattatggtgtatgtacccaaaggaatataaatcattctcttataaagatacatgcacatgtatgttcattacagcaccattcacaatagcaaagacacrgaatcaaccctggatgaagaaaatgtggtacatataccactgtgaaacactatacagccattaaaaggaacgagatcatgtagtttgcagggacatggatggagctggaagccattatcctcagcaaactaacacaggaacagaaaaccaaacaccacatgttctcacttacaagtaggagctgaatagtgagaacacatggacacagggaggagaacagcacatactggggcctatcgaggggtgtgggagagcatcaggataaatagctaatgcatgcaagtcttaatacctaggtgatgggttaataggtgcagcaaaccaccatggcacacatttacctatgtaacaaacctgca

SEQ ID NO: 640836 - DNA, 557 bp, Homo sapiens
tatctgtgatttttaatcagtattttggatatatctttattccaattcccggaaattagattttttaaattactgtttcttcttgtttatttttaaaaaatttctccacattgttcagtttgcttgttttyccttatttcagttttcccttatttcagttttccctttgagataattaccctttttgatgaaatacatcctttagcaagtcctatggtgacatactgtttgtactttactttctctttttgtttgctaaaaatactattttgcttaatttcttgaatgtcagtttagccatatccgcaattctagattgctaggggcttcccatcaatacttcgaagctatgatttcattgtcatctggcctccatttgtagctgcaaaagtctaatatcaaaacgtcgttgctttgaagtaatcaatctcttctctgcctttagagtggctttgctgtctctactttttactttgcttatatctaggtcccttctttcctcagttggaatttcttgtgctctcagaatctgaagatttatgtttttcatcaattct

SEQ ID NO: 640837 - DNA, 239 bp, Homo sapiens
agaggaaggagccaggatacagcttagcttgcttgtgcccagagaaagagttaagctgctgaccctgaaggcaaggaagagctgactgcacagctgtgtatgggggtggccagctccagcagccragacagggtggacagtgggagagtaaactggtgatgagaaagctagtttgagaaagctgttgaagagagctactgctgaataaaatcacgtttcacctgcctacggccccctaa

SEQ ID NO: 640838 - DNA, 601 bp, Homo sapiens
ctaagagcacaagttcaggaccaggatagtccaaacccaagctctgctgtggaatcaagggctcaacccttaacccctccaggccttgattttcctgtctgcagaatgggaacactgttcttatctcacagggctctttgaggatgtgataagtaaattcccatagaggtggcatagcatagtagatgagaatggattctggagtcagagggccacaaggccagtcttggccttaccacttgctagctttatggccttgggccaggtgataagcctctctgggcctcaattgcttcctctgtaaaataaggatgatgctaatactcattgttaagattaaatgaggtaaatgagctaacacttgggaaattcttagagcagtgcctggcacagagtaagtggtatttgagtattttccatattgaagtgtggaatcagtgccagggctacataagcctgataagtgttcattgctcctgtcatgtttataatctcctcaccctcctgcccctgaaaatacccccatgtcagctgccttttccacmtttatctggatactgaaaaatgcacgtaaagggacatttcaccttaaggaaagctt

SEQ ID NO: 640839 - DNA, 392 bp, Homo sapiens
atccacttctgcgctttgatgcatgtctatgtagcatttttagcccccaggattttcttatgttactgtcttagtctattcattctgctataacaaaatacttgagactgggtaatttaaaaatatagtaaaagagatttattttcttgcaactstggagcccgggaatcccaagataaaggtgtgggcaggtgcggtgtctgagagcctgttcctcataggctgggtaggtgtcctcacatgggctcttttacaagttactaatcattcatgatgacttaatcaccaccccaaagaccccacccctcagtaccaacacaatgggaatcaagtttcaacacatgaattttgggggacattcagaccatagcagttacctaggtgtgataatg

SEQ ID NO: 640840 - DNA, 549 bp, Homo sapiens
atgtgtctttttggtgtaatgatctattttcctttgaatatataccactgctgggccaaatggtagtttccctctaatatctgatgatcctgagacggctgctctagtttattcayggtgtatttaaaacagattaatagaatctgtttgcatatagttttatgattttatgacatctgggtatcactgtaagtgatttggccagtgcattacaagttcagtttcttaagaccttttccttgggttgtctagaatgcccacagaagacatttccaaatccttgcctgagagtgaagtcattctggaactcaagtgaagggagaaggctgagggcttcaaaattcaatgtgtgagcatttaccgaaaccctcctttttcagtactgggcattcattttcagctgactggtctccttcagatccttgaacctctggtgtactctcttagaaaatatatcttctgtcttctgtctggttgtggaaaaggcaatatcctgtctgtatggagcagaggacaagatccaggagtctgacttcttcttaaactttt

SEQ ID NO: 640841 - DNA, 536 bp, Homo sapiens
tgatttcattcttttttatgactgtgtagtattccatggtgtatatgtaccacattttctttatccaatccactactatgggcacctaggttgattccatgtctttgctattgtgaatagcacggtgatgaacatagaaatacatgtgtctttttggtgtaatgatctattttcctttgaatatataccactgctgggccaaatggtagtttccctctaatatctgatgatcctgagacggctgctctagtttattcacggtgtatttaaaacagattaatagaatctgtttgcatatagttttatgattttatgacatctgggtwtcactgtaagtgatttggccagtgcattacaagttcagtttcttaagaccttttccttgggttgtctagaatgcccacagaagacatttccaaatccttgcctgagagtgaagtcattctggaactcaagtgaagggagaaggctgagggcttcaaaattcaatgtgtgagcatttaccgaaaccctcctttttcagtactgggcattca

SEQ ID NO: 640842 - DNA, 619 bp, Homo sapiens
gataagcaacttatacatgttgaaatcataatagcattgttggaaacttccaggagtgctttttagcaagtatgacaaatagtcaaaatgaataagatcatttcaaatatgaaaagaggtaacacaaaaataataagaccagtttatttttgtacttaatgaattggctattaacagctactcaagagtctgaggtaggtaggaggaggtaggargacagcttgagaccaggagttagagtccagcctgggcaacataatgagaccccatctttcaagcaaataaataaaatattttaaaaaataaataaataaaattatcccatcccctttgatattctagttcaaaatttcaagtagtgatttttgcatataaatatgtatttttttatttataccattacagtacatgtattaatatagctttcttacttttatcattttgaaagaaacttatagatacaatgcattccttttgtacatccaaaaggacctggatagtgagaaagaagcagactgaattgagaggaattatatataaagtaataaaaggagcaaatttttaaaaatgtagatggttctgtcctaacaggattccctcctgctcttgtataacagaa

SEQ ID NO: 640843 - DNA, 263 bp, Homo sapiens
aatataaagtactatataaattttaggcattattcttatttttgagagcaaacagagaggcattaaaatttactstcatattcaggtagaattataaaaattttccactcacaaaaattctttcaattctttgcctcactctgtctggtataaatatatttgtcccttaatatgagctttcttctataacttgaggtttgttttccctttagtggatgaaatgatgttataaatccatgagagactgtatcacagtgattacg

SEQ ID NO: 640844 - DNA, 421 bp, Homo sapiens
atacacatatgcatgcataccacattcatgccttatttttatagaattaagtyttagaatatcagctagtcaatgccaggagggctactaacccataactcttgaccttagctctaaatctgaaaaaaaaaaaaaaaaaaaaaaaagcattttaattatccaattccactatctcaaataaatagataaaaatgacctcattccctaatgtgggactctgtctccatctattcatcctagactatgcaaagcttttcatggggctggacataaactcactacctaaatcataggactaaaagagtctcagggtaaaacacaagtacatgtttagacaatagaaatattaaattattccctaaaatgaaataagtggtcaagaagaagtttctaggttggaacttaaatgtcgttgtttgcg

SEQ ID NO: 640845 - DNA, 607 bp, Homo sapiens
aaacatcaaggctcaaagctcatgcatcagtattcacatggtgtctggagatcttcctcccagtgtttacctgagattatatattctcaaggaaatgtaactttaaaacacttaaggaatttaattggaaaatatargatttcttgttgatcctgggaaaggtagaacccagatcttcccatcccgtttcctggagggatgagggagagttttaaatttgtgacttttatttgttttaactttccattcaccctgtgttttgttttaggcctcccagacctgtaaccagcatgaacgacaccctgttctcccactctgttccctcctcaggaagtccttttattaccaggaggtaagttccaaccctattataaaataagccctttctttggtaatgagccttgattctgtggtaagaaaaatattctcatgcaagccaagggcagaatattgttactagaaactaacttgcaaatatccattataagttttcaatttcattcatttgtatgcatttaaagaggggtagggtggctttggggattaatgtcatgtctggaaacctgcatttataatttacccacagtaagaatgtgagggtatgttt

SEQ ID NO: 640846 - DNA, 543 bp, Homo sapiens
catgctatatgaattgtaagcaatttcctaatatttggtggagtgataagacctggctakatgttatatagaatagtcaaggttattccttttgtgagtgcttaccactttagaggttgcaactatgaaaatacctgtgaaacctttaaatgatgtttctaaaattggaggtaaaagaagtgtgactaattttttcattagtctttactctgactaatgaagaagcttgaccatagtgaaagaagcttacttgacattaaaaagtattggttaactttctcatgtaaactaagtaatgattatggcaagataattaagattttaaaaaggaggcatgatgccaaagaagatagcagatcctaagaggcacagagctgtgggcagtgaaggggagaaagagcctttgggacctggctttgtggtcagtccttgcaataatatctgcaataataataataatacactaactttcataagcttagataatgttgctggctcaccatacatagctcttagagctctttccccagtggtgataataga

SEQ ID NO: 640847 - DNA, 543 bp, Homo sapiens
catgctatatgaattgtaagcaatttcctaatatttggtggagtgataagacctggctatatgttatatagaatagtcaaggtkattccttttgtgagtgcttaccactttagaggttgcaactatgaaaatacctgtgaaacctttaaatgatgtttctaaaattggaggtaaaagaagtgtgactaattttttcattagtctttactctgactaatgaagaagcttgaccatagtgaaagaagcttacttgacattaaaaagtattggttaactttctcatgtaaactaagtaatgattatggcaagataattaagattttaaaaaggaggcatgatgccaaagaagatagcagatcctaagaggcacagagctgtgggcagtgaaggggagaaagagcctttgggacctggctttgtggtcagtccttgcaataatatctgcaataataataataatacactaactttcataagcttagataatgttgctggctcaccatacatagctcttagagctctttccccagtggtgataataga

SEQ ID NO: 640848 - DNA, 604 bp, Homo sapiens
tctagcagtgtctagccagaaaacagtcctcagctaccttagctgctgacatttgtttttttcatagcacacacgtaattgctgatatttgggggatttagagagaagctgtttatattttgttctttcatttggtacagggaaaagcagtgtgtttctgtttttgtttttgagacagagtttcactcttgttgcccaggctggagtgcaatggcacgatctcggttcactgcaacctctgccttscaggtacaagcaattctcctgtctcagcctcccaagagctaagattacaggcatgcgccaccacacctggctaatttttttgtatttagtagagacagggtttcaccatattagtcagactggtcgcaaactcctgacctcaggtgatccacccgccttggcctcccaaagtgctgagattacaggcgtgcaccaccacacccggccagcagtgttctttacatcaaaaacaacatatctcactaggaacaatttaaacatagctctttttagaaataatcagttaaataaacatcacaggtttttaaatttaaaaatttacccctaactcataaaaggagtctgattttctctaagt

SEQ ID NO: 640849 - DNA, 604 bp, Homo sapiens
tctagcagtgtctagccagaaaacagtcctcagctaccttagctgctgacatttgtttttttcatagcacacacgtaattgctgatatttgggggatttagagagaagctgtttatattttgttctttcatttggtacagggaaaagcagtgtgtttctgtttttgtttttgagacagagtttcactcttgttgcccaggctggagtgcaatggcacgatctcggttcactgcaacctctgccttgcaggtacaagcaattctcctgtctcagcctcccaagagctaagattacaggcatgcgccaccacacctggctaatttttttgtatttagtagagacagggtttcaccatattagtcagactggtcgcaaactcctgacctcaggtgatccacccgccttggcctcccaaagtgctgagattacaggcgtgcrccaccacacccggccagcagtgttctttacatcaaaaacaacatatctcactaggaacaatttaaacatagctctttttagaaataatcagttaaataaacatcacaggtttttaaatttaaaaatttacccctaactcataaaaggagtctgattttctctaagt

SEQ ID NO: 640850 - DNA, 627 bp, Homo sapiens
gagagacgctgacttcatttgaaacacaatgagagttttactataaagttggggtgtgcgtatattcatttatctagctagaaatttaccaatttatattatcactaaaactttcggattttggtgtaagatatttgaaaaatcaaagacacggtgaggataaagatgtaatgacaaacacttgattaacttcctacagaagaagaaaactttctatraattacagttttctgggtggaaggcacttgatttacagggaagggttttctgactcgtgtagtgaagaggaagcctggtcttgtggatgatcaatgaggtaaagtcagggtcctggatctttctctgaagggcctatggcttcactgaaccactgttcttcaatttctgccactatgtgcatttaatgaatattaatggcataatttcccaaggtgttttataattcctctgtgcaaatcactattagaatgaaagggtttgctattatatagtttgtcaccatgctaactagcttgtcaccaggccagcacagctgctgggataaactgctgtgaatgtgccacctctattcactttaggtttaatttttcaaggtcaaaatataatctgggaacattgtttttacac

SEQ ID NO: 640851 - DNA, 586 bp, Homo sapiens
gaataagcagcaaaggcagctgattgctgagctagaaaacaagaacaggtgagactttgtagacgtgctggcttgtttgatcaatgtgcgcattccttaataaactatggtcgtgctttaaagtttcagggctttacaccctgtatggctactcaagggaagacatctacactcagtgatgctcacttccaaaaagctggtctttagatctttagaacttcagaagctccatgagaaaacggcgtgtgcatgtatgtgtatagttctgagatrtcaatgcaattaatgttgcccctctagacggtctcacttccctttttctgagatacttaattttgttcaagagcttctagtacaggaggaccctcctgggtactaggtagaaggtgtctctaccacccagaaacaggtaggaggctcaccagagaggccccctggaaggaccctgagctaaagaggcatctggagagacaccaccatcacccagttactctccaaacatccaaagatctccacctgcagcccatcagcaggttcttcctctattcaacacagattgactcacagtctacctccacagcataca

SEQ ID NO: 640852 - DNA, 550 bp, Homo sapiens
cagttttacaagcctttttcacagccaacaaacaggtagacttttatgacatttcactgaatgtttaggcccaaaggaagggttacatcagatctcatgcaacttcttttctcttttcstggcagagccctccttgtcttcctccttcctaactctgttttcaatccatcacttgaagaactgaccttagctcaacatcagttcctctgagtgttctctgacatctccctaaataagcacccttcaaagtacttctaatgtagcactcattaaaatacagtgcaattgcttttttatgtattcccacaagattataaattcaatgtgggtggaaaccacctggctttttcagttgtgtagactgtattgccatctgagtgtgcagcacctattacatactcaaatacatattgaaccctttattgatcaatatattgatacatacattagatttgtatcaatgctgattcatccaggatttaacattttggtcaagaaaaagtgtgcagcacagtacgttgcaagatacttctgctctgtacacacagac

SEQ ID NO: 640853 - DNA, 526 bp, Homo sapiens
taaggtattttattatagcagcacagcatagactcagagagttagcttttttttttttttttttgagacggagtctcgctctgtttcccaggctggagtgcagtggcgatcttggctcactgtaacttctgccttctgggtttaagcgattctcctgcctcagcctcctgagtagctggtattacaggcacgcaccaccatgyccaggagagttagcttttaaaatgctcaattggtctccaaattcctgtgggctttggattttaggacctactgaccatctattgtgatacaatttccaaaaatggcctccatgctttactaataattttttgattcaaagctggatagaggttgaggtaataacagagacaattagtgttagttctttcacttcagtagacctaactcagaccactttggaaatggaccatccagagaactgctaacacaacactgtgaattcagtatatagactcaatcctaggcaaagaagagtaagtaggtgatctttctataagacacc

SEQ ID NO: 640854 - DNA, 414 bp, Homo sapiens
gaagaactgaccttagctcaacatcagttcctmtgagtgttctctgacatctccctaaataagcacccttcaaagtacttctaatgtagcactcattaaaatacagtgcaattgcttttttatgtattcccacaagattataaattcaatgtgggtggaaaccacctggctttttcagttgtgtagactgtattgccatctgagtgtgcagcacctattacatactcaaatacatattgaaccctttattgatcaatatattgatacatacattagatttgtatcaatgctgattcatccaggatttaacattttggtcaagaaaaagtgtgcagcacagtacgttgcaagatacttctgctctgtacacacagacacacatatgtacctacaattgagatgatttattcaagt

SEQ ID NO: 640855 - DNA, 414 bp, Homo sapiens
gaagaactgaccttagctcaacatcagttcctctgagtgttctctgacatctccctaaataagcaccctwcaaagtacttctaatgtagcactcattaaaatacagtgcaattgcttttttatgtattcccacaagattataaattcaatgtgggtggaaaccacctggctttttcagttgtgtagactgtattgccatctgagtgtgcagcacctattacatactcaaatacatattgaaccctttattgatcaatatattgatacatacattagatttgtatcaatgctgattcatccaggatttaacattttggtcaagaaaaagtgtgcagcacagtacgttgcaagatacttctgctctgtacacacagacacacatatgtacctacaattgagatgatttattcaagt

SEQ ID NO: 640856 - DNA, 555 bp, Homo sapiens
ttaatttagtttcatggctaatttgaagcagtactaaataaaactcataacataatattccttgagtttgaattttgctttcttttttcaaaagcactgtcttatgtgctacttttgttgatccttatagaactcccatgcgttgactagtgttactattatcgccatcttacaaataaggtttcatggccaaccaataacagatatttagtgatagatttgaggctttaatataggtctttagtgatttcttcttatgcaattctgctgaagagggacagtggagaagatatatcctgagaagccatgatctcaaattaaacattagtactttgagataaattttaaggtagtggatgcctcccagaatgcagtcctagtgtgcttttctgcgcmaatgatacagcaggcagctgtctaccatttctgcctgataaagctttgtatacatttggcctcatgcttgagaagataaatgagttcacttcaggattgggtctataggcagatgattgaaattcagggaagtgtttatatgcattcaagagagtattt

SEQ ID NO: 640857 - DNA, 454 bp, Homo sapiens
tataatccttgggtcacagagcccttttcagagtaactattcttatttccctgtgaaattgaaaaacaaccccatgcatcttcaaataaattgcaagtgattccacaagatttctcttttgggagaggaatatcagtgaatgtacaaagagcagtggaatagaaaatagaaaaattgtatggttggccatatgctgaatacatttagaatggctgagagttgctaaaatcatactagatggagcaccctgcaagtcatactttccacaacttctaccttctggagcacagtcataagaaatgaatttccttgaagtggcatttatgcttttatacattttgtgattttgacatcccattgtatatrtgtgtttatatgtatgtctcccaccattattttacaaaccccttgagagtaaagactatgattgtatgtgcccatgtgtgtttttgtg

SEQ ID NO: 640858 - DNA, 593 bp, Homo sapiens
gtgtggtaatttctcaaataacaaaaaaacagaattaccatttaactcagcattaactctgcagattcctttggcaggtatgacattttaacaatctttcagtccataaatrtcaaatgtctttcaatattttgtgccttctttaatttctctcagcaacattttaccattttcaatgtagaagtcttcacatcctttgttaattctaagtatttcattaattttgatgccattataaatgaaattgatttcttaattttctcttcacgttattattagttgatagaaacatatcttatttttgcttgttgactttatattctacaactttgctgaattcatttagggtttgcatgtatgtaatctttagggttctacatataagatcatgttgtctgtgaacagagataattttactcgttttccaattgggatgattttattttttcttcttgcctaattgttctggctatgacttctagtactatgttaaataagggaggtgagagcagggaatcttgtcttactcctgatcttctaataaaagctttcaggactttaccattaaggtgataggatgcaattttgccctg

SEQ ID NO: 640859 - DNA, 592 bp, Homo sapiens
catcctgtttataattttttattgattttggatcaaaatgtaaataaggtagtctgtaaaagattgattatttgatgtatatagaatttttggttgtggcttagaatgtggtaaatttttataaaatatttaagcaagttgttacctcttatgggagaaaggggaaaagttaagaaaggrgggaaatacaaagtagattttaactatacatgtaatgattcatgttctattagagttctaatgtaggaaattattaagttgaaaacctacatcatgtatacacaaatcttcatcatattatttccctttgtacttattttcattattttaaaacattgtattttctcatcgctatgttactgtttttaaaaaaactgcataattggaatattgatagtgtacaagcaactagaaataggtcatctctttctatatttatgagttatttgaagactatttgaaatctatatattaacagatgcatttgcttctagaaacatttgaacaatggacttatgggggttagaactgttgaagccactgggaatatatacaatggaaaaattatttcaattatttgaaagggctatct

SEQ ID NO: 640860 - DNA, 550 bp, Homo sapiens
aagtgtacttgtttttcagtggaaactagagatctaattggaagaacattgagtaggttaaattttattcatgataatagggggtttgtagcaactaaaatgmtcaaataaaaaaaatggctgctctgggaaatagcaaatttgtgttgttggaaacactcaactagaattatgctttggtagaaagtgaaattttcatttattgaatattcattcagtctacagtatttacatggacttacctggtccccagtgtggtgccaatataatgatgaatagccaatatatttctcctttctattgatgtagacttgactatgtcactgcttagtccaatggaatgcaggcagatgagacaatctgctagtcttggtccaagatctttagaagcactaagtgtacttgtgctacttctcaagaaaagggaatgctgcagataaccctttgtcctcagtgattgagaaaacctgtgaaaagacctaaacccaacccaaagaaagaaagcccagtctacccacacatggaacagatctgctacagataccacaca

SEQ ID NO: 640861 - DNA, 553 bp, Homo sapiens
tattgttgtacattatatgggttttgaaaaagataataacatgtgtctatcattgtagtgtcatactgaatagtttcactgcttaaattcacctgtgccctgcttattcatctctccctccccctttacccctagcaaccacggcacttttcattgtctccatagttgcaccttttccagaatgtcatattgttgaattatacagcatgtagccttttcagattggcttctgtcacttaataatatgaatttgaagttattccatgtcttaccctggcttgatagctcattttttaaaatgctgaaaaatattccactgtctggatataccatggtttgtttatgcatttacctactgcaggacatcatggttgcttccaaattctggcaaccatgaatctatgtrcaggtttttctgtggacattgaatgacatttttattttctatataaataagatacagagaaaatatgctaataacttcagtaacttgtgtagagatcataataattgtttatatgttttaaatatggagatggaaggctatgtgaca

SEQ ID NO: 640862 - DNA, 605 bp, Homo sapiens
cagtcagaagtttctagtagaagattctttaaaaagatcgacttggtaaaatacctgatgtatttaaatatattgagagaaaatgagaataatttgaggagattttgatattgaattagtggtaagtacatagaaacataaacaaagaccaaaatagttgtaaaccctagggaagattttttaagtagtggagagattacaagggtcacttagaacagcacttartactctagtcaaaatacgccataaagatatgaggaaaatagatgagtagaagtaagaattggtggcggggggcggggggcggtacagaaagctgaattctcaccttccatagagaaagtcaagagaaaatgcctaacatagaaaactcaggaagttacaatgtaagtatggtttgtagtgacatggagatttacaccaaaagaataacgaaatgttttgaaagttgttgccaatggggaataagtttggaagcaggtggagagagaggcaggaaattgcagtgtttgattatataacttatacacacatacacacacacacacacacacacacacacacacagagttgaatcttgaacaacatgggtttgaaatgcatgg

SEQ ID NO: 640863 - DNA, 639 bp, Homo sapiens
ttttttaactctcttattgtttggaagttacagtttatatttctattaagttaacccccagttttccacaaacatatttattttttttctgaaggtgtttttatcttgacaaacaatgctttgtatacctcaatggccctccaatttttttccattcccatcttccaataaattattatttagaattttatttgcatcttttaaaattttgaaatacttgattaaacaatatataaaaaataatatatgtaaattataaagtacacaataatagaatgaacatctgtaaacattatacccaagaaacagaacatcctcagtaaytttgaagctccctatgggactttcactggttgcaatctgttgtccttttctgaatttatattcttaataatttgctttactttagggttttacagcataccaatatactaatcaccatcatgacaaattaaaaaaaatgttataggcaagaaacataaataccagtagttctgaacgtctcctttacatttgtaaacttacggagaatcccccaaagagcttctgtttatctgcgtcataccttttgacattaatcaaattaaaaattaaggtataatttttaaatttatgaatgatatttatattttatttaaa

SEQ ID NO: 640864 - DNA, 639 bp, Homo sapiens
ttttttaactctcttattgtttggaagttacagtttatatttctattaagttaacccccagttttccacaaacatatttattttttttctgaaggtgtttttatcttgacaaacaatgctttgtatacctcaatggccctccaatttttttccattcccatcttccaataaattattatttagaattttatttgcatcttttaaaattttgaaatacttgattaaacaatatataaaaaataatatatgtaaattataaagtacacaataatagaatgaacatctgtaaacattatacccaagaaacagaacatcctcagtaactttgaagctccctatgggactttcactggttgcaatctgttgtccttttctgaatttatattcttaataatttgctttactttagggttttacarcataccaatatactaatcaccatcatgacaaattaaaaaaaatgttataggcaagaaacataaataccagtagttctgaacgtctcctttacatttgtaaacttacggagaatcccccaaagagcttctgtttatctgcgtcataccttttgacattaatcaaattaaaaattaaggtataatttttaaatttatgaatgatatttatattttatttaaa

SEQ ID NO: 640865 - DNA, 594 bp, Homo sapiens
tatgcctgtgttccagaatacatacattatcatagagttagcacatcaaagtatttttctaaatggcatttatttgttcaaatggcagcaatttaattgaattttttaatgttaaaaatctaccaagcaatataagtgcaacataagtgttaaacacagtttaagcatagatgttgtactctaaaatgtttaacatttgcttagtgtcacaaacctaattccttgaataaaaagaaaataagaaagatataattaattgctaattttttaagttcataagtgatgaaaatatacaaaaaaattattctcaataaaggctkggtttgttagatatgggttaataaaaaaaaacaggaagaatataattgactaagaagcatgcacaggattcagatcacggcaaaggaaggaaagctacccatgtgatgtagaagggattagaaaactggaatttctgagctggcagtattttaattagctatgagaaaatgatatcatcactacctttctgggctctgattttctcatctgcaaaaaaaaaatttgataatcactaaattctcgattccctagaaaaggttcaagtatgaggaa

SEQ ID NO: 640866 - DNA, 600 bp, Homo sapiens
aagaagagtaatcagatagtgaaatggatggatttccccccattgatggattgattggaaaagggagaccgtggggttacagtagccactcaggaggtgtaactaagctggaggatgaagtatatccagcacttaatgatggtcaagaaccttgtaatctcttcctggttgtacttctgatgttatagaggacaaacatytgctccaatgaccactttcctcatttctatcatgagggagtgctggcctctcaatacaactgtaaaattttataattatctggagacaaattcttctttttattgcaaaacaagatcatttggtttttactgaaggaggaaccaaatagtaatttattttgtattcagtatttagaaatatgaatttaattgtggatggtgaagctttttcagagaaagcacgtgtgggtatgtgtgtgcatgagtcccatatcatttttcttatttatagtagtatcctatctgatactctaaatcaattagcaactgcaactttgtcatgtggattttcttatttcactctatttttgttgagatcatcctttcagtatcacattgggaatgactaaactgcagtaga

SEQ ID NO: 640867 - DNA, 527 bp, Homo sapiens
gcaatgggactggcttcatgagctggcaattgctgcagctgcccagggtcccaagcccagaagggcattgcacttgttttaatgttttattcttgctgtcttgaaattcttaattatttttgaacaagtagcctcacattttcactttgcattgggatctacaaattatgcagctattcctgcattacaaccttaatgcttattcaaattgtatttagttaagagttttccaggagccatcattatagttggattccaagtacccttcaagcctccagtttcaatgccaacaactaaactaaaaagattttaaatatcattctcaattattacacaagaaccattttctacagaataattttatattatcttgcttgaagcttccgtcagtattattgagtatgactatgaaatgtttggcaaggcttacattgaaaaccacaattacagrttagtcttagagaacctgatactgcagatctagtttggttgacactggggatgttgtctgctatctaaaccccaag

SEQ ID NO: 640868 - DNA, 629 bp, Homo sapiens
tactgcgcccggccaaactgttttatcctgaagatatcctgaagatagacaaacctttcggtaccaacagtgtaattgcagcttaattctcagctttaggccttgaaactctgcttcccacagtctgtgtaactcttgaagtactgagttgaaatcatgaaaggcctttatttattctttagtgatatatctaattaaaatagtttcatttctttacttagaggggtatttggaaccatgagaattaggaattactggattaaaaaagcataatatctatttagagttctatcaagcatctatttatctttggagagtcgtgatggttttggaatatagtaaaggcatgagtaatccagtccctgtcctcaagaactttctrttcttctcaggatctgtgcatatgatgtagggagaaagccccccttaaataatacaattacatgttgaacaatatagcacaattcataggtgcaatgctttttgaaaaccaggagagacccatgtgggtagcacatttgaagaacgaagatactgaatgaatggatgaatatcttgaccaagtaagaaagataaggtgaatggtgacggttattttaggaaggactgaaaaggatcaatctagagag

SEQ ID NO: 640869 - DNA, 629 bp, Homo sapiens
tactgcgcccggccaaactgttttatcctgaagatatcctgaagatagacaaacctttcggtaccaacagtgtaattgcagcttaattctcagctttaggccttgaaactctgcttcccacagtctgtgtaactcttgaagtactgagttgaaatcatgaaaggcctttatttattctttagtgatatatctaattaaaatagtttcatttctttacttagaggggtatttggaaccatgagaattaggaattactggattaaaaaagcataatatctatttagagttctatcaagcatctatttatctttggagagtcgtgatggttttggaatatagtaaaggcatgagtaatccagtccctgtcctcaagaactttctgttcttctcaggatctgtgcatatgatgtagggagaaagccccccttaaataatacaattacatgttgaacaatatagcacaattcataggtgcaatgctttttgaaaaccaggagagacccatgtgggtagcacatttgaagaaygaagatactgaatgaatggatgaatatcttgaccaagtaagaaagataaggtgaatggtgacggttattttaggaaggactgaaaaggatcaatctagagag

SEQ ID NO: 640870 - DNA, 528 bp, Homo sapiens
gtgtcttaagtgtatcatgctactttttaaattaagaattaccctgtttccctctaaaatgtgtttgaattagaagggatcaaggaaaaaaagacccttttattgtaatcaaagggaacatctcttataaagaaaaccacatagtaataaataacattaatgtaatatgatttaagcagttttatgattctactttgctgcatattcagtattatgtatgtctgtatagatgagacactgtgagagacagatttgattttttactttgagaagaaaagaaaatttgtattattttgttgctgccatatggcaaatagaatcataataatgggcagagcatataattgcatatgtcttgggaattcaagatggctgggtgtcccaaacagaggaacatatcctcccctgcctatttaaaattggtattcaatattgaaaaaasaaactttcatgtcaagagatataaggcttaaaatgaaaacattgctggaaaaataagtgtataagcagatatatatatgtaatata

SEQ ID NO: 640871 - DNA, 648 bp, Homo sapiens
attaccatacctaagctttagaagtgcaaaagaagatattttttctttccatcttggttccagaatttctttgcctagcaagagatactatggaccagtagcaaaatgggtccaagaagagaagtgctatctctcttttctttttacataacttagatgaaaattataactatgaatatgtggatacactatagaatttccaactaagcaattgggaaatgattcattgaagagctagatttatgttagttcttaatccaagcatttagacatatggatatggggaaaactgaccttcaagaggacataaaactattaggaaagagaaggatgttggaaattgagatgcagacatagtgaatagctagtggttccatttggagagwaagcttaactgagagtggactgaattcctttgtcttgaaaacacagttgacagctggattgattaattcatttctggagtccaggttaaattgtttgtggatgttgtgatcagtcgattatttacaattcaatgagtgaatctttcattgcccatggctgaacacattaagaaaatggaattgagttccttcagtgttttgctttggatttcctttattaacctttgttactgcctacgccatttcatgtctctgattttgc

SEQ ID NO: 640872 - DNA, 447 bp, Homo sapiens
tataccacatatcttcctgctccaaaaggggcacatgtgtgctgtggggtgcccagtgaaatgccaataattccctattgatgtgaggatgacggggaactctctgaataaaggagtcagtctaaataacaaatagagagaggctycctaaaagaaatttatttgggaatagggcattgcaatggacatatgcataccatagtaaattatgtgtatgttcagggaggtaaaggaagacaaaggttttcaaatgaaaaaatgaggaacattacataaatgtttcaaaataattattcttggctacaaagatcaataacaggggtgatgccagtctgtggttagacaggcaattgctgggcagataaccttgcagaaatatgttttgtgtaatgttgtgatggcctttgtgcaaggttgtagtttttgcagtctttttcagtatcagct

SEQ ID NO: 640873 - DNA, 394 bp, Homo sapiens
aaaaataaatgaaatcatgtcctttgcagcaaaaagggtgcagctggaggccattatcctaagcaaattaacacaggaacagaaaaccaaaccatatgttctcacttacaagtgagagctaaacatcaagtactcctggacataaagataccaacagtagataccggggactgctaaaagaggagggatggagaggggaaagcattgaaaaactaacagytggatgctattctctgtacctgggcgatgggataattcatactccaaacctcagcatcacacaatatacccaggtaataaacctgcaaatgtacccactgaatctaaaataaaagttaaaaaagaaaaaaatatatatatatataaacattatatgatccagtaattccacttc

SEQ ID NO: 640874 - DNA, 545 bp, Homo sapiens
tgctcacgatctacaggacgagtacaatacaagtttccagtgtctctctccacataaaataaattccgaggttcttggtcaactccaggacctcttatggaatagtatatggtatagttttgggccgtgtcagattgaacctagaaagtagatattatatacatgagacaaatctttatttcagcagagctttcatctatatatttatgaaatctcattgccattttattagtttaaataattgcccttaatttattattatatataaattaaaacagcaatagaataagaaagtccaattgagaaatttcaagagcaaggcatgagtaaaataatgtagtgcatcttagttctccagaataactaaaggaatatttgacaggctagatggtgtctatacatggaaaaaacacttaagactyttcctgtcttagaaaacaaagtattctgagcatggaaaattattctgtcgtcaatgttttaaaaaactgagtttttattatatgtaacataacatttaagaaccgagtttaaagtgtactgtc

SEQ ID NO: 640875 - DNA, 485 bp, Homo sapiens
gcaaggcatgagtaaaataatgtagtgcatcttagttctccagaataactaaaggaatatttgacaggctagatggtgtctatacatggaaaaaacacttaagacttttcctgtcttagaaaacaaagtattctgagcatggaaaattattctgtcgtcaatgttttaaaaaactgagtttttattatatgtaacataacatttaagaaccgagtttaaagtgtactgtctgcagggcaaaaatgtggacaataatttccttaatgagttttttgttctttgccaacatcttccttataggaactgagtaaaaaaaaaaatatgagtgagaatagaaatggaataatatttkggaatgtgtaatattctgatccttgattcgaaaagcaaatttcctccaagctgtgttcatcctctcagtaacatcctatctttatatcaggataactgacacaagctgttttctaacaatttctcaactttaa

SEQ ID NO: 640876 - DNA, 537 bp, Homo sapiens
aatttgtcttcagtttaatggatgcatgtcactttcagctaaaattttgaaagggaaagtagtgactatgtaaaatgaacacctgtatacttgctgccacatgcgtgacttttagaaacatgctatactgaatttatagtgtgatgtatgaaacagaccaatcatgtgcattttttatgtataggaatccattagaggacacactctgattaaaaattaaacaatgaaaggtaaatcaaagcaattacttttatgttagtaaattttggtgtttaaaataataataataaaaacrttgtgtttttccccttggcagaaagtgtatctgtgtaatcaagatgaaaatcacaagcatgcccaagactatgtcctgacatataactatgaaggaagaggatcggtggctgggtctgtaggttgttgcagtgaacgacaagaagaagatgggcttgaatttttggataatttggagcccaaatttaggacactagcagaagcatgcatgaagagatgagtgtgttctaataagtctctgaa

SEQ ID NO: 640877 - DNA, 586 bp, Homo sapiens
agctttgtttactatattgtaaaacgtatgtaataacttcactgattaactcagtgggtacagtgacgatccaacaacagcctaggtgggagagtgctgaaaactatcaggaaggcagcacaggtatatacataggaaagagaaaaccaaatttactgaggcagcaaactgtttcagtacatttttaattgcttatgagatatgatatcaaatcaataatatcctaaacaaaaagtaaatgcttttaaagacaaacattaacttattgccatgaagtgatttggagaatatttatgtgttactccacacaataggcacataactttgaaatataaaattattttgaaggtgtatcttctcataaataaaagttaagttcattttagaaaataatttacttaaaawttttcaatggtttagtgattcatggtgaaccaagtccaatgcaacatatacgtaaacacactgaaatttaattttgttctgtctgaaactttacaatggatgtttctcaaagattcacattctttttttctagttttacaaacatctttgaccaaaagcaagacagttaactagcatttac

SEQ ID NO: 640878 - DNA, 568 bp, Homo sapiens
ggatcagttgtatgaccccctttattatttcctcttcaccagttctggttttctaggtttgaggactgaaatcttgagaagtaggatctgatctttcttccaagaagctcttctctccccacctgtccttgtgttctttatcccatcaatagctaagaagcagaacctattacttttgcttaaatgttttaaattaagcaaatagatacattatgaggctgcattttaaactttagatatttcaaataagacatgcaatatagagtcttaaggtaaaacaaaagagcataatgctaaaaaacaggcaacaaaaagaagctagagctttgaaatagctagtcaggtaaacagagcactttaatttaaaagaacacaccctaaatcttgttttatagaggaattttactgtgtcatggatttggagcatattcttctcaagccatttggtatatcctaaattctaggtataygtgagattaaagaagagatactcactgatgtgcctccgtatggagtgatagttggtgcatgggaaatggcaagggctgttttgtttcattctctcttc

SEQ ID NO: 640879 - DNA, 596 bp, Homo sapiens
ggagtttctgctagccacatcttttctgtttacttattttgttaggattcaagggagaggacagagcagaacactcactgcttttcagttaacaaatatgaaggcaaacttgctgatatattygcttgtataatttttagagtgtgtttcactgaccatcagcatcagaatcaccctggtgttgctgaaaatagagatccctcatgaatcagtcacaggagtaacaggctagtaggggaaaagtatagaagccttcacttttcaatacattttctaggtcattttttcttactctaaagtttgacaattgttagggttttagtaactgggtttattgattatttggtggtttatgaaacttaagtatttaaaatttgccttttcatataaaacatattaagcaaaatgctagaaatgtaccaaagagttgaaacacattgatgagtaaaatttcacaatgtctgcaaattaagcatttcagaatgtacattgttccctgtggtttctactttctacatgcatgtgaacgagagaaatagtcttaaggtaggaatgcagaacaaagccacacagaaaacatttaataaaaattaaca

SEQ ID NO: 640880 - DNA, 596 bp, Homo sapiens
ggagtttctgctagccacatcttttctgtttacttattttgttaggattcaagggagaggacagagcagaacactcactgcttttcagttaacaaatatgaaggcaaacttgctgatatatttgcttgtataatttttagagtgtgtttcactgaccatcagcatcagaatcaccctggtgttgctgaaaatagagatccctcatgaatcagtcacaggagtaacaggctagtaggggaaaagtatagaagccttcacttttcaatacattttctaggtcattttttcttactctaaagtttgacaatygttagggttttagtaactgggtttattgattatttggtggtttatgaaacttaagtatttaaaatttgccttttcatataaaacatattaagcaaaatgctagaaatgtaccaaagagttgaaacacattgatgagtaaaatttcacaatgtctgcaaattaagcatttcagaatgtacattgttccctgtggtttctactttctacatgcatgtgaacgagagaaatagtcttaaggtaggaatgcagaacaaagccacacagaaaacatttaataaaaattaaca

SEQ ID NO: 640881 - DNA, 534 bp, Homo sapiens
aaactcccaggcaccaaggacaggagtaaaccaatagggaatgagaggctcagaaagcccagaggtgaaaggagcagagggtgtcaatatacacagatgtgatgcagaatgaccaatgaaatcaagtaaaagggatttatccaaaagaagtaagagaatagtgtaaagattctactcacatgcaaggatgtttgtctcagtggcattaaatatatgaataactgaaaataaactaaatgttccatgacagggaagtaattaaatgatgtatgatccattactgtgatacaatgtaccataattgaggacaatggaaacaatgatcacacacagacttcgcagtcagaaagaygtggatccaaatctcagctttgttcttgctgtgttaccttgggaaatcacagaaacctctaatttctagcatatcaaataaggacaaattaggaataaattatataattcacataaagatcctagcttactgcttggctcatcagtatatcaataaccagcagctatcactattgtgatatg

SEQ ID NO: 640882 - DNA, 442 bp, Homo sapiens
ttgcataatgaatgcaagtttaaaccaattaaatgtgttcactttttagcaagctaagctgctccttatttctcctgtagtagacacaatcacagttaatctttgcacaatgcatcgcattctccatgcaacctaacagagcggtctgggatagagcctgaactttgggtcccttggggcccaacaggcaaggttcagatctgggctctaccacaaaccatctgtgtaacctgaacctccctagtcttcagtttcctcatctgctttaaaaaattgctagaacatagttctatgtaaatgttcggtgttaaaatttatttggtatctactgtatgtaagatatggcctctgctctcaaaaatatgtagtcccagaagtgatataatatgttcacggagaygtactattaaaaagtgccacaaaaaatctgtaatggaatgtt

SEQ ID NO: 640883 - DNA, 502 bp, Homo sapiens
taaaatatgtttcatcttggaacagcacatttaaataatgttctaaagcttttgaaaaagcagactggaaaactagattcattatgttgcacctaattgtcctcttagcattctaatacaatgctaagataaagcttaacactatagatggactttcatattttcttttattgagcaatgaaaatgatgttgctctaaaactgtgttactttggctgaatagccaagaaataataagcaaaattcaagactcaatgatagcaattaatgtatctcagttgcctyactgataccttattatttttatctactttacatttttaaatttcctaaaccttcttttaagaaaggaggcagcggataaacattgattaaatacacaaagtgcttgtctactctcttttattatgttaatgtcaacaagcaaagaccaggatcagggagcacatatctcccatcaccacttcacagctgcctaagggaccaaccccaggaaaagggct

SEQ ID NO: 640884 - DNA, 568 bp, Homo sapiens
agcctctaactgtaccacatccaaaattgaaatttcaggcatcataatctctaaaaacttcctgttagctttctagttctcttactctagcactcctattccaaatatttagcaaaactggaaagctctatcacttcataggctcattgatctcattttcttcctttctcagcttaaatttacttwttcattgttttcatccattgtcccataactctcaattccctccgctttctcccctcctttgtaatcacttggcaagaccccattacttgataaacaccattttctacctactttgtgatttttacttgagccctggaacatggggccctggaactctcattcttgacccacaattgtaccctgttacccaagttcagggattttgcaaacagtgagacacaacccagtggagggacataagattaatttcagaggtgacaacatgcattatcaatgaattagaagacgagaatagaaattgtcagagtatattagacataggaatagtaagtattgttcacaaaacatttggtccagattgtatatatgaattgcagaagag

SEQ ID NO: 640885 - DNA, 626 bp, Homo sapiens
tataataggcatctcaaatttcatgtgttcaaataaaaccccttgattcttagcccaaattattttcactcacaatattccccatttattcattctattcacacaattagtccaagtcccttgaaaggcaccctttagttttagtcttttctttttctcacaatccatctccaatctataacccagtccgtcctgtgaggtctaacttcacgttatattacaaatccaagttttacttcatctgccatttgttgccctctgcaacctgtgttcttgcaacaaccataagtgattttaaaaatgtataaattagatcatgccaccctctaaatcctcagtggcttttaagaacagatgagattaaaacmaaacctaacctctttaggccattgagttgttttttatctttttttttttctacttcttgttctagtacccctcattacttcattctgctccagcacttgtgggcttctctatgttctctgaacatacccagctatttggacagggcttttacacttgcagttctttcaggctagaatgcttttactccagatcatcaatctcttctatcattcaagtctccaaccaaagttggtatctcagcaaatctttcccaggaa

SEQ ID NO: 640886 - DNA, 564 bp, Homo sapiens
aattagctatttagtgttcattgagtaggcgcaatcccacaacaataaccagttcttttcttgcattgctttcaaggctcatatctgcatctgtctttcaaatgttataagctacacccctccctaactgataagcactagtcttgacttacacacatctatgacgggttataccagatytctgtttctctaaacaactctaatacagaggtcttgcctgaacatttaaaaactgagtagctagtaataatcctagcaggtgtgtacgcatgtatcaaaaaggttgttttgttccccctcctagtaagattgcagcgttcttgacaagttcaataaaattggttatttctccctgtttccaagttctgtttagacaatggccaaggaaagccacgaacttactataatccttcacttttcaaatgagactctctgacaaaaattgtcctgctgtgtccctgaagtaataatatttttttaagtttcagaatacatatattggagaaaagacatctgccagaagaactgctttatttcctgctcaagacaatattaagtagtgat

SEQ ID NO: 640887 - DNA, 553 bp, Homo sapiens
ggtcacttttgctttctcctttgtgagaaagagattgtgatttgatgcgctgtcagcaagtcgagggcatcattctgagacagtgtgctttttcgcagccattatggagtaatttatgtagtcgattcaggcatattatcatgattgtgtaaatattggtcattgggtatcaggcactcttaggctcccagcccccatccacactctgctcacctctcctggtggttaatgtctttgaatcttttttagaaatagaagacaggctcttttaaaactgtaggaagacctagacrtggattgagcttgtgcatgaaatggaatgactggcagtttattttgcacgtctttagtttgtaatatttatagtcgtgtattttcatttaacctctgttcaggctatttggctttaatttttcattaaataagtatcttcaataaataaaactagatggcgaatattggatttatggccttcaggggagaggcgagcaagagacatattctgacagatgtattttcctgaagcaatttttttgggttaaatttgtaaaaa

SEQ ID NO: 640888 - DNA, 619 bp, Homo sapiens
ttaaaaaactttatcccagagaaggctgaatatgtgatttcttatagatgttctgaagaattgaaactggctcaagaagcacctgtcctgcctttgcagacacctggtggtctagagacctcaagtgaggaattactgtactgtatgttactttctctgaactgtagattcccaggagtcatgggagattggattccaaggtctgtttatggatgttctgagactttttttttttgaaacaggttctcgccctgtcacccaagctggagcacagkggtgtgatcatggctcactgcagcctcaacctctcagacttaagtgatccttctacctcagcctcctgagtagctgggaccacaggcatgcaccaccatgcctggctaatttggtattttttgtagagagagggtttcactatgttgccccagctggtctcgaactcctgggctcaagtgatcctcccaccttgacctcccaaagtgttggggttacaggcatgagccactgtgcatggtgctgagactttttttcagtgtctcagagactgttgtatctagaaagagatcttagaggtaatctaatctggtctagagtttttttttttaaggctttatttata

SEQ ID NO: 640889 - DNA, 619 bp, Homo sapiens
ttaaaaaactttatcccagagaaggctgaatatgtgatttcttatagatgttctgaagaattgaaactggctcaagaagcacctgtcctgcctttgcagacacctggtggtctagagacctcaagtgaggaattactgtactgtatgttactttctctgaactgtagattcccaggagtcatgggagattggattccaaggtctgtttatggatgttctgagactttttttttttgaaacaggttctcgccctgtcacccaagctggagcacaggggtgtgatcatggctcactgcagcctcaacctctcagacttaagtgatccttctacctcagcctcctgagtagctgggaccacaggcatgcaccaccatgcctggctaatttkgtattttttgtagagagagggtttcactatgttgccccagctggtctcgaactcctgggctcaagtgatcctcccaccttgacctcccaaagtgttggggttacaggcatgagccactgtgcatggtgctgagactttttttcagtgtctcagagactgttgtatctagaaagagatcttagaggtaatctaatctggtctagagtttttttttttaaggctttatttata

SEQ ID NO: 640890 - DNA, 584 bp, Homo sapiens
gcccacgctatatactatgctcctccccctccagcaagatggctgggaccccatgtcctagcctgctcttgcccctctgtggatcccaggggctctgtgcccatctctaactcttgacccttaaggcctctgtggtgttctgatgggggtaaaatgttccccagtgtcctgtgccacatactgccctacarggaaggaaactgggctgccttaaaagcctagtatcctaaagaaaacccctctcttgtttgtggttgttctttattgcatgctctctaagacttggctcaaagggctgaggtccatgagccatactggactccaaattatttctcttcctgtcaactcttcataactcttaaactaagtttaccatcactgccttttgtctcttgtgcaaatggaccccagtagtctcatcctgtggatcttccatattttccattgatctataggggacacagagctcagatcctgacactgagactcctggatgtttttattatttaagaggcagggaataagtataggggagcatccaggccctgaggctgggacacaggtggggctgtccctggcagctt

SEQ ID NO: 640891 - DNA, 569 bp, Homo sapiens
ttagatacggtgtgggacaggtaggtgcctaggtaggtaggtgggacaggtagataggtcatgagggcaagatgagaagagcaaactgctccttcctccagcccccttttctgtcctagccaggaggggagggctctgtgccctcagagcccagggtcaacgaatgtggagtggtaacataaaaaatgccttaggagaggaactgtcctaggtagcaagcggggaggagcttctgcttacccaaaagggggaattaaggctccatttctattcagccacaatccattcccagaaatcaagaaatattcatgagctgcaagcattggatggcaatgtctctctgtcatcatcaggaatgacagattcctcagagaagaggcagagctcaggtttcccatcttytctaagcacgtcactcagtaggatttcaaatacagacaactcttgaatgaatgcagtcactacccacggaagcaaaggttggaggatgggaaaattcagcagaatgttgaagactatggagttggaatcctgactccaccactggtaagctgtgcgacattgtgcaa

SEQ ID NO: 640892 - DNA, 550 bp, Homo sapiens
aaactcctgacctcaagtgatctggccaccttggcctcccgaagtgatgggattacaggcgtgagctgccacccccggcctggaaacctctgtttctatcattctgttacttcctcatctagaacacaggctctccaaagtgaggtactctgtgttccatttaattaatgtcataataatctattgatgagctattttgtaatggatgctggactgagtaccttggacagatgcttccatggactcttcaccaaatcagaaagtaggcattgttaccctcatcacagatgaggaagtgaaactcrgataaattaaattcagatcacacagtgggttagtggttgtgtcaggatttgaacccagatctataggctcctgaggaacacatgtgcagtaaagccttttgcaacgtgaaagttaattgcggagggttcctgtctgcacacctgcatctaagttgacctgtgtacaggggacacagggtgggaagaccccagtgtgagaagcgcagtagagagggagcgattcttttcaccttggcatggccccc

SEQ ID NO: 640893 - DNA, 579 bp, Homo sapiens
gaactggaaaccaggctttcatgaaggtcctagggtgagctatgcactcagcaggtccctgggaagattacagagcccggcratgacaccaatgatagggctgaagatgttagcaagcagcagagacttcttggcccagggagtcaatacaacacatttgaagttttcagcctatgcacacattggtattgcattaataagagaacattgtgaaggggaaaatatagccagaaacctaaagttttgctgaagtatgttctcctacaactggttaattaagagtcggaagatcactctgaaatgtttcagttcatgtacctacaatattcaccttaactttataatacgtcagacaagaaaatgatgtcttagagaaattctaggaaaaagtcatttgaatgatttgaatgcactttaaatcttttaaaacaacacccacagtatttgaaattctacatttaaaaatttgtctttagttgactaataccagtgtgtgtgtgtgtgtgtgtgtgtgtgtgtgtgttttaattcccactctccctatggtctaagattaaatgtaccatgaggagaaggaga

SEQ ID NO: 640894 - DNA, 491 bp, Homo sapiens
agatttctgaattcttagcgtttttttggaactagcaatatgcagtatacttagagcgtgttttgcttttctattttttaatcatgtgcattttaagtatggcagtggatagaaaacagacacatctaacttttgagtcatgaaacaaatgatggacaattttaactcatcaaagtatatatgcatattcaagattagcctctgtccagaatgtctcactttttagtcactttgagaattgtatagaccacaattttaaagtttcatttatgtctcagatttttcattaagctcctcttttttactataagctaaaatgaatgttaatcttcttgttctcattagagaaagcatgagtgcatttcaaaactgtgtgtgcatggttttggttttcacaatgactgggattgagacatgayacaaagtgacaggggtcaggtagattgtccgcaaggagaggggtgatccttcacaagaaaagatttgtttgt

SEQ ID NO: 640895 - DNA, 624 bp, Homo sapiens
tcttgtttcttgcttttgcatttgatatgatatcagcagattactttgaatcagtaagatctctatgctgattgttatactttaaatctcacagaattataatacttttccctgttttcctgactccttgactaatttttctcaggatatggaaagtcacataaattttcagagaaatgccaggctagaatttctatacagttacactgattatcagagcaaccaaatccctggtttgaccagttgtactttatggtccacagtagattgttaatttcattaaaagaatatcttccttcattggagytaaatatttgaatattcccctatgtcaaaactctgggaccctgaggatactattagtaaatatattttgagtcagctagaataggtttatatcccctctataacaataaatagaaatcatgttttatcagtacttaactatccagcacagtgtatgataataattgagtgtgccagctctggaaccagaaacctttgactcaaattccaataataccattgatcacttatcaaatctttgggccgttacttcactgagtaaagtaaactttagtttcctcatctgtaaagtaaactttagtttcttcatctgtaaaa

SEQ ID NO: 640896 - DNA, 556 bp, Homo sapiens
catgatatcagttcttttcccaaagaatacattttacactgtaggggtgtgttggatcaagggtaagacacatgacaaaatcatagactagttcaattatgagctgtagattatcaaataatagggaatcatacagagagagraattactgtagaacagagaagctgtaaatatggaaaaagagttggacttcaacttaaatgcttggcaaaacagcaaggaacctgctccctacttcttccttgtacttttcctgcaaactaggcaccaagttttcagtccactttaaaactatttagaccataattacaccaagaattgtatattatcatatttgccttttgtaggccactgaggacatcatctataactcagttcttgtcagttgagaaactggtagaaaaaggaaggagactagatggaaccttaagaaggtgtgccttttaaaaatgtccctacaaggagaaaaagaagagagaaagagagaaaagtacagaagaacagagatgaagagacagaaaaatagtgagaaacaaagaggcagagagaaaggaaa

SEQ ID NO: 640897 - DNA, 556 bp, Homo sapiens
catgatatcagttcttttcccaaagaatacattttacactgtaggggtgtgttggatcaagggtaagacacatgacaaaatcatagactagttcaattatgagctgtagattatcaaataatagggaatcatacagagagagaaattactgtagaacagagaagctgtaaatatggaaaaagagttggacttcaacttaaatgcttggcaaaacagcaaggaacctgctccctacttcttccttgtacttttcctgcaaactaggcaccaagttttcagtccactttaaaactatttagaccataattacaccaagaattgtatattatcatatttgccttttgtaggccactgaggacatcatctataactcagttcttgtcagttgagaaactggtagaaaaaggaaggagactagatggaaccttaagaaggtgtgccttttaaaaatgtccctacaaggagaaaaagaagagagaaagagagaaaagtacagaagaacagagatgaagagacagaaaartagtgagaaacaaagaggcagagagaaaggaaa

SEQ ID NO: 640898 - DNA, 611 bp, Homo sapiens
gaaaaatagtgagaaacaaagaggcagagagaaaggaaagaagtcaaagtatcaaaggagaaggaagaaagagaagaagggcgaaaaccaaaccaaaccaaaaccaaaagttgaggagaaaaaaaaaagtcaggatatttgaaatgtttcagaatgttgtgtgaattcttatatttaaaaaatacattctgtgtgtgtgtgtgtgtgtgtgtgtgtgtgtgtgtgtgtgttggtgctgtctgacagatctctcgcgttaggartgattggttttacaacagtgattggccagttatgtttgaaaactggtctcatgtgggaaaacttgctctgctccctataccaggaagagcagggtcctggagccagagttcagggcaatgaaaaacagccttgtcaagaactcttaaggcttcatgaccctgcatattcaagtcaataggttgtcagatacagtgtttggtacctactaacctattgacttgaatataccaggttaatataagattttctttggcccaaagtgagttgacttcaaagccagtagccatagactagaaagccagagaaaaatgaggctgtaagaacaaaggaatctggggaaccctctc

SEQ ID NO: 640899 - DNA, 602 bp, Homo sapiens
tttagttctctcatgcattcacatattttctctgatgatttggccaataatagcataataaaataaaaagacaacaataataaactaaccagatctctccaaaagaagaaagtaacaaaatcaatgtctgcaaccaaaatagtagtgagatagctattcaagagtttttggtctgaggatctatattgaaataatcttggtatggacaggatacagggaaatattgggtataagaggatggttccctggcaaaggccccaccctcaagcctgaaaacccatggccctaaatgagaaaagccattcctgtttttgcacccaaatgttgccttttggcccaccatgcccacccaccccccatcctgtacctacataaactccaaaccccaggctccacaagcagcagagcagcagagtggcatggcagagaaggagaaaagagaggaggcatctgaatgttgagaggagtttggctggggacagtcagagaggaggtaagccacaggaaagtcaaactccagggaaaaatcatcttcccactccatcccctctgcagctttacatctagccgagaamcacctccatcactgaataaaatcccca

SEQ ID NO: 640900 - DNA, 590 bp, Homo sapiens
ccacacccctgtctcatgtgccatgaggtggtcagggaactttcctgtttcaatctgattataaaaattcttaaactttaaaaagatgcatttttattttaatcccatttttaaacaagttttaaaataatcatgtattgaagatgatataaaaacactttttaataataacctctatttcagataaatatagcccacagagtctaaagcattgttgataacaaaagcgcataatagagctgaacttagttggatgtgttctttatgatttccaggctgtatgccacactttcagtttttctctatacaaatctcacagatatttcaagatatctactttcttyattaaaaaaaagtacactgtgcctaggacagtgggaaattcaaagtacaagaaatcttcttgcctctagtagagttcagagtcttaatgggataaaatgtcctgtttagatgaaaagttaattttcagttcaaagccatatgccattcagccaaaagactatcttagaggaaaagccagattgttctgggaatcaaggaagctttccttggaagatggacttgtgaggaatagacactgatgagaa

SEQ ID NO: 640901 - DNA, 571 bp, Homo sapiens
aatgtgagctttcatttgaaaaaattgtctggaaggatgaagcctaaattgttaacagcaatttcctctgatgagatttgtacaattttggtgtttaagtgagaataggcttaaagtttgttctgtatatgtctgcagttattgaggtttttcacaataaaatatatatttagatattactgttgccattataagaaaaataatgtttgggtttacagactggatggatgagttgaacaaagcaagagaagctagatcttctagcttcacacacaagctagaagctagatacacacaagcatcagaatggtgaagaaagtatagtgcttagagtccacggtgacaggagyagagtgtggtgataggatggagtttaagaaatgttatactataaaattgggtctggaactcattgcctaaggtaaggcacatgatggccgatgtttattcatttaaaaagtcatcatgattttcaataaatatgtattcaacatctactctatcattgttcttgggggaaaatagctcagctttcttggaacgtgcatttcatggagaaagaggggacagt

SEQ ID NO: 640902 - DNA, 343 bp, Homo sapiens
ctaacacctagaacaccatgcttcaaaacaagatgctgggatagaggaaagctcatttaacagtcttaatattgtcagttagtattaatgtaacattcatatttgtgagagataacattgactcccagaggaaagaatgaaaataccctaatatttgccatatttacccatctaaatcttatgatctgaatctcagtgacctttrttgatcagtcatagtaagcctaggaatacaggagtgaaagcttattaaaaagttttacagtaggaatgaaaagaagtaaagtaaacatggaaaagggccaagtgggtgacttgagagatccacgtgctctccatccga

SEQ ID NO: 640903 - DNA, 632 bp, Homo sapiens
ctgttactccttgtacttactctttgaagaattatttctagtctggttaaataatacatgtttgactatctcaagtagattgttcagttgaaaagggcagggaccttatttaccttgaayctctctatccctggagtctggctcagtgcctggtacatagtgagcacttaatagatttgtatcaaatacagaataaaagaacttgaaaacttaatagatttgtatcgaatgcatgtattccattgggatatgacaaagtactcctaaaaagagccactggcagttctctataggagttcaaagacatcataatattcttctacacattttttgagatcttacatagctctcctgactttctgtctccagggttcttatgaccctccgtccgtacctccaattactgcacttcctgccccatcttgtaaatcatttttctaatgttcagactgagattctcaaagggcacactgaacacattgtcttttgtaatcttttaggtatgtcacaggagttatattatattcttaatagattttagttcataatatttatgcaaatataatgttatttgccatttctaacctagaaagaaaagttaaggtgaattcataaaatccttgttgtgcact

SEQ ID NO: 640904 - DNA, 632 bp, Homo sapiens
ctgttactccttgtacttactctttgaagaattatttctagtctggttaaataatacatgtttgactatctcaagtagattgttcagttgaaaagggcagggaccttatttaccttgaacctctctatccctggagtctggctcagtgcctggtacatagtgagcacttaatagatttgtatcaaatacagaataaaagaacttgaamacttaatagatttgtatcgaatgcatgtattccattgggatatgacaaagtactcctaaaaagagccactggcagttctctataggagttcaaagacatcataatattcttctacacattttttgagatcttacatagctctcctgactttctgtctccagggttcttatgaccctccgtccgtacctccaattactgcacttcctgccccatcttgtaaatcatttttctaatgttcagactgagattctcaaagggcacactgaacacattgtcttttgtaatcttttaggtatgtcacaggagttatattatattcttaatagattttagttcataatatttatgcaaatataatgttatttgccatttctaacctagaaagaaaagttaaggtgaattcataaaatccttgttgtgcact

SEQ ID NO: 640905 - DNA, 632 bp, Homo sapiens
ctgttactccttgtacttactctttgaagaattatttctagtctggttaaataatacatgtttgactatctcaagtagattgttcagttgaaaagggcagggaccttatttaccttgaacctctctatccctggagtctggctcagtgcctggtacatagtgagcacttaatagatttgtatcaaatacagaataaaagaacttgaaaacttaatagatttgtatcgaatgcatgtattccattgggatatgacaaagtactcctaaaaagagccactggcagttctctataggagttcaaagacatcataatattcttctacacattttttgagatcttacatagctctcctgactttctgtctccagggttcttatgaccctccgtccgtacctccaattactgcacttcctgccccatcttgtaaatcatttttctaatgttcagactgagattctcaaagggcacactgaacacattgtcttttgtaatcttttargtatgtcacaggagttatattatattcttaatagattttagttcataatatttatgcaaatataatgttatttgccatttctaacctagaaagaaaagttaaggtgaattcataaaatccttgttgtgcact

SEQ ID NO: 640906 - DNA, 254 bp, Homo sapiens
gaaaaagactaagtaggcaaatcacaaaatagtaaatctgaatagccaataaatatttttaaaaaggcattcatcataattagaaatgatggtgccaggagtggtggctcacgcctgtaatcccagcactttgagakgccgaggtgggtggatcacttgaagtcaggagttcgagaccagcctggccaaagtcgtgaaaccccatctctactaaaaatacaaaaattacccaggcgtggtggcacacgcctgta

SEQ ID NO: 640907 - DNA, 649 bp, Homo sapiens
atttctgtggatcttcatgccaatatctggactcctgattttatgtcctctgattttttcaagcatttctgataggccactgtgaatcccgaaaagtcctaaagtagctattgtattaatccgaattccccatgtccttggtgacccatccacacagacacatttttcccatttctgctcaactgcaaatgatatcaatgcagccaacttagaagctaagaaagagaactcccacaaggtgtcaaggtatgtgttttggggtaaagaaatgagaaaaatggacaggtaattagacattaatctttcccagtttttgaagaaaacatagatcattcttatttcctcttgatgaggggacattgacacacagacatttgctggagtatatgctctcaaagaggtagtttaggattataaatgttcacaattccagactagaaaaggtgcaggmtgatgatgaagctaaatcagggctgttgaccagtgagtcacaggtcctgagtaagggctgttgaccagtgagtcacaggtcctgccatgctgcattctttttatcaggtcaggtcactctctagttggtgtcaaagtgataggtctggccaagtgcaaataatgttgcctcaaactggttttgagagaggtcattagg

SEQ ID NO: 640908 - DNA, 583 bp, Homo sapiens
gacagcctggtcaaaagattctgtgactaagttactgtataatcatttgcaattctctttcttactctaracattgttttcctcatttttatattgaaagagttaagagatgctaaaaattctagatctgaaaattggataagcctaagaaggtttgaggtagggaaatgtctattctaagctgtttgactactggacttggggtaggagtggaatttcttttttacttcctaaattatagttactttactctctacttatagtcacagctgggtgatcagacattaagtagctatttaatgagaagcaggcactggaagcttgctccagaaaaacaatcacaggacatgttggtcctgagagaagtcattccttggtaggacctattgtttgaaggaggtgggggtgaatttcatcaaaatggacagtgtggatattgtgattcagaggattgagagactttgtttcctgctgttattaatttcaagccttttttaaagggattctcctagtgattggtacagtgggattcatttagagaaaaagccttgtgtaccagttggaagttaatgcccaagagcag

SEQ ID NO: 640909 - DNA, 540 bp, Homo sapiens
aaaattctagatctgaaaattggataagcctaagaaggtttgaggtagggaaatgtctattctaagctgtttgactactggacttggggtaggagtggaatttcttttttacytcctaaattatagttactttactctctacttatagtcacagctgggtgatcagacattaagtagctatttaatgagaagcaggcactggaagcttgctccagaaaaacaatcacaggacatgttggtcctgagagaagtcattccttggtaggacctattgtttgaaggaggtgggggtgaatttcatcaaaatggacagtgtggatattgtgattcagaggattgagagactttgtttcctgctgttattaatttcaagccttttttaaagggattctcctagtgattggtacagtgggattcatttagagaaaaagccttgtgtaccagttggaagttaatgcccaagagcagggccagttgctggaggacaaagtggcctaattagttgcttttcaatacttagatcctacaggctaccccaaa

SEQ ID NO: 640910 - DNA, 496 bp, Homo sapiens
aatcaagaagaatccgcacaaatgctatgaaagacaaaaaggcattcagattaaaaaagaactgttcaaagttaaagcagactaaagacatgatagtcatgacaactaagtgcataaatacatgcatgatccttcaatgaatcctgaattttaaaaaactcaataaaagacatcactgggaaaagatgagaaatctgaacaagtattatatactggatgtattgaatcaatgttaagtttcctgagtgttaatagtactgtagttatataggaagatacctttttcttaggaaatacttgctgaaatagggattaaataacatgatatttacatctaacagtcaaaaagattcagaaaatgaaggayaaatagacagcaaatttggcaaaatgttaatagtgactctaaatgagaagtatataagtatttgttacattattttgcaaaatatctataggtttgaaaattttcaaaataaaataatttagtaaggag

SEQ ID NO: 640911 - DNA, 444 bp, Homo sapiens
gttttcttgacagagcaacccagtgcagttcctaaagacttctgattttgtgtagcaccagctcctgttgcattttctgaatgrattagtattaaaaatggagccccaagaagctggttaaatttttagccttctgcatttaagctgtagcccaggctgtgagctagtatcgcatcttattcattatccaacatagaaccaggtttacaacaggcactcaaaatgtttgtgggatgaatgaatgagaaactgccaattctgaggatttctgtttcagaagagttgatgctaagctgttctttctaacaattggttcccaggttcagctgtttcagtccacaccttgttcacagtaagatattcaattcaattcagcaaacatttgttgagtgcttgctgctctgtgcctgaccagaagaaatgaagccaagatacaaataatag

SEQ ID NO: 640912 - DNA, 444 bp, Homo sapiens
gttttcttgacagagcaacccagtgcagttcctaaagacttctgattttgtgtagcaccagctcctgttgcattttctgaatggattagtattaaaaatggagccccaagaagctggttaaatttttagccttctgcatttaagctgtagcccaggctgtgagctagtatcgcatcttattcattatccaacatagaaccaggtttacaacaggcactcaaaatgtttgtgggatgaatgaatgagaaactgccaattctgaggatttctgtttcagaagagttgatgctaagctgttctttctaacaattggttcccaggttcagctgtttcagtccacaccttgttcacagtaagatattcaattcaattcagcaaacatttgttgwgtgcttgctgctctgtgcctgaccagaagaaatgaagccaagatacaaataatag

SEQ ID NO: 640913 - DNA, 505 bp, Homo sapiens
tatttcaagtgtcaaataaatgtgactggagcccaacatgattcarctgaggcaagggtcaaaaggacattttgggtaatgtcagcaaggaatacttattggataaataaaataattaaccactgtgatccatagatgatgccttgaggggagtcaaaatgggttcaagaaaaaggagaaaacctaaccgtgtatcattctcacaaactgggaaaattctaccaatttggggcttagtttcactagcttcatccatatatatgaaactcataggccttccttctaataaatgtaaaataagtaataaaataaatatatctatattaagtaataatgtccataacaaactgagggaggcattattcttatccccatttaccaaagaggaaactgagagaaggggacagtgtcaaaatagaagtataaaatagacagtaatcagaatctcactgatttcccaaaccatgtgcttaactaccatgataccctgccagaaagatcagat

SEQ ID NO: 640914 - DNA, 505 bp, Homo sapiens
tatttcaagtgtcaaataaatgtgactggagcccaacatgattcagctgaggcaagggtcaaaaggacattttgggtaatgtcagcaaggaatacttattggataaataaaataattaaccactgtgatccatagatgatgccttgaggggagtcaaaatgggttcaagaaaaaggagaaaacctaaccgtgtatcattctcacaaactgggaaaattctaccratttggggcttagtttcactagcttcatccatatatatgaaactcataggccttccttctaataaatgtaaaataagtaataaaataaatatatctatattaagtaataatgtccataacaaactgagggaggcattattcttatccccatttaccaaagaggaaactgagagaaggggacagtgtcaaaatagaagtataaaatagacagtaatcagaatctcactgatttcccaaaccatgtgcttaactaccatgataccctgccagaaagatcagat

SEQ ID NO: 640915 - DNA, 505 bp, Homo sapiens
tatttcaagtgtcaaataaatgtgactggagcccaacatgattcagctgaggcaagggtcaaaaggacattttgggtaatgtcagcaaggaatacttattggataaataaaataattaaccactgtgatccatagatgatgccttgaggggagtcaaaatgggttcaagaaaaaggagaaaacctaaccgtgtatcattctcacaaactgggaaaattctaccaatttggggcttagtttcactagcttcatccatatatatgaaactcataggccttccttctaataaatgtaaaataagtaataaaataaatatatctatattaagtaataatgtccataacaaactgagggaggcattattcttatccccatttaccaaagaggaaactgagagaaggggacagtgtcaaaatagaartataaaatagacagtaatcagaatctcactgatttcccaaaccatgtgcttaactaccatgataccctgccagaaagatcagat

SEQ ID NO: 640916 - DNA, 505 bp, Homo sapiens
tatttcaagtgtcaaataaatgtgactggagcccaacatgattcagctgaggcaagggtcaaaaggacattttgggtaatgtcagcaaggaatacttattggataaataaaataattaaccactgtgatccatagatgatgccttgaggggagtcaaaatgggttcaagaaaaaggagaaaacctaaccgtgtatcattctcacaaactgggaaaattctaccaatttggggcttagtttcactagcttcatccatatatatgaaactcataggccttccttctaataaatgtaaaataagtaataaaataaatatatctatattaagtaataatgtccataacaaactgagggaggcattattcttatccccatttaccaaagaggaaactgagagaaggggacagtgtcaaaatagaagtataaaatagacagtaatcagaatctcactgatttcccaaaccatrtgcttaactaccatgataccctgccagaaagatcagat

SEQ ID NO: 640917 - DNA, 638 bp, Homo sapiens
tacagtatggaaaatggattgaagggtcaagcctcccaagagaagaacagctaggaggtaattataatgatttaggtgtgaataaatgggagtctgaacttcggtgactcccaagagatgcygaattttagggacactgttgcatccagctcaaatgccctttgcctggtaagtgaattcatgccccacctgctgtgtctgggctgctaacagctcagagccccacccttccctggacaattgcaccacagaaaataggaggtgcaacacccagaagattatgcccaccgtcaggacccagcagtggccaatgactaacagacatgaaagtttaaaaggttgctgtataatacaatgtatcctccagagcttcaacggctccagactcaattgaggcagacttcaattgagaccacatctgaagccagactccagttgagatcatgtcctttcttccctctaccatagttagcttcccttaaccccttctccttataagtcacttttgtaaaaattctcaatttcagatatgcatctaagaaacccaaactaacgcagagtaatagagacagtttaagatacattaatgaattttgaggaaaataacttgatataggatgaagattagagagaaaaca

SEQ ID NO: 640918 - DNA, 570 bp, Homo sapiens
aagataagggttggttttgtgtaaaaattaataaaactaatttccttagcaaaattggttttaaaatataaggaaaaaaacaaattatgagaatcagcaatgaaaaggytatgctgtagattctacagatcttaacaagataataaaaagacattacaaatgaattttgctaatgtccttgccagttaaaaagaaatggacctctgctttgaaaaacacagttttctactttttgtcattcaaaaatgcctgtaaaaacaatatttgattgaataaagaaaatgtatgcatcctccatacgcaaagagtcttacaagttaattagaaatcattcagctacaaaatgagcaaaggacaagaacaatttccaaaagaagaatgaatggtcattcttgaaaaactttcaacttcattagtatgaaaaaactttcaacttcattagtaaccagagaaatgcaaatttaaaatatttatactaagcaacttttaatttttattgacaaattataattgtacatatttatggggtaaatagtgacattttgatacacataatgtatagtactaatt

SEQ ID NO: 640919 - DNA, 570 bp, Homo sapiens
aagataagggttggttttgtgtaaaaattaataaaactaatttccttagcaaaattggttttaaaatataaggaaaaaaacaaattatgagaatcagcaatgaaaaggctatgctgtagattctacagatcttaacaagataataaaaagacattacaaatgaattttgctaatgtccttgccagttaaaaagaaatggacctctgctttgaaaaacacagttttctactttttgtcattcaaaaatgcctgtaaaaacaatatttgattgaataaagaaaatgtatgcatcctccatacgcaaagagtcttacaagttaattagaaatcattcagctacaaaatgagcaaaggacaagaacaatttccaaaagaagaatgaatggtcattcttgaaaaactttcaacttcattagtatgaaaaaactttcaacttcattagtaaccagagaaatgcaaatttaaaatatttatactaagcaacttttaatttttattgacaaatwataattgtacatatttatggggtaaatagtgacattttgatacacataatgtatagtactaatt

SEQ ID NO: 640920 - DNA, 644 bp, Homo sapiens
tggttttacaagtgtctggcatttccccttctggcacttattctctctcctcccaccctgtgaagaggcatgattgtaagttacctgaggccttcccaatcatgcagaactgtgagtcaattcaacctattttctttataaattaatgaatctggggtatttccttctagcaatgtgagaacagagtaatatacatgcatttctgcttttaaaaaaagaaatatatattgtatctatatttaactttctagtttggtaataggtatggagagaattattataaaccatggaattttttggcaatttctacaatagttgatatttttgatgaattttttactattggagcaattaaattcagattctgggctgttgtaggcattatctaatacaacaaacactattgtgtcattcagagaattggaaagcagtgcarttatttgaattcagctagaaaggacatagagaattatgacttatttttatactagttctccatcttggagtcatactatagtataaaccactgtatctttgatcacatctgatagttttcagtattaaagctatgtttgtgaatcttttaccacttaccagtaagagagcacaacacttacagatattctcttcaaattttagcagta

SEQ ID NO: 640921 - DNA, 617 bp, Homo sapiens
tctggctgcattgtgtcccttttctatggatccatcaaactttgaacttgagagtgatgatttagggtatctggcagaagaaatttctaaacagcacagcattcaagatttatcctggctgcttctaataacctaagctcatacaaatgagcaaagaaataacatgaaactggaacttatattcaagtggaaagcagagtgcaaaaggttgaaaatttgccacctggtcatttggttgaaaagaaaagcccattttctgggaagaaattcaagcaggctgcagaaatttgtataagtggaaccatgtgctaaccaacaaggcaatggggaaaagccctcaaaggcatttcagagatcttttcagcagcccctcccatcacaggccagaagacctaggagaagtgaacggttttctgggccagtcccaggaccctgttgccctcagcagccttgtgacactgttgtgtgtatcccagccatttcaggtccagctgtgactaaaaagggccaaagtacagttcagatgatgaaagctgtgaattttgaaggctttcatgtgktgttaagcctgcaggtgaacaaattgcaagagaggaggcttgggagcctccaaccag

SEQ ID NO: 640922 - DNA, 500 bp, Homo sapiens
gaaagctgtgaattttgaaggctttcatgtgttgttaagcctgcaggtgaacaaattgcaagagaggaggcttgggagcctccaaccaggattcagaggakgtatcaaaaagtctggaacttcagaccaaagcctgctgcatgggtggagaatcacagacaatctgtactaggacagtgcagagggaaaatgtgtggttggagcccacacacggagtacccacgggggcactgactagtggagctgtgagaagaggactaccatcctctagaccccaaaatggtagatccaccagaagcttgcaccctgcacctagaaaagccatgggccccctcaagagcaacaaaagacattaagagcaactgtgctgcccgaaccctataaagccacatgagtggaactacacaaggccttagaagactacccattgtaccaatatgccctggatgtgaggcatggagtcaaaggtaattgttttgtaacttcaagatttagtgacc

SEQ ID NO: 640923 - DNA, 432 bp, Homo sapiens
ttatttgcaccgaggtgtttatagtattatctgatggtagtttgtatttctgcgggaacggtggtactatcccctttatcattttttattccrtctgtttgattcttctatcttttcctctttattagtcttgctactcagtctaccaattttgttgatgttttcgaaaagccagcccctggattcattaatttttgaaggttttttgtgtctctatttccttcagttctgagatcccaaacatttcctcacagatcctacaaaaatagtttccaacctgctgaatcagaagaaaggattaccactgtagcatgaattgacacatcacaatgcagtttcacagatatctcctttccagtttttatctgggtatattcactttttcaccatactcctcaatgagcttccacacattcctttgcagattctaca

SEQ ID NO: 640924 - DNA, 525 bp, Homo sapiens
gagcctgttatttgtctgttcagagattgaacttattcctggtttagtcttgggagggtgtaagtgtcgaggaatttatccatttcttctagattttctagtttatttgcaccgaggtgtttatagtattatctgatggtagtttgtatttctgcgggaacggtggtactatcccctttatcattttttattccgtctgtttgattcttctatcttttcctctttattagtcttgctactcagtctaccaattttgttgatgttttcgaaaagccagcccctggattcattaatttttgaaggttttttgtgtctctatttccttcagttctgagatcccaaacatttcctcamagatcctacaaaaatagtttccaacctgctgaatcagaagaaaggattaccactgtagcatgaattgacacatcacaatgcagtttcacagatatctcctttccagtttttatctgggtatattcactttttcaccatactcctcaatgagcttccacacattcctttgca

SEQ ID NO: 640925 - DNA, 500 bp, Homo sapiens
gaaagctgtgaattttgaaggctttcatgtgttgttaagcctgcaggtgaacaaattgcaagagaggaggcttgggagcctccaaccaggattcagaggatgtatcaaaaagtctggaacttcagaccaaagcctgctgcatgggtggagaatcacagacaatctgtactaggacagtgcagagggaaaatgtgtggttggagcccacacacggagtacccacgggggcactgactagtggagctgtgagaagaggactaccatcctctagaccccaaaatggtagatccaccagaagcttgcaccctgcacctagaaaagccatgggccccctcaagagcaacaaaagacattaagagcaactgtgctgcccgaaccctataaagccacatgagtggaactacacaaggccttagaagactacccattgtaccartatgccctggatgtgaggcatggagtcaaaggtaattgttttgtaacttcaagatttagtgacc

SEQ ID NO: 640926 - DNA, 604 bp, Homo sapiens
tcccttatgtacctttgcagattctacaaacacagtgtttccaaactgatgaatgaaaataaaggcttaaatcttttaggtgtatccacacatcacaaagcagttttacagatagtttctttctagcttttaaccggggatattcactttttaaccataggcctcagtaagctcccaaatgtcctttcacagattctacaaacacaatgtttccaaactgctgaatccaaagcaaggtttacttctgtgagatgaatgcacacaacactaaacagtttcccagagagtttctttctagtttttatctgaagatattttgttttaaaccattgatctcaatgcacagtgaaatatctcttcacagattctacaagaacagtgtttccaaactgctgaataaaaaggaaggtttaactatgtgagttgaatgaacacatcgtaaagcagtttctcagaaaccttctttccagtttatcagaagatattttctttattgctataggcctcaatgtgctacmaaatgtccattcgcagaatgtgcaaaatcagtgtttccaaactgccgaatgaaaagagggctttaactctgtgagatgaatgcacg

SEQ ID NO: 640927 - DNA, 604 bp, Homo sapiens
tcccttatgtacctttgcagattctacaaacacagtgtttccaaactgatgaatgaaaataaaggcttaaatcttttaggtgtatccacacatcacaaagcagttttacagatagtttctttctagcttttaaccggggatattcactttttaaccataggcctcagtaagctcccaaatgtcctttcacagattctacaaacacaatgtttccaaactgctgaatccaaagcaaggtttacttctgtgagatgaatgcacacaacactaaacagtttcccagagagtttctttctagtttttatctgaagatattttgttttaaaccattgatctcaatgcacagtgaaatatctcttcacagattctacaagaacagtgtttccaaactgctgaataaaaaggaaggtttaactatgtgagttgaatgaacacatcgtaaagcagtttctcagaaaccttctttccagtttatcagaagatattttctttattgctataggcctcaatgtgctacaaaatgtccattcgcagaatgtgcaaaatcagtgtttccaaactgcygaatgaaaagagggctttaactctgtgagatgaatgcacg

SEQ ID NO: 640928 - DNA, 514 bp, Homo sapiens
atacaaaaatctaattaaaatggattaaagacttaaattcccccttcccttctcccttcccttctcctttaccttcccttctcttctctcttgctatattgcccatgctaaactcaaactcttaggctgaagtgatactccgacctcagccttccaagtagctaggacagagaaacatgccaccatatccttctttgttccttgttagttttttaaatgctttgaagtacattttttgccttgtttcagatgagactttggacttggagtttgggctaatgctggaatgaattaagacttcragggactgttaggaaggcataactgtctctttaaaagacgaaagggacatgagatttgggaggggcccagggtagaatgatatgattagactttgtgtccccacccaaatctcatcttgaattgtaatccccataatccccacatgtctagggagagaaaatgtggaggtaattgaatcatgggggtagtttcccccatgctgttctcgtga

SEQ ID NO: 640929 - DNA, 581 bp, Homo sapiens
tttgtaaaaatttgtagaagctctcaatttcctggaatgagatttgggagatatagagacatgcctttaatcagaaaagaagtggtcttaggaatatactacttgaatgactgaaagacaagagttctgcttctgcccataagaaagctttgtcrttggctttttcacagttaaatcccagcatttccttcttagctatagagttaaatagctgggcacataaatgttataaatccttaatcacagtaaaatattcatggttgcttcaccattattgacagagaagttacaaattcaagaaacaaattttggtgttgacaaatttttggtttgcttagttgggtcaccagataatgggagtgtccaggttaatttccactaattaggtcaatatttatatagtcatgcaaagaaattatctctgtttttctatgaagaaattttccaggggatgtaaaattttaactacctttgtacagtagttctagcattatgtttaagtgtctatattttggacatctgctctggatacctttatacttttctgaaagattgagataatagaaagcctgtgtggaaat

SEQ ID NO: 640930 - DNA, 605 bp, Homo sapiens
tctcaatggatttgtaaatagagaaaaaccataatttaaaaagtgcacaatagacactgcacccaaggatcccatccacattcggtctggatatagaggttgagatcttgaatatcaaacagatgccatgatgggatgacatcttawttgagcggggagcttcaaaatcctgccttcccaaactaggaaatcttaattgaccttagaagtctaacaatctcacaggacagacgttgtctccatacacttctactaaaagaagagaaacactcattctaactatagttaagtttttaatgccagagtttttttacattggattttacagcaattctcatctctaaatttctcagtgtgtatattaatggattcaacatgtgtatgataactgtataaaacacagtcatgaatttatcaataggaaagttcgaaacaggtctaacgaaaaggaaaatacagggaacaagaaacaggacagtgactgttatgtaggagatgcaggcagacagggctttaagcctcccttcctgactataagttttaaagttgtttaggatgactccataggagattagtagaagggtgaagacgaccatacagattgc

SEQ ID NO: 640931 - DNA, 560 bp, Homo sapiens
gcttgtgcctctaagtttttgtgaatattctgtacagaagaagagttaaaggcccactagccattcatatatttcataactcctatttaaaacatatttcttggcatggaagtcagctatgatgaataggaaacagattattggtctcaagaaagttactttctcatggcggtacagactttaaataaataagttggcatagattcagtactgtgagtttgtagttttggtatctttatgatctgtgtagcatcaaaaataacatcttctgaaatagctcactcagtactgtggcaatccacagttactcatttggtccttcatgcctcaaaaaatattcggtctttttgaatatctcattaaatgtcaaaagactggacattgacttgtacaaatagtaaaatattatttatcacgttgttccctatggcaacgatttggtctgaccctctgttgccttataacaagatatatgtctctatatcttatccttacttatttcacaaattttttrtcacatttacatacaatatcctggttttcaacaactaattttgaac

SEQ ID NO: 640932 - DNA, 644 bp, Homo sapiens
gcatttacaagtctgtcttcgtttgctcacaggaaaacaacatgattaaattagatgaagtgaaatcctttctagtcaaccatctacaaaactattagtgcacctctcccttactctgttctgcagacttttttatttttcatatatttataattaaatagcaatttccaagctcatgactgttacattaataacggtagtcattktagatgtttcatgattacagtgagtaaataatgactacaagtttctctttcaatatgtgcctaattaagtttcaagacatcattggagagaaggcatagcatgtggtgaataatgtggacaccagagccacactgcctctgcttcaacccctgcttcaccacttactatgtgtctttgggccacttactaagcctctctgtgcctcactttgatttaaaacctcttagggttgtcttatcacaacaaagtaaagtgcctagaacactggctggcatctggtaaaggctcaataagtgatggctattactcatgttcctgaaagcttcactgtgaacattggatcagaacgaatcatctggatctttgttaatttgaaaagactaatagacatagtcctgggaaaagaaaaaaaatacacctataattcaggaatggct

SEQ ID NO: 640933 - DNA, 603 bp, Homo sapiens
gtcttatcacaacaaagtaaagtgcctagaacactggctggcatctggtaaaggctcaataagtgatggctattactcatgttcctgaaagcttcactgtgaacattggatcagaacgaatcatctggatctttgytaatttgaaaagactaatagacatagtcctgggaaaagaaaaaaaatacacctataattcaggaatggcttttggggaagacaatatatgtcttagtaactacctgtttaattatgtatgagtacttattttatctgtgatggaatgtatcttgaaaagatcaggaagaattatagtgaaaaagttggacccctcatcagaggtagagtgaaatggtagaaaatggaagaaaaaggagtcaagtcaagaaacacagtaattacaataagttaatatacacaggtaataagaagattaagattaatgtgataattgacgcaattattctcctaaaaatcttcataaagatttttagtgaggaaatactggaagcacaacctcctgtttgtccctggggtgactcaagaggcttcttggggtagccaaacacagaccaaattctagtgaataaaaaaaagaaaaagaaa

SEQ ID NO: 640934 - DNA, 603 bp, Homo sapiens
gtcttatcacaacaaagtaaagtgcctagaacactggctggcatctggtaaaggctcaataagtgatggctattactcatgttcctgaaagcttcactgtgaacattggatcagaacgaatcatctggatctttgttaatttgaaaagactaatagacatagtcctgggaaaagaaaaaaaatacacctataattcaggaatggcttttggggaagacaatatatgtcttagtaactacctgtttaattatgtatgagtacttattttatctgtgatggaatgtatcttgaaaagatcaggaagaattatagtgaaaaagttggacccctcatcagaggtagagygaaatggtagaaaatggaagaaaaaggagtcaagtcaagaaacacagtaattacaataagttaatatacacaggtaataagaagattaagattaatgtgataattgacgcaattattctcctaaaaatcttcataaagatttttagtgaggaaatactggaagcacaacctcctgtttgtccctggggtgactcaagaggcttcttggggtagccaaacacagaccaaattctagtgaataaaaaaaagaaaaagaaa

SEQ ID NO: 640935 - DNA, 595 bp, Homo sapiens
tgcccacatcctgcattcatggtaaacagtttgctgtttgatcatataacctccagtggaatgctgagctggtcacaatccctctgctggctctctacatctccccgtttctgtttatggattaattaaaagaatataaggccaggctgggcagatctcattttctgtttagtggtccatctgattttacagactatgaacagaagacagagacaaaacaacattattccaagaactacatataagatgttaatgtggtgccttaaataggtccaagggttgaggctctscaggccttgctggaattcggtccagtcttctaaggctgaaattcttgagtttccctatttaaatcaagaattttgttttgtaattcactgatatcaaagatgatattggatgtgaaagctcccttcaatgggctttcacacagtgccatggtgccatggatactcactttggttatattctaagttggttacacaaatgtgagtgtggttacaatggcgacagaattgctgctgcaactgcaggctttgtacttgttcctctaatcataggattgtggatttcaacattgcaacttcagtttgta

SEQ ID NO: 640936 - DNA, 595 bp, Homo sapiens
tgcccacatcctgcattcatggtaaacagtttgctgtttgatcatataacctccagtggaatgctgagctggtcacaatccctctgctggctctctacatctccccgtttctgtttatggattaattaaaagaatataaggccaggctgggcagatctcattttctgtttagtggtccatctgattttacagactatgaacagaagacagagacaaaacaacattattccaagaactacatataagatgttaatgtggtgccttaaataggtccaagggttgaggctctgcaggccttgctggaattcggtccagtcttctaaggctgaaattcttgagtttccctatttaaatcaagaattttgttttgtaattcactgatatcaaagatgatattggatgtgaaagctcccttcaatgggctttcacacagtgccatggtgccatggatactcactttggttatattctaagttggttacacaaatgtgagtgtggttacaatggcgacagaattgctgctgcaactgcaggctttgtacttgttcctctaatcataggaytgtggatttcaacattgcaacttcagtttgta

SEQ ID NO: 640937 - DNA, 584 bp, Homo sapiens
ggtcacaatccctttaccggctctctgcaggaacaaattcaaatgaagtaatctctctgaaaacctttttttctaagaaaatccctagaagaaaaagacttggctcttgctaaggaaaagtagctaaatgccaaataatttgaaaagccygtaatatgacaagaaaaactcaaaagtaaattgaatagtaaattatgagttttacattatgaaatatttaggtgagacaagtaatatttcagccagaatgaaaggagatcgagccccaggctctcatctttaaaaatgttcccagtaaggagagcctcacccttcccgttaaaaagtctgtgcccaagaaaccctgaggctcagaggcagagagcctaagaacagaagttgacattctgattcttggaaagataggtaatcatagtgctgcagtttaattagagtacaggcttttgatcaagacctgaaactatgtcagataaaatcataatgatctgcactccattcattcaatcctttaattttattccaatattaattcaataacagtatctacaatacagaaatttgtatttgccaacaagtgagtagtg

SEQ ID NO: 640938 - DNA, 632 bp, Homo sapiens
tgctaaggaaaagtagctaaatgccaaataatttgaaaagcccgtaatatgacaagaaaaactcaaaagtaaattgaatagtaaattatgagttttacattatgaaatatttaggtgagacaagtaatatttcagccagaatgaaaggagatcgagccccaggctctcatctttaaaaatgttcccagtaaggagagcctcacccwtcccgttaaaaagtctgtgcccaagaaaccctgaggctcagaggcagagagcctaagaacagaagttgacattctgattcttggaaagataggtaatcatagtgctgcagtttaattagagtacaggcttttgatcaagacctgaaactatgtcagataaaatcataatgatctgcactccattcattcaatcctttaattttattccaatattaattcaataacagtatctacaatacagaaatttgtatttgccaacaagtgagtagtgcttaagggcttccactgttatttccatgacttggcttaccattggctccatggaacaccttcatctcatcatatgttaattaaatattggtgtgatagaagccttagataaagagtcccataaatacccatctgagccagcaaagatgtttatca

SEQ ID NO: 640939 - DNA, 632 bp, Homo sapiens
tgctaaggaaaagtagctaaatgccaaataatttgaaaagcccgtaatatgacaagaaaaactcaaaagtaaattgaatagtaaattatgagttttacattatgaaatatttaggtgagacaagtaatatttcagccagaatgaaaggagatcgagccccaggctctcatctttaaaaatgttcccagtaaggagagcctcacccttcccgttaaaaagtctgtgcccaagaaaccctgaggctcagaggcagagagcctaagaacagaagttgacattctgattcttggaaagataggtaatcatagtgctgcagtttaattagagtacaggcttttgatcaagacctgaaactatgtcagataaaatcataatgatctgcactccattmattcaatcctttaattttattccaatattaattcaataacagtatctacaatacagaaatttgtatttgccaacaagtgagtagtgcttaagggcttccactgttatttccatgacttggcttaccattggctccatggaacaccttcatctcatcatatgttaattaaatattggtgtgatagaagccttagataaagagtcccataaatacccatctgagccagcaaagatgtttatca

SEQ ID NO: 640940 - DNA, 624 bp, Homo sapiens
gaattcctggctcacaaaattttgatataaaatgaaatgatggttgtttaactcacaaaaactgtggaaccctgaacattacatgaagacagaaccagaataaaagtgacatctcaaggcgtggagtttccataactacaatttaaagtgtatggaattggctttagtgtccaaaaataggggccaccaggacactgtaagtgaatgctcaaaagacagaagtaactattccagaagctgtgaaaatttgacttgtgatgcaatgctgaaaaaatttagtacctctgtcacccataggaaggtagaaaatgaaaaatatacataagtaaattggtggatatgrctaaaatttccaagtagaatactgaaaatttcagctgtttcttacagcagtgtatcatataataaggcatagatatttaaaaaacactaatgaggggtggagcaaagatggccgaataggaacagctccagtccacagctcccagcatgagcgatgcagaagactggtgatttctgaatgcccaactgaggtaccggattcatctctctggggagtgttggaaagtgggtgcagtgcagtgggtgcagtgcaccgagcatgagccgaagcagggcgaggta

SEQ ID NO: 640941 - DNA, 605 bp, Homo sapiens
aaatctatttaaatgacagtagactagatactttcctcagcatatttatctactagtatgtttgctgggattttttagattcgtaagtaaaaacccatattatgcttccagaacataacaggcattggttccttcacactctaacacacttgacatgatctgcaattttaaactccctaatcaaatatatctgaaagtaattgtacacttttattaatatatcatataaaatacaacatctcaaaaattaagattataattataaatctattggtttattaagmatgtagtatggaactttttttttatttaacaaatagaaaagaagaaaaataaattaggctatatattaaaaccaaatatacattgtatattccaaaaagttttcatgtttcctggctaactttcccaattaaattccttcaacaatatcatatggtatttaagatattagctacatttcctcatatcacaagaattttcaatgaatatctcctgtcactggtttcaaatgctcacactgtaatccagaaaagcaatgcttctttcactgagtgttaatgtagacatctcatgcacctatttgtgatcacagaacatgtaaa

SEQ ID NO: 640942 - DNA, 605 bp, Homo sapiens
aaatctatttaaatgacagtagactagatactttcctcagcatatttatctactagtatgtttgctgggattttttagattcgtaagtaaaaacccatattatgcttccagaacataacaggcattggttccttcacactctaacacacttgacatgatctgcaattttaaactccctaatcaaatatatctgaaagtaattgtacacttttattaatatatcatataaaatacaacatctcaaaaattaagattataattataaatctattggtttattaagaatgtagtatggaactttttttttatttaacaaatagaaaagaagaaaaataaattaggctatatattaaaaccaaatatacattgtatrttccaaaaagttttcatgtttcctggctaactttcccaattaaattccttcaacaatatcatatggtatttaagatattagctacatttcctcatatcacaagaattttcaatgaatatctcctgtcactggtttcaaatgctcacactgtaatccagaaaagcaatgcttctttcactgagtgttaatgtagacatctcatgcacctatttgtgatcacagaacatgtaaa

SEQ ID NO: 640943 - DNA, 622 bp, Homo sapiens
ctcattatctcagttgttacagaggtatggaaatatccaaagcagatgaccaaaatataaagaggyttaaacataatacacaaaggtagttaaataatctcacctgctggaaaatttcttcataaaaaaccaaaaatattatcattgcatgactatgtaaaaattgacctaattaatgaaaattaacctggacaagacccttattttgtgacacaagtgaacaaaaatataccaacactaaaatttgttacatgaaagtttcctcaattatggtgaagtaaccataagtactttactgtgattgaggatttatgataacattcatgtgcccagctattaagctttgtacctaacaaggacaatgctgaaatttaactttatggaaaaaacaatgacagaactttctcacaggcagaagccaaactcttcagtttttcggtcattcagatataattccaatagcgtacccctaagtctacttctttcctaattaaaatcatgtctttatatctccccacctcagcccagtacattgagaactttaacaaatttttacacaacatggaggatatgacaagaaaacaccacacctaaaggactagataccaaatgaagacatgct

SEQ ID NO: 640944 - DNA, 536 bp, Homo sapiens
gcatcatcgtattttaaataaaagagagtgtaaggtcattataggttagttaatttcattatttggaataaattcaaatgaagtaaactctccgaacatctttttttccccctagaaactccctagagggaaaagatttgggcatcaccaaggaagagtagctaaatgccaagtaatgtgaaaagcctataatgtgaaaagaaaaattttaaaataaattgaacaaaaattatgagtttcactttatgaaatactgaggtaaggcaagtaatatttaagccagaatgaagggggaacsagtcccaggttctttaccctaagcacattcccaaaaagaagggctttacatttcctgttagaaattccatgcccaagaagtcctgaggctcagaggcaggcagcctaagaacagaatttgacattctgattcttgaaaaagcaggtaatcatagttctgcagttttagatcagagtaaaggcttttgatcaaggcctgaatctatgtcagatataaccataatgatctatagtccatt

SEQ ID NO: 640945 - DNA, 546 bp, Homo sapiens
tgaacttcattaaatggccaaaccaaataataatcagtgttcctgaggaaaaagaaaattctaaaaacttgggaaacatmtttgggaaaataatagaggaaaacttccccagccttgctagagacctagacatccaagtacaagaagcaaaaagaacaccaggaaattcatctcacaaggaggtcttggcctaagcacattgtcaccaggttatccaaagttaagacaaaggaaagaatcttaagagctgtgagacagaagctccaggtaacctatacagaaaaacctatcagattaagagcagatttctcagcagaaaccctacaatgtggaagggattggagctctatcttcagcctccccaaagaaaacaattatcgaccaaaaattttgtatccagaaaaactaagcatcatgtgtcaaggaaagacagtctttttcagccaaacgaatcctgaaagagtttgccattaccaagccaccactacaagaactgctaaaaggagcttgaaatcctggaacaaacctgaaaacaccaaaaaacag

SEQ ID NO: 640946 - DNA, 546 bp, Homo sapiens
tgaacttcattaaatggccaaaccaaataataatcagtgttcctgaggaaaaagaaaattctaaaaacttgggaaacatatttgggaaaataatagaggaaaacttccccagccttgctagagacctagacatccaagtacaagaagcaaaaagaacaccaggaaattcatctcacaaggaggtcttggcctaagcacattgtcaccaggttatccaaagttaagacaaaggaaagaatcttaagagctgtgagacagaagctccaggtaacctatacagaaaaacctatcagattaagagcagatttctcagcagaaaccctacaatgyggaagggattggagctctatcttcagcctccccaaagaaaacaattatcgaccaaaaattttgtatccagaaaaactaagcatcatgtgtcaaggaaagacagtctttttcagccaaacgaatcctgaaagagtttgccattaccaagccaccactacaagaactgctaaaaggagcttgaaatcctggaacaaacctgaaaacaccaaaaaacag

SEQ ID NO: 640947 - DNA, 546 bp, Homo sapiens
tgaacttcattaaatggccaaaccaaataataatcagtgttcctgaggaaaaagaaaattctaaaaacttgggaaacatatttgggaaaataatagaggaaaacttccccagccttgctagagacctagacatccaagtacaagaagcaaaaagaacaccaggaaattcatctcacaaggaggtcttggcctaagcacattgtcaccaggttatccaaagttaagacaaaggaaagaatcttaagagctgtgagacagaagctccaggtaacctatacagaaaaacctatcagattaagagcagatttctcagcagaaaccctacaatgtggaagggattggagctctatcttcagcctccccaaagaaaacaattatcgaccaaaaattttgtatccagaaaaactaagcatcatgtrtcaaggaaagacagtctttttcagccaaacgaatcctgaaagagtttgccattaccaagccaccactacaagaactgctaaaaggagcttgaaatcctggaacaaacctgaaaacaccaaaaaacag

SEQ ID NO: 640948 - DNA, 211 bp, Homo sapiens
agtgaattgaataataagttatgagatgcatgttatgaaatatttaggtaaggcaagtaatatttcagccagaattaaaggagaaccagccccaggttctctttgctaaaaatgctccyggtgaggagggccttacccttcctgttagaaagtctgtgcccaagaagccccgaggctcagaggcagagagcctaagaacggaagttgacat

SEQ ID NO: 640949 - DNA, 460 bp, Homo sapiens
tgttagtgaaagtttcctcgattatggtgaagcaaccataagtactttactgtgactgaggatttataagattcatgtgcccagctattaaggtttatacctaacaaggaaaatgctgaaatttaacttcatggaaaaaccaatgacagagctttctcacagaaagaagccaaactcttcagtctctcagtcattcaaatgtcattcaaatagcatacccctaagtccacttttttcctaattaaaagcatgtccctatatctctccccaatcccrgtaaattgagaactttcacaatttttacaagaaatggaggatatggcaagaaaacatcacacatagaggactagataccaactgaagacatactctaccttaggcagaaatttatttcagatatctcttgggttattatatcaagaaaataattatcccatttatgtgtagacacaatctatga

SEQ ID NO: 640950 - DNA, 479 bp, Homo sapiens
gttcttggtctcaaatgacttcctctctgctgatggtaacaaattctaaataaataattgacatagatttagtsctttgtgtttgtatgtgtggtatctttataatatgatctgtgcagcaccaagaataacatcttctgaaatatgtcactcagtactctggccttgtactattagaccttcattccttcatgcctcaaagtatgttcagtctttattagtctttcattaaatgtcagaagacatgactctgaaatgtataaatagctatattatttatcacattgttccctgtagtgattacttggtctgactccttgtccaacttataaggagctgtgattctctccattttgtccttgcctataccccaattttttcaacacttacatacaatatcttaattttaattaatttgaactcaagtgaactaactcatgactatcaccaactaccaaatatgccatgttttttttttc

SEQ ID NO: 640951 - DNA, 546 bp, Homo sapiens
ttttcatttctgtgacaggtaaaggcttctacctctaagttttagtgaatattctatacagaagaagtgttaaagtcccaaaagccactcatacattttataacttcttatttaaaatatttttcttggcacagaattcagctatgatgaataggcgacaggttcttggtctcaaatgacttcctctctgctgatggtaacaaattctaaataaataattgacatagatttagtgctttgtgtttgtatgtgtggtatctttataatatgatctgtgcagcaccaagaataacatcttctgaaatatrtcactcagtactctggccttgtactattagaccttcattccttcatgcctcaaagtatgttcagtctttattagtctttcattaaatgtcagaagacatgactctgaaatgtataaatagctatattatttatcacattgttccctgtagtgattacttggtctgactccttgtccaacttataaggagctgtgattctctccattttgtccttgcctataccccaattttttcaaca

SEQ ID NO: 640952 - DNA, 479 bp, Homo sapiens
gttcttggtctcaaatgacttcctctctgctgatggtaacaaattctaaataaataattgacatagatttagtgctttgtgtttgtatgtgtggtatctttataatatgatctgtgcagcaccaagaataacatcttctgaaatatgtcactcagtactctggccttstactattagaccttcattccttcatgcctcaaagtatgttcagtctttattagtctttcattaaatgtcagaagacatgactctgaaatgtataaatagctatattatttatcacattgttccctgtagtgattacttggtctgactccttgtccaacttataaggagctgtgattctctccattttgtccttgcctataccccaattttttcaacacttacatacaatatcttaattttaattaatttgaactcaagtgaactaactcatgactatcaccaactaccaaatatgccatgttttttttttc

SEQ ID NO: 640953 - DNA, 479 bp, Homo sapiens
gttcttggtctcaaatgacttcctctctgctgatggtaacaaattctaaataaataattgacatagatttagtgctttgtgtttgtatgtgtggtatctttataatatgatctgtgcagcaccaagaataacatcttctgaaatatgtcactcagtactctggccttgtactattagaccttcattccttcatgcctcaaagtatgttcagtctttattwgtctttcattaaatgtcagaagacatgactctgaaatgtataaatagctatattatttatcacattgttccctgtagtgattacttggtctgactccttgtccaacttataaggagctgtgattctctccattttgtccttgcctataccccaattttttcaacacttacatacaatatcttaattttaattaatttgaactcaagtgaactaactcatgactatcaccaactaccaaatatgccatgttttttttttc

SEQ ID NO: 640954 - DNA, 479 bp, Homo sapiens
gttcttggtctcaaatgacttcctctctgctgatggtaacaaattctaaataaataattgacatagatttagtgctttgtgtttgtatgtgtggtatctttataatatgatctgtgcagcaccaagaataacatcttctgaaatatgtcactcagtactctggccttgtactattagaccttcattccttcatgcctcaaagtatgttcagtctttattagtctttcattaaatgtcagaagacatgactctgaaatgtataaatagctatattatttatcacattgttccctgtagtgattacttggtctgactccttgtccaacttataaggagctgtgattctctccattttrtccttgcctataccccaattttttcaacacttacatacaatatcttaattttaattaatttgaactcaagtgaactaactcatgactatcaccaactaccaaatatgccatgttttttttttc

SEQ ID NO: 640955 - DNA, 604 bp, Homo sapiens
ttattcataacactatttagataccaaaagtactcaaaaatagaatcttagctatcagattccaagaagaagcatactctaagagaaattccaaattccatgtaagaagacatggatttgagtcattttttgaatgcaattacaagtctgtctcaatttactcactggaaaacaatgggattaaatttgagaaattcagaatcytttctaatcaactatctacagaactattagtgcatctctcgtttatggtattctgctgacaattttctttttttataaatatataattaaataaaaattttccaagctcatgactgttacatgaaaaatggtagtctgtgggacaatgggttttattattacagtgagtagtgactataagcttctcactgagtatgcacctatttaagatccaagacatcctcaaagggaaagtgtagcatgttgtgaataatgtggacactggagtcacatttcttcagctacaacctcatgttcaccattttttatgagactttgggccatttactaaagctctctgacccttactttcatcatttgtagaatggggatcccaatagtcattacctcctaattgctt

SEQ ID NO: 640956 - DNA, 582 bp, Homo sapiens
gtagtctgtgggacaatgggttttattattacagtgagtagtgactataagcttctcactgagtatgcacctatttaagatccaagacatcctcaaagggaaagtgtagcatgttgtgaataatgtggacactggagtcacatttcttcagctacaacctcatgttcaccattttttatgagactttgggccatttactaaagctctctgacccttactttcatcatttgtagaatggggatcccaatagtcattacctcytaattgcttgattttcagcaattttgaacttaagtgaactacctgttgatttataaaagaaagtaaagtgcctagaacactggctggcacctagtaaggactcaataaattatagttattatcagtgttcttgaatgcttcactttgaagatagaacaaatcatgtgaatctttgtcaacttgaaaagatttatagacatagtctaggttaaaaagaataaaacactcataattcaggaaaaccttttggggcacacaataaaattgtatgtcttaggaattacaaatttaattatgtatgagtagtgattttctttgtaa

SEQ ID NO: 640957 - DNA, 623 bp, Homo sapiens
ccttaataaaaaccttccggttttgtggctcaggcggacatcacggacctacagatatgtgatatcacccctggtggcccagccctaaaatttctctctktgtactctttttctttatttttcagaccagccaacacttagggaaaatagaaataacctgtgttgaaatattgggggcaggttcccctgacaggaagccccaggttctcttctctgagcatattcctagtgaggagggccttacccttactgttagaaggtccattcccaaaaagccttgaggttaagaagcagagagcctaagaaccgaagctgaccttctgattcttggcaaacagatcatcatagttctgcagttttaggttagagtacaggcttttgatcaaggcctgaatctatgttacatatgaccatagtgatctgaagtacattaattcaatcctttaattttattccaatatcaattcagtaactgtttctacaataaagaaatttgtattttcccacaacagagcagtgcctaagctcttcaattgttatttccatgacttagcttacaattgtctctgttgaacatcttcatctcatcatatgtttaaatattggatattctgtgtcataag

SEQ ID NO: 640958 - DNA, 623 bp, Homo sapiens
ccttaataaaaaccttccggttttgtggctcaggcggacatcacggacctacagatatgtgatatcacccctggtggcccagccctaaaatttctctctgtgtactctttttctttatttttcagaccagccaacacttagggaaaatagaaataacctgtgttgaaatattgggggcaggttcccctgacaggaagccccaggttctcttctctgagcatattcctagtgaggagggccttacccttactgttagaaggtccattcccaaaaagccttgaggytaagaagcagagagcctaagaaccgaagctgaccttctgattcttggcaaacagatcatcatagttctgcagttttaggttagagtacaggcttttgatcaaggcctgaatctatgttacatatgaccatagtgatctgaagtacattaattcaatcctttaattttattccaatatcaattcagtaactgtttctacaataaagaaatttgtattttcccacaacagagcagtgcctaagctcttcaattgttatttccatgacttagcttacaattgtctctgttgaacatcttcatctcatcatatgtttaaatattggatattctgtgtcataag

SEQ ID NO: 640959 - DNA, 623 bp, Homo sapiens
ccttaataaaaaccttccggttttgtggctcaggcggacatcacggacctacagatatgtgatatcacccctggtggcccagccctaaaatttctctctgtgtactctttttctttatttttcagaccagccaacacttagggaaaatagaaataacctgtgttgaaatattgggggcaggttcccctgacaggaagccccaggttctcttctctgagcatattcctagtgaggagggccttacccttactgttagaaggtccattcccaaaaagccttgaggttaagaagcagagagcctaagaaccgaagctgaccttctgattcttggcaaacagatcatcatagttctgcagttttaggttagagtacaggcttttgatcaaggcctgaatctatgttacatatgaccatagtgatctgaagtacattaattcaatcctttaattttattccaatatcaattcagtaactgtttctacaataaagaaatttgtattttcccacaacagagcagtgcctaagctcttcaattgttatttccatgacttagcttacaattgkctctgttgaacatcttcatctcatcatatgtttaaatattggatattctgtgtcataag

SEQ ID NO: 640960 - DNA, 531 bp, Homo sapiens
attaactgtttacataaccacttccagagataagagacaataaactgaaaggatatgaataagtaaactcactggagaggagtttctgtttgtggaaaggggaattttatctgacctggatgagtatcaataacatctctccttgattaaaaactacacattttattaaaaataaaataaacatgatacataaacacacacacatattttagcaaccttaacctactataattaattcagctgtaattaaaataaggatgatacaaaattaaacatacatatttaagctatcatcttttttcaaaacaccttgtgcgtgcctcctggcagttggtgaactttctgatgtattcaacagcattgatctccactttgtctctgcatgttctccttttattttaatttttaccattttttttcccacatraaaggtcttgcagtcacttagaaatgctgagataaattgactggtataaagtaaggtatctgattaatgaaatttactctaaaactaattggccttttcatgga

SEQ ID NO: 640961 - DNA, 542 bp, Homo sapiens
accatcatgaaccaatgggtgtgcattctactgctgctgttggcctgggctggaggtttcttgcatgctgtagttcaacttctttttgtttacaaccttcccttctgtggccccaatgtcattgaccatttcatctgtgacatgtacccyttattaaaacttgcctgcactgacacctatgttactggcctcactgtggttgccaatgatggggcaatctgtgtggtcatctttatgctcttactcttctcctatggggtcattctgcactccctgaagaatcttagtcaggaagggaggcacaaagccttatccacctgtggctcccatatcactgtggtgatcctcttctttgtcccttgtattttcatgtatgtgagacctcctttgaccttacccattgataaatccttgactgtgttttacactgttatcacacctatgttgaaccctctaatctatactttaagaaatgcagagatgaaaaatgctatgaagaagctctggactagaaaaagaaaatgaggtggcagacaaatgta

SEQ ID NO: 640962 - DNA, 364 bp, Homo sapiens
gaattcactcatgatcaagagaagagcatgggggaaaccacccccatgattcatttacctcctacctggtccctttcacaacacatgaggataatggagattaaaattcaagatgagatttgggtggggacacagccaaactatattagcatgttatgtagtccaaggtattkttaagactgaggatttcagggttcatggtggatgggagcatggactagattgcagctctggaatatatgtattaacagcatatccttcagtgcacgtagcatttgcttatccatgcaatgtctgcatattttcatgctcctgtgtggtaacctcaccatttggttaccataaaaaagaggcagaaaagcca

SEQ ID NO: 640963 - DNA, 507 bp, Homo sapiens
tatgtattgtaagcatacccacaatgcatggctcactttttcatattattaacagtttttatgagccaaagtttttattttgatgaagttcaatttatcaattttttttgtatccaaggtctttcagatagaatattatcaaagaaacttcagacttaatctgcaataaagactaaatggatataataagtatttacagaacatttcatccagtggctgtaggaaacattttcttttccttagcacacaaatcattctcaaggatagaccatatgttaggttacaaaacaagtccaaaaacattcaaaaaatttgaaataatatcaattatcttctctgacwacaaggaaataaaactagaaattaataacgagaaattttgtaaacgatactagtacatggaaattaaacaaaatgctcctgaatgatcagtggggtccatgaagaaattaattttatggtatttcctttgtctttttaaagggaggggcatttgaaagacagttc

SEQ ID NO: 640964 - DNA, 572 bp, Homo sapiens
aagccatcaattgcagaagcattctggttagcaagggtccctttgaaaactgcatttactcataacagcccattctttgcacagaataggcttgacatggaataaacatatgggcatttcttgtgctgcaaatgccatagtgaacaaaacagccaatacctctactttcacggatttcaattctaactggraaaaatggacaaaaaaaaaaaaaaaaaacaattacatctgacaatcacgtggtgaaaatgttgacaacaaaatgtagcaaagtaatgtgatagaaaataactcaaagagatggagaatggctttacatggatggctcaagaagacctctaaggaggagaaattgaactgcagactgagtaatgacaaggaccaagccatgtgaagatctaaaagatgatgagcatttggggaataaagaagagctagtacagtggcccaagggcaagaatgaggtcactgcagctggagcacagtgaacaagcgagagagtcgtgctggatgagatcaaacagatacatgtttgagtggggaacaattgtatagactgacaggaggtgaaa

SEQ ID NO: 640965 - DNA, 524 bp, Homo sapiens
ctgcattccagcctgggcaacagagcgagactctgtcttaaaaaaaaatgcacaaagatagtgatgtcaaaagatagaatatgaggttccacatcacattccctcacagaaacaccaatataaatatccatccacacatgaaaatacyttcacaagagttctagatcacaggtgagaacttacagcacccaagtagaagacacaatcaagaaaagatgcattgaatgggggaatgaacagctttactttacccaagtcaccccttccccaagcccatgcagcacaaggctaagagagaccctctctgtcccagggctctcttatgtggaaaagaaaagtgaagtgagaattgacttcactgcagacgcctattcaggcctgcaccaacagtctcaagcacaaggctgattcacgtgaacttaagcaccaggctcaccccagagccaggcaagtccccacagacccaggcttttaaaccaccccagcactaggccagctctcttagaccaagtcacaaaaccagc

SEQ ID NO: 640966 - DNA, 624 bp, Homo sapiens
ttataccctgtaatatggaccataatggggaaaaaagggcaacttggtttgtaatataagatctgggaatggcatggtgaatggttatagactgcaatttagagtctgaatgcctgggctcaaatctcaactctatgcttaatggctataaaagttacttactctttttctgtctcagtgttttcattcataagacagagatgctaatgtctcatcggtttaaaactgtagagtgcttagaacagtgcccgacatacaataagcgttcagcgattaaccttagctgttattacctgagtttgagttcttttcttttagatctatccctgactcacttgaagaaaagttgtgacctctttgggcctctggagaagtcatctgcaaaatgagaagttggccaacctttagcaatccagggccaacacctgtctcttgccaacttattctttccacctgacatggatctttgatttttaaaagattgcttggcaaacttcatttgttaaarcatcatcaaggtttctctcggactttacaaaatgctaggaacagctcacagtgctccttcctgtgcacttctagatcaagtgagatgaatccctttccactccagctttggacact

SEQ ID NO: 640967 - DNA, 582 bp, Homo sapiens
atcacttgtcagtgctttgtatgattggaaatcacttgaaaatccccattccagcctcaggaactcctgtgggtctgagatctcagggtgaaactaagcaggcctaggtaggagcacctcctgaggcacctaaatattcttcctgaagccactaagaaggaatgcagaggggttagtgtctgcatttctcaggtgatcagaatctcatgtgtatcagtccattctcatgctgctataaagaaataacagagactgggtaatttataaagaaaagagatttaatwgacttgcagttccacatggctggggaggcctcaggaaacttatgattatggtggaaggcaaaggggaagcaggcaccttcttcacaaggttgcaggagagagaagtgcaagcaggggaaatgccagatgcttataaaaccatcagatctcatgagaactcactcactatcacaagaacagcatgtgggaaactgcccccatgatccattcacctccctctctctgcatgtggggattacaggttcctcccttcacacgtggggattacaattcaagatgagatttgggtggggaccca

SEQ ID NO: 640968 - DNA, 582 bp, Homo sapiens
atcacttgtcagtgctttgtatgattggaaatcacttgaaaatccccattccagcctcaggaactcctgtgggtctgagatctcagggtgaaactaagcaggcctaggtaggagcacctcctgaggcacctaaatattcttcctgaagccactaagaaggaatgcagaggggttagtgtctgcatttctcaggtgatcagaatctcatgtgtatcagtccattctcatgctgctataaagaaataacagagactgggtaatttataaagaaaagagatttaattgacttgcagttccacatggctggggaggcctcaggaaacttatgattatggtggaaggcaaaggggaagcaggcaccttcttcacaaggttgcaggagagagaartgcaagcaggggaaatgccagatgcttataaaaccatcagatctcatgagaactcactcactatcacaagaacagcatgtgggaaactgcccccatgatccattcacctccctctctctgcatgtggggattacaggttcctcccttcacacgtggggattacaattcaagatgagatttgggtggggaccca

SEQ ID NO: 640969 - DNA, 558 bp, Homo sapiens
ggttaaaagctcttaacacatttcaaaaggtgttatttttgcagagcagagcatgaaattatacatatagaaaaagaaaaaagaactttgaaattttagtagctcaaacttaaatgtaaaaatgttcattttaagtgtccctcctcttcttctcgcttcttatcttcaacaaagagggcctattttaatgtacacagataatttaagtattcacacctatcctgtgtttaaccacaccagagctttggtaaggtctaaaatagtgcatggatcttacccctttgtttgccttctccattgataagagttgttaagagtcttcctcttcctggtaagagagaaggaggcatctcttcaagtggagatttcctttacagaagtaaatttcctttacaaaagaaaaacttgtgccctgtttttagagcttttcctgcctctggttattctagatggtctttagctcaaaataatctacaggtcaaacagacacattttaggwtggcatattctggtacccttcacctggaccttgctctcaaaccttatgagtaagttaat

SEQ ID NO: 640970 - DNA, 561 bp, Homo sapiens
ggaaaatggttcttgcgcactgagtccacctccaggtaggggccacaggaccatttgagtcatgagtcatgggtcttggtggggtcagctggttgccagaatgcaaaaatctgaaaaacatctcaaaagaccaatcttaggtcctacaatagtgatgttawctacaggagcaactagggaagtcaaaaatcttgtgacctcgagccacatggctgttgagcagtaagggattatagaaactatgcctacatttcagcagaggtcaggccctttccataatcctaatcttgcggcctttccttagtcttacaaaggcagtttcagcccccaaaactgaacaaggaagggatcagtttcatggagagactattatcacacttgcttcaaagttaaattagaaactaaattcctcccgtggttagcctggccctgcccaataatgagtgaggacagccagcctgtgagactagaagcaaaatgaagtcagccatgctagatttctctcactgtcataatctttgcaaaggcggtttcaaagtagcactggagtaggaagaacat

SEQ ID NO: 640971 - DNA, 561 bp, Homo sapiens
ggaaaatggttcttgcgcactgagtccacctccaggtaggggccacaggaccatttgagtcatgagtcatgggtcttggtggggtcagctggttgccagaatgcaaaaatctgaaaaacatctcaaaagaccaatcttaggtcctacaatagtgatgttaactacaggagcaactagggaagtcaaaaatcttgtgacctcgagccacatggctgttgagcagtaagggattatagaaactatgcctacatttcagcagaggtcaggccctttccataatcctaatcttgcggcctttccttagtcttacaaaggcagtttcagcccccaaaactgaacaaggaagggatcagtttcatggagagactattatcacacttgcttcaaagttaaattagaaactaaattcctcccrtggttagcctggccctgcccaataatgagtgaggacagccagcctgtgagactagaagcaaaatgaagtcagccatgctagatttctctcactgtcataatctttgcaaaggcggtttcaaagtagcactggagtaggaagaacat

SEQ ID NO: 640972 - DNA, 585 bp, Homo sapiens
gtacactgtgtctgtgctgccaaagagagaaccatggcctctctctctttttccctgcccattccctgagcccctccacccttctccactggacaccaaatatagcttctttctgtctacctccctttatgtcctacccactcctggttctctccagggaatgatattacttaaaaacagascaggttggggacagaaccttggccctcaggagccaggctcgagccatagccaaggccctagtcctagctcattttttacatctgtgtctgggtatcattttgccttgtgcttctccctcctgcttatctgcttagactccaggtatatgtcctgcaggccctgcaggttttggtcccaggcccagagaagcaagtttccacagcatgtctagcatgaatctataataaaatcttgaggacattaagggaagccagcttactggatggactaatctgagtggatatgctgctggggtcctgtaaagttatctctttcactcacattcctggacagttcaaccatggggaaaacttggacataggaggcactcagtagatgcttacacagagttggatgaattca

SEQ ID NO: 640973 - DNA, 585 bp, Homo sapiens
gtacactgtgtctgtgctgccaaagagagaaccatggcctctctctctttttccctgcccattccctgagcccctccacccttctccactggacaccaaatatagcttctttctgtctacctccctttatgtcctacccactcctggttctctccagggaatgatattacttaaaaacagagcaggttggggacagaaccttggccctcaggagccaggctcgagccatagccaaggccctagtcctagctcattttttacatctgtgtctgggtatcattttgccttgtgcttctccctcctgcttatctgcttagactccaggtatatgtcctgcaggccctgcaggttttggtcccaggcccagagaagcaagtttccacagcatgtctagcatgaatctataataaaatcttgaggacattaagggaagccagcttactggatggactaatctgagtggatatgctgctggggtcctgtaaagttatctctttcactcacattcctggacagttcaaccatggggaaaacttggacataggaggcactcagtagatgyttacacagagttggatgaattca

SEQ ID NO: 640974 - DNA, 553 bp, Homo sapiens
atgaattcagttgatagacatgctgagcatcttccatgtcacagatactgtgccaggaggttctccactaataytttcggtgcttttgtgcaaattatgaggaactagaaagaatgatgaaaaggtacctctgtttaacaaaaaggcaccctttcctccaacctgacacaggggcttggtgaggggatcatggactcaatttcaggtttcaattgttcctcttatccgggcacaactgtatcaagggccttgctgtgaggaatgcaaaatgagaaaaacatggactctgccctcaaattgcttcgtatgtggttgggaaaccaagatgtaaattcaaaatagaaccttaggagctaaatatctattgacttcaataaacatattttgagaaccttctaaatactgaatgctaattgccaaagagatgaagaccacaaccgctgtgattttagaggaagagaaacagggctttgggcaccctggaagaggtaggactccagcaggccccaaataagagagacatccagagcctctaggagaatgttaagttgca

SEQ ID NO: 640975 - DNA, 609 bp, Homo sapiens
taaaacatacaaaataggaagaccaatgtctaagacagatgagtatcatgaaagctggattaaaccacagttggggaagtaagacaggcctctgtttcctgacatgccttttcccactccccacttgacacctctgtggaatctcagaggatatgctagagtcttaatgtccttgaytgctatctcctaatcaagttggggactgatattcattcattcattcatcattcattcattcattcatatattctctctctttctttctccctctccctcccccaaccctacccccatttatttagctcctactacaagccaggcactaaggtaaaaataaatgaaacatagtacctgccctgaggaaacctaagagtttaaatggggagacagacttgtaaacaaacacttgcagtaaatctgacaaatatttttagagctctagggctgtgcaggtggcagcaagtttaccaagaaaggaaagggcagttgattctccagtctgcacccaaaataaggctgcctggattcccaggccaatgagatttcttcccaaccccactgctgctaaaggaataaaagaggaagcttttctattaagggccttcgagc

SEQ ID NO: 640976 - DNA, 609 bp, Homo sapiens
taaaacatacaaaataggaagaccaatgtctaagacagatgagtatcatgaaagctggattaaaccacagttggggaagtaagacaggcctctgtttcctgacatgccttttcccactccccacttgacacctctgtggaatctcagaggatatgctagagtcttaatgtccttgattgctatctcctaatcaagttggggactgatattcattcattcattyatcattcattcattcattcatatattctctctctttctttctccctctccctcccccaaccctacccccatttatttagctcctactacaagccaggcactaaggtaaaaataaatgaaacatagtacctgccctgaggaaacctaagagtttaaatggggagacagacttgtaaacaaacacttgcagtaaatctgacaaatatttttagagctctagggctgtgcaggtggcagcaagtttaccaagaaaggaaagggcagttgattctccagtctgcacccaaaataaggctgcctggattcccaggccaatgagatttcttcccaaccccactgctgctaaaggaataaaagaggaagcttttctattaagggccttcgagc

SEQ ID NO: 640977 - DNA, 563 bp, Homo sapiens
gctgcctcttctgaagtttccccttagcctcacatcgttaaacttcccttccttggaggagctgggctggccagaaagaggatcccaagctcctctgaatgcctctcctgcctgctgcctcccaggtgtggccacaggcccttagggcccttcccttgcattacgttaatctctaactcctatttaccctgccctccccagcttactccacaaaacaaaccatcactctgcatcaaggcagatcagggtttctccaccaggtggccagagccggacccaaagtcagggttctgagtctgcagttcccatgctttccattaggccaggctgggagtgatccgccrtgtgggaaagatctgcactgtccaatacagtatgtgactctttatatttaaattaattaaaattaaaggaaaatacaaaattcaatttctcagttgtactggccacatttcaagtgctcaatagccacagtgtggtggtaagtggctaccacattggacagcgcagatacagaacattttcctcattgcagcactgagcagactaatgttgctgttcta

SEQ ID NO: 640978 - DNA, 512 bp, Homo sapiens
taatgctgacagtagggtgttaaagtctcccgctgttcttgtgtgggagtctaagtctctttgtaggtctgtaagaacttgttttatgaatctgggtgctcctgtattgggtgcatatatatttaggatagttagctcttcttgttgcctcaattccctttaccattatgtaatgcccttyttggtcttttttgatctttctaggtttaaagtctgttttatcagagactaggattgcaacccctgctttttttgctttccatttgcttggtaaatcttcctccatccctttattttgagcctatgtgtgtctttgcatgtgagatggatctcctgaatacagcacaccaatgggtcttgactctttatccaatttgccagtctttgtcttttaattggggcatttagcccatttacattgaagattaatatggttatgtgtgaatctgatcctatcattatgatgctagcttgttactttgcccattagttgatgcagtttgttcatagtg

SEQ ID NO: 640979 - DNA, 512 bp, Homo sapiens
taatgctgacagtagggtgttaaagtctcccgctgttcttgtgtgggagtctaagtctctttgtaggtctgtaagaacttgttttatgaatctgggtgctcctgtattgggtgcatatatatttaggatagttagctcttcttgttgcctcaattccctttaccattatgtaatgcccttcttggtcttttttgatctttctaggtttaaagtctgttttatcagagactaggattgcaacccctgctttttttgctttccatttgcttggtaaatcttcctccatccctttattttgagcctatgtgtgtctttgcatgtgagatggatctcctgaatacagcacaccaatggktcttgactctttatccaatttgccagtctttgtcttttaattggggcatttagcccatttacattgaagattaatatggttatgtgtgaatctgatcctatcattatgatgctagcttgttactttgcccattagttgatgcagtttgttcatagtg

SEQ ID NO: 640980 - DNA, 545 bp, Homo sapiens
gttttccaacttggttccattctcctcgtcactttcaggtacaccaatcaaacatagttttggtcttttcacatataccatatttcttggaggcttccttcattccttttcattattttttctctaatcttgtcttcacgctttatttcattaagttgatcttccatctttratacccttctaccgcttaatcaattctgctgttgatacttgtgtattgttcatgaagttctcatgctgtgtgtttcaggtccatcaggtcatttatgttcttctctaaatggttattctagttagcaattcctctaactttttttcaaggttcttagcttccttgcattgggttagaacatgcttctttagctcagaggagtttgttattacccaccttctgaagcctacttctgtcaattaatcaaagtcatgctctgtccagttttgttcccttgctggcaaggagttgtgatcctttggagcagaagaggcattctggtttttggaattttcagcatttttgcgctgctttttcctcatctttgtggatt

SEQ ID NO: 640981 - DNA, 621 bp, Homo sapiens
caggcagggtgccctagtgaggtgttgtcagcattgttcagatttkttttaaagctcatcagctatctttagtgttactatattttatatggggcccaagacaattcttctatttccaatgtggtccagtgaagccaaaaggttggacacctgtggtccagaaggttactgatggggacatatgaaaagattaaaaggacaaagaataatgtgggtggtggaaaatggacttctgcagcttcacacagtgtatatgatctcgtctcctgaaacaagctataggagaggaggagctgtgcattgttcttccctatatctgccatggtgctaagcatggtgtcttcaagcacctaccagagaaagagcatacagactgtcttcttattaaattaaacaagcattggttaagcaccatctttgtggttggccaccataagtacatgtatgattcaaatgaaataaggatattcattgatggtctctgtttttgaggagtttacagctcaactgagaacaattctaagccaatataagccaatgtgtgaagtgtggcatgggttgtctagtttactttgcaagtaatgaggtaattcattataggaggaaatccctccattgaat

SEQ ID NO: 640982 - DNA, 614 bp, Homo sapiens
ttcttattaaattaaacaagcattggttaagcaccatctttgtggttggccaccataagtacatgtatgattcaaatgaaataaggatattcattgatggtctctgtttttgaggagtttacagctcaactgagaacaattctaagccaatataagccaatgtgtgaagtgtggcatgggttgtctagtttactttgcaagtaatgaggtaattcattataggaggaaatccctccattgaattgttggttcttratctaaaccttgagagaaggattttgattcacattgggaagatggcccatcagaatctctggcatacaaagatttactggatgagttccaagcaggagaaactgcataggcaaggctataggctggaaaagccaagaatcatagactctcaggattgggagtgtaagggacactgctggttgccccttcctccttattaacaaccccaattttttcagttatccatcttcctccaaatggtcacgcactttgagggagtcttggcccttcccagaatcaaccagtaggtctcaaatccaagccatcatagtgttgtggttccttgtcagtgattactttaggtgtagatatatgaccta

SEQ ID NO: 640983 - DNA, 541 bp, Homo sapiens
gtgatttgccacaggacttctgggaaaagctttcctcatcacaagaaagcccctcttcttccctggacatttcctgggtaatggctccactggccagggtagggaaggtaaagttggatgtagggcaaagtgaggagtttggattgggtcagggatcatgatgcactttccagtggggtagactctaatttcaaagcaagttttgaggatgttaattctcaagaggactaaagaggagagcccacagggaactacagtactaaccgaagcatgaggagggaagagcctgatgagttcctagatgtggaaatgagagrtggaaatccaagaggccaagaaagaggagtctgtggtatgtgagggtgagctggatgtgaaggtaaaagtgagaggaagaattgtcagattgtgaactgtgttgtggtggactgacggttgtgggaagttgagcttgggctccagaaatggaacaatgattaaaacaactactaccacctacttttactgagtggcctgtagtcagtacaagataataaagttg

SEQ ID NO: 640984 - DNA, 605 bp, Homo sapiens
tatgtgcatcagtctcagggctagagtcccttgcagggacatggggtgaaatggatttgtgaatttccatgccacatcaaggtgccatgttaaagagcctcagcaagaaagccagggcttgcaccttgggcaggttcttcagacctgcacaggcagagccttgtaagtacacaccaaacacttcatggagctcctgctcccaagatgcccccttaagtaggtgtcaggatgtttaatggcctccacattttgaaacctccctgcacagcttgtggagcactctagccaatacagatgttacttgtgtgccccctgcagcccactcctgaacactcctagacaactccctgcactgggttccaagacaggctgagaaattgcctcctaagaggcctttgaaaagaaagatctcttcagcaagcctgacatgggaacagatggaattgattagcttttaagagacccttgagctctgcatttctgcagctttgcctttcctagtagcatacactgagaggttcatgaagytataaattaatcagctcaaatcaaggccaaggggaaaaatgactccctgccccacgggcagggcatgggcacaaatc

SEQ ID NO: 640985 - DNA, 641 bp, Homo sapiens
ggagtagtggatagatagaagaagttttatttttctgatgacttccaatagaatcctagaggagtgagcttctattatccatggctccctacttaaagacagagctctaactctataactttgtttaaaatgcattgcatgttaaatttttaaaacatgaatgtaaaaagtaaatgtaaaaagtktaaaaattcctttaaggatcttcagcaagaagacttgcatagggcttagtgggcactcagtaaatgtttctgaaacttaattggatttaaatgctaggatggtgagataaaagtactttcaaaaagtttctgttaccaggataaaggatagactttatcccttatttgcaaagtaactttatccccaaatccagcctatcagctggggagaaatcaatagctagagtgaaatgagattatgtcctacacttccagaatccttggttctggaaaattaataataatgtccagtcctcatcacaaatgaggttccatagattgccctggcctgctgctgcaggatgaaccctggataagccaatctgtgcttcccacgtgcagccaagtggacgacatagatgtgatgttggcatggtaacatttttactgactggaagaacagatgaaggtagggtg

SEQ ID NO: 640986 - DNA, 573 bp, Homo sapiens
cttccagttctgcaaatttcattcattttaggtgtcctatacaggtgcaccattttacatatatatatatatatatatatatacacacacacctcatttttaccatacttttttaatgtttgggtgttcagatagtaacaaatatttactattttgttataattacatacagtagtcagtacagtaacatgatgtacatgtttgtagcctaggagcaataggctatgccacgtagcctaggtgtgtaataggctataccacgtagcgtaggtgtgtaataggctatatcatgtagcctaggtgtgtaataggctataccatctaggtttgtgtaagtgcactttayggtgttcacacaatgatgaaattgtctaattatgcattttccaaaacatacatccactgtgactgtattttgttgaagatttttatatctgtgttcatcaaggatattagcctgtagtcttcttttctttgtagtgtcctcgtctggctttagtatcaaagtaatgctggccttgtaaatgagtttggaagtatttcctcctctttttggaagaatttgagaaagat

SEQ ID NO: 640987 - DNA, 573 bp, Homo sapiens
cttccagttctgcaaatttcattcattttaggtgtcctatacaggtgcaccattttacatatatatatatatatatatatatacacacacacctcatttttaccatacttttttaatgtttgggtgttcagatagtaacaaatatttactattttgttataattacatacagtagtcagtacagtaacatgatgtacatgtttgtagcctaggagcaataggctatgccacgtagcctaggtgtgtaataggctataccacgtagcgtaggtgtgtaataggctatatcatgtagcctaggtgtgtaataggctataccatctaggtttgtgtaagtgcactttatrgtgttcacacaatgatgaaattgtctaattatgcattttccaaaacatacatccactgtgactgtattttgttgaagatttttatatctgtgttcatcaaggatattagcctgtagtcttcttttctttgtagtgtcctcgtctggctttagtatcaaagtaatgctggccttgtaaatgagtttggaagtatttcctcctctttttggaagaatttgagaaagat

SEQ ID NO: 640988 - DNA, 577 bp, Homo sapiens
gactgatctgaggcaaatacagaggaatgctcaacagtagctgaagtctaagatacctggctctgtaggtaaaaataatcacatccctaatcaaaaaaactcmactcagtcaacaacttttaaaatctttcaagtcttgaagctgttgattagctcagaggaaagactcagaaatttggaaatatttaggcctgggttctactcctggttttcccaccagcttgctgtgtgaccttgggcaagttacttaccactctaacctcagtttcctagtccacaaagtggggataataatcatcataccttcctgccggagtcagagaatgagaggacacgatgagtgtaaagtatctgtctcagtgcctgacccaacctagtgggtatccaataaaaggtcatcattgttattatggatgatgatattatgtgcaataaccttgcattagcttcttcaaactctctacctccccaccaccctgagtttattatctagtagttacaactcaagaaatcaaataggagacacatcgccatggttgctaaaacttgttgttgaccacttggaacttcttgacga

SEQ ID NO: 640989 - DNA, 567 bp, Homo sapiens
ctaattctcgttggtcttcaaataatgtttctgttataccccattgcaaggttttttggggttttttgtttgtttgtttctgatctgactagatcagaaaaccactctggatcagagatgaagtcttgctcacacttgttttccatgtactcagcacaatgcctggcgcaaagcagaatgcatgaaatcagtacagggcctaagcacttgttaatctcaagtgtgggaaattgaggaacccccatccattccagggaggtcccactgatggagtcacatggacagatgtcagggtccacacctttacacctgggctctaaagtcaggagcactccacatccactggttatctgggagggtyagaaggaaagggggcctccatggggctgggagggggacatagccactccctctgtaacttcccacctcagaggcgaacaggatgggctttccaaggtacaggaagttagctatggttgttcagtgggttcaaataatcaaaatattcttcaggatagaaaataacaccaaagaaggattatgagtgaaccaccactaacatgttca

SEQ ID NO: 640990 - DNA, 619 bp, Homo sapiens
aatgcatgaaatcagtacagggcctaagcacttgttaatctcaagtgtgggaaattgaggaacccccatccattccagggaggtcccactgatggagtcacatggacagatgtcagggtccacacctttacacctgggctctaaagtcaggagcactccacatccactggttatctgggagggttagaaggaaagggggcctccatggggctgggagggggacatagccactccctctgtaacttcccacctcagaggcgaacaggatrggctttccaaggtacaggaagttagctatggttgttcagtgggttcaaataatcaaaatattcttcaggatagaaaataacaccaaagaaggattatgagtgaaccaccactaacatgttcagttgtctgtggccaccccatcccgcacttcagtcacacgtccctgaggacgttccacagaaagcagtggaaagtgtgattttaaagctcttccaaggcgtggacagttacctcacttgagtctctccagttctgccctccaggcctacacagccttcgaggatttcttagatctgcttcctgggcttcttagacctagctatgttttcttgctgtactgttgcctctg

SEQ ID NO: 640991 - DNA, 586 bp, Homo sapiens
ggaagttagctatggttgttcagtgggttcaaataatcaaaatattcttcaggatagaaaataacaccaaagaaggattatgagtgaaccaccactaacatgttcagttgtctgtggccaccccatcccgcacttcagtcacacgtccctgaggacgttccacagaaagcagtggaaagtgtgattttaaagctcttccaaggcrtggacagttacctcacttgagtctctccagttctgccctccaggcctacacagccttcgaggatttcttagatctgcttcctgggcttcttagacctagctatgttttcttgctgtactgttgcctctgggagactgctactgagctctaaaaatagcatcttgcaggttctcagaggacaggttcccttcctgccaaaaaatatgtggaatggtggttccattggcaacagcgagcctttgttagagttgaaagtgcatatccctcctcctgagcccagctgcaggggtttgcctaatgtcactgactctgttttaattaagccctttattgctggacttggtgccaagaagcctaaatgaacatgtctacttgagtggg

SEQ ID NO: 640992 - DNA, 553 bp, Homo sapiens
ccaaatgtgaaagccatgaatcaggggacagtgatgtatgttcctgagcaattccctgtagcttccctttaaacagcaacctcctgagtacacatacaatataattttagatatagatattaggccaggcacggtggctcatgcctgtaatcccagcactttgggaggctgaggtgggtggatcacttgaggtcaggagttcaagaccagcctggccaacatatagtgaaatcccatctctactaaaaatacaaaaaattagctgggcatagtggcacatgcctgtagtcccagctacttggggagctgaggcaggagaatcacttgaatctgggaggcagaggttgcagtgagcagagatcatgccactgtactccagcctgggtgacagagtgagactccatctctcaaaacatatatatatatacacacacacacamagagagagagagagagagagattttatttactcacaacttttcaggaataaactgtattttatgtaaagcaagacatctatttgtttaaaccctggattccataggtaggtag

SEQ ID NO: 640993 - DNA, 582 bp, Homo sapiens
ctcaaaacatatatatatatacacacacacacaaagagagagagagagagagagattttatttactcacaacttttcaggaataaactgtattttatgtaaagcaagacatctatttgtttaaaccctggattccataggtaggtagcatgccatatccaccatatatttttccatccctcaagttccaaaattgattccctgaagtaaacaggaaaaacttgggagaagtaatcagtagctaaaattatttttgtttttgtcctgttccagttaatggctattaaaagcaagatttccatgactgcttctattccagatgcccatgttctcagctctaggagtagcaaaagaagttgcattctaatgactcagaggagtcattagccttgatgagtgttcagattgcagtaactcactgcaggatgtttagtgccttgggatccccgggcagcctataatttgctcaaaagctggaaatgtttctgcacctctgcagagcctggcctgcrgcttcctgtgttttcccaccttcctgcctcccattgtgcctcagagcaggataataccactttaaacatgt

SEQ ID NO: 640994 - DNA, 592 bp, Homo sapiens
aaaatccagtagagagaccagttaggagaacagtgcagtggctcaagtgaagatggatgatctgatccgaggcagtagcaataatatgaagataatggaacagatgtttaaaataggaagcaggcacaatcagcagaacttggtgaccaattggctgtggttgactaacagagaagaatcaaagaagactggacgtttttgaacttggaagatacagrgtaacagagagcaggaggacagcagagtaaaaaggctcaaaaggagtaagagggaaaagaggattcatttggttagggacttgtgggaattgggaagactattggacatttgagtagcaatgtccagcagacagttatctacaggtgtcatctacttagagaggacagtaggagccataacaatggatgaggatgccaaggttaaagccattaagcttcacatggccagactttactaaatgttgcatttgccaaggtctccccttggtttctttttcattcattcatttaacagataattattgcatggtctttctgtgttaatgataaactggagagatcagaaataatttcaaagtctgagatataatctt

SEQ ID NO: 640995 - DNA, 575 bp, Homo sapiens
tttcatatgcaatagtgatcctagaagatgtcacaaggagccctgttctttgcagatcggatttttcataatccaggagtaggtcggagagcacttggattagcctctaaaccctggagctgtagcagcagcacgaacacktattttttattttctcctttaattatgcccttccctacccaccaccccgagtctcaggctgagagtgtctatttagtttccttgagggagagtgaagtgacttaatgtggtttccctccagctgtttctgcagcccccacctgaagctcagaatgcaaggcaggcatctttctgccatctcttctcagtagggtttgtcaccagcctgccaggaaggactggtcacctgcaggtgaataaatgctccggccttatcccagacaagctctttcacaccggcaaagtcagtgggcatccagtcgccaagcctgatgggctggggctgctaaaatgagcaccctgtcacaggaagtgctgtccctgattgatggtgccctgctgtttttcaggccgtggtggtgactgatggggagcgcatcctgggcctgggagac

SEQ ID NO: 640996 - DNA, 465 bp, Homo sapiens
gcagcaggagaaaaaatgatgttccatatagaaggtacatcatgagaaaagcaagaacacaggaaaagcaatgaatatacagggaaggcaatgagtatctacaagaatgggccaactaaaaatgaatgttcagtgattttaaataaggttaaataagaatggtgctggctacatctattatttaggtttctccagagtaacagaaccaataggatattaggtatttagatacttsagagtggatttattatgagaagtggctaacgtgatgatggaggtaaagaaatcccatgatatggtgtctgcaagctggagaaccagggaaactggtggcatagctcagtataaatccaaagtggggccgctggtgcacatcctggagtcagaaggccaaagagcctggagttctgatgctcaagggccggagaagatgggtgttccaaattcagaagagagaacgaattc

SEQ ID NO: 640997 - DNA, 567 bp, Homo sapiens
actggtggcatagctcagtataaatccaaagtggggccgctggtgcacatcctggagtcagaaggccaaagagcctggagttctgatgctcaagggccggagaagatgggtgttccaaattcagaagagagaacgaattcacccttcctctgcctttttgttctatctgagccatcaaccaactggatggtgcctgcccatatggggtgagggtgaatcttccttattcaatttactaatacaaataccagtctcttccagaaacaccctcacaaacatacccagaaataatgctttaccagctatctgagtatcccctaaaccagccaagttgacacctaaaattaaccatcacactaagataggccttgcaatccaggcagaaggtcatgattatgagagctcaaaagtggaaggggmtacagtcatctaatgcagtggtttttaaaccaagcttccctgggccccaggactccaaagaagcatatcaggagtgctagaaatgaaatactttccaccaaccataaaaaatgtaaaccacttgaggaaacactttattgtttttca

SEQ ID NO: 640998 - DNA, 401 bp, Homo sapiens
ctaacaagcctacccttccaccatttcatcaccccaccaactgcagtcctctgaccagaatacccatctacctacctacctgctaccccagcaacccagttttcttgaatgttccaggcactgtgctgagggcagtgaggaatacagcagtgaaagggaagtctgcaccctgaaggagtgacactcatttattcaaattgggcaacatatgcaacctatgcctatgatttactgtgggccaataaggccctgtttcaygcaggtgacatccattaaatggacaaacagtgggcagacagcatgctctgaagctagtggtgggagagatcactatggcctgatggtagagagcagcctcgtggaggagggaagtgatctgggcattgaagaatgagcagagt

SEQ ID NO: 640999 - DNA, 554 bp, Homo sapiens
gaggatctgcatttctgacaagttctcaggtgatgctgatgctgttggtccagaaaccacactttgagaaccactgttgttctcagcgaaaacctggatggccctgccaggaagtcttctgtctaagtgggcttagatgagatggccttatggggmggatgtgtgtgtggaggggcctgggtccgtggcaccccagacaccaggaagtgagtgcctcttgcctagaggcagaagcagccttgaatgtcctgagtcagagctgcgacatctgagtttaatctgtgtggagcaattcaagggagggagccaagggtggggggagcgggagctgggaaggcggctgcatatttcatactgttcccagctttgaaggtccagggaaagcgtgtggcagtcggtgacagcttcatcgtaatgagggatggggagatgcaccctgcttggggtgaggcgctcatcagatgggtggaaggatggtcagggaggggcaggggaggtggtggtaggtgtagatgggaagtggtggtgggggagggtagaatctgtagtgtggg

SEQ ID NO: 641000 - DNA, 537 bp, Homo sapiens
gaggatctgcatttctgacaagttctcaggtgatgctgatgctgttggtccagaaaccacactttgagaaccactgttgttctcagcgaaaacctggatggccctgccaggaagtcttctgtctaagtgggcttagatgagatggccttatggggaggatgtgtgtgtggaggggcctgggtccgtggcaccccagacaccaggaagtgagtgcctcttgcctagaggcagaagcagcmttgaatgtcctgagtcagagctgcgacatctgagtttaatctgtgtggagcaattcaagggagggagccaagggtggggggagcgggagctgggaaggcggctgcatatttcatactgttcccagctttgaaggtccagggaaagcgtgtggcagtcggtgacagcttcatcgtaatgagggatggggagatgcaccctgcttggggtgaggcgctcatcagatgggtggaaggatggtcagggaggggcaggggaggtggtggtaggtgtagatgggaagtggtggtgggggagggt

SEQ ID NO: 641001 - DNA, 478 bp, Homo sapiens
gggcccccggcggaggtgggagagagtcaggcaggagccgaggccggggagccctcttcgtcagctggtgctcactgcgccgcgccagcgccagccgggactcacccgcagctccatgcttgtgcccggttcgactcgtccatactccaagaagaggcaggtacgtgccacctgtcggggatccgggagggrggattcggggatcagtgccggtttggagctcagaaagtaaggtgtccacgacattctgggcagagtggacactagaaatatagggagagagccggctgtgcagggacgctccagctgtgtctgccagttgtgtgagggctgcctgctgacagcccagggtgccaggaagagccaactgtgtgctgatcagtgtattctaaggaaatgctgctttggcgggtcctcctcgctgtgccccgtgtatatcggtggtatgtggcctgagcgacactgacaaaccccctcc

SEQ ID NO: 641002 - DNA, 567 bp, Homo sapiens
aaaacctcagcgcagactaaactacagacccaccctcagccccaatcatgacagcagtattcccctttactggggatcagattccactgggaatctgcctcctccccacacaggcatggcccaaccctcctgggagtctgccgccctccaactctccagaagggacaaccctggctcctccccccggctccagggccaaggtgaagggaattttgagagaggacctcaaagaagtggcagattgccctgggacaaactcagccaccctcatccagaagcaactcataaggcactttagccgggaatgccctgcagttgagctagtgtttcattctgagctcatgccccagaagatactgccaaccagcagaggcctctccagggtcaatagtacaagacctttatttaacctcaccctgatctctccaccccttatcgtcatttcctggagcagagtgcgtcttgctgaggtgagaacaaccctgctcgtgcggcctggaccwcttctttctaaaactgggtccagtttctttctagatctccatctggggatcttgccttctgagg

SEQ ID NO: 641003 - DNA, 618 bp, Homo sapiens
ggggggcaggggcgggtggcagggggcgccacataaattcagaattatcccctccccatgcttgtgtaagcaccaacaaaatgccaggccaggggggcgcagctcagcacttgtataatgagggcctcccctgagacttcaccttctgcttaaaatgcagagaggaggaacagtgatggtggaaaaaaagtgttcactaacccaagtggggactccaagccagctcaggtggctcagccctgcagagacccaggagccccagtcccaaccctgtcatctccctactctgccccacttctcctgttcccggggtctatggaaggacragctgttcccattgagccctgccagggctgcgctttaacccctacaatccttcctaatccccctcagctccacccctccagctgctcctccctagccctggcattctgcccgctggcctctgcccagcccttgccccaccctgcccaggccaccctctcctctccccaagaagatccaggggttggcccagggccctccagagcacagtcagcaagctgggcacctgcaactcggaggcagagccagggctgaggctcagagtctggcccagcctattctcacccacccagt

SEQ ID NO: 641004 - DNA, 542 bp, Homo sapiens
ttcatggggtttattgtcttattactgaattgcaggaggtgactttgaaaagtttttcattttggatcaaatcttttattaaatataggatttrggaatatattttcccagatcgtggcctgtgttttcactttctaaatagtgctttttgaagacaaaatgttctaaattttgatgatgttccattcattaatttttttttctgttaggagctatacttttgctatcatatccaagaaatctttacctagttgggggtcacaaagattttctcctttgtttttcatttaggtctgtgatctgttttgagtttacttttaaatatggtgtgagatactctggtttctcttcagatcatataagtctttgtttcatcttttaaatacggtttgaggtgaaaatccaagttcatttttttttaattttttgcctgtgtgtattcagttgtaccagcagcattttttgaaaagtctatctttgcccattgaattgctttggcatctttgttaaaaaacagttgaccataaatatcaggatttatg

SEQ ID NO: 641005 - DNA, 542 bp, Homo sapiens
ttcatggggtttattgtcttattactgaattgcaggaggtgactttgaaaagtttttcattttggatcaaatcttttattaaatataggatttaggaatatattttcccagatcgtggcctgtgttttcactttctaaatagtgctttttgaagacaaaatgttctaaattttgatgatgttccattcattaatttttttttctgttaggagctatacttttgctatcatatccaagaaatctttacctagttgggggtcacaaagattttctcctttgtttttcatttaggtctgtgatctgttttgagtttacttttaaatatggtgtgagatactctggtttctcttcagatcatataagtctttgtttcatcttttaaatacggtttgaggtgaaaatccaagttcatttttttttaattttttgcctgtgtgtattcagttgtaccagcagcattttttgaaaagtctrtctttgcccattgaattgctttggcatctttgttaaaaaacagttgaccataaatatcaggatttatg

SEQ ID NO: 641006 - DNA, 539 bp, Homo sapiens
gcctgctaatttaacatatttataagttctcatttggcattaatttgctgatttatctcttcattatggctcaaattttcctatttcttattgcatggtggtaattttttactggctgtcagccattctaaattttaccttaatggatgttgtctatgtttgtattcccataagttttcttgagctttgtcgtgagacacagttacttggaaatggtttgatcttttaaagacttgcttytaagatattttaacaagaaatgaaatccagggctaattattccccattactaaggtaaaacattatgtgtactttacccaatgccatgtgaatctttgagattttccagtctggctaataaaacagtattcctattcctgtttgagtgctaactactcaattaaaaacctctaattcttcagattgttccttctttggcctggagcagtttcctcacatgtaagccctactcagtaatcagctgagtactttcctctctagtcccctgttctgtgaactctatccagcatggtccgcct

SEQ ID NO: 641007 - DNA, 635 bp, Homo sapiens
actttcaagaaaaactgtactattctgtcatcactatgtcatgtagaattacaygaaaactatgcctcacaagcagtagcaaagaaacaaaatcacaatataggaagtccttaaaataatcagaaatatcaaaaatgtgaacatgactgaaggtaaacacagcctgttaaagaaagctgtttttactatttaagcctgcaagtggttaaaacatatatccattttaaattctactagagaactgaacacatggtacatttaactatttcccaccacagaactcttctgcttttcattagtgtatttgattatttgatttttgcacctgatcacagtgcctgtggccattccttcttgagtatctccaaagacattggtgcttagtgagtagtgaacctagctagccttcactattcaccaaactcatctccccccgtattcattaagatcctcttccttccatgactcagataaatactgacactcattgctcttctcaagaagagcaatacgcttcctcttgcgccgtctgtacttcattcatattttagacatgtttctacctatccattcaacaaaaattaatctggtgtcatgtgtttctaatattttataactctgcaacttgaaaggag

SEQ ID NO: 641008 - DNA, 622 bp, Homo sapiens
tcagcataataataataattatagagtaataacttcataaattgcagatgttattgaatggtcaccatatgttacatgttatatgaagtccttaacatacactgtttcatgtaatgctcaaaacacccctgcgatgtagggatcattacccctactttagagatgagatttagagagacatagatagttaggcgattgagccaggttttgaaaccaggtaagattccaaagcccatgagctgtcatggatttctctcaagtacttttaaaaatcccattaaagatttatagcatttacaaatttcattcaatttcattatgaaattttcatactattttcatgtatagtagatgaaacagtaagttaaaatatagtctgtgttaagaagctcgttayctatacaatgaacaagatttaagaaaaggtgacaggaaaattccataatccttatttattctagtgaagaacagcaatgtaagaagcataatttttaaatttccaaaataaataatctaaatattatgaacaaaaactaaaacctcacttgtttacatatatagtaagatgagaggataaactgcatgagtaagcttttcaatgtgtttatataaacttacaaga

SEQ ID NO: 641009 - DNA, 534 bp, Homo sapiens
ccacttagaatctgctagacacaagctcctcaagagcaggtaccttgttgtctccactccactgctgtgtatcactcagtcttaacttaatgatggcctattatatatgatgaaaaaagaaatgaatayacaaaaaatgacaatttttttttttgagatggagtcacccaggctggagtgcagtggtgcaatctcagctcactgcaacctttgcctcccaggttcaagtgattctcctgcctcagcctcccaagtagcttggactacaggtgggtgccaccaggcctgggtattttttatatttatagtagagacggggttttcccatgttggccaggctggccttgaactcctgatctcaagtgatctgcccacctttgccactgaaagtgctggaattacaggcgtgagccaccatgcccggcaaaccaaaatatttattaaaagcagtatacacggctcacccacacatacaatcacattcttataaatatgtaaactggttttattaaaaatgaatttgtaccagccttt

SEQ ID NO: 641010 - DNA, 541 bp, Homo sapiens
tctcaccaccactacacccccacttagaatctgctagacacaagctcctcaagagcaggtaccttgttgtctccactccactgctgtgtatcactcagtcttaacttaatgatggcctattatatatgatgaaaaaagaaatgaatatacaaaaaatgacaatttttttttttgagatggagtcacccaggctggagtgcagtggtgcaatctcagctcactgcaacctttgcctcccaggttcaagtgattctcctgcctcagcctcccaagtagcttggactacaggtgggtgccaccaggcctgggtattttttatatttwtagtagagacggggttttcccatgttggccaggctggccttgaactcctgatctcaagtgatctgcccacctttgccactgaaagtgctggaattacaggcgtgagccaccatgcccggcaaaccaaaatatttattaaaagcagtatacacggctcacccacacatacaatcacattcttataaatatgtaaactggttttattaaaaatgaattt

SEQ ID NO: 641011 - DNA, 599 bp, Homo sapiens
gtagccactgtttgttgagggaatgaatgaaatgaatattcgtacaattttttttttaccaaactcaagctgctttgcctagtttgcaaggccatctgtaatttgatttttttcttatctattctgttgttcttcctacttcttccctagagagtaccttttgtcccattcaagcagttatgcaatacagttgacctttgaacaacacaaggattaggagtgttgaccccttgcacagttaaaaatttgagaataatttttgactcctcaataatttaactactaatagcctactgtggaccagaagccttactgtagcataaacagtcrattaatgcattttgtgtcatatgtattatatactgtattcttataataaagtaagctagagaaaagaaaatgttattaagaaactcataaggaagaggaaatatgtttactgttctttaagtggaagtggatcatcataagtggaagtggatcatcataaagatcttttttctcatcatctttacactgaggaggaggctgaggaggaggaagaggaggaggttggtcctgctttctcaagggtggcagaggtggaagaaaatcaacat

SEQ ID NO: 641012 - DNA, 542 bp, Homo sapiens
gatatgattatttgatagagtagtagctgtggatttttagtaggcaataaggagctactgtagatacttgagtaagcatgatgcggtgaaaacattagaaagacatatctctcattagtttataatagattggaagaattgaatactaagaaacccgctagaagatgcttgtagtaatccagatattgatggatartgtatatattctagagtcaaaactcatagttgagcaggatcagaggatggaatagggtagaagtttttccatttttgtagagagacataattataccagtttatgtgaaactttgatactctttgaaagtttgatgcagcaagctgtgttacagccagcttttaaaaattattaattagtcatttacatttgtgatgttaatgttgtaggtgctagaggcatatgaataagacagtgtctcgtaatattttttcaaacctaagactgggctgaatataatattttaagttaagtttcgttcttgatctgtatcctcttgttttgaatctgtgccacattctctgcc

SEQ ID NO: 641013 - DNA, 622 bp, Homo sapiens
atcattctgagagagcaacaaaaaaggaaaacttaaggccaatatccctgatgaatatagatgcaaaaatcctcaagaaaatactagtaaaacgaatccagcagcacatcaaagaattaactcaccatgattaaataggctgctgcctgggatgcaaggctgatttaacatgcaaatcagtaatgcaattcaccatatgaatggrattaagaatgaaaacaatgtgatcatttttaatagatgcagaaaaggcctttgataaaatacaatatcacttcatgctaaaaacctcaacaaattaggcattgaaataatataccttaaagtgataagagctatattatgacaaacccatagccaatgtcatactgaaatggcaacagctgaagcattccccttgagaactggagcaagatagggatacctactcttaccgctcctattcaatgtacttcgattttataaatttaaaactgaggcctctgagagcaggtcatacacagtaagggcttgaacttcaaagacttagtactttatagaataacacactacatcttagaatatgaaattttaatgaagttggattttgttatttcatatgaatatcctcattaaaaccctt

SEQ ID NO: 641014 - DNA, 558 bp, Homo sapiens
actgtgagacattactctatggtggtgyggtagtagtagttgttataatcattgctgactttagtgtttttctgagtcttaattctttaattccaaagtgctctgagaccacaaaaggatgagatccctgttctaaaaaataataataaaaataagaagagatccctgttctagaatggggtgaatgctcaaggtaatgtaatacttctggggacttacaggaccagcaggtgatcctctcctggtaccttgccagtgcaaagcagccttttttcaaacttccatgtactcaatcagtctttactattacagcagtgcagtacattttttctggtgaacaagagaagtgaatggcaggattagttgtaggcatgctaacattttattaacagaagacctgtattgggaagttacatctttttaggctgtggtttagattatcaggtgaatgagaatttcctttaaggaaaacaccttacctatgtagaccagactctgtaacactttttttttttttgtattttcttttggctacagcaccaggttatgaggcaaaat

SEQ ID NO: 641015 - DNA, 558 bp, Homo sapiens
actgtgagacattactctatggtggtgcggtagtagtagttgttataatcattgctgactttagtgtttttctgagtcttaattctttaattccaaagtgctctgagaccacaaaaggatgagatccctgttctaaaaaataataataaaaataagaagagatccctgttctagaatggggtgaatgctcaaggtaatgtaatacttctggggacttacaggaccagcaggtgatcctctcctggtaccttgccagtgcaaagcagccttttttcaaacttccatgtactcaatcagtctttactattacagcagtgcagtacaktttttctggtgaacaagagaagtgaatggcaggattagttgtaggcatgctaacattttattaacagaagacctgtattgggaagttacatctttttaggctgtggtttagattatcaggtgaatgagaatttcctttaaggaaaacaccttacctatgtagaccagactctgtaacactttttttttttttgtattttcttttggctacagcaccaggttatgaggcaaaat

SEQ ID NO: 641016 - DNA, 609 bp, Homo sapiens
cgaatgggatgtaattaaactaaagagcttctgggcagcaaaaaaaaactattaacagagtaaaaagacaacctgcagaatgggagaaaatttttgcaagctatgcattcgacaaaggtccaatatacagcatccacaaggaacttaaacaaatttacaaaaaaaaaaaaaaamcctttaaaaagtaggcaaagacatgaacagacacttctcaaaagaagacatacatgctgccaacaatcatatgaaaaaaaagctcaagggtcatgagggattatgacagacaggaggcagaactagattgcagctctggacagagcagcatgcggaggcttgcattgtgagttttagctccagatggactgcaagaacagactagcaatcctcacaggacccacagaccccccgaaggaagcagactgctcttgcaggacctgggagacaccccaaatacttttaagtcccctaaccacggaaatgggaaagggagaccctcatctcctgaacacacacccccactggagaagctgaaagtctgtttgtgggagaagttcctgacttcacctggagctgagtcaagttagagagctgagctgagagacatacagg

SEQ ID NO: 641017 - DNA, 616 bp, Homo sapiens
gctgtagagctgaagacttgstaactcagcatgcctggttagttctttccaaactctccatcagataactccatttcctggggccaagaaaattaaagggcagggaggataccaggagtatgacatggcatgagtgtcacaaagatggaaaacatctagaatgaggccaaattacctcacaaacaaaattcaagagtttgtatttttttaaccacaaagcttatggtcaatgaatcaggggaggatgggttatctccctatgcagagatgtcaggagtctattaaaataacgctaatctcatcttcatggatctgtttcttcaatactagtcattactttttctatatcttctcagaatccctcatgaacggcatattactctgagatcagattctaagctaatctcagaataatacactaatacaatttttaccatatacattttacacatagctgaaaatttacatcttctcttctttgtcatcttaagttatgtgccactacattatccagtgtagcacattagagattctttgataattaaatgacattaagagactttaaaagtcataaataacctcctatattaaaatgctaaaaaagaaaaatttccca

SEQ ID NO: 641018 - DNA, 546 bp, Homo sapiens
atatatgtatgtgtatatatagtggtgcagtggtacaatcatagctcattgcacccttgaactcctgggcttaagcgatcctcccacctcagcctcttgagtagctggggccacaggcatgtaccaccatacctattttttttttttttttgagacacggkgtcactctctcacctaggctggagtgcagtggcacgatctcagctcactgcaacttctgactcctgggttcaagcaatcctcgtgcctcagccctcccaagtagctgggattatagacacgtgccattatgcccagctaagttttgtatttttagttgagacagagttttgtcgtgttggccaggctggtttcgaacccctgggctgaagtgatccctttgccttgacctccccaagtgctgggatttcatgtgtgagcccccgcgcctagccctaattttttttttttttttttagtgtttgtagagacgaggtcttgctaatttgcccaggctggtcctgaactcctgcgttcaagtaattctgcctcagcctctcaaagtgc

SEQ ID NO: 641019 - DNA, 631 bp, Homo sapiens
ttcatccatgttgatgcaaatgaaagaaacttctttacaaaactgagtgatattttattatgtatataattcctttatccatctgttcataaacacttaggttttttcaatagcttgggtattgtgagtaatgctgcaatgtgatgtgcagttgtttttaaatcagaagaaaagaggacattgcttatatatactaaagttacctttattaaagatacacacrcgcacacaccagcatttttactcctttatgtgtttgaaattactatataatgttctttcatttcagcccaaataactcctcatagaattttttatcatcctactgcattcttaaaagaggtcagctgtaaatttactgtgaatcactaataactgatcttcccttatctgcaattttactttccatggcttcagttacctatggtcaactttcacctgaaaatattaaatggaaaatttcagaaataaacaattttcaattgcatgccattcgagtagcatgatgaaatctcatgctatctggcttcatcccacttgggatgtgaaccattcctttgtccagaatattcatcctgtatatgctactgacccattagtcaattagcacctgtcctggttatcagattga

SEQ ID NO: 641020 - DNA, 631 bp, Homo sapiens
ttcatccatgttgatgcaaatgaaagaaacttctttacaaaactgagtgatattttattatgtatataattcctttatccatctgttcataaacacttaggttttttcaatagcttgggtattgtgagtaatgctgcaatgtgatgtgcagttgtttttaaatcagaagaaaagaggacattgcttatatatactaaagttacctttattaaagatacacacacgcacacaccagcatttttactcctttatgtgtttgaaattactatataatgttctttcatttcagcccaaataactcctcrtagaattttttatcatcctactgcattcttaaaagaggtcagctgtaaatttactgtgaatcactaataactgatcttcccttatctgcaattttactttccatggcttcagttacctatggtcaactttcacctgaaaatattaaatggaaaatttcagaaataaacaattttcaattgcatgccattcgagtagcatgatgaaatctcatgctatctggcttcatcccacttgggatgtgaaccattcctttgtccagaatattcatcctgtatatgctactgacccattagtcaattagcacctgtcctggttatcagattga

SEQ ID NO: 641021 - DNA, 585 bp, Homo sapiens
tctgacttctcaggctacataataaaaggttatatgacttctgtttgtatctccctctccagaacgactagttgaaagactggaaatcttagccagagcaatcaggtaagagaaagaaataaaaggcatccaactagaaagagaggaagtcaaactatctctcttcacagatgatataactctataatgagaaaattccatagtctctgcccaaaggccatagacctgataatcagtaaagttttgggatgcaaaatcaatgtataaaaaattaatatcatttctatacaccaagctgtgagccacaccaagaacaaaatcccattcataacagctggaagaaaaaataaaaatacctaggaatacagctaaccaggatgatgaaagatctctaagtgagaattataaagcaatgctgaaagaaatcatggacgacacaaacmaatgaaaaaacattctatgctcatggataggaagaatccatattcttaaaatggccatactgctccaagccatttacagattcagtgctattcctatccaactatcaatgacatgtttacagagttagaaaaactattttaa

SEQ ID NO: 641022 - DNA, 585 bp, Homo sapiens
tctgacttctcaggctacataataaaaggttatatgacttctgtttgtatctccctctccagaacgactagttgaaagactggaaatcttagccagagcaatcaggtaagagaaagaaataaaaggcatccaactagaaagagaggaagtcaaactatctctcttcacagatgatataactctataatgagaaaattccatagtctctgcccaaaggccatagacctgataatcagtaaagttttgggatgcaaaatcaatgtataaaaaattaatatcatttctatacaccaagctgtgagccacaccaagaacaaaatcccattcataacagctggaagaaaaaataaaaatacctaggaatacagctaaccaggatgatgaaagatctctaagtgagaattataaagcaatgctgaaagaaatcatggacgacacaaaccaatgaaaaaacattctatgctcatggataggaagaatcmatattcttaaaatggccatactgctccaagccatttacagattcagtgctattcctatccaactatcaatgacatgtttacagagttagaaaaactattttaa

SEQ ID NO: 641023 - DNA, 585 bp, Homo sapiens
tctgacttctcaggctacataataaaaggttatatgacttctgtttgtatctccctctccagaacgactagttgaaagactggaaatcttagccagagcaatcaggtaagagaaagaaataaaaggcatccaactagaaagagaggaagtcaaactatctctcttcacagatgatataactctataatgagaaaattccatagtctctgcccaaaggccatagacctgataatcagtaaagttttgggatgcaaaatcaatgtataaaaaattaatatcatttctatacaccaagctgtgagccacaccaagaacaaaatcccattcataacagctggaagaaaaaataaaaatacctaggaatacagctaaccaggatgatgaaagatctctaagtgagaattataaagcaatgctgaaagaaatcatggacgacacaaaccaatgaaaaaacattctatgctcatggataggaagaatccatattcttaaaatggccatactgctcmaagccatttacagattcagtgctattcctatccaactatcaatgacatgtttacagagttagaaaaactattttaa

SEQ ID NO: 641024 - DNA, 585 bp, Homo sapiens
tctgacttctcaggctacataataaaaggttatatgacttctgtttgtatctccctctccagaacgactagttgaaagactggaaatcttagccagagcaatcaggtaagagaaagaaataaaaggcatccaactagaaagagaggaagtcaaactatctctcttcacagatgatataactctataatgagaaaattccatagtctctgcccaaaggccatagacctgataatcagtaaagttttgggatgcaaaatcaatgtataaaaaattaatatcatttctatacaccaagctgtgagccacaccaagaacaaaatcccattcataacagctggaagaaaaaataaaaatacctaggaatacagctaaccaggatgatgaaagatctctaagtgagaattataaagcaatgctgaaagaaatcatggacgacacaaaccaatgaaaaaacattctatgctcatggataggaagaatccatattcttaaaatggccatactgctccaagcmatttacagattcagtgctattcctatccaactatcaatgacatgtttacagagttagaaaaactattttaa

SEQ ID NO: 641025 - DNA, 615 bp, Homo sapiens
gcaggtagggtgtacctaaagggtagcttttcagactttactccctctccctcccctcctggtaagtcccaatctctcttgttcccatttttatgtccatgtgcactyattgctcggcccccccttataactgagaatatgtggtatttggcttcctgttcctgagataatttgcttagaataaagtcctccagctgcatccatgttactgaaaaagacacagttttgttctttttatggctgcatagtattccatgacatatatgtactacatttgctttattcaatccactgttgatgaacacctagtttgattccatacctttgctactgtgaataccactgtgatgaacatacaaatttaggtctttttacaagactgatttattttcctttggatatacacccagtagtgagattactgggtcaaatggtagttctgtattaagtttcttgaaaagtggtttgaaaatataatgctcaatagaatcaggtatagtaacatagtacacatgattcaaagacctgtgaaccgagagtaacaacaaatttctgcacaaacatattgcaagttagaaaacagctgtattttaatcaattattccacaatcattt

SEQ ID NO: 641026 - DNA, 615 bp, Homo sapiens
gcaggtagggtgtacctaaagggtagcttttcagactttactccctctccctcccctcctggtaagtcccaatctctcttgttcccatttttatgtccatgtgcacttattgctcggcccccccttataactgagaatatgtggtatttggcttcctgttcctgagataatttgcttagaataaagtcctccagctgcatccatgttactgaaaaaracacagttttgttctttttatggctgcatagtattccatgacatatatgtactacatttgctttattcaatccactgttgatgaacacctagtttgattccatacctttgctactgtgaataccactgtgatgaacatacaaatttaggtctttttacaagactgatttattttcctttggatatacacccagtagtgagattactgggtcaaatggtagttctgtattaagtttcttgaaaagtggtttgaaaatataatgctcaatagaatcaggtatagtaacatagtacacatgattcaaagacctgtgaaccgagagtaacaacaaatttctgcacaaacatattgcaagttagaaaacagctgtattttaatcaattattccacaatcattt

SEQ ID NO: 641027 - DNA, 615 bp, Homo sapiens
gcaggtagggtgtacctaaagggtagcttttcagactttactccctctccctcccctcctggtaagtcccaatctctcttgttcccatttttatgtccatgtgcacttattgctcggcccccccttataactgagaatatgtggtatttggcttcctgttcctgagataatttgcttagaataaagtcctccagctgcatccatgttactgaaaaagacacagttttgttctttttatggctgcatagtattccatgacatatatgtactacatttgctttattcaatccactgttgatgaacacctagtttgattccatacctttgctactgtgaataccactgtgatgaacatacaaatttaggtctttttacaagactgatttattttcctttggatatacacccagtagtgagattactgggtcaaatggtagttctgtattaagtttcttgaaaagtggtttgaaaatataatgctcaatagaatcaggtatagtaamatagtacacatgattcaaagacctgtgaaccgagagtaacaacaaatttctgcacaaacatattgcaagttagaaaacagctgtattttaatcaattattccacaatcattt

SEQ ID NO: 641028 - DNA, 532 bp, Homo sapiens
tgtttcaccagctcatgtaagctgcagagagaaccaagggagcctgagagctgcctggagaagacaccagacccctggggtgtccagcttgtctcccacccacccacgctcaagccaggctgggggttggaacaggatgtgtggtttctgggagctggttcttakatttggcatctgaagggtataaaggcctgggggtgcacatcaaaatggccaaaccgatttgaggagggagccttaaggaaggtttgtaccttctgtgctggatgctcttcaagtactgaagaattatttttgcatgtttttcttaattccatggccatggaacaagtaaacgcaaccccctggggactggttcagcacataaaagatgacttttctaggacaccagatttgatcccgacattccctgagctcagctcacacgaggggctcgcacccctgaatcccatccaggagccggctcctgagcaggggccaagggctcaacttgtgctggggctactgcttctagaatctcctctaacgccac

SEQ ID NO: 641029 - DNA, 496 bp, Homo sapiens
atataaatatgatattgcatatatttggtcttcacatcaagccactaactgctttgtgaccactgaaaagttaaatggaacctaatgcatttggatttcagttcagttaaataggcatttattgaatgtttattaaaattgctgtactgattgaaagctattctagaattggcttttgtgttccagaatagaaaaaaaaaagtgctggtttttatacctctcttattgccaagaagttgtcatggaaaaggtgctctgtgttacatacaaaggctgctcagaattaaaacacttttcaaactaaatacctcagtgtgtgtggcctatccccagagcagtgatatcttaggacataaatgaaatactatacaatgttttcaacaagtatagtttttcagcctttaagaagaccttgaatgtttcactcttaatatatgcaakggtttctagagaaaaatggcaacctcaaatacccgtgccagagatataagtagtg

SEQ ID NO: 641030 - DNA, 496 bp, Homo sapiens
atataaatatgatattgcatatatttggtcttcacatcaagccactaactgctttgtgaccactgaaaagttaaatggaacctaatgcatttggatttcagttcagttaaataggcatttattgaatgtttattaaaattgctgtactgattgaaagctattctagaattggcttttgtgttccagaatagaaaaaaaaaagtgctggtttttatacctctcttattgccaagaagttgtcatggaaaaggtgctctgtgttacatacaaaggctgctcagaattaaaacacttttcaaactaaatacctcagtgtgtgtggcctatccccagagcagtgatatcttaggacataaatgaaatactatacaatgttttcaacaagtatagtttttcagcctttaagaagaccttgaatgtttcactcttaatatatgcaagggtttctagagaaaaatkgcaacctcaaatacccgtgccagagatataagtagtg

SEQ ID NO: 641031 - DNA, 343 bp, Homo sapiens
tccttctctgcctcccacatgaacagggaatagaaatggaaaccacgctctgtggttgctgttgtgaaaatycatgttccccacaggctgagtttggcatcttacattctagttcccattgtaaaaaagcaagcaacaaacaaaaactacaaaagaaaaaatgaaatagttgaaagtctagagccacagaggttccagatccacccaccgccaacggtgacctccacagccctccaggcctgagggcagttatgcctgaacagcctgcctcttcaccatccacgcaggaaagtgactttaaacttcaatagctattactctgttccacaaggaaccaggtcaa

SEQ ID NO: 641032 - DNA, 343 bp, Homo sapiens
tccttctctgcctcccacatgaacagggaatagaaatggaaaccacgctctgtggttgctgttgtgaaaatccatgttccccacaggctgagtttggcatcttacattctasttcccattgtaaaaaagcaagcaacaaacaaaaactacaaaagaaaaaatgaaatagttgaaagtctagagccacagaggttccagatccacccaccgccaacggtgacctccacagccctccaggcctgagggcagttatgcctgaacagcctgcctcttcaccatccacgcaggaaagtgactttaaacttcaatagctattactctgttccacaaggaaccaggtcaa

SEQ ID NO: 641033 - DNA, 555 bp, Homo sapiens
gcataggagactgatgaagtgcaccctcatcttgtcatgggctcagaaagaattcgtacatatgctttatgtgatagcaactctatgtgtaggcctgtgagccctagaatgcactttctttcagcaactagtccacctaacagttttctaagtcaaatcccctctccatgcttggataggtcatgaatagctttctgttacccacctaagatgaagggatattgctaaatcaggtttgtggccaagaaacttttacctggagtggcaggagagggcctacctgttcaccagtgtctgcaacactttcttttgtcttcctttttatttatttatttatttatttatttattttatttttatttttattttatttttgagatagagtctcgctccgtcgctcaggctggagtccagtgtcacgatcttggctcrctgcaacctctgactcccaggttcaagcgattctcctgcctcagcctcctgagtagctgggattacaggtgtgtgtcaccacgcccggctaatttttgtatttttagtagagagggggtttca

SEQ ID NO: 641034 - DNA, 555 bp, Homo sapiens
gcataggagactgatgaagtgcaccctcatcttgtcatgggctcagaaagaattcgtacatatgctttatgtgatagcaactctatgtgtaggcctgtgagccctagaatgcactttctttcagcaactagtccacctaacagttttctaagtcaaatcccctctccatgcttggataggtcatgaatagctttctgttacccacctaagatgaagggatattgctaaatcaggtttgtggccaagaaacttttacctggagtggcaggagagggcctacctgttcaccagtgtctgcaacactttcttttgtcttcctttttatttatttatttatttatttatttattttatttttatttttattttatttttgagatagagtctcgctccgtcgctcaggctggagtccagtgtcacgatcttggctcactgcaacctctgactcccaggttcaagcgattctcctgcctcagcctcctgagtagctgggattacaggtgygtgtcaccacgcccggctaatttttgtatttttagtagagagggggtttca

SEQ ID NO: 641035 - DNA, 432 bp, Homo sapiens
aataaagaagcaaataccaaaatcagtatacaaaagtcgattggttccctctatgtggagggaagacgagcttgaataagagaagcattctgtgttacgctttaataatggctggagatctgccaccatgcatttgtcaaatcccatagaatttcacagcacaaatagtacatcttaatgtggctcaggagtacatataatgtcagcyacagtttgtgggtaaattacatatttaattaaatagattaaacaataaataattatatgagctctgtctgcctggacacagtccttgcctctccaaccagtttgccaagggcttgaatttcttgctcattatcctcacagttgacataaaccctggctgcagagtaaaatcaatcatttgtggagtttttaaagtataatgatgtgtcaatttcaaccatggat

SEQ ID NO: 641036 - DNA, 432 bp, Homo sapiens
aataaagaagcaaataccaaaatcagtatacaaaagtcgattggttccctctatgtggagggaagacgagcttgaataagagaagcattctgtgttacgctttaataatggctggagatctgccaccatgcatttgtcaaatcccatagaatttcacagcacaaatagtacatcttaatgtggctcaggagtacatataatgtcagctacagtttgtgggtaaattacatatttaattaaatagattaaacaataaataatkatatgagctctgtctgcctggacacagtccttgcctctccaaccagtttgccaagggcttgaatttcttgctcattatcctcacagttgacataaaccctggctgcagagtaaaatcaatcatttgtggagtttttaaagtataatgatgtgtcaatttcaaccatggat

SEQ ID NO: 641037 - DNA, 627 bp, Homo sapiens
gaattctgctccagtagcctaacctacattttagaaattatcactcatttaataaaaccactaattaatattcaactgatattattcattgacaaagcacctcctcctattagagcacaggaccctgttgcttacctggattctggtcttgaagaaattctcttccttccygccacagctcttttccttgctccagctgcaaaattatataggatttgcttatctggtaccctgttagtggaaagaatacatgtgttttgagttcactgtcaataaatgtgcattatcaccaagtgtaaggcaggctatcaaggaagaataaaaacagtgaaggtcagctcaggccacaagacctagaacacagaaaactccccaggatttttctgacccaacgtgagactagaaaataaatccaaaccaaaggtccatcaggaaaaggaaattcaaaacagtcaggacctatgaatgctgagtccatgcctaagttccaagacacaatgcataatacacaatctttccagaaagagagtaattaaatctctgcacagtgtgtttattattattctcacgcacaacaaaaaaatcattcgatttacaaaaataattggtgttctatatggaaaagat

SEQ ID NO: 641038 - DNA, 627 bp, Homo sapiens
gaattctgctccagtagcctaacctacattttagaaattatcactcatttaataaaaccactaattaatattcaactgatattattcattgacaaagcacctcctcctattagagcacaggaccctgttgcttacctggattctggtcttgaagaaattctcttccttcctrccacagctcttttccttgctccagctgcaaaattatataggatttgcttatctggtaccctgttagtggaaagaatacatgtgttttgagttcactgtcaataaatgtgcattatcaccaagtgtaaggcaggctatcaaggaagaataaaaacagtgaaggtcagctcaggccacaagacctagaacacagaaaactccccaggatttttctgacccaacgtgagactagaaaataaatccaaaccaaaggtccatcaggaaaaggaaattcaaaacagtcaggacctatgaatgctgagtccatgcctaagttccaagacacaatgcataatacacaatctttccagaaagagagtaattaaatctctgcacagtgtgtttattattattctcacgcacaacaaaaaaatcattcgatttacaaaaataattggtgttctatatggaaaagat

SEQ ID NO: 641039 - DNA, 627 bp, Homo sapiens
gaattctgctccagtagcctaacctacattttagaaattatcactcatttaataaaaccactaattaatattcaactgatattattcattgacaaagcacctcctcctattagagcacaggaccctgttgcttacctggattctggtcttgaagaaattctcttccttcctgccacagctcttttccttgctccagctgcaaaattatataggatttgcttatctggtaccctgttagtggaaagaatacatgtgttttgagttcactgtcaataaatgtgcattatcaccaagtgtaaggcaggctatcaaggaagaataaaaacagtgaaggtcagctcaggccacaagacctagaacacagaaaactccccaggatttttctgacccaacgtgagactagaaaataaatccaaaccaaaggtccatcaggaaaaggaaattcaaaacagtcaggacctatgaatgctgagtccatgcctaagttccaagacacaatgcataatacacaatctttycagaaagagagtaattaaatctctgcacagtgtgtttattattattctcacgcacaacaaaaaaatcattcgatttacaaaaataattggtgttctatatggaaaagat

SEQ ID NO: 641040 - DNA, 383 bp, Homo sapiens
ttatttcatatcttattttttaaacttgatgtatgttttacttcttattttactggctattgccacaagtacaatgttgaataagagtggtgagagtagaaatccctaccttgtccttcttctttgggagaaatcaaccagtgtgtcactaytaagttgggtgttaactttaggttttgtacataatctttattaagtacaagaacttcccttctattatagttttctgagaggatttttttaggaatagatgttggatattgccatttttttcagaatcctttggaataatcatacgttcttgttagtttattaatatcattaataactttagttattattgatctctttatgagatcaacattacattcataggatcaatc

SEQ ID NO: 641041 - DNA, 383 bp, Homo sapiens
ttatttcatatcttattttttaaacttgatgtatgttttacttcttattttactggctattgccacaagtacaatgttgaataagagtggtgagagtagaaatccctaccttgtccttcttctttgggagaaatcaaccagtgtgtcactacyaagttgggtgttaactttaggttttgtacataatctttattaagtacaagaacttcccttctattatagttttctgagaggatttttttaggaatagatgttggatattgccatttttttcagaatcctttggaataatcatacgttcttgttagtttattaatatcattaataactttagttattattgatctctttatgagatcaacattacattcataggatcaatc

SEQ ID NO: 641042 - DNA, 383 bp, Homo sapiens
ttatttcatatcttattttttaaacttgatgtatgttttacttcttattttactggctattgccacaagtacaatgttgaataagagtggtgagagtagaaatccctaccttgtccttcttctttgggagaaatcaaccagtgtgtcactactaagttggrtgttaactttaggttttgtacataatctttattaagtacaagaacttcccttctattatagttttctgagaggatttttttaggaatagatgttggatattgccatttttttcagaatcctttggaataatcatacgttcttgttagtttattaatatcattaataactttagttattattgatctctttatgagatcaacattacattcataggatcaatc

SEQ ID NO: 641043 - DNA, 570 bp, Homo sapiens
ggttttgaaatctccacctgaaattgtraaattttctaattttttgtcctcgtgagcagttgactctttatcattatgaaatgaactttaactttagtaatagtctttgctctgaaatctactttgttgttaacatcatcactccagctttattttgattagtttcaccatgttgtatcttttttcattattttacttttatcctatttatgtctttatgtttaaagtgactttcttgcagatagcatttaattgggccttgctttttcatttttttaatttttgagacagagtcttactctgttgcccaggctggagtacagtgacgtgatctcagctcactgcagctttgacctctggggctgaagtgattctcccacttctgcctcccaagtagctgggactacaggtccatgacaccatgtccagatagttgttttgattttttttttttttttttttttggtagagacataatcctgctctgttgcccaggctggtctcaagctactggactcaagccattcacccaccttggcctcccagagtgctgggattacagctgtgagc

SEQ ID NO: 641044 - DNA, 534 bp, Homo sapiens
gctgtttcctctaatcttaacttcttcaggtgattcttccttcagctttggaaggaagcttttagagtttcgtcacatacacatgttgatcagttcttgcctgaattattgaaaaggatttttggcagattttagcaattctttttctgtgcagctrtctcctctcctatatcttactgtatgcctagaaattctccatgctgtgactgggcaatttatttcctgtctctcaggtgtcactgcctctcattgcttgacatctaccttaagaaagctattatttcatatatttttgtcaacactcttagttgttttaagtgggagacaagtctagtcttggttattccatattggctggaagctgaagtcttaaagatcttaagaatgagagtgccatgatagaatatgcatttaagaatataattctcactgttatgtgcaaattgattggaaatggagggttgcagctaagagattatttaaatagtccagacaacgtgttttggacaaggatgatatcagtgggtttgaaca

SEQ ID NO: 641045 - DNA, 534 bp, Homo sapiens
gctgtttcctctaatcttaacttcttcaggtgattcttccttcagctttggaaggaagcttttagagtttcgtcacatacacatgttgatcagttcttgcctgaattattgaaaaggatttttggcagattttagcaattctttttctgtgcagctgtctcctctcctatatcttactgtatgcctagaaattctccatgctgtgactgggcaatttatttcctgtctctcaggtgtcactgcctctcattgcttgacatctaccttaagaaagctattatttcatatatttttgtcaacactcttagttgttttaagtgggagacaartctagtcttggttattccatattggctggaagctgaagtcttaaagatcttaagaatgagagtgccatgatagaatatgcatttaagaatataattctcactgttatgtgcaaattgattggaaatggagggttgcagctaagagattatttaaatagtccagacaacgtgttttggacaaggatgatatcagtgggtttgaaca

SEQ ID NO: 641046 - DNA, 606 bp, Homo sapiens
ggattattaagttattctttttattgaaattattaaatgagatggttttattttttattaggttattcttaaaaaatactatgaatgagtaaatttggggtatcyaccatgttaggcagttagagttccacttctttaaaacaggaataaaattgttgcgcagtttacctaattgagttaaagggggttttatatttgtccgagtgactccacaggagaccgtattttgctgtaaaagtctactacaaatataacattttcagtaagagcaaaaaacagctaaagccttctaggaaagggtaaaccctgatagatcaatttctctggctcttagataaattttagacattaaatgtcactcagaacattagtaagaaactaagaaacatattctttttaaaaatccctattttttaaatatgcaaagcttctgaaaaagtaattattcacaaggctaatacacatatcaaatgactgagttaaaattgtgtatttaatagctatagtatagactcatatcaattttaaaggtcaaattattccttctgatcttcataacatatagtgaagtctgtgttttaacacttcacctgacatatgccagca

SEQ ID NO: 641047 - DNA, 606 bp, Homo sapiens
ggattattaagttattctttttattgaaattattaaatgagatggttttattttttattaggttattcttaaaaaatactatgaatgagtaaatttggggtatccaccatgttaggcagttagagttccacttctttaaaacaggaataaaattgttgcgcagtttacctaattgagttaaagggggttttatatttgtccgagtgactccacaggagaccgtattttgctgtaaaagtctactacaaatataacattttcagtaagagcaaaaaacagctaaagccttctaggaaagggtaaaccctgatagatcaatttctctggctcttagataaattttagacattaaatgtcactcagaacattagtaagaaactaagaaacatattctttttaaaaatccctattttttaaatatgcaaagcttctgaaaaagtaattattcacaaggctaatacacrtatcaaatgactgagttaaaattgtgtatttaatagctatagtatagactcatatcaattttaaaggtcaaattattccttctgatcttcataacatatagtgaagtctgtgttttaacacttcacctgacatatgccagca

SEQ ID NO: 641048 - DNA, 581 bp, Homo sapiens
ggtttagagtttgagttttcctcaaagtcacagcagcctctaaaaagaatttaagctgaaggtgtcagttgtgtawtttgtagcaaaaacattgattgtagaatagagaatgaatcaaatggggacaagtctggagatagagaaacaatgggaagttactgcagtaatttggaaatgaattattaggatatgaactcaggaatggcaatgaacatgagaagatatcaggatttccagagacatttaaggtataatgaaaggacttggtgaccaacagaatgagtgagaaggaagagttaggaattattttagaccataccatttattaaaacagaatattcatgaagaggcaggctttgggagaaggtaacttcattcattttttccgtattccagctttccatacagtatatgagtgaggcagccctacctacatgatgtgatctgggaggctctaaatgtttttcttcttccagtctacccctagaggggtagatgactgctagtgccactttaatcactatcctttgggttaaggcattggaaaagagggcttctggaaaactacagacatattacct

SEQ ID NO: 641049 - DNA, 597 bp, Homo sapiens
tgactgctagtgccactttaatcactatcctttgggttaaggcattggaaaagagggcttctggaaaactacagacatattacctggtggtgataatcatcaaccttcaattacttgyagagaggagggtctttatgtggagaggagtagcaagtataattgtgctgtatcatagccagggtggtcagagttggagagggcatttaaaagaaaagcacatcaaaaactagttttacctccttatttgcataacaagataggtcttcatagaatgggtttataaagaaaatgatgcaaaggaccattttaatttttctaaattaattacacagtagccaaatgatgttaatatgcaatacaaacagaaactttggcagctttagcattcttttaggacatttgtatcttggttttgattgtaacataaaatccttaagtatttggctgctctgaaaaatacaggataaagaatcaccaattaacaaacctttatttagagaattaataggggcactctgcaaaatattcataatttatgtattacaaatccagactaacacacagacattcacacatattcatcacaaacttttcctt

SEQ ID NO: 641050 - DNA, 530 bp, Homo sapiens
tactatcagactcttataaaccacatcagtcaggtgtaggtttttccgaagggtagacaaaagagggatgatttctaattctttcttaaaagcaaaaaccaccaactttgattccaaagtcttcattgacattacaaggcagaaatattacagattaatatttctcaagaatatacatgaaaaagttcctgaaaaataagcaacttgaattgtataaagtggatgctgtcacaccacaagtgtggtttattttaggtttgcaaatgtattttagcatttaaaagtaaatcatttgatagaaaacattaagagaaatgaagaataaaaattgatgcggaaaaagcattgaaaaaaatcagccctctttatggtaaactcttaacaaacaaggaatacaaggaaacttccttaattttytaaataatgtctacccatttaaacacttagtgaaaacattttaacaatgaaatatccaatgctttcccctgagagtagtaatgagacaagaattctcactattcaatgccaat

SEQ ID NO: 641051 - DNA, 623 bp, Homo sapiens
ctgggtcaaagaatatgtatatgttcaatttcatcaaatactactgaaragttttccaaagtggctgtaaaaatttatattcccatccgcaatgtatgaggtttgagatactccacattttcataaacacttgacattgccagtctttttaattgtagtcattttgatgtatgtatagtggagtctcattaggtgttaatttgttttcctccaatgattaaggagggtaagtactttttcaatactcattggctcttaggatgtgcttcttttttggaattcctcttcaagttttgtttttgttttgttttgccaagatttcactattttttctatagatttctagaaattctttatatattttgaaaatgagccttcagttggatggaagtatgaaatcatattccaatctgtggatttgtcttttcactcttttaatggaatatttttattaacagaattatttcaattttattaacagaattatttcaattttatcacagttaaatcaatgcttttatactacaaaatcttaacctaaaccaagttcataaaaattatattttatgttatcttctaatagcttctggaaacttttttatctttcttgtttggatctaatt

SEQ ID NO: 641052 - DNA, 600 bp, Homo sapiens
tttcaccttttccttgtagtattgttttcaatttctaaatttcttttctttattatttctcttattttctttgggttaatattctgttctttgtcgaactacttgattcagatgctgagattattgattgtcatttataatatataaacctaagtgtataattttctctttgggcatgtatttagctatattccataaattttcatatgtagtattttcattattatttggttcaaaatattttctacttttcattatgatttcttcattgactcatgggttatttaaaagtgcattttaaaatttccaaatataagagaatttttcagttatcttttttattatttctaacattattccactgtggtcaggaaacatatttagtgtgatttgagcccttctaaatctgctgcgacttgctttatagcctacaatatttttaatttcagtaaatattttacatrcatttaataagaatgagtgttctagagctttgtatgtggttattatattgtatgtagtcaattaggtcaaatttgttaagtattatattgaagcattctatagtcttagtgacttttttggtcttgttctttgtgt

SEQ ID NO: 641053 - DNA, 589 bp, Homo sapiens
ttcacatccattaggatagctattatcaaaaacaaaccaaccaacaaacataaaaccagaatagcatgtgttaataaggatgtagagaaattggggttcagagagcctccactcctcagcatgaacagtacagtataggttgaacactagaagtaaagtacaggaataatttgattgattggttacagctagctgtttgcctcatttggacatgttctgaacagttggctgcctgtaactagctgaagctgtttgtgaatgtctaagaccctgctatccattacacaaaataaactctgaagttaggtttcagtttgttcatgtactgagttaggttgtagttcatgacctcctgcttacttagtttaatgtggttgagaatcttgggtgctgtctcatgtagataggtactggttaattcagggactgtgaaacaagcattttaaaaatgattgaatatatttctcaccrttgctgtgaggtgacgtagaacacatggaaggttcttgggacaaacatactgaaaatagaactctgtatctttggcttcagacattacacggatcacagagtggtcagaaataggata

SEQ ID NO: 641054 - DNA, 609 bp, Homo sapiens
tgtcagtgcttactgaagaacaagagaaataattcagcgcatgtcataaattcattgaaatattctacctttttatctatttgcccttcagctgaatgcttaacctagagatgtttggaatggaattgagctcattttatagttttacttttgtaagttctgtgaacagtggtatttcccctgaaatcatgtgtagtatttggtgctttttgttccatagcatatattccttttcccagaaacaacaccttccatcttttggggagttaatcctcccccaccaccaaaatgaccagagaaaaaggctgacaataccaagtattagcaagaacrtaatcagttggaattctcatgcactgtggtctgaatgggaagctgaaggggggatcaactgtactgggagaagtcaaaaaaagtttcatagtgaatacatctgaatcattatgcagcttccattttggtaaaagatatagacagtacacagaatgagaaaatatagagtatgacagatgataatacatgctatattaaaaatgtaacatggaagaaggagaggaaatcttggggttggggatgtgtgattttaaaatatggatagggaaggctttc

SEQ ID NO: 641055 - DNA, 601 bp, Homo sapiens
tagtgcctggactaaatcaatgagttcttaggatatttctaaacaatgaatatttttaatggagtcatcgttggtcttttcaaaagaataaacccagagaaataagcaagtagtttagaaaagtctttatttagtttttcttccctctcagtaactaatttttcttgaatatttgaatgtgatattttctaaatgttagaacttcagagcctactagagaaaactggaactaaacattttcaagggtattctttttcctacattttagtccacctgccattcatcttgactgttaacacaaatagcaactgtgtcaaattggcgaatatactcctgaggttgcgttgcaataattaaattgtgagggtgactaaaagatagaaggaagaaatacagtgtcagcctatttctgggattttttttttttttctattagcagcctttatttgcctgctgctsttttcaaactgttattttatgtatttcagctggaaaattccaacaatttttttctaggaatcacgaaaattgtatagtatttgtaagggtctctaagggcatttgaaattaaacagttgatcttggggactaaggagaaaat

SEQ ID NO: 641056 - DNA, 505 bp, Homo sapiens
cacaaattttaaacttaaaaaaaagataagagcaagtggagttacatctgagttctctttgaaaaaaaaagataacttgtaaagtacagtgaggggaaagaatgatggagtttcttttttgtttgtttgttttatttgtttctctcacttaatgtagaattgaaagatgctcctggaaacagtggtgggaaagaaagatgtagacttcagtagcaagtaacaccttcattgtcttctaaggaaaagcaaaacaaggattgtgatttcaaacaagyacttagtgaaagaactattaaattgcatatggtcatttttttctataagaaaatgccccttaacagttctaaatttcttcgttttaatgaatatttttcttttgattgtttttaaaatagtatatgaaagggaaaattcttctctcagttcacaattaagtgactctaatttttcagacaaaatcagaacatataacctcagatttgttggaatatagttataaatattg

SEQ ID NO: 641057 - DNA, 505 bp, Homo sapiens
cacaaattttaaacttaaaaaaaagataagagcaagtggagttacatctgagttctctttgaaaaaaaaagataacttgtaaagtacagtgaggggaaagaatgatggagtttcttttttgtttgtttgttttatttgtttctctcacttaatgtagaattgaaagatgctcctggaaacagtggtgggaaagaaagatgtagacttcagtagcaagtaacaccttcattgtcttctaaggaaaagcaaaacaaggattgtgatttcaaacaagtacttagtgaaagaactattaaattgcatatggtcatttttttctataagaaaatgccccttaacarttctaaatttcttcgttttaatgaatatttttcttttgattgtttttaaaatagtatatgaaagggaaaattcttctctcagttcacaattaagtgactctaatttttcagacaaaatcagaacatataacctcagatttgttggaatatagttataaatattg

SEQ ID NO: 641058 - DNA, 505 bp, Homo sapiens
cacaaattttaaacttaaaaaaaagataagagcaagtggagttacatctgagttctctttgaaaaaaaaagataacttgtaaagtacagtgaggggaaagaatgatggagtttcttttttgtttgtttgttttatttgtttctctcacttaatgtagaattgaaagatgctcctggaaacagtggtgggaaagaaagatgtagacttcagtagcaagtaacaccttcattgtcttctaaggaaaagcaaaacaaggattgtgatttcaaacaagtacttagtgaaagaactattaaattgcatatggtcatttttttctataagaaaatgccccttaacagttctaaatttcktcgttttaatgaatatttttcttttgattgtttttaaaatagtatatgaaagggaaaattcttctctcagttcacaattaagtgactctaatttttcagacaaaatcagaacatataacctcagatttgttggaatatagttataaatattg

SEQ ID NO: 641059 - DNA, 430 bp, Homo sapiens
attgtatagaaatagttcagttaataaatgtagaattatggtggaattagaaaaacacttcgcaatctctaatgaaataactgactaaagtaatcatcatcaatatcgaggttgatgggtaatttattgtctaaattaattactaatttattagattagtagtaatttattagatttattaataatmagtaattaattactaaatttattagagtaaaataattactctaataaaataaaaagatactttgtgagaaaaaaagggtgcactattgataattatgccaggaaacaggcataaactggtgtgattccaggcaaatatatgtcaggtcagcctgtactggggaacctgacaataaagagaacaggctgtcactggctgaactcactgattaattttagcagaataaagataagacaataaaac

SEQ ID NO: 641060 - DNA, 622 bp, Homo sapiens
cattatatcttaccacaccaagctatggattttaaatgtgagatcatacagtaatttgttgacttgccagttgactgtacttgggtcaattgtacaaccttcgtctgatagtgtgtgattaaagaaccaggagattttgctacaaaatatggtcactgttcatttatcagtgccatgggcagagatatttgtttttgaagggaaagtagacagtgaaatccccaaaatatttcaagtattaatgtgccacaatccctgagaagtagacccaagaaaagagtgagaggctaagcatcctttaaaggaatttcctcctgaggaactcctctctggcattcccatcaagtggtcatcttgttttaacttggatgcttccaaagattgaaaacttatttcaagaggctrctagcctgctgaaaagcactagccctgaagggaatatcatcttcaattgtgtcttcaattgtgttcaatatttatttgttttttaatatgttcattggccacataaatgtcttctttttagaagtgtctgttatttcctttgctcacttttagtttgttttacatcactgatcgttagagaaatgcaaatcaaaaccacaatgagataccatctcac

SEQ ID NO: 641061 - DNA, 592 bp, Homo sapiens
gatgaaaactatagatcattctaggtactttgttcccagacttataatactcccaatagcttctctaatgtatgatcaagtggctgtctgctgtaatattttcagagctataatgtttatatctaacctcttatatttatgtccaaatcagctggtatattttggcttattctgagcagtagctgctagatctatcttgtggtacacattaagyctattccttcttccacagttcttcttgacattatgctacttaaaaagtcatcccttatcaaaatcaaatttcattattttagttatatcacatccaatatttaattgtgtaaaccactctttactctagctattcgtcctcagaattgcttctgttataaatgctctttttgaacagacttcctagagtagaagagaaagctccagatatgatctgatgggggtaaaatatacttggacattactttccttagtatggatactatatctctatagatgacatgcaatgttggattatttctttaaaaaacatgatctagggacaagacttaacagaggaattgttaaagaccacagttcaaattaaaatccccagtcc

SEQ ID NO: 641062 - DNA, 594 bp, Homo sapiens
taataacaattctatacaacttcccaaaattgcagaggtgtaaattttccccaattaattcaatgtggcaagcattattgtgattaaaaaatcagacaaaaacattaaaaaawgatatgtaggcctatattcatcatgaatatacatacaaaatttttagtgcagctttagcccatcaaatccaaaaatataaaaagaataatacatcacaaccagtgtgatttgccctcaaagttcaaggttggtttaatattaataaaatttaatattcaaaatgcatttaattcattgtattaacagactaaaaaataaaaagaataaagaaaaatctatggccaatataatagattcaaataaagtatttgacgatttttgatatttaccatttatttatggtaaaatgtttcaaaatctttcaaaaaacttgagaacgtttgtgacaaacctaagctaaaattgtatttaatgatgtaagactacatgctttccctgtataatcatgaatgatgcccattttacaaagtctattcagtgttgtacttgaagttctaaccagtgcagtatgataagaagaaaataataaaaatgtatcca

SEQ ID NO: 641063 - DNA, 594 bp, Homo sapiens
taataacaattctatacaacttcccaaaattgcagaggtgtaaattttccccaattaattcaatgtggcaagcattattgtgattaaaaaatcagacaaaaacattaaaaaaagatatgtaggcctatattcatcatgaatatacatacaaaatttttagtgcagctttagcccatcaaatccaaaaatataaaaagaataatacatcacaaccagtgtgatttgccctcaaagttcaaggttggtttaatattaataaaatttaatattcaaaatgcatttaattcattgtattaacagactaaaaaataaaaagaataaagaaaaatctatggccaatataatagattcaaataaagtatttgacgatttttgatatttaccatttatttatggtaaaatgtttcaaaatctttcaaaaaacttgagaacgtttgtgacaaacctaagctaaaattgtatttaatgatgtaagactacatgctttccctgtataatyatgaatgatgcccattttacaaagtctattcagtgttgtacttgaagttctaaccagtgcagtatgataagaagaaaataataaaaatgtatcca

SEQ ID NO: 641064 - DNA, 594 bp, Homo sapiens
taataacaattctatacaacttcccaaaattgcagaggtgtaaattttccccaattaattcaatgtggcaagcattattgtgattaaaaaatcagacaaaaacattaaaaaaagatatgtaggcctatattcatcatgaatatacatacaaaatttttagtgcagctttagcccatcaaatccaaaaatataaaaagaataatacatcacaaccagtgtgatttgccctcaaagttcaaggttggtttaatattaataaaatttaatattcaaaatgcatttaattcattgtattaacagactaaaaaataaaaagaataaagaaaaatctatggccaatataatagattcaaataaagtatttgacgatttttgatatttaccatttatttatggtaaaatgtttcaaaatctttcaaaaaacttgagaacgtttgtgacaaacctaagctaaaattgtatttaatgatgtaagactacatgctttccctgtataatcatgaatgatgcccattttacwaagtctattcagtgttgtacttgaagttctaaccagtgcagtatgataagaagaaaataataaaaatgtatcca

SEQ ID NO: 641065 - DNA, 434 bp, Homo sapiens
agctaggattacgggcacatgccaccacgcccggctaatattttgtatttttagtagagacgggtttcactgtgttagccaggatggtctccatctcctgacctcgtgatccgcccscctcggcctcccaaagtactgagattacaggcgggagtcaccacgcctggccttttttttttttttttttaaatttgagtttgaaggttggggcagaaagagatcaggatttgcactgccctgtcacatgcaatctcccatgtcagagcattaatctcaaacatggaaaaactttaaaatacacaactctccagatggacacagctgaatcattttcaggaaggctctgcctataaaattacctttggccttaattcagtaattaaaggcacccacaggtctgagccctcatctatgaaggttaaacgtatcattcc

SEQ ID NO: 641066 - DNA, 526 bp, Homo sapiens
ttggggcagaaagagatcaggatttgcactgccctgtcacatgcaatctcccatgtcagagcattaatctcaaacatggaaaaactttaaaatacacaactctccagatggacacagctgaatcattttcaggaaggctctgcctataaaattacctttggccttaattcagtaattaaaggcacccacaggtctgagccctcatctatgaaggttaaacgtatcattcctatcagcactaattggttttataggatacagacctctagtttgctgaataaactttggaaggattcagattatgaggttctaaactgtagagcctttgaggagaaaggtaccccatttcttctccgaatagatcattttgtgtcttctcctgggyttagcacattgtcttccttaggatctgatagtctgtttatttatctttttgttgtcataccttttattcttgcatttcccacttttgactagcattttgccttttctccgtttctggaagcctgtaattttcaacattccc

SEQ ID NO: 641067 - DNA, 583 bp, Homo sapiens
tttgccactttatttaaaattatgattttagtaggtttacaaaataccagtgctacatttgaatatgtataaattatgtttaaaatttacattttggtaagtatgactaaattcttaatttattttcattattactaccactttatttctaaatgttgccatagtcatttggctttgttctaaatctgtrggaaagatacagagattacacattttgttttcttgcagttactatgctgtccttcctatcactacctgttggctgaggtagtgataggcctaaatgattcattatcttaaatgtactaaatatgttgagtaattttttcttctaaactaacagaaagagagaacctaggagttactcccttaggctggttaaagtgaaaaggtagccaagtcaacccagctgtttccttctctcattaggaaagaactatgtccattctcataacacactttttccaatgcaaacatactcagggttaaaatagtttagcacaaattgcagcccatttcatttgttcttcacaagctggaacttttcttgtaagctaaatattaaatggttcaagtaaattgg

SEQ ID NO: 641068 - DNA, 583 bp, Homo sapiens
tttgccactttatttaaaattatgattttagtaggtttacaaaataccagtgctacatttgaatatgtataaattatgtttaaaatttacattttggtaagtatgactaaattcttaatttattttcattattactaccactttatttctaaatgttgccatagtcatttggctttgttctaaatctgtaggaaagatacagagattacacattttgttttcttgcagttactatgctgtccttcctatcactacctgttggctgaggtagtgataggcctaaatgattcattatcttaaakgtactaaatatgttgagtaattttttcttctaaactaacagaaagagagaacctaggagttactcccttaggctggttaaagtgaaaaggtagccaagtcaacccagctgtttccttctctcattaggaaagaactatgtccattctcataacacactttttccaatgcaaacatactcagggttaaaatagtttagcacaaattgcagcccatttcatttgttcttcacaagctggaacttttcttgtaagctaaatattaaatggttcaagtaaattgg

SEQ ID NO: 641069 - DNA, 452 bp, Homo sapiens
tattgcatggtcttgcttataagtggaagataaatgatgagaacacatggacacatagaggggaacaacactttctggggtctaatggaaggcggagggaagaggatcgggaaaaaataactaataggtactaggcttaatacctgggtgatgaaataatctgtacaacaaaccccatgatacaagtttacccacgtaacaaacctgcacatgtacccctgcacttaaaagttagaaaaaaaatagtaaaaaaaaawatatatatacacattaaaaaaaaaagtcacccatctaatactttgctgtaggaatcagttagctttcccctttttgacatatctatatcccggtacataatatgttatgccttcctttctctacttatgcgatgctttattgctcctactttctacttttcattgaaaagcactcatgtatttttctgtgtgttt

SEQ ID NO: 641070 - DNA, 452 bp, Homo sapiens
tattgcatggtcttgcttataagtggaagataaatgatgagaacacatggacacatagaggggaacaacactttctggggtctaatggaaggcggagggaagaggatcgggaaaaaataactaataggtactaggcttaatacctgggtgatgaaataatctgtacaacaaaccccatgatacaagtttacccacgtaacaaacctgcacatgtacccctgcacttaaaagttagaaaaaaaatagtaaaaaaaaatatatatatacacattaaaaaaaaaagtcacccatctaatactttgctgtaggaatcagttagctttcccctttttgacatatctatatccckgtacataatatgttatgccttcctttctctacttatgcgatgctttattgctcctactttctacttttcattgaaaagcactcatgtatttttctgtgtgttt

SEQ ID NO: 641071 - DNA, 616 bp, Homo sapiens
tagtcccccaaatcctctgctgagtttactttgatgcatctatagtgcactgggtgatactttcctatttagttctaagatcatttcaagaactttgtggaaggctttttggcagtcraaaccatttatatatgtgtatatagaagtatttaacatttgtttagtgcaataatttttctatctcagtgaagaattactgaaggagtttgttcaaaatgtagttcatacctggagattctaattcaataggtctggaatgggcctcgggaatctatatttttaacaataactttcagatgcaaaggtgagaagactgcattctataaaacacttatttgttactattaatagatattaatagtgtcaggcaatttgctaaaagctttacagactttattttatgaaactatcacatcaatgctataatgaaaatattattagcctcattttatagatgactaaagagggctgagaaagggaaatgaaaacccaaggtcattaatcaattatgttagatcagaaattcaaattaaattaagtctatgtagttgcaaaatccaaactctttcaattacattacattataaaacaaattctgatgttaaggacattacaa

SEQ ID NO: 641072 - DNA, 616 bp, Homo sapiens
tagtcccccaaatcctctgctgagtttactttgatgcatctatagtgcactgggtgatactttcctatttagttctaagatcatttcaagaactttgtggaaggctttttggcagtcgaaaccatttatatatgtgtatatagaagtatttaacatttgtttagtgcaataatttttctatctcagtgaagaattactgaaggagtttgttcaaaatgtagttcatacctggagattctaattcaataggtctggaatgggcctcgggaatctatatttttaacaataactttcagatgcaaaggtgagaagactgcattctataaaacacttatttgttactattaatagatattaatagtgtcaggcaatttgctaaaagctttacagactttattttatgaaactatcacatcaatgctataatgaaaatattattagcctcattttatagatgactaaagagggctgagaaagggaaatgaaaacccaaggtcattaatcaattatgttagatcagaaattcaaattaaattaagtctatgtagttgcaaaatmcaaactctttcaattacattacattataaaacaaattctgatgttaaggacattacaa

SEQ ID NO: 641073 - DNA, 616 bp, Homo sapiens
tagtcccccaaatcctctgctgagtttactttgatgcatctatagtgcactgggtgatactttcctatttagttctaagatcatttcaagaactttgtggaaggctttttggcagtcgaaaccatttatatatgtgtatatagaagtatttaacatttgtttagtgcaataatttttctatctcagtgaagaattactgaaggagtttgttcaaaatgtagttcatacctggagattctaattcaataggtctggaatgggcctcgggaatctatatttttaacaataactttcagatgcaaaggtgagaagactgcattctataaaacacttatttgttactattaatagatattaatagtgtcaggcaatttgctaaaagctttacagactttattttatgaaactatcacatcaatgctataatgaaaatattattagcctcattttatagatgactaaagagggctgagaaagggaaatgaaaacccaaggtcattaatcaattatgttagatcagaaattcaaattaaattaagtctatgtagttgcaaaatccaaactctttcaattayattacattataaaacaaattctgatgttaaggacattacaa

SEQ ID NO: 641074 - DNA, 595 bp, Homo sapiens
actggacattggcttcttaaatacttgttggtggctcaaaatgaagtgatgctcttttgtttttttttctttcctctcatttaattttttctctttcattattctattcctctttctgtgtgtacgtgtgtgtgtgtgtgtgtatgttttcaataaaaaattaagacacagtaaatgttttctcaactgattgttagcctatttgtatctctgtaattaaatacctcattcttttcagtatcacagtgtttaagtctaagatttttcacattcaaaattgaaaagtttaattaattttattcatttaaagtgtggggcccatcctcatggggatgttctgattttcttactttaaaaattgatatggagagataatgtttaactaattgcatgtttatgaaatacacaatggataagttctgtcagatgtgtacactcatgaaaccatcaccatagtaaagacaatgcacatatagattgtccacaaaagtttacttatgctcctttgtaacctttctctcmggctgctctctgcctgcacccctctcccattaggaaacagctgatttactttttgttgctataaattaatttg

SEQ ID NO: 641075 - DNA, 489 bp, Homo sapiens
aattctctgtctgaaacgtcacatgtctctgttactctgggaatagtcactggtgtyttaattagttcaatttagtagaggccatattttactggaatttttttttctttttttttttgagatggagtctcgctctgttgcccaggctggagcgcagtggtgcaatcttggctcactgcagcctctgcctcccgggttcaagcaattctcttgccctagcctcctgagtagctgggattacaggcatgagccaccgcacgtggccagagataggtacttattgtagtcttttcagtctgggcttctttgtacccaaccttattgggaaggctttacaagtactcaaagatagttgaatgttatgatctacatctttggtcattgcagctgtatctgtacctgaagataaggctgtagtattagggagtacctgaagcccaataatactgtgactcctgtgtgttcatagacatattaacttggatcttg

SEQ ID NO: 641076 - DNA, 489 bp, Homo sapiens
aattctctgtctgaaacgtcacatgtctctgttactctgggaatagtcactggtgttttaattagttcaatttagtagaggccatattttactggawtttttttttctttttttttttgagatggagtctcgctctgttgcccaggctggagcgcagtggtgcaatcttggctcactgcagcctctgcctcccgggttcaagcaattctcttgccctagcctcctgagtagctgggattacaggcatgagccaccgcacgtggccagagataggtacttattgtagtcttttcagtctgggcttctttgtacccaaccttattgggaaggctttacaagtactcaaagatagttgaatgttatgatctacatctttggtcattgcagctgtatctgtacctgaagataaggctgtagtattagggagtacctgaagcccaataatactgtgactcctgtgtgttcatagacatattaacttggatcttg

SEQ ID NO: 641077 - DNA, 493 bp, Homo sapiens
acacatctacaaccatctaatctttgacaaaccgtacaaaaayaaacaatagggaaaggattccctatttaataaatggtgctgggagaactggctagccatacgcagaaaattaaaactggacccctttcttatacctatacaaaaattaactcaagatggattaaagacttaaatgtaaaacccaaaacaataaaacaccctagaagaaaatctaggaatgccattgaatatattttttacatatcagttgctttggttatatttacatcctgaaagtcagcttgaaatatgcaattcttttaaaactctgcaggaaggtaacctgataatattctttagagcagggaatcaaaaaagatgtatatggcaccattcctgatttgtctttctagaatcctacaaaattaattctttgtaagttggtaatacttgtgaaaagtctgcaaaaagaaaagaaaactgtggtgcattttccaggtacctacaaagt

SEQ ID NO: 641078 - DNA, 378 bp, Homo sapiens
tgttcatatttatctattcctttggtctatgagatccttaaaagcagagatctggtcttgtttgactttataacttcatatcctagcatagtaccttcataaagtagctattcaatagtagtaataataatgtcaatgatgatgatgacaaygacgatgaagaatggatggatggatggatggatagattaatggatcaacaatgaaacagatcaataaatgaaacgatatacataagcagtaggtgagatgtttgaaattccaccaacaaaaaaccgactatgaggcctggtatagtttgtgtgcaaatcctctgtcttgtcttcttggctgtgaaatctgtctggggtggctactccaacagtgtctccagccctg

SEQ ID NO: 641079 - DNA, 566 bp, Homo sapiens
tggccttctgggcctggaggcctagagaatgtgctcaggggagaatcacactggtcagagtggtaaagcactgtaagactttctctgtggtttcaaaattaggctccaaaagggcatcacagaaagcgaagtcaaatttgagacttattcccatatctatgcagtcttatttgattggagtaataaggactgtagtgttatttccttcaggtcaatgttaagtcagaatactacagtattgacttatatttatattctgtttcaatatctgcaagaaatcaaaacgtgagtctgtcagctgaccccaatttaactcaagcaagtgtgatgaattagaatacaagtccaaacttctcaatactcaaagtgcaagtaatatcacrtttctttaaacttctcaattttattaaagattcacataagactcctctacccaccaaaatgtgtggaaaattcactattaattatttgaaggactattggtgtgggttcctctctctcttcccttgtatgatacaagaacaggaaaggagggttgtagaaggtatatagctctgaaatggtgt

SEQ ID NO: 641080 - DNA, 467 bp, Homo sapiens
aggtatatagctctgaaatggtgtatatcagtcatcaaaatctttagcagagaagaagcaagatgtgtgtgtgtgtgtgtgtgtgtgtgtgtgtgtgtaatgttcctgttccttgcagctgtgtgtttccttgaaggagccatggtcctccaacytctgctgctccaagttgctatacagtctccttgtccagctttctgcctggaaaggcaggtctttgaagacccaggccctgaaagctagtgtcagccccagtgcttctttacattttcttaagccacaacaactagctctgacctgcattcttcctgcccttttcttcaggatcccactgggtatggattccccttctctaatccacaagactaaaagtctagtgttttttactctcctgctcttgatcaagaaagcttaattgcttcattgggactagagtcagcctcatcagcctcagctgttcacagatg

SEQ ID NO: 641081 - DNA, 485 bp, Homo sapiens
tctttgaagacccaggccctgaaagctagtgtcagccccagtgcttctttacattttcttaagccacaacaactagctctgacctgcattcttcctgcccttttcttcaggatcccactgggtatggattccccttctctaatccacaagactaaaagtctagtgttttttactctcctgctcttgatcaagaaagcttaattgcttcattgggactagagtcagcctcatcagcctcagctgttcacagatgtatggaaacacaaactcctgaagagagcaatcaagaaaagtgacctggggggcrgttccaagatggccgaataggaacagctccagtctacagctcccagcatgagcaatgcagaagatgggtgatttctgcatttccaactgaagtaccaggttcatctcactggggcttgttggacagtgggtgcaggacagttggtgcagcccaccgagtgagagccgaagcagggcaa

SEQ ID NO: 641082 - DNA, 567 bp, Homo sapiens
gggactagctgaagaatcaaccatatggtcagcaatgactaaaaccacccattccagcaggcttggctaagaaagctaatatttgaaaagctgtggtttgaggaactaggtgagttatgggaaattctaatttgttttatatcttgtagatggtacttcagttaaaagttataaaccacagacacacatggcttatgcaggaccattttttctgttcctgatctgtccctcttcawtgtgtgaagctggatggttcgtgtttacttcacagctcctaaagttgaagatactgagtatttaaagatataaatgtttaattaaaaaattattagcttttaaccttgtaacatactcaggtttggagtagaaaggtactgcagtacagtgttaggagcccagtgacaaagaattcccaggataatgactggatgtcatttccatgaagaggcttgctgctggcctatactgccagcttaagcaaactgggaaaagatgtgtcctctgagatgtaaccctatctttggcaggctgagcacaggctagatttcagcctctcattcaccctcc

SEQ ID NO: 641083 - DNA, 567 bp, Homo sapiens
gggactagctgaagaatcaaccatatggtcagcaatgactaaaaccacccattccagcaggcttggctaagaaagctaatatttgaaaagctgtggtttgaggaactaggtgagttatgggaaattctaatttgttttatatcttgtagatggtacttcagttaaaagttataaaccacagacacacatggcttatgcaggaccattttttctgttcctgatctgtccctcttcattgtgtgaagctggatggttcgtgtttacttcacagctcctaaagttgaagatactgagtatttaaagatataaatgtttaattaaaaaattattagcttttaaccttgtaacatactcaggtttggagtagaaaggtactgcagtacagtgttaggagcccagtgamaaagaattcccaggataatgactggatgtcatttccatgaagaggcttgctgctggcctatactgccagcttaagcaaactgggaaaagatgtgtcctctgagatgtaaccctatctttggcaggctgagcacaggctagatttcagcctctcattcaccctcc

SEQ ID NO: 641084 - DNA, 628 bp, Homo sapiens
caaatcaaatggaaaaagtgaataagcagactgagattacctgaaaatagttagttgctagtaagattcagtacaatgtatgtttattaaataatcgctactagaacaaacatctgcgacaactatgaagttaggaaatgctgtattagcttgaacagtttatctgttggtcacattaataagtgactcagaaatattacaagtatggaaaggcatgatagtgaacaatgccacatgagtccattaagcaaaaatagataatggcccctatatcttagaacagactcacttattcattggtatgaataatttagctctaaaaagaaaaatccaaaagaagcgaagactaactgtggaaaggactttgaacttttccttttagaaagttaaaaaaaagaaaaaaagtgtacatgactaccacagcttgacaactaccatgtggcacattttatatgacaygagaaaaaatggtcaaaagatctcaactttctggaagtcaactcaaaagctgagggcaactagcatttttggattttacagtatagaatggaattccctttatattgaaaactaaatcatggaccttgctcatagtaatttttctcaaaggtttaggcactttgcaaca

SEQ ID NO: 641085 - DNA, 652 bp, Homo sapiens
ttgtctaatcagtaatacagacttgtaaaaattaattgcagtatataagtcttgcgataaatatgtaaaagcagtggtaatatagacaagggtaagctctgtctacttagatgactcatagaggggcttcaggagagtcttgaagatgaacaagatgtcacaggtagagaagtaaaggctattccatctatagagaagcatgtgttaaggcagcagtccccaacctttttggcaccagagaccggttttgtggaagacaatttttccayggacagccaggggatggttttgggattccacctcatatcatcaggcattagattctcataaagagcacacaacctagatcccttatatgtgcagttcacaatagtgtttgcgctcctatgagaatctaatgccactgctgatttgataagaggcagagctcaggcgataatgctcacttgcctgcagctcacctcctgctgtgcagcccagttcctaaaaggctgcagacctgtaccagtctgggggatggggacccctgtgttaaggtacagaagtgtgaattggtaactcttgcacatgaaacaggagtacaagttcacccagggatttgtggtagtgtgctgaagcgtttacagaatcagtgactgcatctgaacattcc

SEQ ID NO: 641086 - DNA, 600 bp, Homo sapiens
attaaagagagctgtcgacgatggccttgttttgaatatttataaaattcattagatattagagaccttaaaaatcctatagttaaaaaaaaattgtttttgtctttcttaaacctacttgactagggaattccttttacatagtacctccaaggaaggctgttaatgtcacaaagaattagtatttcatgaaagattatttgggaaatgggtataatctttaggcattcatgaaaattaaataagaaataacattcatgagattaccttaaatagggcctggccacacaacaggtgttcaataaataagtagtatgatttgtgggtttgttttttttttcttttttattaaacttttagtatctagataactgtaaaaatgcatacatttgtaaaaaataatagatcccagtatcctttaccaatctcctccattkgtaacatcttacaaaactatattacaatatcaaaaccaaggcttgatatgaatacagtcaagatacaaaacatttccatcatcagaaggatgtctatgtggcccttttataaccagacctacttccctcctgccccacctcactcctcactccctgtccttaa

SEQ ID NO: 641087 - DNA, 600 bp, Homo sapiens
attaaagagagctgtcgacgatggccttgttttgaatatttataaaattcattagatattagagaccttaaaaatcctatagttaaaaaaaaattgtttttgtctttcttaaacctacttgactagggaattccttttacatagtacctccaaggaaggctgttaatgtcacaaagaattagtatttcatgaaagattatttgggaaatgggtataatctttaggcattcatgaaaattaaataagaaataacattcatgagattaccttaaatagggcctggccacacaacaggtgttcaataaataagtagtatgatttgtgggtttgttttttttttcttttttattaaacttttagtatctagataactgtaaaaatgcatacatttgtaaaaaataatagatcccagtatcctttaccaatctcctccattggtaacatcttacaaaactatattacaatatcaaaaccaaggcttgatatgaatacagtcaagatacaaaacatttccatcatcagaaggatgtctatgtkgcccttttataaccagacctacttccctcctgccccacctcactcctcactccctgtccttaa

SEQ ID NO: 641088 - DNA, 630 bp, Homo sapiens
acttcaaactacactgcaagactctgtctcaaaaaataataataaataaaaataaaaaattaaaattatctaattaatttctgtctccccatgctagactataagctccaatgaacactggttttgagaattataactagcacataatagatattcagtaaatatttttcaaataaattttaaaatgactaaattcttagtggatctatgctctaaaccagaaacctcataaattattgtctgtttctgaaatatttctccacaaagccgaaattcccacttctttctacaaaatctctttcaacaccaacaactaagtgcatatcagttaagcagttgttatggggttttgtcaaaaaataaaaaactgaaaatcttgttacggtattcagcaaatatccttgatttgaaataaaatctctgtttccaggtaaagttgtgttcctctctcttctccccttctcttccctgctttctgtgtgcgtgtgtgtgtgcgtgtgtgtgtgtgtgtgtgtgtgtgtgtwtatacacacacatatttggtggggagacttaactcagtgtaaaattcaaacaagaatataagaagttttagcaaaatttgcctaatgtttagaggtgtttaaaata

SEQ ID NO: 641089 - DNA, 656 bp, Homo sapiens
cttttgctagttgtttacctgtctgtctttcctgctacacttatatatactttttcaggataggtaccmaagttattcacttgttaatttttcttctagctccccacttagtgccttgcatgtagaaaatacttgataaatgtttgtccaattgaattacatttgtgtttatcattttttaaagtaagacacccttggtttcctgttttttttttcttctgatatctatcttaatttaaagctactggaaggagtcccttgtactgtaatatgcatttatatgatggttattattattatttttttctttaagcttagcgtgaaccagtgtaccctataactttctttgttactggcctggattagaagacaaaccttctcccttgtgataactgttcttgagctggtgcaagtaccaacacaattcccaggttgcacctatttttgttcgttttttactttttatttatatcataagtagttatgtggggttttttttcaacttttattttaaattcaagagtacatgtgcaagttcactatatagatattaattcttaacacagcaagattgtggaagttcttatataatattctatggatctttctcatatcaaataatctttatatgtgttatttggtcatatttattattt

SEQ ID NO: 641090 - DNA, 656 bp, Homo sapiens
cttttgctagttgtttacctgtctgtctttcctgctacacttatatatactttttcaggataggtacccaagttattcacttgttaatttttcttctagctcccmacttagtgccttgcatgtagaaaatacttgataaatgtttgtccaattgaattacatttgtgtttatcattttttaaagtaagacacccttggtttcctgttttttttttcttctgatatctatcttaatttaaagctactggaaggagtcccttgtactgtaatatgcatttatatgatggttattattattatttttttctttaagcttagcgtgaaccagtgtaccctataactttctttgttactggcctggattagaagacaaaccttctcccttgtgataactgttcttgagctggtgcaagtaccaacacaattcccaggttgcacctatttttgttcgttttttactttttatttatatcataagtagttatgtggggttttttttcaacttttattttaaattcaagagtacatgtgcaagttcactatatagatattaattcttaacacagcaagattgtggaagttcttatataatattctatggatctttctcatatcaaataatctttatatgtgttatttggtcatatttattattt

SEQ ID NO: 641091 - DNA, 656 bp, Homo sapiens
cttttgctagttgtttacctgtctgtctttcctgctacacttatatatactttttcaggataggtacccaagttattcacttgttaatttttcttctagctccccacttagtgccttgcatgtagaaaatacttgataaatgtttgtcmaattgaattacatttgtgtttatcattttttaaagtaagacacccttggtttcctgttttttttttcttctgatatctatcttaatttaaagctactggaaggagtcccttgtactgtaatatgcatttatatgatggttattattattatttttttctttaagcttagcgtgaaccagtgtaccctataactttctttgttactggcctggattagaagacaaaccttctcccttgtgataactgttcttgagctggtgcaagtaccaacacaattcccaggttgcacctatttttgttcgttttttactttttatttatatcataagtagttatgtggggttttttttcaacttttattttaaattcaagagtacatgtgcaagttcactatatagatattaattcttaacacagcaagattgtggaagttcttatataatattctatggatctttctcatatcaaataatctttatatgtgttatttggtcatatttattattt

SEQ ID NO: 641092 - DNA, 581 bp, Homo sapiens
gtagaaaaagacattctatgaaaacagaaatcaaaagtgcacaggaataactatacttatatcagataaaatagactttaaatcaaaaacagtaaaaaaaaaaaagggccaagggtcattatataatgataaaggtatcaattctgcmagagaatatgacaatcttaaatatatatgcacccaacatcagagcacccaaattcacaaaacaagtattattagacctaaagaaagaagtatacagcaatatgataatagtgggggggggggtcttcaacacatcactgaccgcactagatagatcatcaagataaaattagcaaagaaacattggactttagaccaaatggacttttcagatatttacagaacattctacccaacaactacagaatatatattattttcatcaccacatggaacactgtataagatataccatgttaggccacaaaataagtcttaaaatttttaaaaaaatcaaaatcgtattaagtatcttctcagatcacagtggaataaagctagaaatcactaccaaaggaactctggaaactatacaaacacacagaaattaaaca

SEQ ID NO: 641093 - DNA, 582 bp, Homo sapiens
ttattgaggtgtgtgtggaccagcagcagctgcatcatctgggagctcatcagaaatgcaactgcatgggccccacccaaactgctgaattggaatctcaaaggatgaggcctggaatgtgtgattcaccacgttctctrtgaagcacttggggacaggagttctttgcagaacatggggacaggagttttcagtcttggctttttctgccatcccgtgagataccaagcaagcctctttgtctctcttggctttatgtaaggataagtagacttgatactttttccttcaactctctccttgttagtataaacatctaaataaggtatgcatgtgtgtgtacatgtatgcatgtgtgtatgtgtgtttgtgtgtctgtgtatgcatgcacatgtgtgtctgtatatgtgcatatatgtgtgtgtacgtgttgtgtgtgtggttagtttactctggttcttcttttcccttcaccttccattcccatgagatgataaagaaagcttattggaaacaaaaactcagagtcaaaaccaaccaatgatgtttactgtgaagtcatctgagaaacaggatgttgag

SEQ ID NO: 641094 - DNA, 582 bp, Homo sapiens
ttattgaggtgtgtgtggaccagcagcagctgcatcatctgggagctcatcagaaatgcaactgcatgggccccacccaaactgctgaattggaatctcaaaggatgaggcctggaatgtgtgattcaccacgttctctatgaagcacttggggacaggagttctttgcagaacatggggacaggagttttcagtcttggckttttctgccatcccgtgagataccaagcaagcctctttgtctctcttggctttatgtaaggataagtagacttgatactttttccttcaactctctccttgttagtataaacatctaaataaggtatgcatgtgtgtgtacatgtatgcatgtgtgtatgtgtgtttgtgtgtctgtgtatgcatgcacatgtgtgtctgtatatgtgcatatatgtgtgtgtacgtgttgtgtgtgtggttagtttactctggttcttcttttcccttcaccttccattcccatgagatgataaagaaagcttattggaaacaaaaactcagagtcaaaaccaaccaatgatgtttactgtgaagtcatctgagaaacaggatgttgag

SEQ ID NO: 641095 - DNA, 573 bp, Homo sapiens
gaattacatataagcaggaaagtaaaggtgggtaattctatcaatgcttaatgggcagaaggaaaaggctcaagtttgtattggcaaagctctactcctccttcatgctttagttcagcagttacctcctcctggagcattttctgactcaaccaggcagaagtaagcttaccctccacaagttcccattgttcccagccatgcctccactagatccttttatcactctgcattttacttttttttggtagagaacttgactttttatttctgtatcttcagtgtctagcagagcacctagtacatagtaggtattcaaaaagtatttgttgaatgggaaagtaaatgaatgattatctctattatagcatttatcacctgaaattattaatttacctaccattttcctacaccaaatcatgagttycttgagtgtgagaaataacttattcatcatatgctttttctaagccatgagcgtgggtctggcatatagcaggtactcaataaatgtgtcaaaaggatggatggatggatagatggatgatggataattgtttgaagctgctgtgt

SEQ ID NO: 641096 - DNA, 604 bp, Homo sapiens
tcatatgctttttctaagccatgagcgtgggtctggcatatagcaggtactcaataaatgtgtcaaaaggatggatggatggatagatggatgatggataattgtttgaagctgctgtgtatcctagtatttctcaaagtcatcagctatatatataccagaagcatttctttgctcagtttccagtctttggattgtgaaatttgaacctcatttttccaaagacaggaagcatctgttttaaaattggtttcctgaatactcaagaacaaatggggagctcttaaaaaatctagagaagatagcttgaatatctgttgttagatcctattagatgtcccccaaaatggattctcctattcttccttagtaatagaatccccaacattttggctcagcacaaggtgcctggaataataatatttattttctagcctcctttacagatagatatgcccatatgagtcaattctggccaatggatttaggtggaagggtcacgtgsaactccctggaagtgtccttaaaggaaggcggcatgactttgtttttcccttcttcctttctactgttagaatacagatggctagatctcaggcagcca

SEQ ID NO: 641097 - DNA, 503 bp, Homo sapiens
ctctgctctttcatggaggggtttacagtggaggaggggaagcagtatcagatcttccaggtgaaaaacgtgaggtctggctctcctcattactatccactaaagcaacatgccagtggcttccaagccatcttctgcctccctttactgcctccagttccattggctgctccatggacatcatgcttctctaggctacccctgtctacatgactaactgactactagcctgaattcttaaggaaaatgcagcctgcagctgattaacaagcctccaggacaaaaaggaacaggcccaaagaagagccaaatttccctgttgttagaaagcccgatgtatctcaggcttggcctagctttttttttttttttycccaaaagaaaagtctgtggtctttcagacatggaccatttgggtgtttgtttgatgggtgtcatctggaagggattaataatatgaaatagatttaacataacctaaacagaaaaacaattcatattga

SEQ ID NO: 641098 - DNA, 460 bp, Homo sapiens
ccttgctgagtcaagatgaagtgcattcagctgctagctcctactgctaggaaaagatttctccattgtccttttaagccacagctctccaggctttgaggccttcaaatcagggacctcagccagaccctgarccccaaaccacaatttaccacacaactgtgctgagctctaaccaagcactaatattaatttatggaaccacaaagctattattacaaagtttgtattctatttattttttttctgaaaataaaaaaaaaaaaacacctattgaaaaatatgtctgaactggaacccagcctacatatttcctagaacgactgaattgggacttgagaatgttctgtgaacctgagttgaactgaatgtatatttcataggcctggtgccctggttgagacccagttctttaaaagaccctttattttagctgcaggtgcttccaagtctgtgctgg

SEQ ID NO: 641099 - DNA, 599 bp, Homo sapiens
gagctgctgcctccttaacaaacaaacgaaacagaaaggaatctcaaccccagagtaacagtcctccagggtcagtagacatttttttgccctgacraaaagggaagagtctcatatagttaacaggccaacatctaattgatatagtcatacaaaagggactctcaaaaagcccatattgctgatagctggtgcaaaagaaaagggatttgcataacaactaggaagaggggacccctggcagttactgccactgcctacctgtgctagggacacaagggtcaggactgagagtaaaacaacttgagccatgatatccacatagcaagaggaagagcctttctggtgattagcatcataatagatttagatgctgaccctatccagtcagcttaatctctttccacaggtgtctcagccaaagcagtttggccttaatgagaaatgtctccccactgagaagaccagtgaatgaggccattatccataatccaaaagtgatttagcaggagacggagggaatgtacaagtagataaccttggcaataaccatatagagagcccctagctcatcctactagaatgagggacccgtctca

SEQ ID NO: 641100 - DNA, 590 bp, Homo sapiens
agaactcaagtaaacaaaatttagggtacatgtggttttgatatttttcttacayagatggtcatcacagagatgcttgattttaatcagatctctataagcagctaaaagttgattttccacaggagaccatctaaataaagactgatcgcagcagtttgcttgctcagaagtccagggatcatttctggagcctggaagaaacaaactaccagaagctccagaaagcacatgtgtctacatgggtgccgtagaaggtgctgcagtgtaatgtgcagtcagagtaataggatatcaaaacagatctcactgcaccagcctctgctccaactcaagaccccttgctgcttggacctccactcaaaggtagaggtatatgtgaaacctggtggattgggtatctgcaagaggctgagattagaaatgaaaatgtaccatcaaacaatatcagtaggtgctgaatctcctacgtataaaaggacacctgcagtggcacttttgcctagagtcctgaaagcatcatctgcagcaccttgacaagggcccagacagcggagctgggaacttggactttagactgccaaagaagc

SEQ ID NO: 641101 - DNA, 590 bp, Homo sapiens
agaactcaagtaaacaaaatttagggtacatgtggttttgatatttttcttacacagatggtcatcacagagatgcttgattttaatcagatctctataagcagctaaaagttgattttccacaggagaccatctaaataaagactgatcgcagcagtttgcttgctcagaagtccagggatcatttctggagcctggaagaaacaaactaccagaagctccagaargcacatgtgtctacatgggtgccgtagaaggtgctgcagtgtaatgtgcagtcagagtaataggatatcaaaacagatctcactgcaccagcctctgctccaactcaagaccccttgctgcttggacctccactcaaaggtagaggtatatgtgaaacctggtggattgggtatctgcaagaggctgagattagaaatgaaaatgtaccatcaaacaatatcagtaggtgctgaatctcctacgtataaaaggacacctgcagtggcacttttgcctagagtcctgaaagcatcatctgcagcaccttgacaagggcccagacagcggagctgggaacttggactttagactgccaaagaagc

SEQ ID NO: 641102 - DNA, 590 bp, Homo sapiens
agaactcaagtaaacaaaatttagggtacatgtggttttgatatttttcttacacagatggtcatcacagagatgcttgattttaatcagatctctataagcagctaaaagttgattttccacaggagaccatctaaataaagactgatcgcagcagtttgcttgctcagaagtccagggatcatttctggagcctggaagaaacaaactaccagaagctccagaaagcayatgtgtctacatgggtgccgtagaaggtgctgcagtgtaatgtgcagtcagagtaataggatatcaaaacagatctcactgcaccagcctctgctccaactcaagaccccttgctgcttggacctccactcaaaggtagaggtatatgtgaaacctggtggattgggtatctgcaagaggctgagattagaaatgaaaatgtaccatcaaacaatatcagtaggtgctgaatctcctacgtataaaaggacacctgcagtggcacttttgcctagagtcctgaaagcatcatctgcagcaccttgacaagggcccagacagcggagctgggaacttggactttagactgccaaagaagc

SEQ ID NO: 641103 - DNA, 590 bp, Homo sapiens
agaactcaagtaaacaaaatttagggtacatgtggttttgatatttttcttacacagatggtcatcacagagatgcttgattttaatcagatctctataagcagctaaaagttgattttccacaggagaccatctaaataaagactgatcgcagcagtttgcttgctcagaagtccagggatcatttctggagcctggaagaaacaaactaccagaagctccagaaagcacatgtgtctacatgggtgccgtagaaggtgctgcagtgtaatgtgcagtcagagtaataggatatcaaaacagatctcactgcaccagcctctgctccaactcaagaccccttgytgcttggacctccactcaaaggtagaggtatatgtgaaacctggtggattgggtatctgcaagaggctgagattagaaatgaaaatgtaccatcaaacaatatcagtaggtgctgaatctcctacgtataaaaggacacctgcagtggcacttttgcctagagtcctgaaagcatcatctgcagcaccttgacaagggcccagacagcggagctgggaacttggactttagactgccaaagaagc

SEQ ID NO: 641104 - DNA, 559 bp, Homo sapiens
aaattgggtgcagtgtatactgctcgggtgatgggtgcaccaaaattgcacagatcaccactaaagaacttacttatgtaaccaaacaccacctgtcccccagaaacctatggaaataaaaatttttttaaaaaagaatactcttgttgtgagaagttatttctatttaaccacttggcaatgttgacatactcttagagactggggtccaggaaatggcctggctggcccagctctttcagggagtgtcagcagggcccatagaactagtggaaaagcctagaccagttactcagacaactcaggccacaytggtgtctagattcacccatgtgtatacattatcaggctaggttccagctgctaatcctagatgagggtatattagggtgtgtgtatgcgcgcactcacttgtgcacacacacagcagctcgggctggcttaaggcctgagaagttggggtacacatgtcttagtaaacatcctttcacatccaggaccaatgttaccttcagcggtttgggatctggctcctagagatagctggatggctgctggg

SEQ ID NO: 641105 - DNA, 559 bp, Homo sapiens
aaattgggtgcagtgtatactgctcgggtgatgggtgcaccaaaattgcacagatcaccactaaagaacttacttatgtaaccaaacaccacctgtcccccagaaacctatggaaataaaaatttttttaaaaaagaatactcttgttgtgagaagttatttctatttaaccacttggcaatgttgacatactcttagagactggggtccaggaaatggcctggctggcccagctctttcagggagtgtcagcagggcccatagaactagtggaaaagcctagaccagttactcagacaactcaggccacattggtgtctagattcacccatgtgtatacattatcaggctaggttccagctgctaatcctagatgagggtatattagggtgtgtgtatgcgcgcactcacytgtgcacacacacagcagctcgggctggcttaaggcctgagaagttggggtacacatgtcttagtaaacatcctttcacatccaggaccaatgttaccttcagcggtttgggatctggctcctagagatagctggatggctgctggg

SEQ ID NO: 641106 - DNA, 564 bp, Homo sapiens
agatctcaatacagatttaaatcaaattattatttgttggttggcttgctcttctccaaatgcagctctatacagaaactaagaaacacagagccacagcttttttcagtttatatcaagacagagcctaagctcctcatcatggcggaccaggtcttgcagacacatctctcaccattgttccattgagagttcacattcagccagactgggctatttcagatccttttaataggtcaggtttttactccctctgtctgaaactaccttcctattccctttctgcctttcttagtcagttcatgctgctatgagaaaagaccataaaccagatggcttataaacaggagaaaattatttctccaagttctggaggctgggaagtctatgatcaaggtgccaacaggtttggcttcctggttcatacagggcatgtgtctcatgtgtccttacctggtrgaagggggcaaggcagctctctgcggcctcttttataagggcacttaccccactcatgagggttctgccctcatgacttgattacctcccaaaagccccacctcc

SEQ ID NO: 641107 - DNA, 588 bp, Homo sapiens
tcctcatcatggcggaccaggtcttgcagacacatctctcaccattgttccattgagagttcacattcagccagactgggctatttcagatccttttaataggtcaggtttttactccctctgtctgaaactaccttcctattccctttctgcctttcttagtcagttcatgctgctatgagaaaagaccataaaccagatggcttataaacaggagaaaattatttctccaagttctggaggctgggaagtctatgatcaaggtgccaacaggtttggcttcctggttcatacagggcatgtgtctcatgtgtccttacctggtggaagggggcaaggcagctctctgcggcctcttttataagggcacttaccccactcatgagggttcygccctcatgacttgattacctcccaaaagccccacctcctaattccatcacattgagggttagatctcaacacaggaattttggggagacacattcaggccataatacttcctttttcctagccaattcctactcacagttttagcttagatgtcactacccagcaaccccaaatctggattccatggctatcttc

SEQ ID NO: 641108 - DNA, 569 bp, Homo sapiens
tctcctgctgatgtgggcagtttcctgcttctcctgtagatagtgagagcctcacacccctacagggaggtgttgcctgcagtctcagctcaacaccctggtcaccctttgctcgcacttgctgacttaktcagacctcagattgaagcatctgaggatgatgggctgtgtgactaaggaaggggctgccccacccagaagtttagattacatatttgtgtgcaggacctagcacagataggtctacccagcatagctttttctaactttgatttagactgaactctagaagagccaagcagaatgtaaacctcatgttggggaggtcaagttactttctagctcaagattctagagagacaatttagcaacgtgggctttgaggtcaggctgctaaggttcaaatcccagctctgatactggttaattaaccattagtggagttatttatcctctttaaacctgagtttcctcaactgtaaaacggggtaataatagctcatacttcatggtgtttctgtgaggattaactcagataatttgtgtaagccttccataaagtgcctgac

SEQ ID NO: 641109 - DNA, 569 bp, Homo sapiens
tctcctgctgatgtgggcagtttcctgcttctcctgtagatagtgagagcctcacacccctacagggaggtgttgcctgcagtctcagctcaacaccctggtcaccctttgctcgcacttgctgacttagtcagacctcagattgaagcatctgaggatgatgggctgtgtgactaaggaaggggctgccccacccagaagtttagattacatatttgtgtgcaggacctagcacagataggtctacccagcatagctttttctaactttgatttagactgaactctagaagagccaagcagaatgtaaacctcatgttggggaggtcaagttactttctagctcaagattctagagagacaatttagcaacgtgggctttgaggtcaggctgctaaggttcaaatcccagctctgatactggytaattaaccattagtggagttatttatcctctttaaacctgagtttcctcaactgtaaaacggggtaataatagctcatacttcatggtgtttctgtgaggattaactcagataatttgtgtaagccttccataaagtgcctgac

SEQ ID NO: 641110 - DNA, 610 bp, Homo sapiens
aatctacttcaggtgaggtcttaaaaaaaaaaaaagcccacacattagttaattataatttaacttatatccctccccctcactgtctagaacttgaatagttggtgagatagaaatggctagttgcctccaaatatccatttccccttcttttcatcaacaggatctaattttttagctgggcatactgtcacctgggtaaaacagtccaattccaatcatccattgcagctgtgttacatgtaactaatttctagccaaagagacataagcagaaatgtgtgagaaacttcctggaagcctccttaagagtgagaaggtggacccttctttctgccttctccattctgcttctggaactcagatgtgatgcctggaactctagcagtcatcctggaccacgaggatgtggactgtacacttgagcaattagaagggaactggttcctgacaactctgtgtkgctggctgcccccactagcttgggattgcctaactctagacttgttttatgcaaaaaaaaaaaaaaaacttctcctttatttaagctatatagtatttgagtgttttcttaaatatgcattaagacctaatcctaaatttgccaccc

SEQ ID NO: 641111 - DNA, 586 bp, Homo sapiens
tttgcatcccatactgtctcttctgctgagtggcccctgctccatggtaccagctttaaaactggaatatcatttctataaagccatttcctcctcttgtcccttcagtgctcggggtggtaatggcttcctgctgttatttcaggggcatcactacccatcacctgttcccctggtcctgcctacactgctgtaagcagttccttcagtgaagtctcctaaacctctgagcaagattctgtttctactgagracccttgagggacatagtcgtctcgcctgatcacaccccaaggtgtaccatagctcctctctgctgggtggaggtacctgaagtgggcccttctcaggaattgaattgataaagagcttcctataacttcttgagaatccatcttgaactccaccccactccacagggctcccctagtgatacgaagacggcagcaaaggtgaagccacatcagacatgactgaggtcttgtcagccaagcattggtgggctcctctccccagagagcttccctcagtgccaacgagcaatagagcaaggctgccccccaagagcaaaagtgctcctaaggcc

SEQ ID NO: 641112 - DNA, 586 bp, Homo sapiens
tttgcatcccatactgtctcttctgctgagtggcccctgctccatggtaccagctttaaaactggaatatcatttctataaagccatttcctcctcttgtcccttcagtgctcggggtggtaatggcttcctgctgttatttcaggggcatcactacccatcacctgttcccctggtcctgcctacactgctgtaagcagttccttcagtgaagtctcctaaacctctgagcaagattctgtttctactgagaacccttgagggacatastcgtctcgcctgatcacaccccaaggtgtaccatagctcctctctgctgggtggaggtacctgaagtgggcccttctcaggaattgaattgataaagagcttcctataacttcttgagaatccatcttgaactccaccccactccacagggctcccctagtgatacgaagacggcagcaaaggtgaagccacatcagacatgactgaggtcttgtcagccaagcattggtgggctcctctccccagagagcttccctcagtgccaacgagcaatagagcaaggctgccccccaagagcaaaagtgctcctaaggcc

SEQ ID NO: 641113 - DNA, 586 bp, Homo sapiens
tttgcatcccatactgtctcttctgctgagtggcccctgctccatggtaccagctttaaaactggaatatcatttctataaagccatttcctcctcttgtcccttcagtgctcggggtggtaatggcttcctgctgttatttcaggggcatcactacccatcacctgttcccctggtcctgcctacactgctgtaagcagttccttcagtgaagtctcctaaacctctgagcaagattctgtttctactgagaacccttgagggacatagtcgtctcgcctgatcacaccccaaggtgtaccatagctcctctctgctgggtggaggtacctgaagtgggcccttctcaggaatwgaattgataaagagcttcctataacttcttgagaatccatcttgaactccaccccactccacagggctcccctagtgatacgaagacggcagcaaaggtgaagccacatcagacatgactgaggtcttgtcagccaagcattggtgggctcctctccccagagagcttccctcagtgccaacgagcaatagagcaaggctgccccccaagagcaaaagtgctcctaaggcc

SEQ ID NO: 641114 - DNA, 606 bp, Homo sapiens
gactcagcccatttcccagaactgcccctagagaaacattcccaggccagaacttcagaaacccagtcacctactgcaagcactarcatgataagggcaaaactgttccccaaggagaactgtgcccttgggcagagcagtggagcgaattaatttctaataatgagactgtgagctacagtgtttgtctacaaaacaggcttattcatgaagagtaaatatgtcaactaattcaagaggcatgctaaatctccattgttttctgtagttcaggtttcttggctctgtaaaatgtgatgcaccccttcaatgtgtgcagcagaatctgtgagattgcagaatgccacattaaactcagagctcctgggctaattagggtaaatccattttgcagtaatgaattgttggtaatagcccatcatggagcagatgtctcatccatcattgccccgggagtccgacactctgtagtactcccatcagatacggagggggcacagcccagggaggcgatcctcatctctggactcccgagggcagccaatcctaggaggtagaatcagtgggtgcctatccagtgtgatttaaggtcccccaaatcctccc

SEQ ID NO: 641115 - DNA, 591 bp, Homo sapiens
tgcccatcatgaactgggtgctatccaatcctctgaagcaataaagtcaaatgtgtatgacagcattcgacacttaaaggaagaagcacatttaaaaagctggaatcggcagggcgtggtagctcacacctgtaatcctagagctttgggaggccgaggcgggcagatcgcctgaggtcaggagtttgagaccagcctggccaatgtggtgaaatcccgtctccactaaaattgcaaaaactagcttggcatggtggcagacacctgtaatcccagctactcgggaggctgaggaaggagaattgcttgaacccaggagacggagcttgcagtgagccaagattgtgccactgcactccagcctgtgcaacagaccaaaamtccgtctcaaaaaaaaaaaaaaaaacaaaaaagctagaatcacagtggtcctgcccagcaggagctggagccacagatgagaagaggctgttgccagagacacaaacaaaggtcactgtaaccctttaggtccagggtcccagccttacctggctggtaagtcatatgaggaccaacagttctcacataaaacagtagagcagtggttct

SEQ ID NO: 641116 - DNA, 348 bp, Homo sapiens
attccctgcaagaaggaaatcaggcccccaacaggattgccccaggcagggagataacaaggggaaccctggtgaagcccagtggaataacttgagactgacctgcatttgaatcttagcgctgtcacttacttacttgttgtgagaccttgagcaagttacttaacctctgccagcctcagtttccctccctggaaaaatggagctgataatgcctactttatagggttgttgtgatgattaaataatgacatgtatataaagctacttaytcagtacctaacacattgtaaacacttaagaaatagtagccattattgttatgggtttttttttacagatattaac

SEQ ID NO: 641117 - DNA, 533 bp, Homo sapiens
gccttgggttgccttggccaccttctctgatggcatttatatgaacacattgcatttattgagaaggccaacttttgttctacctcctttcagggggcttcccctctcccaccacctccacaaagggctcatgaatgcaagccccaacaccaaccagtttattggccctctccccaagcccttgctgttggtggtctcctcgcctgttcttggcctcactgtcccaggctgggtcttggctcctggctcactgagagctagactttgccagctcccgtcctttttgatttgggtgaccctattcktcctgagtttttaagctttggattcttgaagttttatgctctgactatttgggttttgggaagcctctgttgtttcagatgagaggactccaccatggctatgaatcatggaatcttctagaaataaccccttctcagtcctgttgggccttatactttatactgggatgtgcagatctgagcatgggaaaaattgggctgtagaagcaaggcattttttttttggat

SEQ ID NO: 641118 - DNA, 533 bp, Homo sapiens
gccttgggttgccttggccaccttctctgatggcatttatatgaacacattgcatttattgagaaggccaacttttgttctacctcctttcagggggcttcccctctcccaccacctccacaaagggctcatgaatgcaagccccaacaccaaccagtttattggccctctccccaagcccttgctgttggtggtctcctcgcctgttcttggcctcactgtcccaggctgggtcttggctcctggctcactgagagctagactttgccagctcccgtcctttttgatttgggtgaccctattcgtcctgagtttttaagctttggattcttgaagttttatgctctgactmtttgggttttgggaagcctctgttgtttcagatgagaggactccaccatggctatgaatcatggaatcttctagaaataaccccttctcagtcctgttgggccttatactttatactgggatgtgcagatctgagcatgggaaaaattgggctgtagaagcaaggcattttttttttggat

SEQ ID NO: 641119 - DNA, 491 bp, Homo sapiens
acagcagctctgtttgtactgtacaaagaacagcctcttgtaatttggttctttttgaasagttgctaataattttgcactcaatttccatttaaatggaaacattaacctctggagcctggaaaggagcctagaaggggctcataagtacagctcttatctccatggctcagagtgtcccaggagtcaatccaaacatacttctaaatcactctcaatagatgaggggttcaatcctgttttgaaagaccttttccctccctcccagtacaaagttcactttcttgtttactcacctgattcaatgtctggaagttcttccttaagtctaacctgaagtttttctgctggaacacaagccttctttttcctggatcacatgcagaagacattggaaacctacctcctgagctgatagtgaagctcctaacaagttgggcaagtgaccccaggtggaggctggaacaaagcccagggatcatcgaaaataa

SEQ ID NO: 641120 - DNA, 504 bp, Homo sapiens
atccattttactccactataagggctagagggcagagggcctctgaagtgagaacacttttgtgatggtcaattttatgtgtcaacttgactaagctcagttgtatagtcaaacaccagtctagatattgctgtgagggaagttttcagatgtgagtaacatttaaatcagcagactttgaataaagcagattatcttccacaatgtgggtgggtgtcatctcatcagctgacaggccttaagagcaaagactgaggcttctggaagaggaagcaatttggtcttaagattgcaacacagaaacccttcctgaggttccaacctgctgctgcctggaggaattcagcctcaggctgcaacatcagcttttatctatgtcttcaggctgctaacaagtyctacaactttggactttatagccacctgaattgtgtgagtcaattccttaaaataaatctctctctatatctataccctattggtctgtttctctgtagaacactg

SEQ ID NO: 641121 - DNA, 482 bp, Homo sapiens
gtagggggaggaattaagtcatccaaaggataaaaaactctatggagtgtaatgaaagagcacaggagagcaatctagcagactaatgagtctgggggatcttgcatgaaatgactgtgggtgagaataataacgatgatattaacacagatgattgtagtggtcaggactcttcaggcacaagtaacagacaccaatttgagccagcttatgcttggaaaaggaaccttattttargtacacaggagcatctcatggaggccaatggcaggaacacagcttctgaagggtctggaatcaggacctgggaatcacagggaccctgccactgtttcttgtctccatcttcatgtctgctttgttgcagaccaccttatcagtgaccacctcctgccccatagtgagtgaaaggtggctatctcccagctcctagattcactgttaaaagcttagccagccacagactgaactgcatctctctt

SEQ ID NO: 641122 - DNA, 568 bp, Homo sapiens
gtgattatcttactttggtggttaagacgagcaaagtgaagatgtttcactttgtgcattcgatgtatggagatcttttctgtagacattttttcccccttgggaaaagacagaagtgaaggcctttccattgttcaagkttcaaataatggctccacatgtaccgtgagctcaaaacagtgttctgtggctcatgtgacccaacagatgaatgttttggtctactgaatatcccaagaagtaaaataatagttggagtttgaggaaggggcatagaaaaggcccagacccaggtcatgtgcttgggtggctagactcatctggtgttaggcttgtctaaacttgtcagaatgaacacgtgggatcaagtgcttctctggtccccgtcggcctcttacatcaggtcagtgtgagtcttttatttactcaggggcccagaatagacagtatagcctgggagactggtgccttttccatcttactttttggtccatctgtgcaataaatggacttctttttaaattgcttcacgtcttcatgtttcagagtgttcagctcagataaacca
